United States Patent Application Publication US 2008/0113342 A1 - sequence listing, part 11

SEQ ID NO: 39684 - DNA, 1131 bp, Arabidopsis thaliana columbia
agaactgcaaccaaataacacagtccatgatcacatctctatttctctaactgcaaactacatacagtaaatacactactgaagcgaaaagtgaagttgtaggtttcacactgagatgaacaagctacaagttgcagttgctatatagagcattcatagtccaatatcgaaataatattgaaacacttaactctttaaaactgataagtatagatatgactaggaaaaagtaaggcagagttcaaatttaccattggtgttttccaggtcactttacatgcacctagtttttttctgcaacacattgcaccacaacttcttataaggttctattcttagttttgcaaggttttgcacctagcgtttttaaggcaacacactacatcacaacaacaatcttgatctgcaccaaatatcacacaacttaacatttactggtaatcgtaagtcaactgctcccctttgtttatcacatccaagcaatatatttacaaaaaaagctatggatcaaaatttattactattaaagatggcagttgtaatgccccgtacgtggactatagacgggaaagcttaatccgaggaatttggcaattcatctattcaacgagtcatgttccagtggtaagtgacttagccactttgggtaaggaaaccttaggattagcttaggatggttaaagtaaggaaaacttagaggtgggcgagaatttttaagttggatctttgcgagaaaacaatttaaggacctcgtccgtggtgtgtctgaggacgaagtgtgggcaacctgtggcggcgtgaattcggccgaggcatacgtgtgttcaaccatggtcggcgtgtgcagtagaggtgcggccaagagtcggccacgtcatcgaccagcttatggcggcgagcaggtgggtaagatgctccgatttgctgtggttgaaaatcggccatgtccgcccgcgaagatcaagtggtccttgaccggccacggaggtgcttaagcgggccgacttaatgtgtggctgaggacgttctaccgacagctgggcggtgactcacggccgggtgtcgcctcacgatgtgtcaggttcgggtgcacccattgagcatagcttagtggcaacgcacgacatgtgt

SEQ ID NO: 39685 - DNA, 1265 bp, Arabidopsis thaliana columbia
cttcatccctcaaaaagttttccaagttccaccgctcggaaaaatatattcattttggtgaaatctaagtgttgagttcgctcttcacaagactagatttcatccctcaaggatttttccaagtttcacctcttgaaaaaatgtattcattttagcgaaatctaagtgttgagttcgctcttcacaagactatatttcatccctcaaagatttttccaagttccacctcttggaaaaatatattcatttcggtgaaatctaagtgttgagttcgcgcttcacaagactagatttcatccgtcaaggatttttccaagttccacttcttgaaaattatattcattttggtgaaatctaagtgttgaggttgctcttcacattgctagattttcatccctcaaagatgcttttgatgtccgaccaccggaagaatgtgctcatttcgatggaatttatgtatcgatttaactcgtcatggactcaaattccagttaaagcggtggcgattcactttttctcggaagcaagaaactcgtaaaagcaaacaaaaaaaaaaagaggccatcaacgtctcatgatgttccgagatttcccattagctacacaaacttcaccaaagaactcctggacctcaacaagactacagctcgtggtggcgaaacaacaaccttgtcacctccaaagtaggagcacaagtctaggtagaagcaaggttgagtctactaagatcaactcaatcgatcaagccatgacacaatgatacagagaagttttcatggcgtttcttcggaaatcattagcgaatgacttcaacaattacagccatgacaggacaagatcatattggctcaaaacatttggatcagatcatgtatgaagcatcaaagataagttcaactatggtgtacacgtttactccttaacaggaatgtctccatcttaaggtacacaaaatgttatgacgaaaagcatagatgtctaagaccaaacaggtgggggcatcttccaaataatataaagcaaagtcaagcctctttggaggagaattatacagcattatcacttaacgtgattgacaaatcattgctacaagtttggagtccatatttatatcatcactcaaaattcaaggagtcaaaatgcgacatttgtcaacaagaagagattcaagtttgaaaaagacaacttcgatgctataccacaaccttccaatgttattcacttcatggagatgtgaattcaattggtggaactaagtgttgagt

SEQ ID NO: 39686 - DNA, 1494 bp, Arabidopsis thaliana columbia
acatatctgtcaagtggactatcaaccgtcacgatgagtatgtgcactccatgctttgactgtcacatcggaaaccatccacgaaacctgtaccatcaaatgagggaaccctacctttgaagtctgtaatcaacccatttggtgcacagtagctttgtcttaatccatcggcatatacccatataaagctgaccatattcgtttaaatcaggaggatctaggggtctcggtgttaacgatgatgatgaggtgagctcaccggaagctaccaagttggagtctggagctcggttgacttgttcgccactctgttgagaaaccaacgctgtcaccatggcctcaagcttttgttgacactggaacaacttgtctatctgtgtttgagactgcattagtttgtcgatctggagggttatagcctccatagctagtttctgctcattgatctatttgtttaaggttgtgagacgagtagcttcggccatttctgcacagagctgaggacgagatagctctgataccaataaaccggataaataatgtcagtaactttccaagtcaagaatccaccgtggattcaggaaatgagcaaacctgaacgcaaaagatgatcaagagaaagaaagatcaccttaggtgagatgggtttgatgagtaaatgataacggcgcttagcagagaagagaaaagagagataagaaattgttcagtcattaggtttctcgaaatggctaaatgcctaacttattctcaaagttgtaccagtcataaaccgactaaatgtaccaaaatagtgactataccaagaaaccatactaaaagcataacaatatcagataattaagattaatcatgtattacaatactgtgacaaccaatgctagcagcaaagtgtttgtccgtcaagcaacaacgacaacaactacagacacaaatgctatgatccaaaaacaagaatcaaaatttgcgaaacaaaaccccaacgacctaagatttcgtgttaactagcaacattttactactatgataacatctgttggagcaggattctcctccaggaatccacctgcgaaaataccaggccagcccactaagcccaccaagcccaccaagtagaggacttgcgcaactgatgagcccacatacgcaaaaggttatttgggcctgataagcctgatcacctgatgaagggaggtaagcgaataacaacctaggaactaacaggaagatattcgcggaggatccgtgatatctcgaaactgacctaccgaatatccaggagaatctccgcagatcccggacggagctaccacgtgcgtagacctatgtaaggaagcaaggacgacttggaagggacattcaattcagctttacattcacacttacacttttacacttgtaatctcctttcacattgtaaaagctctgtgataatcaatacaaaagtccatttgttcttaacaatataaatcttaaagttcctgtgaagatcta

SEQ ID NO: 39687 - DNA, 444 bp, Arabidopsis thaliana columbia
  unsure (1)..(444): unsure at all n locations
taattgttattgtttgttcaagtgtccctcaacacctgttgttaaacgaatttttctgatgactaaaaactgaaccattgtcagaaaaaactatagtgtaccttaatgttttgagaagattttggattcaaatcctcagctgcggacaatttgataaattaataatattatagctgatatgaataaaataaaacaaattaagatatttcagtgggatatttgtgagttgtgacaatccatatgtttattttggtgacagcagattaccagcaatcaaaattcacgttatatcgactatataaatcagtgcttacaagatagtcacattttttggtgatatatttatgtacatacgtagctcacaaaaacgtgcaaaattctctatgaatgcagaaaaagagagctaacaatcaccnnaaactatagcacaaaaagcaagatgag

SEQ ID NO: 39688 - DNA, 506 bp, Arabidopsis thaliana columbia
ctgattatatctccagctctaacacatactaaatgttcaagagataacactaaccttggtcatagacaggtgactctggaacaatgccgctcttgatgaagttagtgagccgtggactaagctccaatccctcacagtcatcttcatccgatgataacacaatttctccaacagaattcgctacatcatcttcacctactctggtggagttccttttcacaaggctatgagtctctagtgtctcgctggcaccgtctggcgagaatctttcctttaacttgcatgagatattatcttgccgatgtttttccgaagtatctactggaactaagtcaatgtgagatgtattccggcaagaatgttgtttttctgttttaggcagaggcgtattgtctgactccagaacattaggaaagaataaaagaggaactggcattacgaagacgttccccagagtatcaacggatgcacattctgaactgaaaagataacggtgtgtgggtgaa

SEQ ID NO: 39689 - DNA, 302 bp, Arabidopsis thaliana columbia
ctcgaccttggcaattttttatatagctacaaattttttttatgaatctagttgtttattgtgtgcttgtgtttgataaattggtgtttatatgatattactgatttgtttattttattttttgagttccatgttcgtttgattgtgtcaaataaataacttttgggtatcatctaaataacttttctggtattttttaacagagatgaagattttttaataatgttttagttgtgtataattacttaatattttgagttatactttgattctgtaaaaagtacttatgggatctgccgcat

SEQ ID NO: 39690 - DNA, 448 bp, Arabidopsis thaliana columbia
agttaacgacagtcacatatatatctccctaaaagacgcattcatgtatcatgacaaaacaaatcgaccattatactctcttttaacatttaattataaatttcatgtgtacttattatataaagttttgtgaaaacttgataaacaaaagatgaagaagtaagcctcatccaaataggaagattactctcatcagttcattccgaacattcggtcttagccaaacttaaccttcactgaaagatgtctaaaagatgccaaccatatgtcgttttaaggtttacccggaccaaactgaatcacctaattttgaatacgatttacattcagatgcgtttgcggctcttgtaaagttttttttttttaataccagtagttttgagccaaatttcgtaatccctcaaggcccacaatcacgtcatgtatttgtgtagtctcaaacgtcact

SEQ ID NO: 39691 - DNA, 563 bp, Arabidopsis thaliana columbia
taacactagaatcagtaaaatccaaaaacaaaacaaaaattatgacacttaagcatgttagcatttatgagtgaggaacatatcagagtatggttagttgccggtatttcagccgacagacttggataacgtttgcaatattggatttgaaacggcgatgcagctttatttcttttcatttcttgtcactttttatttataataattttgtttgaccaaaaccaaaaggatgatgttacattgataagaagaaagaagaattattttcaaatattcaacaaatgaattggttgctcacactctctgcagtatcttttcttacgtataactagatcttttgtgcacaagcctaaccaaataaatagaaccggcgccaacattctccgttctttttctttttctctatggctctatacattgaaagttgaagcgtttgcgtttccattatcgttagaatttcttcaaattccattttctggagagaaagtttgtatcttttggttaggaacagtccaaatccctattttgattcttccttttgagagacaaatcgaccatggtta

SEQ ID NO: 39692 - DNA, 596 bp, Arabidopsis thaliana columbia
tagaaacagagaggattaaactttcgaaagccttaaaacaatctccaataaaaaaaaaaaaaacgaaattgggttacacgacctagaaaacggaggagcacactcaaaagtcaagtcaagtggaaacaaatttaaaaccttaggaatcggataagtgaaacgcacaatcaaataataaccagaatctaacaaaataaaaaacagtgaaaagagactcagagatttaaggatcacctgacgacgaacagaggaagatgaagagaaagagaagcagagtacccaaaatctaaaacagcatcggatgcgatagtgctacagtagtattaaagaaaaaagcttgcatctttgtttggccgcttgaaaagggtctccggcgacgacggtcgaagagaggagagagaaaaggccggagaggaaagcaacggctacaagacaggcgccaagtttatagtaacacatttcctttcttgcagctttttctggttagccaatgataaactgccacgtcatctaataacgtattaaattctaatatctaacgtcataaatttttggaagctgctgggtcgttttcatatgtatatgtgacaataaat

SEQ ID NO: 39693 - DNA, 469 bp, Arabidopsis thaliana columbia
cccttcaccgcctgatgaagccatcctaaaattgttttcttaatcaagacaaaagaaaaaaaagaaaactaaaaaccaaaatgtcattgcaaaagtttctcatggggacacgttgctcctaaccaccatcgtatacaatagttaaataattgtatactatcttagtgggataagtaaatgaaagtttattcaataaatattaatatcttaaacgtcaataatacctaaagtaagatccaaaaactcgatctggatcattactatagaaaattaaagaaaatgattaacgaggccttgttggcatatctttttcttttcttgtaaaacagatctggttgcatatttgaaagtagacattaaatgagagatccgttgattatggcagattatatgttaatattgatgctagttgtcacgagcgctattattaagacgaaggtgcgactatagatgacgacttcagttatag

SEQ ID NO: 39694 - DNA, 489 bp, Arabidopsis thaliana columbia
aaaaaaatatacaaactaacaacaagtggaagaataacttgtgtcattcagataatctttgaatattttattttttaaagtcttctttgatcattttggttgcagaaaagggttagatttcttgaaaagagcaaagcagaagacctgtgattttcagtgttttcctccatcttattcttattgttagtttagtttaacacaattcttaagaggaatactaagacgaaagagaaacagaaagagatatgagaaaaaggcaaatcattagtattctttttctttaaatttggggggctttagtttggccgataattacaatatacaattctccagaactcagagaaaccaacacaccaaaaaaaaaaaaaagataaatcaatcagtcaggttcgaacctgtattatattatatgtgtctgttaaccaatttccctttttatttgagaagaacaaattggaatcagtgaacaaaagaatgatgaaaaatggt

SEQ ID NO: 39695 - DNA, 532 bp, Arabidopsis thaliana columbia
tcgcccatttagtaagcttgtttaatgattgtagaatgacttttatgtttatggacaaattgttagacataaaaaaaactaccatcaggtgatatataaaattgaaacaccacatacaaactctctcgggcacaaacatcgagacgctcccacaaaccatgctttccgacgctggcgaacgtctgcttgccggcgtcaggagtctccctccgtttgtctctgctgctttgttttcctctcttgttctttgtgtttttgggcgtcttctcaatcttcctgttccttcaaccgcatctctctgttccacggtgctccaatctctcgagacaaagttaggaagagctcgacattcctcctgatgttcgctctgctctcattatcttcctcaaagtggacaagtgagacctctttaccttccagtggtgtactgcttaataattccgggtttcgttttcttgcgttgccaattattctagatctgtaccaatccgcctcatctagaagccctccctattgatcatgtacatgacaa

SEQ ID NO: 39696 - DNA, 317 bp, Arabidopsis thaliana columbia
cccaggttagtttaatttattctatatgggcccagtaaataaacatatactattcattagccaatggagaacataaatccaacttatcgtaactatcataattcattaccagtggcagatttaaaatatattttattaaaatatatctttataaaaagagagaaacactatttccaaatatctatctgaacttcataatatacctgactatatttttattttcagctattacattattacaatagtataaacggtaatcttatatatacagtagactttttggccaaaaatctctatactagttcatccctacacag

SEQ ID NO: 39697 - DNA, 484 bp, Arabidopsis thaliana columbia
gttcacttccaaaactagtactagtcaaatgattcgacataacctgaataccaaatgctatatcaaaaatggcaaatattcaactaataactaaaaagaacaatacttttaattttcttattaaaaaagttctagataataaccttttgagatttgattttcgaagatattaataacggcagattactaaatgcaaaattacaagaaaaaaatttatattatgtgattttctagtaaatgtcgattctaccgtagttgactacgtgttggcgatgaatcttctgagcgaattttcgggaaagtttgacaacatcatctatgtcatcaatcaccatcccccgcttcactgaggcatgatcaatgctctcatggtagcatacaaagtcaaacataagtcatactcatcacccacaattctacaacaatatgcttatcataggacattaaaatcaaggacgaggaaactacaagagctaaagacatc

SEQ ID NO: 39698 - DNA, 203 bp, Arabidopsis thaliana columbia
atagccctatgcgaaaaaaaaaaaaaaaatcagctgagcttaatattcgtagaagtcttgttttatcttctaaatatgctacttaagacaaaaaataaataatatattttacccttttttttcgtcaaaataattcataaaaaatctgacctgctaggaaaagtgccttgattagtttttttttttttttttttattttaaat

SEQ ID NO: 39699 - DNA, 535 bp, Arabidopsis thaliana columbia
actagaatcaacttgttgtaggatccatataaaggactgtttttagtcgcctgaacagtgtgaattcgatggatttgtcttctgatcaactcgtgatgaagattgttgaaatgggttttgaaaagttggatgctttggaggctgtaaaagctgtaggtggtaagtcatgtgatgatgctgttgagtatattttgaagggaaatcatagaactggtgggttcaagccggctagtttgctatgttcttcagggagtaataagattcttggtaaaagagctatgccatcttcgttttcttcttcggagtcaaagcgtcagtctagtttgcttgaccattttagatctgtgaaccagaacaagaaaaaaggcgacatctttgggactgtagaagtggactctcagttagaaacggtgtctgagcattcagaagaggtgagaaagtctttagctccagtgtttatggagtctagttgttttcctgaaggacaattgttgaatggttgctcagaggcttcatcatcgtgggagaaaagagt

SEQ ID NO: 39700 - DNA, 575 bp, Arabidopsis thaliana columbia
gttttatatgaagatataatcatgagattgattactttttttttttttgtgtgtgtgtgtgtgtgtattttgcagttccaactttgctcttcggtcgtacttatacattctattccatgaattggctggacggcctgcttcttggtggtttggtgatgacaaggtaagcaatgcatacttactgatgtacattctaatcggtatagatataactgcatgtttcttatccagtttacgtctatcttttggataggttagagttttctatgcagtgagactctttctcggactggtttctgcagtttcagatactgtcctggttgttgcgctctccagaaagtatgggaaacgtatcgctacctatgcagttgcgatgctctgcttaaccagtggctgcttctttgctagtaccagtgagtgttttgttttgttttgatttgttgttacacttgcttaagctttctgtcatatttccttaatatgcatatataggctttccaagttattcttgcatccgataggttttagtttcaaatgcttgtataagttattccaaagacattgctctgaatttg

SEQ ID NO: 39701 - DNA, 558 bp, Arabidopsis thaliana columbia
  unsure (1)..(558): unsure at all n locations
tatccattacatagatcaatggtggaaactagtttgttattctccattaaagcactaagagtctcttcaaagtttatctggtcgggttgggaaaaatccaactagagaagagcataaaagtagacatctgatcaacccgacccataataacctttttttgttggccgcgtaatatgttcgagcgcggccatcacactaagaacattcataaaaaaaaatccacaggattcaaagcccttaagctttgatcatagtctcttaaagaggtagtaaaaccataaactagagccccaatttgcattcacaagccacctaacacattagcttctggtcatttctgctttatatacacatcaagtaaaaaatggtgagaagaagagaaggtcttacattgccaatcataaaaccggcgcttcccgaggtcagatcagcagcgacaacgccggtggnctcacagaaaccaaaacatcgtttatcgaaacaactatctatgtgtgaacaccaagagacgttgcttgggaaagaagaaggcgtcagatgataatgattcaagaaaag

SEQ ID NO: 39702 - DNA, 404 bp, Arabidopsis thaliana columbia
cacaccactgacccagttaaaatataagatttctttctatttttttagttaagaaaattacaacataaattattttattttatttttgtcagaaacaacataaattatttattatctattattaacaacaacaaagtgaataaaatattcgattagttcagcttggattaagcatactcaatagaattattgttattattttactttatagctttagttttccgaaatcggcataatatcccataaattccaggatttaccatttaaaattatctcctttcttgctaaaataaacataaattcatgactcttaattgcaaatttgaccaaaaataaaacccataataacttaatcaccaaggttccaaaactcatagacaaattttccacacgaaaaaaaaaag

SEQ ID NO: 39703 - DNA, 1037 bp, Arabidopsis thaliana
tattgcatatagccgtaagagacaaatggatttgttttgaattttgtggtatgtttaacgtctcaaaagtctattacttgaaaatattgaatgtcaatgttacgaacttacctaaagatacaaaaatgaaaatacataatttcatatgataagatatgaaccataacgtaataataattaaaaaaatcaaggtaaaataactacactaatattaggtagcaaacaaataaactacaacacaaacaactatttagtcattatagagtgatgaccattgaccattaaatttttttaaaatataaaataataaaagtaaaataaaagtagtaaatgatttatttaaataagtaattttatttttatttatattttgaaaaaatcatttaagaaatgaattaatggaggatttaacacaatatgagacttttgattttctctcaattaattttgctaattttaatttaatcaatattaaatgacacatgttattttcttgtgtgatgatgtgtcacccatatggagagagttggccaactttcatatatatgattacatgagttaaagacaaatttgttaatttttcttttgttgaataaatgtcccaaaaccttaaattacccgaacgggtcctaaacttctaaacccgaaaactcgaaccctaaatacccgacccgaatacccaaacgcctagggctaataattaatataaaaaaaaaaatccacaaaaatatttagaaaccaaacattgttgaaaatatattttctatatatgccgtaatctcgtaagttaattttacatcatgcaaattaatattaaatgagttaaaattaataaataaaaataattgaaaagttaaatcctgtaagctaagctatttttctcaaaatgttctattttcacttatgattacatgagttaaagacaaatttgttaattttccttttgttgaataaatgttaattgtttataaatatatagacatataaattagtatatgtaaatttgtttactttttaagattttctattttcttaga

SEQ ID NO: 39704 - DNA, 571 bp, Arabidopsis thaliana columbia
  unsure (1)..(571): unsure at all n locations
tttctttttgttttggtattctagatttctagttttttgggccgtaatattaatacctttgggccctagtcacatgttatgactgaactcgaaagagtaaaagcccagaagtggagaaaattaacaaagatagatctttgacgaaaaaacaactaaataatcaatagtgtgttgagggaaaaaaaaatccgacctgccggaatcgaaccagcgacctaaagatttcagcaactactacagtcttccgctctaccaactgagctaaggtcggcatgtgtttacactcgaattaaaaactaatttatcatattaagacaattaagtctgccttcacaagtaatatgacatgtggaagaacatatatgagaagtgaaaacatagacaatgatagaaaactcaaccaaaatttcatctcgcaatagccatcgcgacttaaaaatcaaagtaaaaagatcggaaacaaagctttcggtacatacaaacggttcgcaagaggccttcctggttaggaaccgcaaaganacaacactagactttcttttacgataaataacctaatcatggtgcatag

SEQ ID NO: 39705 - DNA, 718 bp, Arabidopsis thaliana columbia
atgataaagttagaagaaatgttgcgtctcttattgtttagcggaaaatttacatgtcacggctgagttatactcttaagggaagacaaaaggttcggtcaatttacatgtcacggctaagttatatgttccagggaagacgaaaggtacgataaaattacattacggctgaaatgtcctggtttttactgatttctaacatagtttcaaaatggtttttagagtctttcaagtcttttttgtatattttgagtcatttcaggtacatttacacatctgggagctatggagcacaataaggaattttggaaacttttcagcaataaagattgtgaaggacgtttttcagaagatggtgtcgatcgacaccacacctgtgtcgatcgacactctaattgctgccaagggaattctcgtttactgccaagtctttgagaagccctgaagtcttctttatttgcaaagtagtccctgcacgtttttagtcacgaatacacctaattgttaggtcaatgttagacctaagttttgtttttggagattgttacacattttgagagaagaatccaatccttttagagaggattctgtactcctttacttttattcttaattcatcaatgcaaactattcagattatgatttgtgtttctgttatcatgtatgagtaatcccttgttgggtttaagagcccaatagggattagatcattagtaga

SEQ ID NO: 39706 - DNA, 695 bp, Arabidopsis thaliana columbia
aaccgccggccgaagagacttgaacccgggcgtcccctcaagttttccaccgatcactagggcgcacaaccactccttcccttcctcttgccgctgacttcaagcctccctaagaatcccaggaacttggcccatcacttactaatcaacggaaaaacgtttctaccctttgacctaatgaagccctataaatacaaagattaggggaaaccctaatcaccacccacgaaattagactgcctcccgcgactctctcgcctccaagccgtcctgctcttgttcttcattcgttttctcttctctcttctctacttgtaaaaggaagaagatttatcaaactttggattttcggagaagatctctaaacccttttctatattcatactctttttatgcaattacttatttatatgatgttgtgttctttgagtatgtgtgagtagatctgtagttaggttttatgtgggtttcgaagggcactcatggggactttagatcaagtttaggttggcggtttctatggttttgtttgattgtttcactgttctttctagttgactttaatcttaaaacacgtatgtccggaatgtccctagtacatgatcttaggtattttatattgaggcaaaatcttgtataattgcttgaactagctcaactgaataggaactataaccgttgttgaccgccgagtg

SEQ ID NO: 39707 - DNA, 991 bp, Arabidopsis thaliana columbia
gatttggttgaacatatttggcaaaaatttggtctaaatcaagcttaactcttctcgtcattcaaatttttcatttctatatgtttgttttgtgtttatattatgtatgtttacaatttaaatatttcatataattattatgttctgtgaaataaaaatatgaaaatattatatatttttttaagaaacccgcttaagaactccaccattggacaacaaaaatataaggattcaacaaaaactctaaactttaaattcttcataatagagtattataaaatagtaaggagtccttaactttgactcctgaatagggatgttctaaatagaaaagaaaaaataattaatttaacagatggtggtgtgaacaaaataatggtggtgtgaacacaactttgtggaatccgtaaaagaatttaaaaaattattaaatattaaaaatgtgaatagttttatgtatatgtacagttgtccggagtctcaaacagttgaattattataaatatttgtgattttggagttgaaccttaaaatcatacataattttctagttggtcacataattttcacattgtattggtgattcataagttttgatggaaaaatatttagaaaatcatagttttcacacttaatgtatcaccataggatgatcattagctaaatgttccttgttatacataggtgatttgtaagaaaaccaatttatgttaaagtttactaataataacgttataatatcatattttatcaatagttagtgttttaatgttggtaatatttgtaaatagtgaaatttacttactgtaaatttttgataaaatataaatacgatttatcaattgttttagttgaacttgaaaataataagatcagaataaagagaaggataatcagtttgagaataattcaataaagttgaaaataataaatcgaacttgtagataataagatacgaatacagagaaggatgataatcagttatcagttg

SEQ ID NO: 39708 - DNA, 1351 bp, Arabidopsis thaliana columbia
gtatagctgtttcatatcctgtctattactcgaccacatcctacttctggcatcagcctgttgtggtcgagtgattttagtaattctgttattgcttctgttttctgcatgttcgcttaggactgttagaaaccccaaatctgttattgcttggcttgacttagagacttctgatcacatctcatctgtttgcatcacacccatttggattgacacctaaaatactacaatgacatgattggtgttttaggaataattgactaaaaatatattatcatcatttctcatcatcttgcatactttgcatgattaggatagctttgcatagatattgaatttctgagttgttttcaggtgatttggggttgttggcgagcaaattggaagaagcgagcctgaaccagaagacataatcgaccacccaggacgagtacatccagcaccatactcgaccccctgatcgagtgacattggagccattcttcccatctactcgaccccgtggtcgagtaaccgcagctcaggccactcgatgacatcactcgaccccctggtcgagtttcacttcgtcataccactcggccattcgctctaccacattactcgacccccgggtcgagtatcatcactcaccaccaacaccagtactcgaccaagcacttaaccacatctttagagtctactcaaaaacgcactcaaccagacaggctgagcacaaggaagagaagaggagaagaagaagtgtttggaagcggtccagagcttcatcccatcacgaagtccatctcggcccattatcactctatgggtcggtcgattaggttcccggcccatctactatcattttatttcgttttgtataaataagtgtctaagggttttgtcctgggacatctagtcgacattgagttttttgcttcagttttattttatgttttactctggtttcgctgcttttgcttctgtaacctataattcgaggtttttccaagtcatcttgcaatattagattccgcatttgatttcatcggtcatcttgtttctctactctttatctctttacttatgcaatattatcatttacatgcgtttatgtctttgagcatgttgtctgagtagtgacatagagttcttaaggatgggatagaatggttgtggaatccttattatgtagaatggttaagttttgagaactgattaaacggcgggactagttgtgtttacttcttatttctttctgatcaactagaattcgatcaaaagcattcccttacccagaaggtgtctgatggaatgcttgatccactagttcctgagatatgcgtctctacccaagggattggtcgtttaa

SEQ ID NO: 39709 - DNA, 837 bp, Arabidopsis thaliana columbia
tatggacttatattgcaccggtcggaaccggagtggccttaaccggctctgataccaaatgtaacacccgtcccgccatataggctaaaacgacatgttattcatctgatcttgccaaaatgttttctttaaacttctcacacgaacaaaatattgcacataactaactcatcacgcttagtaaccagagaaaaaaggggaaaaaggggtgagtaaagaatactcagtgaggggaatcaactttgctcactgaaacatagaacactttctaaagctgtacaaccatcatcataacatataaacttagatacaagcaatcaacctaacatgctttaactactaataacacatttataataatcaacttatccataaatccttaaatagcacatacataagtaactttaggtccagtcatcctcgtgacaactagaacctcatgagtggaggctggccctcgtggctcagacactcccatgcatcccgggctcgtcagcctttcttgaccagcatgtaacacgtcggcccatcactgtccacattctagggagaccacgtacggcccatagctcgattctccccagtctttcatacaaacatacgtaatcatcatacatacatacttatacttaacataaacatacttataatatcatacttaacttcacattatcaaacatcatacttaacaatcataaagtcatatcatcatgtaatctaatcctatacaatcagatccaagtctacatatcatgcgtcaagaagcataacaaaagaaaatgataccatgcttcacaaataccacctcaccttagcctagtagaagatgacaacaca

SEQ ID NO: 39710 - DNA, 563 bp, Arabidopsis thaliana columbia
tcaatacaaaaaaactaaagatgaggactttgaaatagcgcgtcaatataaggttttgactcttatggagagatgagttcggtccagaattcttcaaatatataaccaatctaaataaaaaatataagataagagtttttaatttaaaagctaggtacagctaatcgaatactacctatcccaagttgcatttgtttatgtgatcgtttaaaccatagcaacaactagagtttgaacacattgctagaaatcatttctttcaggaattgatcatatctcttagttgttgttgtacgtgattcattcttgataacatactatatatgtaaaatacgaagggatggtgtggaaaacaactgtacatgtgattccaaaaccgataaattaaaaacgaatatgaagaagagaacagatgataattacgaacgatggagtggttccacatgaacgaaaatgaaaattaatagtataatttattacaacaagagaataagtgaatgtgatgatgatgatgataacgataatcaaatgccgagataataaaaatcctacgaataatgaag

SEQ ID NO: 39711 - DNA, 1317 bp, Arabidopsis thaliana columbia
ctttatagatgtatataaatgtcaaaattgatatatgtggaataaactttgtgtttatatgataagtctttgttaatttatcgaagcttgtagaattgtcgtttctatttaattggtttagggtttttgttgggttatgagcctaaatttatttatttttgttaaaaaaaagataacaaagtataataaattgcataaccacacatgccgactaaaaatcatttacacgtatattatatttacttcaaaagatgagtttgtacggtgacatgcatcatcaacaaacatatgttatatgaccagcaccaggaccatcaatccggtcactattctcgtgaaccgtccggccgtcagattttctttgttatgaataaagtttgctagttacacaaagtaattagagtaccctcattaagagtatttaacttgttacatagctacacataacaactaaattaatgtataagtaccctcattcttagcaacaaaaaaaataaagtaccctcatcaaaaattggattattacaaaatgacggacaccaacaagcataagttatatgaccaacattataatcatcaattaagtcactaatttggtgtacctcgcaagaaacttggtaaagattagaacctaaaaatataagagcaagtccaacggtgcatcttaacacatatcttagcataatatcttaggtttaagtaattaaaattaaatcaaaaatgacttaaatgctaagatttacatcttagctaaaatcttttatgtgtgctaagaagcatggacgtgtcctgaaatgagtggtccaaattaaagacaaaaccaaaaaataaaatcacgcgttcatcttctctttctctctttttttttttctctttctctcgttctcgagacatgcaaaacaaacacaaaaacttcaccatccggctcgatccgatgaattgagaagagatttgagtcggaaattcttcgttcatctgtggtcatcatcattaaccgaatatggagaccatcggcgatatctggttcaccagatcgagatcagaaaatcgaagaattcaccaaatcggagatttgagttattggctgctccaatctgtttcccatggtatgaatctctctctgttcaattgtttttcgcgttgaattcgggttatttgatttggtgtagaaattagggatttctcagctgaattggattctttaacatttggtttggagattgatgagttgttgttttcttttctatatttcttctgctgatattgtaattgtttctgtatgatgagttccgtgcgagtgtgtttgtggcattcgat

SEQ ID NO: 39712 - DNA, 574 bp, Arabidopsis thaliana columbia
tttccattgtggagcgtacttacactatcgcacaacgaggaagatggtatcaaatcgacaaatacttttgtccactgagagcctggtaaactagaaaaccaccatactacatgacctcgtataacttagctttacatgttgacatatctagattagctttacaacaattaaccgctagttttactgatcttctactattgtatgtacctgttgtctcttattcttctcaaaactcttgataacctttttgtgaaactcaaccttttaagatatgtttaacattttacccccaaaaagaaagggtgcaaatctttttttaatttgaccgtattgaacaaacacaatggatgacccaatcaccagttgaattttaaaaaaggaaacgaaaatatttaataaacaccacaaaaatattacaaataaggaaagtagaagatgcgataatatatcactagggtatgatagctcatgcatgaagctcgaaaagattgctatcttaaactgttttttaatatttgttcttaagagatacttaacaccttggaccaaagatatgttcagttacatgatgata

SEQ ID NO: 39713 - DNA, 1598 bp, Arabidopsis thaliana
cccaaatcccacacctccacccttttctcgagtgtgactctgtatcacaaatgaatttcagtgttgaaattgtaaatacacatataaaatctactgtctaaatgataagtggaatgtcacgtatgtatcacttgtctaagtcaatatatgtgtatatatatatatatatatatatatatatatatatatatatatattcatgtaaaattgttttgttttatttatcttgtaatgttttcatatataatcaaatattcatttcaattatcaaatattattattataaaattgcaaggaaaattatattaacacatatctaatagagaatacttaattaactctgtaatgacgatcgaattgtgatttattagagacaaaaaaagatggaagctctgaaaaagtaagccacttctttgaatactagaaactgatgtatcttttaatttttcatatggctcaacactaatttttactttggttttcatcggattgtgttgaaccatggacgtgactttccttgcaagctattagctccttaatctaatgacttagcaggtcttatgagcttgtgaataagtactgagcccgtgggatgagaggcattccatcactccaagaagtcttccatctgttctcgattatgttagtagtttgtgtctttgatttgaaaaaataattgtacaaaatctgatcttgctactaaaattttgctagaatatgaaagttttgataatcagtattaaagcaaaagtaacggagtgctacctcggacttagaagaaagccgagaataaataaaaaaattactaaaataatcgaaaaagtatctaatggattgttacctcgaacttagaaagcttcctttccgagtgtataatttggccgacggagcagttcgcgctgtctctagagttgattgcaatggcaacttcaattacttggatgcaattgatctttttaatcatagttttcggaatgtccttcctcccaatagtgttgatggtcttcattcggttcttcatgcggagaagaatggtttttagagacaacacattagtaaggtgggagtgaaccgtgtgggagtgaaccggtaggactcacggcccgggtcattatgtaccaacttgtctgagtcaacaagaacccacccatttggttccaccacaacccattttgcggaattttatggggaacaaacaaaagttagataaattccgggaatattctgtgaagtcatgattctagagaggttatggatcaagtacctctctctcgtgttgcatctcttccttacaattttcatttgcttcacatgagtagtcttgttcattaatttcttctcgatgatcatggagctacatttggacatgttcttcgtctttacaatccgctgattcaacacaaatatgagaagatcaaaacataaaacaaaaataaattgaaaagaagagaattaccactaaaatgtgtttttcttttcttttccaaaaacttcattattaatatcattttccaaaataccagcatttccaagtttggctcttttgagtggaatcaatatatattgttgacaaaaaaaagagaaatgcccataaaata

SEQ ID NO: 39714 - DNA, 325 bp, Arabidopsis thaliana columbia
aaattagactctggagcatattccactttaagaacaatttgagggtatgtctttctactcctcctttttgatgcgttcgagttggtcccccattggatggcaagctacggaaagtttgtgaactgggaccctccaatccaaacactgtgacacggagacccagcgctataagatggtgtgtgtgcgtcgtcttctcagctataagatgagtaaggcggcataactgctgagtgctaaccagcgaagatacatgtagtgtagggtgcagatttaaggctagttcaacacttctgtttaactcaaaattaacctttgatcagtttag

SEQ ID NO: 39715 - DNA, 390 bp, Arabidopsis thaliana columbia
agaaaataaattaaagtagtggaacatggaaatcaccgttcagatattctaactgattcactatagacggaattcttgttttcgtccattgtttttactttttagaatttttaagtaaaataaatcatccattacatcactgaggtgacatcatcgctcaggggacatcactaactacgttcccactaaaaatataggcaaatgcaatcaagtgaatgatgatgacctttcaagagttcgtagagataaataaaataataaatatttggcatgttgaggatcaaatgaattagatgcataagaaaggtactaggtagaccaggcccggcccaatgtgctctgttgtcgaaagcagaacaaaaaaaattaaggcaattatagaatagttat

SEQ ID NO: 39716 - DNA, 321 bp, Arabidopsis thaliana columbia
tgaagggtcctcctatttgtttgggcactgcttttccaacattggaagctgctgttctgtctattggatgttttgttttttacctctgttcgtaatgatttccaactttgtccgagttggattccacttaggttctggctgtttggtcccactgtaccttttaacagtgtacactatcgaatcaagcccagtttcagcttcgttagctcgatgacccaattaatgggttgtgcttgggcatcgcagagtttaaacccgatatattattcttctcgttggtgacgtgtagggtcatctttggcatacgtactggtctcaatg

SEQ ID NO: 39717 - DNA, 361 bp, Arabidopsis thaliana columbia
gagagaaagaaaacgtaaactttcacagaggagaaaccctaaattgaaccctaaatcaaaccctatagaaaccctaaatcgaaccctaaatataaccgtaaagaaaccctaaatcaaaccctcaagaaaccctaaatcaaaccctcaagaaaccctaaatcgaattaaatcatgactaaatcttcagattaaaaccgaaatcataccctatagaaaccctaaatcaaaccctatagaaatcctaaatcgaaccctaaatcaaaccctatagaaaccctaaatcgaaccctaaaaaaaacctaaatcacattaaatcatgcctaaatcttcagattaaaaccgaaatcagaccaataacaaa

SEQ ID NO: 39718 - DNA, 241 bp, Arabidopsis thaliana columbia
atcccgttttcatctgctctccttgttaatttaagtgatattttgtttgatattgtgaatataagcgctggaagataacggtatggtgatctgattcacataaattaacattgtgtgttattttatgtgaactaagcgttagttgcgccgcgcacgtttcgcaggcaaatagcgtagaatgtcagcaggacaaaggaaggagcaaaagttgatacccgtagagcgtcgccaaatcatcctt

SEQ ID NO: 39719 - DNA, 429 bp, Arabidopsis thaliana columbia
tcgactccacaagcttggtatgaaaaattcaagaaaaaaagatattcacaagacatattctcttcatatttcaaccaaattcgagaatttgaagtcgaacaattccacacgtaatatccctctagacctctggtttcttctttccttcctataggtctcgccgtagtgatctaagctttatgaaaacatttgaatttcgagattcgtgtaaatacataaataaataacaaaagatgcaaccaattatatagcaaacgatattattaataaagattattaaattataacacaccaagaaaaattattaaagtatatcctagcatttactaatagaagagtctaattttaattttgttattgcataaacacagtatctgattttagagatttctttggtttcagtcacaaaagtctgtctcaattttcata

SEQ ID NO: 39720 - DNA, 537 bp, Arabidopsis thaliana columbia
gtggctaagcaaattgatttttgattctatttaatttccaattccatttatatccggtttttcatttccgctttgtgcccggacaaggcccggttccttttccaccatcagtcggttttcatagacggtggctggtttcaatattttctttttgtgtcgtgtttctccggtattgattttattcaccggaatcagagtccaagtggcagaggatgatggaaaagcatatcactttcttgtgcaacacttggcattgttatactccaatatctctcgatacgttttgggtagagataactctttttttaccttgtgatggtatcgacgggccttatgggctttcagtgatgtttgttaactatgtgtatttgttatggtatgaatttaaaaaaaaaaaaacatacgaggaaaaacggaattttgaagagaatttgggagtttttagtctaatattacttttattttttttaaatgtacattcattattttgatagagtatttgatcacaataaactctatagaaaaaaactcataaat

SEQ ID NO: 39721 - DNA, 128 bp, Arabidopsis thaliana columbia
cgatcgtcagaatggaatcttgcatcgtttctcctgggtgtggtcagtaaaaatcttagcttttaatcatagaccgtctttttgcggctaacgtcctgcttttaacaataaccagataaacaccggcg

SEQ ID NO: 39722 - DNA, 551 bp, Arabidopsis thaliana columbia
  unsure (1)..(551): unsure at all n locations
cataatcttggtaaacgatgttaaaagaaccacctccatcaccaagcagatgggttaaaagacctgcatcatttgaatctatataacccattatccacttcaacattttcttctcttcactgaaatcctctttgtacctaccgcaacaaacatatacacatcaatgtatatcctttcttagctcattagactaataaccaaaatgactcatataagtctcattaggtctcactatttataaatttcaatgtagacattattgtaaagagaattgattaccacttgatgattcttgatagatgtatggtcctcttgtccaagacaacctcaattccaccattttgaaaaaactctctagctgctcgtttgagctcagcttcgactccttgcggtgtgaaaaacctcaccacaggacttgatttggcccatcgcataagccaaaatgtactaatggattcagttttagaagaccaagctgacattaaaccatagaattaacactataggataatccgaaaatcaccgatatgagtanaatcaaacaaacatgg

SEQ ID NO: 39723 - DNA, 509 bp, Arabidopsis thaliana columbia
aataaaattggatgatatcttgatataaatgttttgccatttgtagtaatttcattgtgatgtttctgtttttgcagactgaattttaaaactaaaagactcacacttaaggcaatgatcaactactttttgttgctcaaattgtgcaactttttttaacatcccaaggtccttaaatctttgactttataaccataaaccgttgtaggagctttcatattcttaccctaacacatgccccaatgcgagcaaggcaacaaatgcgatgacgagaggtgaacaagcgccgatgtttgtgcccacgacttccccacgaaggagaagccgccggcatgggtgtaaaccgaactcaacaattccttcaaattaggtacgaaacacaggccccggaactcatcatcgagcgtaacatcgcccgtgaattaactgagaaggataggtggtaggtagttcgatgcgcgacatggagcctacgaacactagctatccgatcaccactcatacgccga

SEQ ID NO: 39724 - DNA, 639 bp, Arabidopsis thaliana columbia
taggagtcttctagaacgtctaatgcggtacattatatccttactcatatagattaataatgtaaaccccacccccttcattttctataccgatgaatatctgatcttttgtaggttcctctcgtgtggagcttgggcagggaagctattttgtatggttatgatcctcgattacttgctttggcggttacttcagttactgcaggtgatctatcattgattcatcttctctaatccttgttttttacaaaatgtaatatctctaaatataatggaatttgcctcagcctgatgaagatatcgaggaggcacccgatatctgtctttgccatcaccgaggggttgaggtatctgagggtctaaggaagaagataaagtgagaaatgggtgagtagagtttcatctccgtcgatatttggcattttgttccttgaaattatacaagtgagctcttgattcattgttttcgtaggacctaagtaacttcataaacttattatctatacagtttccagatatttcattacaagttattgtctttccgagacagaaatacctatggaaaagagagacgatgatgtagcaaagagttcagctcgctaggaataagtggttcatttgagtacatacattctgagt

SEQ ID NO: 39725 - DNA, 661 bp, Arabidopsis thaliana columbia
gttttggttggttttcaatttctgaccccataatttgcttggcaatgatcctccagagagatctatggaggcatagtatagtaagaagcaatcatcaccaacacttgttactgagaatggaagcttctgtgattttggagagatgtttccaccagctatactaagaatggcaagaaaaccgtcgatcttctgcaaagaacaaaacaaaacgagagtaagtgagtcaaatcttaaatgtttaatgtttttaacaacaaagagtttttgcttcgaggttttgtgagtttcatgggttttggtagagtgagacctgattagcttgcccataagataatcttcctgaaaagagggactcttcaaaagaaccaaccaatgacctttgaatgggacgtccactcaagcttctactaaaccttttacatggagatgtaggaactgattcaatagctctatccattgaaaaggctctctggataccattagtatcatcaaacgatctgtgaccagtcctgagttctgcttcttcaccagtattctttaaacaaacatcatcttcgaaaatatcccatttaggccccttgaagagctttcacctctcagaaaatcttggcctagaggtgcagagaagtggcgagagcagatatactctatgcatggtaat

SEQ ID NO: 39726 - DNA, 365 bp, Arabidopsis thaliana columbia
tccccaaactcttaccctaaataaccgattttacttgatttaattaatagggtcaattaagtcttgttcccccttataattgatcacccttataattgatcagaagtgtgcctgtcggcaaaagttttgcatcagatgttttcgaaagtgtatgataatgaacatcgacgttaagatatcatatggtaacataatttggtggtgtcagctgaatcggttacgatagaacccctggtttgggtggtcgattatacgcgaaattcaagacaatgactttgagtcgtttgatttacaaaatcatggtacgatctaaaaccaaatgggtaaattaaattgcgtgatggggtagaattgtttgttgcagt

SEQ ID NO: 39727 - DNA, 484 bp, Arabidopsis thaliana columbia
tagtgagctccttactagctttattacttagaactaagcaccttttgttgcttccgtacacagttgaatttgtttgagtcttttttccctcatagtggactagtctattgtcacttgattttcttcctttgttgatgttttctatgtcatgcaaactccaatatgggtaaaggttacctccttgtttgggattaccagagttccttttcatttcgtagacgtgaatgtgtttgttttttatgtcttgagttcttgacagagatgctcccatcatatttagtcctgttcctttctctttgtgtcgttctcttctggatgtttccttctgataaagctttacttcttaacttttgtccagcgacggtgaatttattacgtatcaatcttcattatccgacttataatttaaagaacacttagctagatgtttcacttttgaaaatttatttctatcggaatggggaagatggatttctgaggcatg

SEQ ID NO: 39728 - DNA, 762 bp, Arabidopsis thaliana columbia
atgaatctgctaaaggtaggctaatttaatgtgcctctttctgtcgacgcatttaatgcctgatatctttcttcagtcgcctataaatgtctttgacttataggggtatagttgaaatattcgttttgcaaaattaatcccacccaaatatcaaatctacatgtatatatctatactattaattgggaagcattttgtaactacaacattgtgagggtagtttaaaaataactaaatgaattttacatgggtatttagtaaattaattactacgaaatgaatttagctttcataaaaattaggctattgatttcgaaattgtatatatagaaacttattcaattttggtaatatattttgagatatttccggaaacgaaaatatcaatttaatatcatcatatattttagattttaatatatttccttaagaaactacactaataattttaaaaatatttaaaaagatacctttaagacttcaatctctttattgtgcacataataaatccgtgaaataataaaaattccttaattttagagttaacatattaaaaataaattgtaacgcccgtgaacccgaaaatcggttagggtttgtttttaaatcatccggtttaattggttgggttaattggaaaccctaaagtgtgcctataaaagaaggaaactcaaaattagggctttagttagccacttttcgttttataaaggagaaaaagagagaaaaggagaaggagcataatcgttagggtttgggaga

SEQ ID NO: 39729 - DNA, 621 bp, Arabidopsis thaliana columbia
cttgttaaaaagagcctcagggctttaaattgatctacagatcgcctaggtatatcattgcctagttcatcaggattttcaaggaaaacgatcccgaagctgactggttttatagagttgggtctcatgactggctgcactcgcttgaggtaaacgtttatatctcagcatatatcttcgattaaggtgaggtcaacttctccgaaaagacgactctttgggcgatccgtagaggtattaacccttacgagattccctgtgatttgccgggaaatcggccccgaggtgaactggtctattcggacggatctgttaagaaacagacagcatcgacttcagaaaaacggcgataactctgagcagagatatccgatggagttacggttagattccttggaacgctgatctccggggcaatccgtggaatggttgtacgtcatctggttcattgtgtcttgacgggaaatccccccgcaagtagacggatctgattgtcttggcttgatgagcgtacatcgaatacttggatgaatgatatgtgaagagagttctttgtcgtccccacagacggcgccaattgttgaccaaggatcacacaatagatttgttagagagggaaac

SEQ ID NO: 39730 - DNA, 1046 bp, Arabidopsis thaliana columbia
ggtcgattccctggcggttgaatcgtgcagtgccttgacacatatatcagccacatccgcgcaactaatgccctgaaattgaaagaaaatagcgcattgggaagttataagtggctccatcagagaacttttgctaggtggcttgagtttgtttttcgtgattgaaataacctgagaaattctgtttccttgatcaaatatcagagctcgttgcccgcctggttcctcctatatcagaaaatatgtattcagagccatatatatacaatatggctggagctcaaagaacattaccttcaagggaccaggacgaatgattgtgtatccaaggcctgatctccttaaagaatcttcaccagcctaacaaatttagcggacatcaagagagaaggagatagagatgtgaaaagatggaacctactggcacaaaagccctgacaatccatagcctcgaaagattcaagagttattatgatgtgtaagacaaaatggacttaccctcttagctttcaacacttgctcccttctgttggcttctactcccgaaccagtacacgataccagaataaagtctgtttcttgacccgcctgcagacaaaaatgcaggaagctgatgatgtatctgttttttttttccgttctttcaggtgataatcttcagtaagtagacattaagttgggagtacttacaggcaaagcttttatgtactcaaatacaaggctaaaacttctcaaatcttgttgcgcaccagcaagtccatcaacaggcctctgaaagaggaaaaaccccaagagattgctaactcagacaccaacgaatgaaagttttcggttaatgatcacacagatcaatccgcaaaaccaactgctgaagctttgaaaagagtaagcaaacctgtcttttaggctcaaagcgtattgtcaatgtgtgaacaagaaatggatctagcggtggatcttctgggttgaccggtcgaaaagctgaaaatggcacccttacctgcccaaggaaccaaagttttagccaaaaaaataacggaaaaggg

SEQ ID NO: 39731 - DNA, 302 bp, Arabidopsis thaliana columbia
gggagatggtggaacagtatactcgtaaattgaaccatatatttatatagtttggctctaaacgataggttacaaaagtcttcagcttagaaatgatgagttttctacacttttctcttcttttttgactttagatctcacatgattcaaaaagagatggcttaattacattcgaggtcgatgtgatcttgacttgcgaaataagtgccagaagaaatcataatgataacattacattaagttatagtcatttcgatttcggttgtctcccactttctgctatgctttaccaacaacagttc

SEQ ID NO: 39732 - DNA, 513 bp, Arabidopsis thaliana columbia
tgtcgaagcttctcgaattttctaaatatatctctttctcctctctcgaatctgtatgttttttgagggatttcgtagaaattttacctagattcttctagatctgatcggaaatttaggattaggattcaaaattttcagtctcagtgactaattgatagtgaatcgcaacctagttatggaatcgttgggtcgaattgttcgtggtggcgtcgaaattttaatttcgaaatctttgtgcagtcgtacaatttgaaaactctaagaaccggaatttctacgaatgctgcaatggatgggaggatcgaggcggaaagtagccgctgtgagtgactttttccttttagtgatatttcaaattcagaggtccgttataaatggggtgaagctaaacctcttggtgttgggataatagcttatttttcttataatttgttttcattctgacttgttattgttttctgggaaccttttggggtaatcagcacacacgtcagtgaagaagaggtgtgt

SEQ ID NO: 39733 - DNA, 525 bp, Arabidopsis thaliana columbia
  unsure (1)..(525): unsure at all n locations
nnnnnnnnnnnnctaaagcgtcgcaattgaagcttgcgcgtgccgtgctggacggacaccacctggagtcggtaggttgttttgtatggctcagggagcggatcagggggagtttgtcggcggaggcattatgttgaaagaatgctggcgttcagcggagaaacacgtagcagcaggttgattgagaccgagatggtcaataactcgttgtctttctcacattctcacggcatagcgagtcgtcgactgagattccacctccagtagtctagagattggcagatgcctcaagctccaggaacatgccgcggggctagaggtttgcaaaattacggcagtacgcttgagttgtgactcgagtaatgagtacagaataccgtactgtatgtatcgtaagtatttaatcttatcaatcttatcagataaaacggacgtcgtcgtggaccggcggcccacgggcctcacctgactggttcaggttccgtggtacaagacagaaagactggacgcaggacagcgcgcgac

SEQ ID NO: 39734 - DNA, 540 bp, Arabidopsis thaliana columbia
tgaggaaaatttatatctataattaaataaacatataaaataaaattaaataaaaaacatatagaacaaactattatatacgtttatgtgtattataaatccaaatatcaaattcaaattagagctaatgttatagtaagaaaaatgtctatacgtagataaattagttttttttcaaatataatctaggggagaaccacacaagatggagtagtttgacagtactattactcacaagataggccttcatcagctaataaaccctcacaaccttaacagccttatcaaccataccattgggccttaagtgggtatttgaaatagaaaatgtttgatcccaagaacttttactactactttgttcttgcaaagacactaaattttaaacaattacagtgcacgtttttgcaactagtaagcaattatttctccacgtaatggatataattagtcgatctcaataaactgcaatattttagagaaaagagaaaataacatcatcaagtggtcatgactcgagagactaaagcaaattatgag

SEQ ID NO: 39735 - DNA, 514 bp, Arabidopsis thaliana columbia
gattttgatatactaatagtcactagatctattcaattattgtttaatacttctcagtttttcctatgggcaaacttcttctccccattgtttcaaggatggtttggacaactactactatttatatgtatacttgtgtattatttttgtttgaattagctgtctgtgttggcaaaaccattatcattggtgatataaaaatatatagtacaaagactaagaaaataaaaataaaaatgaatttatgagttccaagatctacaattctacataaagaggaaccttagcaaaacaaaaattgaaactcaacacctatctttctttcttttctcggttgaaataaaaatgctttctactgaatctgaaatagagaccaggcctaatcttttggtgccgttgcatgaacatcctttatcatgtacagaagaatttatctattcttgcgatttttgtaatagtcgaaatggcattgctatcagtgcacggactggcatatcggctgcacaaagactgt

SEQ ID NO: 39736 - DNA, 549 bp, Arabidopsis thaliana columbia
  unsure (1)..(549): unsure at all n locations
tgcttgtgacttgtgttaatgacttgttagattttgtgattaatacacataaactctactagaatcgctaatttatgcttgtgatgtgttaagtacttgttagatcttgtgattagtgttgataatagtagtagaatcacgaatttatgcttgtgatctgtgctaatgacttgttaaatcttgtgattagtacacataactgtagtagaatcgctaatttatgtgtttgttgttgataaggatgattaatatttgaagtagcacactaatggcttatttgcaaccagtcttatgcttgtggtctgtgttaatgccttgtttaatcttgtgatgagtacacataagtgtagtagaatcgctagtttatttgtatacttgataatgatgattagtgtattcaagtagcagactaatggatgtattgttcttttgtgttttgtagacaccgtgtgggcacaatttctgtttgaaatgtntcgagaaatgggcagtaggtcaagggaagctaacttgtatgatatgccgagcaaaattccgagacatgtggcg

SEQ ID NO: 39737 - DNA, 533 bp, Arabidopsis thaliana columbia
cgaaagttagcaaaacgcctaaacggaagagaaaagacaaaatatatagaggccctagaagctctattttaggcccattaataagaaatgggcccaaccatggtgctggagcctgcccatggaggtgtgctaccgagtaagtaaagtactagatgcagtcttcttcatcaatggaggtttttgattcgccccaagctctcgcgattcctgatgtccttcagtaatttcttgcaatccttataaacaaagagcgtggagaatcgtttcagaggaaagaaaactaaaaatggcgactcttttcaacaaatttcagcaggttaatgaatctcttgcttctgtgtttgatctcttactgggtgtgaagaaagtttgaattttttgttcggatttagtcttttcgatttgcaccaatagaattaagattagaagaattgaaattaggctgaaggggaatcgtaaagtttcgttttttattgataaatttctaatgaagttgctcatttgataaactttgcatttgcaggctgttggag

SEQ ID NO: 39738 - DNA, 460 bp, Arabidopsis thaliana columbia
cctctattaatttaatacgcaatttacatataagggtcacagagagctctttgatgactctttatatcttccgacaacaaaaaatcttcagtcgaatcaaaattaaagaatccattaaaaacttttgcttaacaataataacgaattaaaccactacttgtctctctgcaaatgatcactatgaagctacattattatgactattatccttcacaccaatttctcgtctttccgcctgaaacaagacacataaatctctcagcaaaatccacaattaccaaaaacattctcaaaacacacacaaaatcttgcagatacttacttcttaactaactttattaacgaagctggtctttcatatcctctatcttccttcatttgacctttcactttctcttcttttgactccatcttccaagaagctttactcaacgattcacctaacaactctgcaatgttt

SEQ ID NO: 39739 - DNA, 534 bp, Arabidopsis thaliana columbia
gggtggacccaaaaaaaaaaaacatggatgactgactaactttgggaaacttgttaaacaagttatcagaatttggatgaagctatttaccaataatttcagacatgcttggtgttaaattttgagtcatatcgtagctgtattacgatccaaacttgagtctcttagctctgggaaagtgaggaggtgcaacatcagtccataaccttttagaactgtcgtgaagatacaagcaactctcgcccatccgacaccccttgggcctgttaaaatacatgcacggtttctgaatcctaacctttacgattttcttatgatcaactcttcctttgtaattgttagtttcagttgttgccggtttgactgccccatgttccctaatgaggttcttgaagtagtctagatctttcacgggttttgcagaaacctgatcatcccggtttgtgttccattacggatttgaggatctgtttcagttcgcgctgactccggtaccttattcatattccaagagctgcaagggaaaaggagttg

SEQ ID NO: 39740 - DNA, 570 bp, Arabidopsis thaliana columbia
catattattcgtacagatttgaatggcagatcacaatgaatgcaactttaccgaatcagcacaaatctgttatcacttgtcaccaccttattctccctacattttacgaattgggttgtttatttagtatggatcaagcccaattctttagtagtttaaaataagcctgtactatagtgcaaatgattcccacatcaatcatctagcccatcaaattcatgtgtcttttgatcccaactcggctagtcctgcacgtagcgtccagtgtccactgtccacgcaatggtaaaatatatgaaactatcatgttttgatgatacgaccaagttaacgatgataattgttgctggttaacatcgttcctttcttatccgcataagacttgtttttgggtgtgttaacattcattttcatggtactttaagctacttttagcattttactcggagatatacaattggaatatagtattatttagggacgtatgatgtatctttgattctgtcaagtaggttataagaacaaaatgcttaagtactatacggttttgttccacgttattgaatgggt

SEQ ID NO: 39741 - DNA, 506 bp, Arabidopsis thaliana columbia
tgatgatttatagtgtttggttaaaatactcgcacacttcctgagacttgtttcttagactgtggaaagttaaaccatatagtatctggttaaaatggttaaaggttaaatatggttcatgtttacaatgaattggatttctacaccacatttatattcccttagttcttttttttgtcttgaaaaaggaaatggagccaaaaacatgaaatgggtaccactatatcctttactagggatagcacaagtagcatggtccagttcaacatgagaatttggatatatttagtgtttgattaaggtggttaaagccgggaagttaaacaacttttttgttattaaatcatatcaatgatacaacagacgattcaaataggtgtttgcagttgaaacaaaatggttacaactcatttgtactaaaacaatttttgagttaatttttttaaaaaatatattttatatcgttcttataaaagttatattaataggtaataactaacaaaatt

SEQ ID NO: 39742 - DNA, 494 bp, Arabidopsis thaliana columbia
gaggatccccgagttgtcaaggaaaaaatcgagaggaggtgtattctagagtacatgagtttggaacaagccaacttgatgttggtactactgcaccaggtacttaattagagataaacccttttgtgtatccttaagattattattactttaaatctgtttatgaagaagacattgttttttttgaatttatgtattgtgtagtaacaaagttgcaagaacctaatgatcatcatcatgatgaagaccaaacttttgatcagtggttcgagactgatgattttgctaatataagagattcattcctttgtttaagcgatctggttgatgcaccaggtacgtcgtttaagaaaccactctctttctagttaagattagtcttttaattatgttttttttttagtaacagaggtgcagaaacctaatgatgaagatcaaagttgtgatcagtggattaatgggtctaatgatttagcttctatagaagaaacagt

SEQ ID NO: 39743 - DNA, 563 bp, Arabidopsis thaliana columbia
tattattgtaaagatggaaacacaatcatataatcataaatctatattattattttcttgttttaaacttgcatgtacgagatttgagtcgggagaaaaataaactttattgtatgtgttgagaaacaaaatctataaatatttagggatcccatatatacatcactctcttctgttggctcccacagacgatcaaaccagaaggaagacatattcctctgtttaaaaatatcttaaggtaaagagcatttttttgttcttattgtttttcttccactgtcgtaattttatttgttactcgaagtttgtatttttatatacccgctaatcttgtaacattctttgcgacaaaattacaagatcatagtttattagatgttgaatattgctgtagacaaaaaaatatgttgaataatattggttagcttatacaattttttgttatcaaaactatagaagatcaaactatctaaaccaataaaatatattctggaaatactaattcgattcatatattttgcatgtttctatgttgtgtagatgattagaccaacgtttggttt

SEQ ID NO: 39744 - DNA, 536 bp, Arabidopsis thaliana columbia
tattactttaaatcagtttatgaagaagacattgtttttttgaatttatgtattgtgtagtaacaaagttgcaagaacctaatgatcatcatcatgatgaagtccaaactcttgaacagtggttggagactaatggttttgctaatatagaagatacattcctttgtttaagcgatctggttgatgcaccaggtacgtcgttaaagaaaaccactctctttctagttaagattagtctttaaaatgagaagatctcttcttttaattctgtttttttttttttgtagtaacagaggtgcagaaacctaaggataaagatcaaagttgtgatcagtggattaatgggtctaatgatttagcttctatagaagaaacagtttcgtctttgatcaatccatcaccatttgctgaaacaccacaatcagaacctcctggtctacgatacgataccgattgtggtgactcgaatcttgaacaattcgctagagatttagaagatcaacaacaaaggatgcaacaaaaattccagagaggac

SEQ ID NO: 39745 - DNA, 516 bp, Arabidopsis thaliana columbia
tatctgctagtgcgcaacttcagaagttgtacagctttaagtatcagatgatcaaagggcatggagatattccaaaaaaacattaattggataacatcaggactcaccctttgctataagaataagactatgtataacaatcaaacaagcctataaataacactagaaactagctttcatttttttttagtagaagcttttcttcaatttcctccaaacccagcttgcaaaaatgggttttactgcctgcctttctttgccattttctgattcttgcacatcctaatactagaaggtgtaactccaccaactcatcctcttcaatgtattcgatgcagtcgtccagactatatgttaagggagtgtcaagaatcactgtaattgagaacagatttgtgagcacatgggatttgaaactttcacaagtttagatatatgatatatgtatttataaatgaaatacctgttacatctttgttggatcttatgtttgtcgctgccttcttcttgcagata

SEQ ID NO: 39746 - DNA, 494 bp, Arabidopsis thaliana columbia
catatgtggaagtgactgaagtattactactgattattcaattaagtgacatcgttcaagaaaaccctaattaaatgctaatatataaaataatttcatttaaaaaaatctcctaaaaacacgaaactgccctaaatcttggtaaccttatttaacttgtactccgttaaaatagaaaactttacgttatataaatcttttttttttgttatctcataaacgttagtttactaaatatatttaaattaatgctattgaatgtaagaatattcatacgacagacacaactcaacttatcaattcttttttgggtccgtctcttgcgtgactcaagaatcaaacaacacaagtgtcaaagccaccaagaacacaaatcgtcgaaaccccaaagaaaaaagtctcagcaaaatccttctttcatcgtctttcgatttctccaaaaaaatggaagaaattttattcgatgagattctctgcgagatatttacaagact

SEQ ID NO: 39747 - DNA, 291 bp, Arabidopsis thaliana columbia
cttgtctatagtgagcattcaataaaaatactaactatttacctaatgtacttcaaaacttgatggtgtcttcttgtacaagtgatgtctcaaatcttctagattctataactcaaaactcatttcataaaaccaaacacaagttagaaaacttaaacacaagaacacaacataatacttacagcatagaagacaacttaaacacttaaattatatagaacacaaactcattaattagcctaaaaacaactgaaacacaacttatcattaaaaccaacttcttttcataaa

SEQ ID NO: 39748 - DNA, 635 bp, Arabidopsis thaliana columbia
agaggatcccagtggcttccatgtccctaaaggagagctactataccaaatttctagttgtccatttttcttcgccccaaaaccagtatgatctgatccgattagccaatagattccttcatgatggactatggtcgaatcaacaagaggctttttcagagataacctttctccagcgtccaacttaatggaaagttaacagcacggtagagattaagctgtccaatctcattactctcgggcatcatgtatatcttttgaataaaaaagagttagagaaatgcatgatctaaaactatgtcattgtaggtaactgataaacttacttctccgttgtaattgaagacgaatggaaaagacaagtgccaagcttcatccaaagctataccaagaggttcccaagtagctcctttatcaatacttttagcagctcctatatccccttgcattgtaatggggcttttagtttcgaagaagaggtaaagagtatcaccctgtttaatgaccacaaatcacccaaattcagagatttcagaagagaaacagagcaaaaaagagagatcagacttggacatacctgtacatgaagaaaaggatcagctagaaagttgcttggaagaccagaattggtgaag

SEQ ID NO: 39749 - DNA, 573 bp, Arabidopsis thaliana columbia
ttattgtaatacgacattagtataagtagagccaaaatcagattttaatatctttagtcttaagacatgaaacaagattaagaaaataccttgttttcaaagaaaacggttataaaaaggaggatttgagtttttgacattcagacgataaaaattatgaactaggtctagtcacgtggtcgacgcgtgagagtttccggcgtgaactgcaagtaaaatcacgtagagcatgtgattgacttgaccaaagagtccaaacccaccaactacaaaaaaaaatcaagatataaataactaactctcactagtcactaatataatttttcattacaattcatatatgatctactaacaattgttgtggttatacaaacaaaaaatttatttttcgtaagacggaaattttgaaatcaaattcctcaacactcaaatgaatattcagtagtagtttatcaatgactagattagatatttcttaacgccagtcaaattttggaattatgtggaggacgtacgtttatacatgtgcagactacaacataccagatgttttattaaaccaaattacaatgt

SEQ ID NO: 39750 - DNA, 933 bp, Arabidopsis thaliana columbia
taaataagatagctttcacctaacaagcatccgaggttctatggtgtagtggttagcactctggactttgaatccagcgacctgggttcgactcccggtaggacctctttttgtttcttacatttttttagttattacttttcaaaattaaccctattatatcactcccacttctcttcttcttctgtcgccgaaaacgcagcttaagctaaaacccctcagagagaacaatgagcaaaatcgagagctttgatgatttcgtcaaagtacatggaatacttttggcggcttcaggtttgccgccgaagctttacccacgcctcttcgagaaacttgcttacgatacttttgatggcggcgattacttccaaatcgaatcctgcgaggatgatcagcgacggaagcttctcctcactgccgaatctatgcctaaagattctgacgtcttccttgtcgatcacgcctggacttttcgtcttcccgatgcctataagcaggtaacgcctactctcactctcgaaagaagcttattgaattttggattggtgatgaagcttaaggtttgttttaatctcttacttcagcttaaggaaattcctggattggctgagaggatggcttctttgatgagtgttgatattgatgtggatgctggagaagaagaagtggcagaggaactctctgttgatcagataattgacaatgaaattcgttatgcagcagataaaggatatgactctttgagatggttggagttggagggtcttggtgttgatgactcattgttgtccctgcatttgcctagtaaatttcaggcatgtctttagatctttcttctcctttagtacttcatgctagactctagctcagatggtgaaggtttatttcaaatgctaggatctaaagctcttttgtttgtgctgctgccatttt

SEQ ID NO: 39751 - DNA, 432 bp, Arabidopsis thaliana columbia
ccagtgtgctctaaagatactataattacagatatcagcaatgaagcagagcacattactggtattaaaccactcatggccaaactctcaaagcacccagtagagagggactctatcacagcagtcatagcctttccaaaaaggctacaacaccccttgcaactctttggcctgtccggcctatcaaggcccacccgccccaagcaaaggcctttgcaatacacccgatgctactacttccatgatacacgagcctgccgctccagcgaatgctgtatctcctgcagatccttaaaacaggaacacaactgctgtgtgcagtgtatcaactactgcggcccgcatgcagcggacttccaaaaatgcccagccagaccccacgtccagaggaacactgtcaccctgcctctcaaaagatgctctagctgctat

SEQ ID NO: 39752 - DNA, 484 bp, Arabidopsis thaliana columbia
tgggcttgagtaaaccattacaaaaagatgaataaaacttaaaaaggttttagagattacttctttgaatgtagaatacaagaggcaaagctctaccttaaagagtcttacacgaaaaagagaaaggaaagagagagatggtgttcttcaagcttcaagaggtgcgacggcgagtgggcagctcgcggcgaaggctagggttcgctggggatgaaggaacacctagggttagggcttagaacaatatttatacttgagggcccaaaattaggtttaggggcaagaacgtcattctgccggataagtaagttatcgggctgagtagtggccttcacggcaggagcctaataacggtggtggaaagaaggaaagacttgggcgtgaactaatggtaggtggtgagctactcggactgcccgggttcaagtctcctcggacggatgtgttttggacttattatttccaaacagacggttcttgacat

SEQ ID NO: 39753 - DNA, 937 bp, Arabidopsis thaliana columbia
cacttttaaatagaaaaacaacaaatttgtgagtttctaatcaaataaaaaacagttctttagttttttttttttttttttaattgattctacataaactactatttcctaatcctttagatcagcatggaatattttctatatgttgttacacattgcgatggaagttagaggatgagataggcaaaaatggagagagtcactgtcacgtgcggtttttggggtggttaagagtagagcgtgcaatatatctatagtgggaaccaaacttactaaagtacatacgaagaccacttccaagttccaccttgtgttcttctgtcttcgacgaaaaaaaaatctacagtactttggcttcttttcatttttgtttgcagcttttttttttctttctcatattccaaatttgtaatgaaaattaaactaatttcaatgtctacaacaactacgtgaaacaacaacaatttctgtattaacctttaaatgttagtttactttaaatttttcttatggctcagcctgtgatggataactgaatcaaacaaatggcgtctgggtttaagaagatctgttttggctatgttggacgaaacaagtgaacttttaggatcaacttccgtttatatacggagcttatatcgagcaataagataagtgggctttttatgtaatttaatgggctatcgtccatatattcactaatacccatgcccagtacccatgtatgcgtttcatataagctcctaatttctcccacatcgctcaaatctaaacaaatcttgttgtatatataacactgagggagcaccattggtcacgaccttacttgaacaggatctgttctataggctcgtacctctgtttccttgatttctcaagagacaggcccttaaccctggttgatgaaccatgaccgtgcggctagagcgtgattgac

SEQ ID NO: 39754 - DNA, 318 bp, Arabidopsis thaliana columbia
tgatattaattggtgtaaggaaaatctggaaaacaaacaaaaaagaaaagagagacagagaatttaataagagaggaagagtattaaggtgatggcggcgttgcagagcgcgagacagagaaagaaacctctctgagatacatctctctctctctctctatcccctcttaaatacactccataccgacaaaccaacttttttctcagtactaaaagaaacctctattcgatttctaaacaaaccctagatatagactactctacattcttccattaagttaatctctttcgtcttcttcttcttcatcctctcataat

SEQ ID NO: 39755 - DNA, 551 bp, Arabidopsis thaliana columbia
cctttgaattggtagtgtgaattattggtgtcactgttataccgcgctggcaattaaatcgatagggtcatatagatgtcattaggtaatcgcaagagtaatatattttatggatatggtaagggttgatgctttgtcatggtttttattattattattatatataaatgtaaatattaatgacatagtgtgtatatatatatataatagttttggaattacatgatgtataatgtatataggggttgagagacctatgaccggtcaaaatttgggggccaaagtaacaaattatatatttggggttattataaactgttttgaaatttggatatatttttcttagaactaaatatatttggaagcctatttataaatcaggtttgctgtaaaaaaaagtttttaaaaatggagacaacgtacaaatgtttcatgttgctgctttcagagccggcccgggagaagcgttgcaaaaaagaataaagacaaaggtaacaaataaacaaagaagacacaacagtgaattcatctaatccaaagttgtatgtggt

SEQ ID NO: 39756 - DNA, 255 bp, Arabidopsis thaliana columbia
tcaaataatgaggagtccacactgactgaatcgatgatagaataaaggtattataaacgcagcaatttaaaaagctttaatgtcaacaatatactacacttgtactagccatctcgcgaaaacaattttagtatgtacgtatgtaccaagctctgctcctagacttccatcatcgccgattcattggtatttaagattcaagacttaactctatgattgcataaatcacatctgattttgttgaaatattttcat

SEQ ID NO: 39757 - DNA, 523 bp, Arabidopsis thaliana columbia
tttttcttatagctcttccagatgtcccgttgacatttatttgtagttaattattggcatagctttattcaaaataaagggataaatgtgttttattattctttgtagcttccataggtaagagcatctccaatggaaaagctttttctatggttctcttcattttttaaaattaaatttttaaaaaaacttacaagagagcttttggattttctttttagtttttcattctccaataatagtctctcttacacaaattctctaaagacaggaaattattttactattatttcattaataaagaaggagacaaatcataaaatattaaaaatacattattttgacatactttaccatacatattccaaaaaggcaaattgacataacgatcacctgttctgttgattgatgatacgatgatgcatctattgagattgataacgttagaaacgagatccaacagagtaatatccataacacgacacaagaataaaacaagaataacaggcaaaaaaaaaattgt

SEQ ID NO: 39758 - DNA, 433 bp, Arabidopsis thaliana columbia
gattacttgtaatcacactaattcgatttaattcgtacaagaaatttcagtaatatcaaagttaacaaaaacaacaatattgactttttttttgggtccaaacattaatatattgacaaatatacattttttagaagttttaaaacaagattacaagagttactttctagctctcataacttcctctgttgcttgtgtttgagcaatcattacaagagttaaaatctcaggagcaggctgaatcaatattcacacctagggatgttagcaattgtgaatcacaccacaattgctattttgatcatgctttgtggagtcatgactcatgaaaattgctaattagctggtcttgcggacggaaaccaagtgttttccaagcaagctgagactgacactctggtcgctgaaaacccacaatgactgagtctgagtg

SEQ ID NO: 39759 - DNA, 369 bp, Arabidopsis thaliana columbia
tcgaactagcgagaaactaagaccatgaacggtaacatagactaaaagcacaatcgcaccgcaacagtattacaatctttacatatatatgtatttatgtatgtttgttacaattcgacatagatcttcttctcgtttattgtcgatgtcggctgattacgcgactagattcgaaacactcccagctttataaattaggcgactacagcataataccactatgattttctaagactgctatatgattccagtatgtaaatcttacctgtgatggtccaaatctgtctctccaaggcatacagaccattgattgctaagttggaacactttacgttagtactatcatttgtatctgcgataatagatggt

SEQ ID NO: 39760 - DNA, 135 bp, Arabidopsis thaliana columbia
taaactgcgcatattcatgtatcgcggcggcggcggatcaacactcagagtggttgctccgcctccatagtacgcaacccacgacgctttcatctccgtagccgccgtcaccgctactcaccagaggcacacatc

SEQ ID NO: 39761 - DNA, 593 bp, Arabidopsis thaliana columbia
gtccatacttaatgatggccgcgggatagaaatagtgtgcctgcttgaggctgcctgatttctctctgtactagacaagggttgtccagagacggaaggcttgtgtgattcgctctcccctctctctctgctaaatgtaggcatcaatgaatgtgaacgtctctcagattcaccctttgattctttaggttttgccttacttgaaatcttgagtttgctgatcttagatgtggacttaatcccagtgtctatgtcagacaccaccgcttgctcagaacttcctggagcttcagaaacaggtttatctgacaaatctccagcggggataccatatctaaacttcagagggagaccccagttttggaacttaacttatctcccttcagagcttcatctacagaagttttcattgcactttttggcgcagtttgctgttcttaataggtttcagcttgggcagacctgatggttctgaagaactcggttttccggcagacttatccatatctatgccttcgggttgtgattctgtatttccctgtatcttgggcagtgtttattggtctcatgtgccatgctggcatgaagaaata

SEQ ID NO: 39762 - DNA, 500 bp, Arabidopsis thaliana columbia
gtagatgttggtattcttgttttgcaagatttgtaatgggagttgtgtagtctttttatgatgtgtcatgaagtctaccgccaattacatacatcattcactttgtaattaaattgtcttcaagtttgtaattttatttttgttttatgtaccaaaatctaaattcagttgtttacaacttgataacaaaaaaaaagttatacattacttatgttttcacactcaatgattcaagttttttctatatccattcgaaagcttcttattaatcatcatacatggatttttactgctttgtatatttgtagtttacaactgtagtggattaatatcattcatttagcaacaacaacactcgttaagtttgctcacttgtcataattataaaccaacgcatgcatcacatatataagtaaatgcaaaacctatgcagctattatcaaagtcttcacttctcaaacgtgcttcaatcacttcaccctcagctgcactgaccaacc

SEQ ID NO: 39763 - DNA, 483 bp, Arabidopsis thaliana columbia
tagaggaggatcaccttcataagctcttacatacttaattagacgattaatggataagccgaacacacatggtgctgaacaatcaggataattaaggaagagaccttgccattgtacaacacaaaaggtgaagtttttatactctgttttttttcacaatatcaaaattaagttaccacatgtacattctgtcagatattattaagcttttgatttcttttccatcttagttatagaaaggtatgtaagttttgtaggtacataccattctccatgtcaagtcctctggacctaatggctgagcagggctcgaatataggaaatggcgagagtactggaaaagtttaaaacaaccatattacttaatatatataaagatccactgcccaagtaaggttgctatgccctttcgtgtaaggcgaactatgcattttgtaacatcaaagttagtgataaggaaaactaagtactacttgagcaaga

SEQ ID NO: 39764 - DNA, 513 bp, Arabidopsis thaliana columbia
  unsure (1)..(513): unsure at all n locations
tcaaaataaaaatttgaaacatacatgcgtttctcacatttgtctctgttttgccacagttcatctcagctcatggacagcttgcatcttccaaatgtaagaatctatcatacatgttttgttataagtccaccattaaatgaaagtgcatctctattgaagtctttaataaaaacatatgtatgctatgcacagataaaatggatttgtccaaccgctccttcgcgtcctgttacaagtcttggtggatttacatgcactgcttgtaagatcagttctctcatttgaaaacttcaagaatcattctttgttgtctctaaagttatactagaaactgaattaacggtagttacgtaatcagggtttgacgttggggaaatttctgaagatggtcatgatgatttggaaggtttagatgcctcagcttcacatattgctaaccttttgtcctctgaaccagcagatggtaagccanaatcatcttaacttgaaatttcgaaaatgtaatatgta

SEQ ID NO: 39765 - DNA, 360 bp, Arabidopsis thaliana columbia
gttttctttaatttttggcacatactattgtaggtgcatgactatcggaaacatacctcatctcaagtctctcctgtgataaataaattgcgccttaagatgtcactcgagaatgtggtaaaagatattccatcaatgtcagacaactcatggacgtacggtgatctcatggtaatcatggtagctcgtggcttataggtcgtatatctgagcactgaaactattatcttctgtactgatccttacatcaactgcaggaagtggagtccaggatattaaaagccttacaacctgaactctgtctggatcctttacccagacttgataggctgagtaaaaatcctttgactgctaaggtaa

SEQ ID NO: 39766 - DNA, 495 bp, Arabidopsis thaliana columbia
cacaagatgcaaccaaaagatttgccaaatcctcaaaaaaaaaaatcgatcaaagcgtttgcgttttttcttttcttttattttttttaatgaaaaataatgaagaaaacaatttcatgcaataattacgttggaagcctttttgggctcgaaattcgaatgctttatctatgatgggattgcaagaattgtttattaaaaaaaaaaagttatggcgtttcggttaaactcagaaactctaatcgagttagaaaactcacgatcgagttttggagctttggttaggattgaactacaccagttattgcagactccgtaaagaaatcagggtccgcatagccacgaaccaaacaagaccggaattaaatccccaaaagattaaatgttccaatttggaccggtccacagaaacacagaaccaggaccggaccaagctaataacaagagataacattggtcaacgaatagtcagctataatctctgctctccacaac

SEQ ID NO: 39767 - DNA, 491 bp, Arabidopsis thaliana columbia
tgcaccaatttgcgatatcaacatactattagtaatcaatctacaaaaatagaaacagactgaagtttatgaaattatacaaatgagcttagaaataagcttatacgcagcgttgcataagcttatcatcctataatctataaccccaattgaagcatcagtttggagattaataagagatagagattaggccaaattggtaaaggatagttattgtagttgactaattgaattgtctacctaaagtgcccaaatgtcatagagatgaaaaaatgtcgctattgggccaatttctctatacaaaaacattttgattttttgttagaattgggctgattcttataaagcaaaaaagaataggtgacatatcagatcaaagagtacaaaataaggtaggaagaaacaacaacaatggcaacggcttctcctccatttatctcaagtctcagcttcactcactcttctttcaaaacttcttcgtcttcttcatt

SEQ ID NO: 39768 - DNA, 561 bp, Arabidopsis thaliana columbia
gtaactacccaaattaaggcactttttatcctctttccaagagtcctgtgaaaaaacgaaagaaaaaaagcccacaaattgtcatcagtattcgattaactcaaaacttacaacatagagatactaaaatttcatcaagctacgaacttgtcctggtcgccttcatagaaaaacattgcgaaggggatgacaaagaacacgagaatagcgtccacgatataaatagcaagccaaagatccttcatgggcaaggtgagattgcaagctccattgtatatagcatgtcgacaagcatgccgattggccacatcagccggtaacatgagaatcgagatcatagcaatagaaaggccaaaaacaacgacgaatttggggaaataagcctggtttgcatcatctggatgctgatagttgacgagaagatagatgctagagatgaatacgatgacgcaaacaacgatcgcgacaatcacgagagcgaggttgaaatcgcccatcgtgtgcaatgtacaacgtccccaattcgagagatttcgatcccggaacgatttggaagatgta

SEQ ID NO: 39769 - DNA, 648 bp, Arabidopsis thaliana columbia
ttacgtctttagtttatgttcggtttcgtttgaatttttttgtgtggttttttctttcgttgttattttcgtggactatgttctttaggtttcccttatgtttatcaattgattatttgtttatttgtgatagaaacatcgcaagtcatttttatttaaccactacaaaaaaaaatgattatgtactaacctgatgaaatcaaattatcatttttaattatagcttgtctttaaatgttcataagctacattattattcttatgggaatttatatattacaattcgttgctttttattcttatggaatttatatattacaattcgttgctttgtgttcttactcttatcaatttatcatggtattatagttttcataaaaatcatatggaattttgtcagcttccttgatctaaagagaaataattaaaggataaatcaggttacaaaatgtatcgtttccgaaacctttttttgttattaagaattatacaatcatttttatgaaactctaattcaaaagattatctttcgtatatcagtttataataattaccatgagatacatgtgtttcgtgacatatcactgctttaatgaaattagttttctaaaactttattcgttgtgcgttcacttacactctggaaag

SEQ ID NO: 39770 - DNA, 559 bp, Arabidopsis thaliana columbia
tagcaagttttatttaatatggtttttgttacgaaataaaatcataaccaaagttgagattcaaattgagggacaaggatctcactagatgtatgtacactagctccactcttatttatgtgaattgagaatcatttcttgatacagacatggatgtggattcttacaacaaagaccaaatattgtttcctgtgaatggcaaaacccaacatttggtattagagagaaattgcctcatagcttcgagtttagaccagtctgagtaagctgttgccttagaactcttctcataaccttatttgtggccgtcctcggtagagaaggaagagtcacaacagatgatacctgccagatgaaaaaaaacattcacattagccacacaacaacttcaactctcttgtgttttgtttttggtataaaccttgaacaaaggattcagtttcttttgtatctcggagttgaaggacttcttcaacaggttcaagtcgggatttgaaaattctgggctcttgaacacaacagcgattactagctgctcaggacccccactaggaggtgg

SEQ ID NO: 39771 - DNA, 642 bp, Arabidopsis thaliana columbia
caaaaccccaaccttgtgtacgttgcgacaatgacttcgccgtggattccgaacgcgattccgagcggtctaccaccagtattgacccaatcctcaacgactgagtcattaaccgagtcggcgaccttgactcgtttcacccatccatcaacacaaccagtgtagatgagattagattccttatggtaggcgatatcttcgggtatattgagaagaccgacaccgataaactcagctccggtgagaaattcgtcgtttataagcggcgggagtgaagtagcagaggatgtgaatgcatcggaaggaacaatagcggggtcgaatgtgtcgagtttgtagagagcgatagatataagtaaggggacaataatggagagtatgagagaacgagaggagaaaagtacaggcattggagcaaatttgagtttgtggaaaaatggtgaacatgccaattttgtagttgtgaacttgtgattgaagagaaaaacaactaaattaaacacgtgtatttaatgatgaaatcgcaaatcatcgttgactcataataatctttgactctagcccttgtaagttgtaccaactattagtcgaaatctcgtggggtttactatgttacagtagggctatattgtatggcaatgg

SEQ ID NO: 39772 - DNA, 1088 bp, Arabidopsis thaliana columbia
cactagactctcttggttgtaatgtttcctttccttccttttcttttctttttttttttaatttttttttatttttatggaaggggaaacaaaactttgaaacaccgagtctaatgagcttactttttgaattggttccaaggaagaataaactcttaggccgtttgttgcaatctcttatttttgcttcatttttgtctttatggcgggaaactgtgttgttccattttctccaacgtttttgcacatatctgctaaatgaaaaaggaaaagagaatgcatgaggcttgaaaaaaggatagggtttaagggtaggaaccactaaaaatgagtggccattcaagatcagcagagagtagtaaaaagggataagaagtcctgaatgtatatgctcgtttcccgctctaacacccttcatgagaaagaattaagatcaggttaattcgtccaaataaaatagagttaacgttaggtcaaacaaagtctctgtagtgagaattcaggggatagatacggtagtgggtttctaggtattgtccgtccttgtgagtcctgcaaaacttgtcacttagggtatgagttagcacattgtaatggtcttattaatcatatagtaggttcattgttccctacattgtccttgcccaatggtaccttgaaaagaaataaaaactgaaaataaaagctttttgctttgttagagcgtatcagtgtaaaaagtggataaaggtctcaagtcaacaaaataatgagtagcattagtagtaacagattcattaaccccccatacttacttcacaccgtccccagtgtgagaatgagcatagggatgaatctgtgagaaagataggttaagaacaatgtcaccttggttgtggtgactaaccggatggtctctctccttgcttaacatcgctcatactcggcttagtatggttgaattccatgatattaatctccattcgcatcttccttgaaacaaaaacctaaaacaaccaataactttaacaaaacaaaataaataaaaagatacctaagatagatttgatcttgttgttgtcaatacggaaacgaataagatcaaattc

SEQ ID NO: 39773 - DNA, 511 bp, Arabidopsis thaliana columbia
gtatatagtactgtacaaaaaagtgattatctattactctttctgttttaaaattagattttttagaaaaaaaattatttttaaaattgagtttttaaggttttttatgcaatatttattaattattattcatatattataaacttttttttgaatatttttagtttagaattatagattttttttttaaaggtccgtatttttttacaaaatctattatttagaaagagagaatcttaaataaattattcttataacgcaatacaatcatttttctttaccttatgaactttatttttttttgtgattagaagataaagtaaatactattttttctgcatgtcttttgtataagtttgtaactactaccactttcaacgccgtctcaaatctttcactgtttttttttggattgcaatatgaagtacctaagagatttcatataaggtgatctaaaatataacagaaataaaatagtgtaatgattctctctgagcctacaatataaatg

SEQ ID NO: 39774 - DNA, 1076 bp, Arabidopsis thaliana columbia
tatcttaaaatatatatatatatatatatatatatatatcttaaacatgaatgtttttgttttggtataaacgtgaattattcatgaactgtgcacacgcttcaatgtcaattggatcgaattattgtatatatctcttgcttgaaactatatgtcgtgtgtcctcatttttttgttttcctaattgaatactttatacatgcatgtagtattattatacaagaccaagataattttttttaatgcttctgttgatgatctgagtaattttggacatatctaagagttaagggtgtaaagtgcaattttcagcaaataaaacgtggtcccgctaacccatgttatcatttttggtttcaaccttcagcaaacttaattaatatttggttatgaactttattaaaattttgcaagattatcataagattgtcgtataaagagtgctgaatcttgacttaatttcataaaactgctgatctaaaatcgacatctatgtagtaagttctgatcggtttgcttgaacatatacggttgagctaggacaattattctttgatttattactttaaatactagtatcaattttattcacaaatttatttttgtaatttttttatacaagcctttaatttaccttttttttattcacacattacatggcaatcacttaatcaccaaaaaccgtataggattaggatcgtaatttgcaagttattaagaagatttggcagattacatctctaattcaataatgttgttacgtcacataacttcttaaataattgataaactctcttaaatacgaacttaattggtctagccggaatctaaagtcaaccctaaactcctccttcttccttttaagagacacacaagagacaacctttcttctccgtatctctctttctctctctcagctctctcaaacatgtcaggagcaataacatgctctgcggccgatctcgccaccctacttggccccaacgccacggcggcggccgacatacatttgcggccaattaggcaccgttaacaacaagttcaccggatgcagccttcgccatagacaacaccta

SEQ ID NO: 39775 - DNA, 1022 bp, Arabidopsis thaliana columbia
tgacttagtattctctgatcacatcctgattgttagcaattccacccaattggattgacaccttaaatgctaaaatgacattagatgcatttagggaatggacacacagaacccttgtatcacttttaatataatgatggatgttgattatgtaaaaaattaatgttatttcagtgatatctataaaatctctcaacaaccatgtctaacatacaaatgtttttaatttcaatactaatacttaaattagttaatttagtaaaactattttattaaataatcgaaaaaaactttttaccctgcgcaaggggacaacacctagttctcattgtataagacgagtgtactcacaacaacattcattaatgagaataacataatttcttgattctctctctaacaaacttttctagaataaatgaaaccaataatcaaatcttaccttaaactcacgcaccagagaatgaaacgttcggagagaaatgacacgagatagagcgaagaagaaatccggcgagagagaaagagagatccggtgagagagagagagatccgatggagagagagagatccggggaagtgtttgtttgcggcgaagaagagagggcaatggcgtcgagagaatgagagaaatagattaggtttttgggatgtaattctttaaattatttaggggtatttaggtcattttgtattttggactgaatcagttccagttaactggtcgatcagactcagccggattccgatcattttgaaatgagttttataaaaaaaatccaactgatccatctcactccagtgttaaattgctctaaacgaacatcattattcatctacattcaactggatcatctgactggacaaacaaacatcaccttacttttgaatgtttttttttatataattacatcaaagaatatttttattttcttattgacctctctacgatcaaaatacaatttctaattgaagaatattttttgttgttatgtatttgtctaaatcgtattgatgattaa

SEQ ID NO: 39776 - DNA, 904 bp, Arabidopsis thaliana columbia
gtattagtagtagatcatcagctcatttcatacacacttaattagagacccttttcatatattagattgacagcttagctagaacagctttttctgggcttataggcttaagatttatttattttttggttaaagattctatatataactatataagtataattctctgattttgattgtaatacattttaaaatattttgtttttaactcacaacaaaaatttagcacttacaaaaataatgtctttataaagtataagttttcattttgagcataacaaaaaaatgctatgctgatcatcaatatctaaggaaaattaatgctaattgttttagagcaccctcaatgatgtatcttgggtatatcttaacaaaatcttaggattaaaagtgattaaattaaatccaactaacaatcttaagctaagaaatatatctaacttaagatgtttttgcttagctaagatgtgtctatgtgtcactttcacattggtttaaggaataaacaaaagggaaagcaaaaaaaaatgcaaaactgatcttctatccttaagaaacaattgaatcttaaccattggaggtcatttttgttaagatacttaacttttagtcttagctttcaaaaaacaaaattttatttttaaataatgctaagattcaaagttaagaattaattggtacttaaccattgaggatgagcatcctcaaagggaggattttagaagtttcttagattaataaagtaataaaatttaatgtttaatgatccatgaagcttagaggctctcttagcttagaggtgctcttaggttgctcttagttaattggtggtgacgtgaccaggttttattggttggagtagtaaatatttaccgtctttccctattatttgtctcaaaaaaat

SEQ ID NO: 39777 - DNA, 631 bp, Arabidopsis thaliana columbia
gtctactgcttactgcatctcctcaaagatagttgactcgctgcaaaacaaaacaaaagtatagagaagtaaaaaaagaaagaactgaaaccatcccattagtattcatatcgaataaatatgtttttccttgcaagacaaattttgtttaagaatcatggaataacttatcttgacgacaacaaagatgtaaacaaatgatatatcatatatgcaccaagattcaagaacgttaaagctgtttttttttttgttttttttgataaaccctatcggctgatctggtcagcaccggtagaaatgcaccgaaatacttcagaatggacttctttccgaagaccacctcactatctgtcccgaatttggatgccttccgactaatgccagggggtaatcaggccgcctgtatttctgcctactagataaaccaattgggccaaatcccaactgacagaattcccaaacaaatgtgatttttgtttcagagaggatcgaacccaggtctggaagtttccccttccccaaatcttctcctaccactggaccacagatgcttgggcttaaagctgtttgtttgtactcaaacgttactttttacgaggttgcaacgtttactacgctccttaaaatt

SEQ ID NO: 39778 - DNA, 536 bp, Arabidopsis thaliana columbia
  unsure (1)..(536): unsure at all n locations
tttttaaatcatatctaatcttatatgtcatgccgacgagtgatggagaaaatccggtgaaagaggaaaaaaagaatagataggaaaaaaagaaaaataataaaagggtaagatggaccaaagatcttataaaaaccctgtcgttggttaattgtataaattctctaacaattatataaattcaagacctgaaagattcatttttaagcgcaaatgaaaacaattggaatttcacatataccacaaaaaggcaaaagacaaatttcatttttcgaaaagatcacaaggagaatcgaaaaacacactccctatcccttacatacttaatagaaaaccaacaacagaccaacttcttatgtaacttttggttttctcacaatgggaagttagcagatttggcagcgagtctttaaaacttgttgcatcaccgacggctgcgacctgctcctgttnttcataacatattagagttttagcttaaatcccattgtggcaagacacagatatttgaagtatctagtaaaacagagttttgt

SEQ ID NO: 39779 - DNA, 593 bp, Arabidopsis thaliana columbia
  unsure (1)..(593): unsure at all n locations
atatatagttagtttttcatggatgcatcatttatatattgtgtttaaacttcacatattaggtgttgttatcttaagcttaattcatgtctcttctcttaaacttagcgaaacagttttttgtttttgttttccttctcttttgactcagttatctattgatattccaggagtatcgatctgtatattcttaaacaagaggtatttgtgatttagattttgtaagagattcttggtagaaaaaaagtttgagatccaattatgtttcaggacaagtcctcaagatcttttaaaatgtagcagagacattctttggagaaatctgcagaagctttcttcgttttctttccaaaggttcatgaagatgaccaacagtggaactctcgagccagagcgatgagagaaactcgtacattttcccgatcatcactctccaagcgttttgtatatattcaagaattgagctctatcattcacaagttgtatattagattataatttccaaaatcactcagaaacttatataggcatatcattttaagtgataagatntctgaaacgtttagacaaaataattttgagcatcagtatga

SEQ ID NO: 39780 - DNA, 483 bp, Arabidopsis thaliana columbia
cttaattagcagtaacatatttaactgaatctaaatttgaatataattggaaattagaaataataattaatctaaagcctaactgtaaaaatatacttcattaaaatttgttcacaaaccaaaaccaaagcctttaaaagcgttatataaaatgtaattcatacactttactaaggaaaacccaaaaaatatgacgtttaaccaaaccgaaaatcgcattagccttaaacatattaaccattttcaaccaataaaaatatataaataaacaaaagattaaaattttgatttttgaactgatatgtttatatgtttcggatagattgaatcaatttgattattatctatatagagagacaaaaaaatgtgtttacaaagtcatataaatatttttcgcttgcacatcattttatataaaaacaataagtggacgcctaactgtttttttttttttttgcctgtaatgaaaaatatcaatcatgc

SEQ ID NO: 39781 - DNA, 583 bp, Arabidopsis thaliana columbia
ggattatttcaatttatcagtttagcctacctaggttctgttgagtggaattattggttctcagatctcaattaatttgagaactcttatcagaaactattccaagataagaaggtgttttttttctctatctcatagcctcattggtatagacctttttgtgttttggcagtattgttttgggagaaaccaactggattttaacgaaatattgttaaaccaaaggtttgttttcttggagattgagcttagctttgtttggatcattcggccacttgtgtgagagtttgattgatggttagtcttttttatatcatcatcatgctttgatagttgagagagaggaagaggcagaatcatcacaagttctgataaaggacaaaaccttttctgatgcaactcacgttttcacttcacaagctccaaaagagtttacttgggaaaacaaaagtttgacgaatgcaaaaccaattttgttagcataagaccaaacctacttcttcgtctgcctctttgcctgtatttgagttgttcttgttttgagagaaagggtgagaaaatgtctgcatgtttgtgtcttgtt

SEQ ID NO: 39782 - DNA, 529 bp, Arabidopsis thaliana columbia
cataatccctacactcactcacttgtggatctcgagagagatgatggaggagtgcagtatgaggaaactggccttgtggcacacgagaaccttcaagcctgttatgacgcacgaggagcttgaaccaatcatgtccaccatgggcttcgtcgctcaggccaccggagcaggaggaggattcaaagagtacgttttcctctcttctcccaccaccaccaccaccaggcccaggctgccctatccccacatcgacggcctccatatcaccacctaccaggcttttattgacgcactgaccttctttcttgatgtctctgatctcttccatgtcaggtacacacgtggatatatgcccactttctcatttacatctagatggataatgaatgttgatgatgcaggggaatgccgctgcaacgtgccaaagataacaacagaaagtggcgtcggatggaagaggacgaaaatgtgtttgtctatagagatgggacgctggataagtcgactcacggttgtccatcaaacaaga

SEQ ID NO: 39783 - DNA, 461 bp, Arabidopsis thaliana columbia
ataatttgtaaataatagtaattcgtagacatagatgatcaaagttctttgtaatcttactacatacacaaaaagtaataaaacacaacatttttgttgtattaaatgtgcttgtccgttgacaaaaaagataatagaatagctttgtttgtcctttctcgacaagtttgtaatattatcgtctcacgttcatatcaagattacatgcagaatttgtcacatgaagtctaaatcatcaaaagtaatttttccttatttgttctcacttgaatatatattaacgaaatatgattcaccataaattacacgaactataggatacgggtacttatttattccttgcggtaatacgaataggtccaagattggacatctcagagttgtcatgaatactaagttaaaatatgtgcagaccatacaaaacatagacgagcatagaaagagaagttgatcaagtgatg

SEQ ID NO: 39784 - DNA, 516 bp, Arabidopsis thaliana columbia
ggtctagaatacaaaaccaacctatttcgaataattcgttgatcataatttgcattctccaaattcaaagaacatagaagcttttaattttaataaatcgatcaatcaatgaaccaacaaccaagcttttttatatatatatatattcatcttatttctttttcattcctttttttttggggggcaaaattcttttcattcattcaaaatttatcaattccactaatttcaaattcgagccttatataaaatttctttcatttagttggtagcatattcaagtaaaatgcgtcacatataatattgtcattcatctcttatcctaatttaataaaaaataaaaagtcaaaaacgaaaatttagactttagtgggaaaagcgcgttaaacaacttttagtgtcaagtggcataaatcgtaaataatataaatcctagtggcaatttcaataactcattctcttttaaaccatttctttctctttcttcaataaaacttttgaaacctcaaaaaaaaa

SEQ ID NO: 39785 - DNA, 554 bp, Arabidopsis thaliana columbia
cacatcagacattgtaaataacattcacctatgtttatggttttgaaaacgcctaaggaaagagacaatatcaaactatatggaaacatcaaaaatccgtttatcgtttacattaatcagagatgtgacaatgatcatcgttcgagtaaatgcctcatcactattcagatcttacaagctaatcttgaggtatgttttgtagatgacatattctcatttttctgcagcatttgtggcagattcttatctttttagctgcaggttcacttctatagtgaaaagccagcaagtaacaaaaagactgagtattgaagccttgaaagattgtccattggaaaaaaggtaattttgagcttgtcaaaactgcattattgctagtgaatgttatgcactacagaagtaactttgtaagataaataattgttacatgagtttgagtatgaggtttctggtttcatgttcctgtcttacaattatacaaggctaagtaagcttacattctttgatcacagacccgaccgtgattcatctgagcccccacagcttctgattag

SEQ ID NO: 39786 - DNA, 497 bp, Arabidopsis thaliana columbia
gggtaccgacttcgaatgtgtaacaacattggctttatatagccttgtcaattcaacgatcctctcaagaggaattcattaactttcatggtatcagagcaccatcgctccttaaccttttctctcatttctctttcttctttccttttttccttctttccttctttcatctcttttttcttcttcaaaagtctccaatggctgctcaacttccagcgatagagcgagcgtttggggttacaaatatcaaagcccacatactcttaattctcgatctcaatgatcacaattatgatgcttggagagagcttttccagacacgctgtctgacgttcgatgttctaggacaccttgatggtactatgtttcccagtggagataacgatggttcttggctgaaacgcgacggactcgttaaactctggatctatggaactcttgctccagatctgttccgctcatcattcaagactggaggcactgcacgtgacgtttgg

SEQ ID NO: 39787 - DNA, 595 bp, Arabidopsis thaliana columbia
tgaatttttatctaggcaaaattctcacatgcgtcgataataagatgcatcacattcagtcttgattgtacaatctatttaagggtggagaaaaaattaattatttaacgcaaatagatcaattcacttttattttacaagtttattcttgttttttttaattattttttatttttttgttaagttatccagttattagagattcgaaggaagcctaccagtttaatgtgacgaagcttattcatggagggatatggctgaaggcgcttgaattactttacaagataagtctttgatttaatgttttattagtttagtttgtgtacgtctgttttgagtttgatgtctttttctgttttgtatggacttaaaccaatgatatgttgtttcgtataattataagattagtgtttaatattacaatcttctgattgtgtcagacattgaatatctattagacatcacatttgatggaacaaaggaattatatcatataaagacttacaactaatgtcttcacactatttaaccctaaagtgaaaaaggcttcacacttttctaaagggtggctaagtcctgtgttatgatttgtaga

SEQ ID NO: 39788 - DNA, 511 bp, Arabidopsis thaliana columbia
tagaggatcccctatacctgaaaagtgcttctatgtagtacttaaaaacagattgaagattgtcgcacgcgttataacggtgatgcagaccatcatcaacggcgtaaaaagttcagttttccgtctcgattataatgtggggattgtattgaggtataatgagctaagctcctctagtagtttaggaatcttgttgacatggttttaatgagataagttcctctagcttcactatttgtaaatactaattgtgtaattgcttacaggtagagctagacaagattcttgaagaggatgccccttttgatatctgcagttgcccggatttatatgtttcaatctcctttctgttttaaaggtcatatccggtcaagtttgaaccgtttcagataaactatttggttttactagtcacgagactctgcttcggctttgtaactaggttgtgccaaaattagtttttcccctggcatattgcagttgtagcgtggttgacatatagttcgttgtg

SEQ ID NO: 39789 - DNA, 512 bp, Arabidopsis thaliana columbia
aaacgagttcccaggaagattagggaagaagctaagcgtacccggaggtgattcaatcagtgactgttcctgaagatgatgatctcacagttgatgacttattaagctttgctaatgaggtaatgtaatacttcagttccacagttttcactattaaggatttgtgaatttacttaacaatgaatctcagtatgtccaacgtgatgaggaaggaacaagacaggagcgtgacagacgcttgtcagtgtctgacactacgctagttctcgatgaaaccaatatgactacatcatctcaaggaggaaccaaagattcaacagcagaagacatgttacaattgctaatgggtcctttttacaagacacgttagacttgaagcacaactgacttttcaagtgcttcaacatttcttttttacttttgttactgttttgaattctgttccagagatccaacatctttataaaggtttgtgtttttctctccaggagcaaaaatattatagaatgtag

SEQ ID NO: 39790 - DNA, 529 bp, Arabidopsis thaliana columbia
tgaaatgattagaatatatgtacgatcattagaatcaatatctcaatatctgctttgttgttgttgttgtagtagtagttgttgttgtcgtcgtcgtcgtcgtctacaactcaaaaccccacactctcatacttcgtcattttgtgaatgaccccgtagtcttgacaattcgagtcacaatgtggtaggcatagctcaaacgactgtggtttttcttgattaattggatttttatttttgataaaattttaaaaagtctttttggataaccaaattaaaaataaattgagctagcagaaactggtagatggacaaaaggggaactgaactaaaaatatgttaagccaaaagtcacatggctaatatactcggatacaataactaggcgattaagctatatctgcagtaacatatgaattgataatatgaaaaagggaaaacatattaattcgacggatttcttgtgtatgtgttactttgtttcattagtatttacctaattaattgtccccaattgccatttgcttac

SEQ ID NO: 39791 - DNA, 347 bp, Arabidopsis thaliana columbia
atgtcgttttgtcagatgtggagaactctacttgggccatagacttcggattttacaagttttgggcttctgggatataagacttttccacaaaatagtccaacgaagaccaaagtcactttttgttgtgtattcgcatacatacaaaagaaacgattataagattatcgagttttccttttttttttaaaaaaaattatttataatttaataattttactatttaggcacatacagaaataatacctgtccccaattcaacaaaaataactggaacaagatattttgtaaggactaacgacaatacaaagaaagacacatgacaaacttcattttaaactgagagt

SEQ ID NO: 39792 - DNA, 555 bp, Arabidopsis thaliana columbia
ctgtgtgaagattctgatctggcttcacgtcccggttcagatcctgattcggagatggagcttgcggcggaggaggtgtaccggagcttagaaaccgtgacactggctcgaggaatctagaggagacggatcggcttggagcgatcaaacgtacgatgttgttcgtcgccattgttagatcagatgtgtcggccaaatcaagaaagagatccgaccttcacggtttgtgatagtatagggttcgatagtcatttaggttgggccataattggataataagcccagtagtatctaggcccaatcatttacatgtttataaataaattaagagaattagagagtaaatttggcccagtataattatgtttaacaagcccatcaggagctaggcctaacatgtttataaaacaaataggagagaattagagggtaaagttgacgtgggctgatttcgaacccgtaacctttttatatattagacctcattaccagaaagcgattcgattatctcataaagcgtcatgtgtttatttgtgcacatcagcggctgtgagt

SEQ ID NO: 39793 - DNA, 513 bp, Arabidopsis thaliana columbia
gatttggacagaaaactctaatctgatgcatacctccgtcctttcaaaccaagaattttcagaattcccatcgaaagatatgttactactcttccaacaggatataatatcaaggaaagccacgccactggtctgacctagatgcatagtaagtcaacataaatcagactatttcttttatcatgtgagcatattctgtctgtcaagtctttgctaatgataactaatttaaacttaccacaatcctggcaacctcttgagcattgtgaaccgctacacttttcggagttatttcagtcaggagtaatatggctacctataatcattcacgactcaaaacttccatctctatctcagtcaagatagtaacaagtaaaatttatatgtaccgtcatcactcctgtggctgcactaacaccagcttcaccaaaaatagctgttgccgctttagtgaccaaggcagtcgccgcaatattaacaacactaagaaaaatccaaagaacaaagttaaga

SEQ ID NO: 39794 - DNA, 539 bp, Arabidopsis thaliana columbia
taaaacctttgttagtagtgtttgttcatttcttaattctggttatacatttgaaacatatgcaaatttatcactcgacttattaatcctaagttcgtaactaagttctttttggttaattagcttatatacttctcaagatttctgattctgacttatgctataaagtatatcttcgataagttgagtcgcatctctctcctcggaaaatattcttgtattttggacaaatttctcgtgtattgttttgatatttttgtggtcatgttgttttgtgaattagtatataagtagataaactacgtagttttcattcgtacaactatataaccaatcgtattcgacgaaataaatagtcagaaaatattctatttgttatgcaataatatctcactatacagtccaaaatattaacctccatataaatctgatagtaacaacaaacaattttttctctttgtcctataacatacataatacatttatgtttgaaagacaagagaagaacaaaaacaagaacccacaaatggcaaaatagt

SEQ ID NO: 39795 - DNA, 513 bp, Arabidopsis thaliana columbia
cccatattggtcacacccttcacctaacaaagggtgtgatcaccaaaaatcacatcacttgcttaatttttcataaaaaccgatatttctaatgatgttaattggcaaatatgataatatatgaaatatttactttgaaatatgagagtaaaaaaattgaaacaacatttcttttgttatctaattacattacgcaagttattttggttcaagttaccccaacattgcatgttatcatgttatcaatcaatacaataatcgatcaagttgcatagcataatagcatactccatttatggaactataattactcaactcgagcttcgaattatggtggaaagctgcagcaaagtattgcaatgaatgcggcatctatagctatgccagtcggtcaacacaatctataagctatagcactactatagtccttgtggtcctactcagccaccacaaaaggttcaaggcttcaagcttcaaaggttcgacacattcattcacaatcatcatttaaca

SEQ ID NO: 39796 - DNA, 603 bp, Arabidopsis thaliana columbia
gtgttgtacttctacttcctctcctccatctgtggaaaaggttgatttgccgttggtgctctttcatgtcaagcctgaagtttgggatgatagctattcagtttctgaagccatggattgtagtgaaaagtcagaatctcctataaatacagtgttggtggaagaaataatgcttgattcgtccagtgacatgaggctggttccatactgcagtgcagagccaaattttcccggagtggtagccattgaggaagcttttgaagatgcatcagaagagtttagcgatgctgattttcagaataagcaaattgttttgtactctagtgtgtctagagaggagatggaattggatgttaatccacaacattcagaatatgagaacattggttgtgtaaagaacttcatttctgcttacacaagctctgggtgcgaagaagaagataaagaggatgaggaaagcaatgatataaaggctaacttagatatgagtgtaactggtttggagattgtgaagatagaagctccagaaatacttgctattgattaccccggttgtttgtcatcatcaatttttgtgcagaagattccgagattgtgtgggaa

SEQ ID NO: 39797 - DNA, 536 bp, Arabidopsis thaliana columbia
ttgtcgaagacataataaagtatctcttatctttccgttttgcagtttgattggattatctgcacttaagcgatagagaatccttttcgtccaattttgtatttggtgttcaacggaaaggggtcatactcactcttcacttgtttggataggtgtagttgtactcatccgagaatgatatgacctaaatctttttctgatacaatttgagttaaaagtggaaacaaaacaaggccaaatatctacctcgtggatgtccgtttagtttaggttccaaataaagccgttggtgtcgtagacttctgagttctggtgaattttgggtaaattggtcaacggaaatcaatgaatcacatcagtactttcggacacgtcatatgaattacatcagtactttcagacacattacatcagtctatctagtactcaacaccgaacatttaaataaataaaaatgaacttgtgaaaatcataattaccaaaatgccaaatttaaacacgccataatgactaacacaaaaaaggatagtttatgc

SEQ ID NO: 39798 - DNA, 467 bp, Arabidopsis thaliana columbia
ctacaatataaaaaatgattttgatgtcttttttttttttttgtataggaggtaaactatcgttatatcgtggccccaaaaccttttccagattaggacgataacatttgtcatatactaatactagtcatttggtgatagaataatatatcgagatttttaaatatctgatactcctatttcaaattatatactgaagtattatttaaaggactaaattacgatctttgggatactaatctgatctcttactagattcttgaaggcaacaccaacttatgacaaacgattctcgccttattctattttttttttgttttacagttttactctaatgatgtttgttccgacgagacaacaacgacccttatgccaagtaactgtcaccaatcacactcgcttttcaaagtcttttgtctctttgctttccatgtagtttttatcatttaatttgagtcttattatga

SEQ ID NO: 39799 - DNA, 522 bp, Arabidopsis thaliana columbia
ttgttcgaagaacgagaagcaacaatcaagaagctaacagatgattacaaacaagcccgagagatgttggaggagtacatgtcaaagatggaggagacagagaggagaatgcaagagaccggtaaagatgttgcatccagggaatctgcgattgtagatcttgaagagacggtagagagtctacgtaatgaagtggagaggaaaggagatgagatagagagtttgatggagaagatgagtaacatcgaggttaaactccgtttgtctaaccagaaactgagagtaaccgaacaagtgttgacagagaaagaaggagagttaaagagaatagaagctaagcatttagaggaacaagcattgctcgaggagaagatcgcaacaacccacgaaacatatcgaggtttgatcaaagagatatcagagagagtggattcaacaatactaaaccggttccaatccttgtctgaaaaacttgaagagaagcacaaaagctacgagaaaacagtggttgaagcgacgaag

SEQ ID NO: 39800 - DNA, 523 bp, Arabidopsis thaliana columbia
atccccttctccaataacttgatttgtccccatcactttaactttgcaattcctttacttactttgatcattgtccatataccatcctcagatattaactccaaagcctgactccgtgaatcattgtccctctactcttctgatacacatatctaattgtttttccttttcgatacggcttcctttcattctcatattttgttgtaatgtgacgttgtatctccgcgacggtgaacgtgaacttggataatgactgaatcgtgcttagaatcactttccttaaagagtatttcgacccttctcaagccttgggttacatgaaatcccttctaggatacgacaatcaaagtactctctcttgttctaggcaaagatacaagagaaacaaataaaatttctaatgtttgtttatgtgtttcccaaagaatatctcaatcctttggtcttatgaatctctgttttttctctctgttctttttctcttctactttctaatgatgcaaagaggcagagttatataagg

SEQ ID NO: 39801 - DNA, 651 bp, Arabidopsis thaliana columbia
cagtaaaaaagcgcggaaaatagtacaacactgtaaaaaaaaaagtggtaagcaaaagacattcacaaacaaaacttggttttgattgcagctaaaaattcggtttggattggtaacttgtatcgtatgatgaatcaagtgaattagttttatggtctctacaagtaataatttattatcttctgtacagtcacttgaaaagtagttaagcattaagggacatattttggatacttgtgtgtatctacattgtacaacaaattgaaaaacagaagaagaaagaaacaggttatctattatgttatctattatgcaacgtgatcattgtggccaaactaacgtctacatcattcgcaatacaaaagaaacttgaatctatgattctgttcattgatgaacaaaacataagtgatgtaataaaactcttagtaagatagacaagaatcacagtacttattcggcagcctcttccatcacatgttccgcggtgattggagcacggggtaataatggtaatgtagctcgcaacgtcgtctcagagagttcgtccaccttgcgggccacgtggtacctgatcatcagatttagaaagtttatacaaatttaaggaaaaggatcacagatgatgatgtatggcagaagaagtaggat

SEQ ID NO: 39802 - DNA, 550 bp, Arabidopsis thaliana columbia
catacttttaacgtaagacattctaacacctgtactttcaattcgagtatttgagatcaattattcgtttgagtacgaataaccaaacttttgaattttggttatttgaaatcatttttggagtatagatacccaaatttctacattttctacttgttgccattctagtatcaattaatgaacggtacaggatgtcctcaatatgagccattggtgatagacattaccataaaaggccttcaaatttggtatgaatctagtggttgagttcatcaactactgatttttagctttatttcttaaaacaaaatgttgcacttgttgtacaaaagatatttttttctttgaatttaatttaaacattaaaaaccaaaaacagaaacatattatatattttcaccaaaactcaacattttattcgaatcatatatattataagacgttacttgtgtaaaagttacaccagaacgcagcctactttcaccatctcttaatgtgtcgtggtgtgtttttatgaagtacatatatataaggacgcaataaacgatgt

SEQ ID NO: 39803 - DNA, 799 bp, Arabidopsis thaliana columbia
tttagtcttatataatattcaacaagttctaagtcttaacatatttacacacaaacttcgctatgacttagccgattatatacttagccgaaaagttaactatattttttttctatatgatcttacggaccatcggtcaaaggttcctacacttgggacaatcacaccttacccacaaaaacgagggcatctattcattcaaacatttctcctcagtcgtcgtagtcattaatggcccgactcctctcaaagatccttcgcccgcattcggcgcaatgtacaggcagtacattgacatatgtcccattccttcgcaataatagcacttggcataatcatccgtgtaagggatagtctgtggtggatacaagcactcttcggtcggatgatcggtatggctgcatatctcacacggacgcttagctggagtggctaacttcttcccaactgacttcctcgccgttgcctgtattccaggcttaaccttggagttaatcccatatccgatcccaactggatgcaggtttactccaacgatccgttggtctttagccttctccgattccatgttcatttccactgctctctttcccttccacttctcgttttctcccgccttgtcaaccaactttccttttgacctttcttcatcaagtcttagatgattcatcaaagactcgtggtttagttcctgttcaagtagcatcttatcccaccttccattttcttcatcttcactaggttcatctcccttaaacatttcatcctcccagcatgaatctgccttgcttgaattcgg

SEQ ID NO: 39804 - DNA, 648 bp, Arabidopsis thaliana columbia
cttagaaccctaaaattcaattggagaattattcacacatagcaatagaaatgaagtaaagagatatgaaagcaaacataattcaaattgaataaataagaaataagggttagaaatcttctccaaattatcaagaaggatgaatctctaatcccaaaggtagtagcttacaaaaatactctccaaatgttgcagaaaaagaagcgtaaaaataaaattaggttttggggtttttataactaattacagaaaatagaagataaatccggttaaggaataccggaaccgttcatcgtgaagccgaaccgatcggtcttctggtggaccaatcggtcaggtggtggaccgatcggtccaacaatctctgccgaatcaatgaagcactgaccaatcggtctggcggtggaccgatcggtctaaccgtctctgcccacctcgtcaatgcacggaccgatcagtctaaccgtctccttgactccttctttctcctcggttcagcttttctcatcctttttcaagccaaacgaggtcaaaactatccaatcttttcactagtacctaagacctgttaaagactcaagacgcaacaaaaaaagacgtaatacatggactacgacatgatagatgactcaaaacaaaggttagaca

SEQ ID NO: 39805 - DNA, 583 bp, Arabidopsis thaliana columbia
ataaaaagggtaatattaagggatgaccaaatttgacagcattattaagaaaataaccttcatgcagaaaagttgggtaactaaccttttttgggttgcgaaataactattttaccctttatatatgagagaaactctttctttccaacaatagctatctagatgtagggaacaaaaaacattaggaagtaatgattacaccgctacttcttaaaaaatcaaacaatattagacaactaattaaaatcatacccaatatctacaagccttaaaaatgtacatgtagaagaaaacttagttaaaagatagccatttagaaacagttgtgattagaagtgtctaggcccaaatagtgtaatgaaatttaatctataaaatcataaaaatgaaatttttacccgcagtcttagcggaccagcccgttggcttaccggggcgggcctgaaggtattatttctgcccgcggtctgagcagaccagcccgttgcagtcttaaaaattgaaagctcattgcgggccagcccagatggacgcacgccgacgcacgctgacccgtttgacacctctagttgcgattgagtca

SEQ ID NO: 39806 - DNA, 515 bp, Arabidopsis thaliana columbia
aatatcagatacaatagtatcaacataaaaaaaaaagatgacgaaaaacaccgtggagacgatacttaagttaccgaagattgtttgattttcgtttattcacatgcaagcagtttccatcttcaatcattcatattgtccacacaacaaaaaaaatgaagaaaaatgaagaaaaaagtaaataaaagttctggaaagtaaaaaaggaacccataaggtcattaaacaaagagttagtactgtcagatccagcaaaattcgtggtcagcagacaaacgtaaaagtgaaacacttaaaaaatattttttttaaactacttaaataatctaagaagaaaatatctgatttcttcaaacagagccttatttttttcctacatatttattttagttctcactaagatgtgaatactcattccaacccaaaaaccggtgtgtgcaaaacagagagatttgattttgcagtttggtaagaacttgaaatgttgttattaatccagtttatgttccaccata

SEQ ID NO: 39807 - DNA, 777 bp, Arabidopsis thaliana columbia
ctggaaaactataacatacatgcactttgtacattacaatgttttttagcagaaatttggcatttgcataagttttaaaaaaatatataatgggaaaagatgtttgtttacatgcctgataggttctaaatccatttttaaaatctgacatgatctgaaaataatttgctcacaattaccaatttttcaacatataactgattggggtatcttacaatatttaaacatgtaaatcgaactaatcttacaaatagatctatttaaatcaaacgattggatatgatctgatggtcaactatacttgtatagaaaaaagaaatatttgattttcatctacttgtaccttttctgcgacattattgcgagtccctggtgtaacataagcagtataaatgaaaaacctaattagcatccaatactcaataaatatttatatgttttacacctacgcattacattacaaaagaaaaacaattaatatcctaaatagcaatctcaaagtcatccaccgtaacaacttgttcaaattggatttgtacaacttgtccttttatgacccgtgcctttgcacctcgagcaccagttctgctgcgtccttctagtcttaggtttctacatttaccatgtacacaccacattatgcattaggttttaacaatcaattagaaagtactactttagcaaaaaaaaaatccttaccttgtattctcgtgttgatggaattctggctacctttggcctccctgaatggtctcacttgtatatggtggtaacatc

SEQ ID NO: 39808 - DNA, 168 bp, Arabidopsis thaliana columbia
ctggccagggcaccggcctgcgccgcggtgtggacgggggagcggccaccccgaggtgtcccagtaccggcgcctgccaggacgcgtcgaggtcgaggcagacccgcagcggcggtctcgtcgacggcgcggcgacctgtccaccagatcgagctgcgccacgtcgtc

SEQ ID NO: 39809 - DNA, 496 bp, Arabidopsis thaliana columbia
taattaaccatttgctatgtatttgcagacttgcagtttcctaagtagtcgtactcccgatttcagagttaaaaaagctccactttctttcttttagctccatttatcttccgttaaaagtttcgggtgtgttattcaattctttaatgtttagatttgttggtaaggattcaattctttagtgtttagattttatgattttctttttttaaactatttatgtgaatttcaaaatctctgcataatattttgaatcttctacctaataatatacttaaactcttattgctatgaatgttaatatcatataaaatgagaattgaggtaatacagagacactacctaagaagagagtaatcttgacaaataagatatccagcatgattacaatccgtatggcttaaaaagagaattctcggatccagagaagcattaggctactccagagctacctatgacgcccagcggagatggtgttgcgcactcacgatcgatg

SEQ ID NO: 39810 - DNA, 297 bp, Arabidopsis thaliana columbia
ggtgtaaataaagtgattatagtttcttcttcattagttagtattcaatgcctcattcgcggaaagtctctctcactagtctctaatccaggtctctctactctcaggtacagttacgtcaccatcatcaccgtgacgcatttctcattcttctaccgtcagacagactttgacctatttctcgtcctgccagtccttccttactgttatttctgacctttcgacccgtttccattttcccacttttctaacactgatgatccaccatacgtcaccattattctccgtcgaaatggc

SEQ ID NO: 39811 - DNA, 452 bp, Arabidopsis thaliana columbia
atattaagctgaagaaaccttgtttttaagtttcatgtctttaaataagacccttgttattcatgtcattatttgttactgtcttcatgtccacccaaagattcattatataacgtatgaaactagaataaattttcttagccaaatcaaattaaccatgttgtatataaaccacgaccaaagctttatatgaattttgggtcaatccaaaccgaaatccttaattaagacaaaactgataatgtattgtttgcaaaagagccctccaaatttgttaaaatgtgaaagaaagctaattaaatatcaatttatctgtgtttaaagttttaacgagagggggcttttgaatttttttgctcaacttccaaatcgtcgccggcgatagaaaccctagatttgattctcgtcggttatatcagcaatgtcgttttttccccacagcaacaacagac

SEQ ID NO: 39812 - DNA, 413 bp, Arabidopsis thaliana columbia
taagaaaacttgtcaaattaatttttatttaaagaaataaattacaataaatgagaattttttgcattgtgtcgtgaagtgatgtggataaatctttaagcttaaaacaattgggtctacacaaccttgatacgtagcatttagaaatttaaaaaaatctcagaaatatttttttgcatccggtaaaattaaaggtagtctcctgcattactcttgtgcgggaacccaacacattgtctagaatgacaaatactaactagaagatcaaagagtttgtgggaggacaaacctattttggtcttctcggaagttactttaactgtgtcattgtgtatgcatgtctcaattggaatttttttttagtggaggactcatttatcctacgctccatccaatttttttttccgtagcca

SEQ ID NO: 39813 - DNA, 526 bp, Arabidopsis thaliana columbia
catctttatcacttttagttttgcaacatttcagtttcgaattttgggttgttttgatatggttttcgtttaaattcgggttctaacttcatatacaaacgattgtcaaataataggagcttggacataatatataggtgttaactgttaagttcgtaattacttttgttaggatttattcaaacaaaatttcaatacaatttcggttgagtttcagcaaatttaaactagatggaccatggatacatcaatttttctttaagaatgaatgattctaggattttatgtcatttttgaaaacaacaccaaagctttaaacaataacaataataattcatttcttaatagggttctctttactatattcgtctatgtattgttttcctttgatacatagattgccgacaaaaagaaattgttttgagggtttaccgactaactgtaacaattagttgctaaactgtatcattgattatcaaccaaacgatcgttgaccaatctactgattagtggattaataatagaa

SEQ ID NO: 39814 - DNA, 446 bp, Arabidopsis thaliana columbia
tcacctacacacatgaatcggtcacgatctcgcaagagaagaactagtgaatgaaaccattgtcgcgcttagaacgcaacaaccaaaaccgaagacggctccagaaaagaactagtagatgcacctgcatcgatgtatcatccgagagacaaactccaaacacgaaactagtccaccagagtccacgcacaattgagaggaagcaaacagcgaagaagaactaggaacccaaagcagagagttaaagcaagcaaaccactaatccggaaagcaccgcaaagccatacaataatccgaagagttagaacccaaaataagcataacttaatctctgcccaacccaaaagcatcaactaaaccttcgactcaaactagaagatctaaaccaaacacaattaatgaagagcaaagaaaaaaaagaagcatgagagacgataggagaattg

SEQ ID NO: 39815 - DNA, 420 bp, Arabidopsis thaliana columbia
gtttgctggagccactcattgtgatgatgcttttgtagacaaaggtgagattggaaaattgataaagaagggtctggtataaaggaaaggctgactttgatcttaattgtttttttttctctgtatggcagcacaaatagtagagagagatgaaaacaattcagtcattgaagaagatctgactctggttattgatgaaggtaggttgtgagtcctgtgacattaatctaagaaagtaatataatgaaaccttttgctcaattgatggtctttctctttatggtaggtgaaaatctggacaaagaaaacaacagtttgctagcaaatgaaactgcatcaccacccctcagcatgcgacttcaagaactatcaaacaatttgaagtcgatatgcaaattctcaaaccaactatcagtacct

SEQ ID NO: 39816 - DNA, 513 bp, Arabidopsis thaliana
taatggaacttgaagggaatatttctactactaatggtgatgatgaagatccttattcagaaggcaggttaataaaagtgatagaaccgatcgggctagacgaagacgatgagtgtgttgagattgggttggggagttgtgaacaagagccaatacaagagcgttttggtgatgataaagatccttcttcggatcacggaaacgtagaatctatccggctagaagaagaagacgccgttttgtttgagccttggttgaaaagcaggttgaaaagcagggacagggaacagtctcaacgacaaggttttggtgaatacgaagattgtttctcggaacgcaggttcttacaagaagaagaagaagagtgttttggtgacgatgaagattctttctcggatcagatttcattcttggaatcgaaccggctagaagaagaatttgaagaagagaaagaagcagcccggttttcaaacgacaacgatttcgttgagcttttgtttcaaggtattgaac

SEQ ID NO: 39817 - DNA, 508 bp, Arabidopsis thaliana columbia
catacttcagagttcagcagatagagaacacaagctcaaagatcaattaaataacgtatctcctaagccaaagcagtacgagcaataaaggagcttttaatgtagcaaagagagagcgacacagaagaaactcaatttcttaccttcctttaatggtttcgtgggcttaatcacagcaggagttgcttcatcctaaagttgcaaaaccaaatcaaggtcttttaaatttgcgaagaagccattaatagagtaaaactactaacaacaaagaagggaaccataattaattaaggcgacgaagattgttactttggtggtggatttcttacttgacttgtccattgagaatgataagaagaaaagagaagagcgaaccctaaagagctactacgtaagatatttttcagttttaggtctaaattgtatttccttttatatctattatttatgtattattctggttaagggtataactagaaaaagaaatgactaacaaaaataccacatc

SEQ ID NO: 39818 - DNA, 598 bp, Arabidopsis thaliana columbia
cactaaaattcgatagatcaaaataattttctaaatactaaccatagtgtctccactagaacgtttaaacccgcgtacgttagtgatatcaaataaaaaaactaaaaattttaaaaaatcactctttccgttttttgtttttttgttttaagttaaatttctctttcaactgttttatacttaaataagtccaaacaaaattatgattatcttcactcaaccaaaagttgaatgatcttttaaaaaaattagacaagcaaaattgacataatcatatgcatatttgagagcaaaacatgtttttcatgttttatatacataatatatagtatatacattgtttaacagtaaaatgttttttttataatagaaacgttatgtacaatatacaagtcaataaaaggttaaggtcttaactcttaagtgtggaagttgtgttttatataaacatatatatagtaatatcttgtcttcatagataaataaaaccgtatatatattgttaacttttctaaaaaataaaagacaaaacgtataaattatgtcaataatatatggtaaaattgaaattccttgagattattggctactgagctga

SEQ ID NO: 39819 - DNA, 887 bp, Arabidopsis thaliana columbia
cgaataataataaaaagttccaattttatatcggtccaaataattgtgtgttcattgttcctcctcaattgtttacctttacttctttaaaaaatctttcttggaatgatacttcaacctcttacggttaagttcaaagtagattttttgagcaacaaaatcttggaggagtttatcttggtaattttttattttttattttttattagcagtaaaagtaattgtcttaataagtataaacgacgtcgttagtaagtacgacgtttgcatatatcctatatagactttttgtccaagctcaggacttgctaaagctcgttcagagactccaaaagagttcataaacaaaaacctactcccagaaagttcttccaaatctctcgccatggtttctctcttctttcgtgaattttagtttttctaaatttaattatactttaaattgctaagtccaaactctttcgcttttgattcatcggtaatacaagtttaagaaaaaaaattcttatatttatctctcaaatcgagtttcgagtgtttgatttgattcgtaaaatcaatggcgacgagcaaacctcaaagatcgccggctgaaattgaggatataatcctccggaagatattttatgtaaccctaacggaatcaactgattccgatcctcgtattgtttacttggagatgacggccgctgagattctcagcgaaggtaaagagcttttgctttctcgtgatttgatggagagagttctcatagatcgtctctccggcgacttttccgacgccgaaccgcctttcccgtatttaatcggttgccaccgtcgtgcttacgacgaatcgaagaaaatccagtcgatgaaggataagaatctgagatcggagatggaga

SEQ ID NO: 39820 - DNA, 525 bp, Arabidopsis thaliana columbia
  unsure (1)..(525): unsure at all n locations
tcagaagaaaatagaggattaaaagtagtggggtcgaaaagagaaagaagaaaagaaatgggngggtgaaaaagatagtaaaatctaagaaagtgacccgaagagagtaaattagttagagcatcacatctctctctggtccccaatgagaagaagctctcacggaaacctcatatgggtcctatttaccaacacacatctccaagcaccctcctttaaaacgccgttacacttaacggagctttatcctcatcttcatggtacgatgtagtttgagaatgagacaaaaagagaagacgttacctaaggtcgaagtaaaagcttttgaagaggcggtgtaatggagagagtgttaacagcgttagtgtaggaaacgacaacgtgggatgctgctgtctgtgtcagggagaagagagagagagagttaatgaagatttttgtctgtattctgaaacaaggtcgaatgttggagactaaggaaacaaaaataaagctttttgatggcttatgagtctttgaaatagc

SEQ ID NO: 39821 - DNA, 574 bp, Arabidopsis thaliana columbia
ataagtgatatgatgcggttggacacgcatttgcagtgtgaagagtctaagagcacgtaaaaatcgtctccacaagcaaactatgtgcataagagttgttaaaagcaagagtctcctaacaaatgcaaaagggtcaaatctgtacacgaccaaaacaactggtgcagtgtgaagcataccgtcatttttctaagctccctcatattaccatctctcaacaaatcaagaaccctgcaaatatgacaaaattatgtatttaatcgtaaggtcttgacaaataaaatcagtcaccaaagcaaatgaagatagatacataccttatatgtttataaacaagccaaaccaaggtcaaacaatcaactccaaaatgctaaccaccatgaggaaaaaccaggcttaacctggagcaatgccacaaaacggtggaggatgatattaaaccaggctaccataagctgcttcaagcaaaactttttttgctagagaaaaggatatcgccaaccttctcagaccaactcatttcaaaaactttaagaccctgcaaatatgatgaaatcagtcttattaatggatg

SEQ ID NO: 39822 - DNA, 1032 bp, Arabidopsis thaliana columbia
ggttagtaggtgaaagccagctattatcaataatatcttgcgtactcagttgccctatcggttagtaggtgctaacatggtttcaaaatacaagatcaaagcattaagttcaaattcgattctagtccataagtccctatcacttggcgggtgtgcaacggttatagttctttattcagttgagctagttcatgcattcaaacgagattttgccaaataatgaaatacctaaggtcaagtactaggtggcgttccggacatacaagcattaagattcaactcaactagacagaatagtgtaaacgatcaaagaaaaccatagaaaccgccaaataaatcagatctaaagtccccatgaataccctttgaaccccccccccccttaaaacctaactagagttctactcacatatactcaaggaacacaacatcatacgaataagaaattgcataaaagagagtatgagtagagacaagggtttagagatcttctctggaattccaaagctttataaatcttcttcctgttacaagtagagaatacagaattgaagagaaaagagagatctaaagaagaacaagaggaggacgacttttggggcggtgagagccgcaagaggcagcctttttcgtggttgttttctagggtttcccctaaacttgtattacagggcttcattaggtcaaagggtagaaacgtctttccattgattagtaagtgatgggccaagttcttgggcttcttagggttgctggaagtcggtggcaagaggaagggaacgtggttgtgcgccctagtggtcggtgaaagactcgaggagacgcctgggttcaagtcaccttggcaggcggttttaaattgatcatttttaaaaccgtgattctaggacatgccttcactgttcaggccataacttatgactggcttcgtggattcgcttcgattcaactttgacgttaatcttgactcttctagctttccaatgaaactgagatccctcatgccaatcgggaagactttggccggatgtg

SEQ ID NO: 39823 - DNA, 553 bp, Arabidopsis thaliana columbia
tactatatagtatgggcccaaaccccactatttcttggttacaggcttacagcaaaaacctattaaatccatattatacacttggtagagctagcaatgaatatgtgaaaattttatttaaaaactattattaatattcatgatcgttagtggttgctgataatgatgcatgcatatggcaaataggcaatagtggtatgcaccaaatatggtgcccggcctatcagtaaacgaatgcacaacccactcaagaagaatagtggacaaaaaaaacgcatgatatgtaaagttggtcaagagaaactaaaattcggtgtgtgacttctaacatttttatttaacagcggattgatgaaaaaaagataacaaattattgatactgtattggaagaaatgaccgtggtctaatgacattttacatgtctaccaagaaccagcaccattatacttgggtccgaatccctttcaatgcaatagagttaattgaaatgttgaatcggtttgttgtggtcaaaataaaacgaaaacaaaatttgatatagttactattgta

SEQ ID NO: 39824 - DNA, 503 bp, Arabidopsis thaliana columbia
ttctttatatttacacactaaataaattgtatgaatcttagtgtacaaaaaaatagtgaaaggtgactatttttaaaataataaataataaaatgattgttttttaaattatatttggacaatgactattagtctagtcactagtctatttagtatatttttcaactaattaaaaaaaaaaaatacgcaggtggtcctcgtgtagagagacaaaaatggtatttatctttttaagagtatattattaatggttttttaaaataatttttaaattaagagacatgtcttataatgtcttataatagcttataactaacaaaaatctcttatttaaaagactttaaaacactttagttagatataagacatattttttaattaatagttatgttaagataccatcaataaaaattgtctaagatggagtaatatagtaatttaatatagtccattgggccactgaaacttgtccaaaatcgttttacagtatagcactaatttgg

SEQ ID NO: 39825 - DNA, 474 bp, Arabidopsis thaliana columbia
ctaatattaaaatttctcttacatatagaaaacatccaactttgacaaatccatgtaatggacccgtaggccgtaacatcaaatatggttagatatcactcttatcgatcaaccaaccaattaccccataaatatatgtatttattcaatcagccgtccataccggtcttaaagtattgaagtagccagttctttagtggtccttattatgttttcgatcacctccttatctctgtagctacataatcttcccttgttaaatacctaaaccctattctccacttaacctccctaaagaacctatatttcacgttatattcttggctctttcacttttcccataaattctgtgcaaaaactcgagtgggccttaagctttatctaccttatctctccagctatacacttgctactcaagataccgctaaccctaatctctactagacccccttaggacttacaaccctatatatc

SEQ ID NO: 39826 - DNA, 962 bp, Arabidopsis thaliana columbia
attaagtttctatcttataaatctgctttcgttctacaaaagaagaagaaatctttcaactattttttttttccgttggctgtttattttattttatgtgattgttgctgaatattgtttaatacttgatttaagtttattagtttcgattaagtgcatctgcatggatttgtgatttatgtataattatttgcttttagagctcacgtttgttgccttttatagtccattttcaaaagagataagatattagtcccagactatacaacataatcatatctactagtaatcatataaaccataattagtaacaagaccgatcacatggtaatcacttttggctttagtcaaatattgtgtgacatctcataattcaaacgaagttgaccaacgcaaataatcatgttggaacaaaatcatctcatatattatgtcttcacgttatcatttctcaatttctacaaacaccaagtctttacgattacattcattcacctaccattgattggacttggacatctgtctaaatctctgctatccttcagattttagcacaagatcccatagagaaaaaggatcttcatatttttgatattggtgtgtctcacggcatgcaatggcccactttgctggaggctcaaagcaataccacaaggacctcctcctcgtgttcgaataactgtcttatccgatctcaccgaagacatacctttctctgttggtccacagcgtacatttatggtactcaattcattggttgtgctcagtccctcaacataaacctccaaatcagtgtgcttgacaagttccaactcattcatacctctccgcgcgagaacttaatcgtgtgtgtcattttaggctgcacagctgaagcatagcatccttgatgagagaagtgaggctttgaaagcactgagaagtttggggcaaaaggagtggtctttgtgagacaatggaga

SEQ ID NO: 39827 - DNA, 234 bp, Arabidopsis thaliana columbia
cagatggcatagaatgtgctgttgtcgcatgactaggaatacagtatgatctaataagtattaactatcaatcttaggtcgtagtgtttggtttttgttttagtttctgaagatacttcatgagattatactcagggtttaagtcggaactactcattaagagcttttgtaagtcgtggatcagtttgatatacgtcatttcgtttactgatcgtacttgagacttgcagtcga

SEQ ID NO: 39828 - DNA, 621 bp, Arabidopsis thaliana columbia
cgatctatattcttgaaaaaaatttcctcaattttatcaatatccttagatttatactaaaaggtatatgtacggagatactacagaatatgccaaaatacgtatacgcagcaaaacgtacgtgcattagatacggaggggtgttttcgtcatcttaaccattcaacttattccgggcgaatctactaactgactccggccgaagtggactcgcagacacgtacccagcagagaagctttgagggtagtgtcgacttttctcaattcaatagtatcgtatcttagccacatgttaagaacgaacaccgttgatctcacgacacgtgcccttgatcattttacagatttagctatttcgaacacgtaggatacacacgtgtacatcaaatctctgtccctttataaaacctccccaaaacaaagcttatcctctttagtctttactcttcgccacatcacagattttggtttcttccgtatctcgaaattcagtttcatcatcatcctcatctggatttataaattgtcaatctacctttcaatcgccgggggataatcgaaaccgatctgtgtaacaaaatgatgaaacgacggcgagatttgcgctgattgcgttatatg

SEQ ID NO: 39829 - DNA, 337 bp, Arabidopsis thaliana columbia
aagaacaagagtaaaaacagatttgtaaacaattcaaagaaaacagctcaaatcgaaaccgagaaacatgagctgagtgaataactaacctcagcactcttgggaacctcgtcacagaagatttcgcacttgatgtcacccaggttcgtgtgcaaagttaccgactgcaataatcaaaaccaggaaactcgaacatataaatacaaatatcgccagaactatattaaaaaaaaaactgactagaacgaacaaaggacaaacgaacgaacaatggacaaacgactcaccattgttgctcggaaacgcaaaacgagcagagaggctcactcccatactc

SEQ ID NO: 39830 - DNA, 498 bp, Arabidopsis thaliana columbia
gaatggcattgatagtgctacgtactggtaacaccgtaacaagtctatgatatttggtattttgccatcaaaactaattttatgtgcatgacaacatactatgattatcttctttttaaatgttcttgtaatttcacgtcgatgataacctatccataaatatttcataaaaatgaaaaaaggtttaagaatacgatcaaaactttatatgcctatgcaatggtcccatactctcatggcaaaaaccataaaaacatggaagtaatttagtctgtgtaagaaggaggaatagttttggatttgcaagcgtatacactatacagtatgaattttttttgtcaaaaaatgaattcatcccacgcttggaggtggattcaacgttaatggagcctctcctgttgctgaagatgttaagcctcctccggttctagggagagtatgagaatccacatttcataacaaataagtcgtttcctcattatttagcaagcaaaattg

SEQ ID NO: 39831 - DNA, 511 bp, Arabidopsis thaliana columbia
tgctctctcactatttactgggatgtgaatgtcaataactttcccaaatttctgaaaatgggcaagaatgaggtcccttctgttgctctcgtgtggaacataattcacaaatagagtccgcattgccttttgagttggtttccttgtattgttcatcatatcatttgaaatattcgatgaatcaacaacttttgcgacactttcaccaacatggttttgtttaccgtgtcgagatgaattaactgagacctccttcaattgatcttcaggaacagctgatgaatttaatactgcatcagctttctctttggaatttgcttgactattagaacctttcattcttccccaaactgattgacttgtgcttctagagtctctaataccacacccagttttcagcggcgtcttggttactgtcatccagtggagccacattctcatcaaccgccatgagaattgagtgtagatattgcacctgaagtttcacagtactattattcccaaaggttga

SEQ ID NO: 39832 - DNA, 471 bp, Arabidopsis thaliana columbia
gatccggcaaaacagacagatcgaccagtgaaagctcctatctgtaagcattgcatgttcccaagctctaattcaatgaaatgttgtagattcaacaagtcatgtaaaatgtttccttaataagtcggtgatgtctcatggatcttgatcggttgtgtttgtgtagttttcttgtctcaattttgcataaagagctagaattgaggggagagatttgacctaatccctgtttcttgaataatcttgtttcttgatttagcatagttgaccaaacaagtcaaaggtgtttatgtctgaaaatttggctctttgattttaactaatgtagtgccaagatctgatctttagaattctcaaggactctgttttgtgtgtttctttagtgtctgttgattatatataaaggatcatatgaacaaactaagctctaaattatttttcatattttctccagcttcctgaggcattgtg

SEQ ID NO: 39833 - DNA, 506 bp, Arabidopsis thaliana columbia
ccataccaaaaaaaaaacaaattacacgagagtcatgtttaatttgcttaattcgttgaccaagaaataaatgaattttgttaacccaaaatattcgaaaccggattagacggtcaaagagtgacacacatataaatcgaagagtatgggaagtaaataaaaataaaaataaagaagaagagagtaaataataaaaacctcactacagagaaattgattaaacaaacaaacaaacaaccctaaaattcatcatcaaaatcatctctttttttcttcttgagatattcttcttttcatctgtaaaaaccaaaaaaccaaccctaattaaattacaccttgaagaagaagaaagaaagatcgatcctaattattactttcatggcggatctgacttgtacgacaccgtttttgctctatccatcactcgttatcattctcttcttctactccattaaccaccataaccaaatattctcatccgtcgttgatgatgatcttcttgtcgt

SEQ ID NO: 39834 - DNA, 467 bp, Arabidopsis thaliana columbia
ggattgacaaattagaaccgattaaaaccgaaccgtaaattaatgagagaattaatttgggcctaagagccaacgaattaaaaaagcccaacgcttcaaaactcagagattgaaccctatggctaagatcgacgccggttctcatcgccggccgaaacctcgactcgtgccatcgtcagtttcatttctgcttcttctctctcgtagcttgaccatttatgtggtttggtcacttcaggtcagcttctcctcgatcctgtcgtctgtttatcttgattcgacgattcatttattcttattcaatcggagtctgatacgagcgacgcagcaagcaggcgaaataccataccggattttactggctaattttgtccggttcagtaaaatcgttagctacaccgatttgtatccagatccaggtcataccaagcacagagaaaagcatttggggaagagtaggtattgcg

SEQ ID NO: 39835 - DNA, 495 bp, Arabidopsis thaliana columbia
atcccctgaccaaagatgtgtatatgtgtcccaatcagaaagttcataacaagttcctctcttctcttctcaattcttatgcatccacatcatcattgatttaatgcttttaaaaacagaacattacatttatttttttaaaaatgtattactttttggacaatacaagtttgatacatataacggatttcgcaaaatatttcatgttctttttgcaaacaaataatccccaaaaaaaactaaaggaaaagaaattcgtaaagaccaaactcgtaataaagagtatatactgtttccccttaaaaaaaaaaaccaacctaaaattaaaacccgtgggtttaaggatttgatcttttaatgttcacaaaatcgagaccctaaattgctctcacactcacttcccaatcttcttagttcaatttcaatttttagaattagaatctctgaatcccagattccggtagagaagatgagtttcgcggcctataagatgat

SEQ ID NO: 39836 - DNA, 596 bp, Arabidopsis thaliana columbia
taatttatatcttgtccaatctcatttccatcacaagtttaatcaaggaaaaaatgaaacgagatttcttttatggttaatgtgttaacttttgtttggccaccctaaaccaatggagaacgatttaaaacaattaagaaggaatgttagtcatagtattgaaaaaaaaatgaacgataagtacaaaagaagataagttccagaaaataaagaagtacaaaaaggaaagcataaggttgaaaggtgagtggctcaattattacaactttattaattagggcaaacactaaaaattcgtagcccgagaagaagtgaaagagacaagagagaagagaccggtggtgatggtcacgacggcgacgatggtaggaccgccgcacgtggcctgccttacccatgtctccatttgaccagtcaacgtacttcttctctaattattggagttcttcagtacatatctaaaggactaacaggtttattaattcaagttcaacttattaacatgactcttcttttgacacactgttctaatataataaggtattcaaaaaaaaaaatgaataaattgggtaatgttcactttgatagtagattgg

SEQ ID NO: 39837 - DNA, 407 bp, Arabidopsis thaliana columbia
ttcggagcttggattttccactgtgagagattaaaagaaaaaaaaaacattagacagtggatatgtcaggaaaatctaatgctgtaagataatctaagaacataagggaaattatcatatgctataactcattctttgatagtggaagtttctacatgtgtttgatgtatgaggaaaaaaataaaagcacacaaatttgcggcagacctgacacaaaatcctccataaactgagctgagaaagacgaatccaatgcttcaaccaagcaaagtagttgggaagcaaaatcaattcttttgccatgtgaaggatcacccctggtaaagctatatttgttataaaactggaagggaaaaataatataccacaagacatgcaaactactattttgtccaagaatgagaaac

SEQ ID NO: 39838 - DNA, 864 bp, Arabidopsis thaliana columbia
gcagaagtatctaattatagatggtccttgatttaatcagaattaagaaaagagaaattaagtattgcaagtgtaatattataagaatcggcgacaagacgttctagtcaaaatagaattaggctagataagtataaaattctacgtcaggagaggatcacgaaaaaaaatctttccccttaaaaaaacaattacaattgtattggaaaagacaagttgtcgttaaaagttaaaaatcaaacaaagccgcgagaggtttacaattgataacgagaaataaaacaaaaaagagtactgtaataatcagatgcgtcagacccacaccttttggtttcgtacgtgtcttcccttacgcgcctatcctcgtatcccttggtctcttaccgttttaaccggttatttctttgtactaatacgcgtaaaaaacaagagtcttgctaaaagatcatttgagttcatcaaattctgttacgttatttgaattgatacgaaaactatttaagaaattatgttctaaaattctaaataacctgtttatactatactttccataacatacaaaaatttgctcaaatactaagaaattctctcttagtaactatgtccagccatacttaggctatgaatgataaccaaaactgcatctaaaaccgtaccgcaacagtgctgtaacagtatcaaaatctctacatatacatatgtatttatgtattttcattactatttgaaccgcaccgcacttctcccgtaccgcaaaacgcagtcaccattcggagccttaatatttaatcggctttcatgctcaaacgttatgacgtaaaattttaaaaattcacaaaatgagactgtttattagtctcctca

SEQ ID NO: 39839 - DNA, 484 bp, Arabidopsis thaliana columbia
ggttcactaatactccatgtgatacgtacctatattaatccgtaccaaattttacccctagttctttttttcttttatttgtagccgttagtcgaatcaagtgttgcaaacctttatacgatgatacgaatatgaagagttgaaaagtgaggatgaaatggccagttacattattttgactgtgtaaaaagaaaaaagctagtactacgcactaactctggtctgacagtctcgagacgtgtggtaacatttgccattattacattccccaaattctctcattttttcaaaaaatatactactaataaatatttttcttaaaattccataaaaagcactgagaagtaacaagttgattcagtctcactcttgctcagtagagctcccatcaatggcttcaatcaagctcttcctcttcgctttccttcttcttctctctcacgcttcaggtttctcttcacattccctgctagatctttaaatt

SEQ ID NO: 39840 - DNA, 606 bp, Arabidopsis thaliana
gcttctctatcactatcctttgatcctccatagtcacacttggcttcttcttcttcttcatcttcatctttcaccctcttcaaatccttacaattaatctcaaaccctactttattctcttctttgatgactccaacatcgtttggttccttgaatcccaagcaaagttgttcttcctcaagtaaactctccacgtccatagtgagatcctcaagatccatatccaatggcacgaaccccataaaaccttcatcgtccatgattgccttctcgacttctcctaattctccattagtagtagtgttattgacttcatcaggaactaagcaaaagccgtttatatcatcaatcagcatgtctgagaaaggatcgaaaacaggcacgcaacaattcagactctcctcggtttcttctacggaggagaacgagaaaaagccatcatcttcgtctccaccaagctccggaacaagaggatcgtttgactcgatttgcaacaacttctcaaacgcacaactcttgctcctaggcgttctcgcctttctcctgaatccttcgtaccataccgacgtcgttttgtctgccgtctccgtcggcgaagatgattgt

SEQ ID NO: 39841 - DNA, 767 bp, Arabidopsis thaliana columbia
acttactccgtaaataagtaatcgtacttaaatactaataatcacgattagtcccgctaatcatagtttaactaacactaatcatgcttagtaaatactaatcctaattagccattactaatcataattaacaattactaaatctaattaactatcttaatctaggattaagcaaacaattaggctaagtaattatacttaacctcctaagctagattagggaaataaatgaagaaaatatcctattcacgtgctacttcacgtgacttgagactcacttggatttccctagcggtttaggcttctgaaggtttcacccgcgaactaagcttttctaacgagttttttttggcccaaggaacaaatgagcagagggggtatatatatgggcgttaggtcggctagggaaagcatgaggtggcccggccgaatcaaatcgcggcaagtgtcgtcccacgggtgctccgggacacaaatcggccaccgattggttctttctattttttcggataaacatcatccaaaagtggataaaaacgaccttaaaaggataaagatgatcggaatgtggataagcatcggccctaacggataagcttgagccgcgattcaatccttgccatccattctctcatttcggaggatcctacgatctgtcaccggatcgcaagaacattgagacggcattctccgtcactaatatctcaagagggtacgtgacacaagtcaagggtttctaaggactataatacattacatgccagaat

SEQ ID NO: 39842 - DNA, 958 bp, Arabidopsis thaliana columbia
tttacaatattatctcttatttgcgtcatatattctccatctgttatctttgttgtttctatttcatctaaatcacgatcaaaatctttgttgtttatatttgtctctgtcagtacatctgcaaaatgtgcatctgagaagtttgaaattcttatgaaattaggtttaaccttggattgttaaaatttgatgaacagacccgtaaaagatgaatgaaaaacaattagtagaatatagctaaagtaaatataaagagagaataatatagaaagtttggtttttccttttcttaccaagtatgagaatctattatctaacggagaagagatgtttatggctacgagaaatttttttatgatagaagagtatcagggaaaagactgagagaagatatatatatatatatatatatatatggtcggggagtatatatatacatactgatttataacattataaaaatcaatagtaaataaatggttattgcccactgcagttttcggttggaccgcagggtaaggacgtgacttcactttgaaacgcggtccatgcctttttatcccttttttaaaatccacatttccattcttttttaaaataataaacacacagatttttaaaaaggtgttgaatggtgacatatgtacagttttcaataataaaaaatgaaaaatgccaaaacgctttccccattcactacctatatttctgaaaaacgttccgaacataaaaatctaaccaaccaaataaagcgtttttattttggtcaacacaatctaaaattaaagggtatgttaaccataggaaaaatgtataaaacgttatattatactgctatcaatactcaaatttcttgtagttttggggtaaaatatgtgttttccccgagctatgtcaaaacacatcgagtcatttgtctgttcaaccgcctcgggggtaagtttacaaaacgcctagg

SEQ ID NO: 39843 - DNA, 450 bp, Arabidopsis thaliana columbia
agcgatcttaacagctaagtaagaaatctgatcattccaccaaagatctctcatgtgtatgattattccatccaaatatttgcattaagattttcttgggttataaactaaaccaaatgtatttcagtttttggtatgctttgctttatattaggattcggctatgtagaactatttcatttttagaatgtttaacccatattgtcttcaatctaaacaatagacttctttacgcgggttcgatcctagtgtacattatggcagattcattttgtagtatgtaagtgatggcatacttatttaatattgtacagactaaactatatagagtatgatacctacacgcaggaaaatagctggagaaatcaagaaataggatgaaacaaaatcggcagaaaattccagcaactcttactcgatgaaccagcttgatctttgaataaaaaatga

SEQ ID NO: 39844 - DNA, 667 bp, Arabidopsis thaliana columbia
tgagctaagtaaaatagtaaagaaaataaagagacacaaaaagtgagcaatagcaatcgattggatggttgtgaaacaagctaataaaagcgtcaggcttagggtattctcagaaaatagatgatagtagatctagaaatagctaggttgttatcgaaccgttctcaaactcaaactatgattttagagtaaccggtggtgttccgcgaaaataaccggagaagctgagaaatcttatactaaagcatgcattattatcaagtttgattagttcacctagtatctaaaccagagcccttctatgagcctacctgttctttcttaaatgcctaggctcatctatgatagatcaaatagcaagtacctatggtgggcatacctattatctaatatcaagttctagttagctactctagaactagcatgaagaacaataaagatgaagaatcctacatataacctagcaaggggcaatatattaagtcatctaaatccctaatgagaaaccttaaacctaacaagaaaactactcaaacatgatgaatgaagcaacaagatgattgaataagaaatcactgaataaaacaagaatagattaaggtttacgaggattttctctaagggagttccatagggttttctccaaagtacaaagagaaaggagatt

SEQ ID NO: 39845 - DNA, 119 bp, Arabidopsis thaliana columbia
accttgaaatcatcaagaagtctacacgtacctcatagtccagacacacggaaggacaaacatcgtcaacgtccgctccaaaagtaacaggactgccaggaatgcccacttataatccg

SEQ ID NO: 39846 - DNA, 439 bp, Arabidopsis thaliana columbia
tttcaagctacttttgactaatttactttctcaataaaattaacttttttctttccatggcttcattttatgtggtggtgcttctgtcagcgattttctcgatccttaaacctcacaattttctctgacttcatgacacagatgttttctcctccttcaggccaagctcaaccaagtaacgatctgaaaagacactgtatcctaatcacagccagcaatcctcacatattgccaacacctgtatatcgtccacgattgcaaaatgtggaacggaatgagaatggtgatgcgcaacgtgagagtcgattatcagatgctgagacagtggcttcatattttgctaaggtactttttttaactgattcccccaggtattacaactagctataattactccttttaatgggaaattactaacctgccatattggtgtgcagtg

SEQ ID NO: 39847 - DNA, 521 bp, Arabidopsis thaliana columbia
aagctcggaattgctaaggaaactaatcaaatgggaaagatggagattacaacagacctatgatgagaagagctttgataggaccatgaccgtacgttctgtagaagattttgattgcggcattgttaagcgtcgtctctgggccgacatcttctttcacgacctcgcaaaacggcatcgctttttttgttctcaaactctgatatctgggtgggatcagattttgaataaccggagaggagaagaggagaagaaaggaaaggacttttctatcggaagagagagagattgggtctgtggtgtggttcggttcggttttttgggtggaggttaggactgccacgtaggattggtcggctggattttattggcgggtaatatctaacaaaggtcaacggtcaaattttttacacgagaaaactatgttgtatagaaatatagcacgtgaaaaacgctagaagtagaagtagtactacgtcaatggaattcatatgcatcatatataagagaagcgataatgg

SEQ ID NO: 39848 - DNA, 275 bp, Arabidopsis thaliana columbia
ctatagttttttttatttgataatttttattaataaaagaatacttaaattagaaaaataattaaaaaaaggcgtaaagtcatttgaagcctccataagtagccttcctagcttcccctctccctctcacattcctctcttctctctctcttttccccaaaaaccaaaaccttttttccgtaccaaggtcaacaaatggcggcgaaagtaattacatttatggcggttatggtggttactgcctttacgcgcaacgccaaaatccccggagttta

SEQ ID NO: 39849 - DNA, 303 bp, Arabidopsis thaliana columbia
cccttcctctgtttcattaaactgaactagtgatgggttttggagggatactatagcaacaaaatgtagtcatctctcatttttgcaattattttctaactcagacttcctaggccttttcattttttttctgcctagagctagaatttggtttcttaacttctataacaggctgtaaccactgatacattggtacttctacttcatgtcatagtaacctaccaagctgtaaccaggctgttttgcaattttgttttatagtgtttactcaggatttagtttctcacagcagtttagtattaa

SEQ ID NO: 39850 - DNA, 306 bp, Arabidopsis thaliana columbia
gatgggggagcggggatggaagttccactatgggggtgtttgcgctgtgtaattagtatgtcttgtgatattgatgtatatttgtggcttagatagtttcagcaagtgagaagtaggtattagtaagtccatgtatgaatttgctatgtagtatgccagctctataagtggtagactggctaagagcagtgtgtgcttgggactagtagcacagacggttagataggtctcgcgggtacttcatatgattctaattacgtgatacatcgtccagcgtctcggatcgattaggtgagagcctcacta

SEQ ID NO: 39851 - DNA, 432 bp, Arabidopsis thaliana columbia
taatatttgtgttatatgtttttataagattaatgacaaaatctgtaaatagttttagacaattatttaaatagtgaaaagtcactctgatatggacatgtcaacatgacaagtttgttaataacacctgaggctaaaatttactatacacaatgttttaatcgtgtaaatattttgtgtaacttatagagatcacatcctaattttttagtaccttcggagttatttgttaaatcatttataagtaaaattttaggatgcaaattatattttgatgaaaagattcaaaacatatttctaacggaaaatgcgtaatcacctaagaaatgcaattagtgacgtttgtggtagaaaaacatgcatttgatggacaattagagagtcatatgtgttcacctaaactcgaagatgtgaagcgttatggcattgtag

SEQ ID NO: 39852 - DNA, 542 bp, Arabidopsis thaliana columbia
catcccaacccaataacgaaagtcggtattgactgactattctgttcatgaaatttacattattgaacatagagttggccattaatggagctcgatcattgtacactcgaaaaaccataaagcgttgattctcgtaatatataattcaaggcacgagtttaaatatgaaatttccgatggtgattacaaatcgttctttggtttgtttttaatagttgggaaataaatggtaagttttagtttttataacatgggtatttaatttttgaaatttaagtttgattggtgaccatttgccattgttgaatttagatctcagaattcatagtttcattccatctcgatatggttctggtcgctttgatctcttcgaaatccaataattatttatggtgacagcgaaaaaaagggacagagccagcaatatcattatacatattacaaactgaaacatataataacatggatatattcctaagctttttattctccacaaatgatgaaaacatataataatatcacacatacatcaccttgatata

SEQ ID NO: 39853 - DNA, 477 bp, Arabidopsis thaliana columbia
tgagacacgttctgtgctttaaattggactgtccaaattcatttcctaaatgatgggtcttaaagtctttaatgttgggccctattagttagttggaccaaccaacgcgttcattaaactttgacattaagacatatgtttactattctctcaatttcataatataagcatgcaggaattttacagtgagttagacccactaagagtgatgtaaagaaaatactaatcaaagatattcgtttagtttaagaaaagttgagatttctgtaactacttaagaagatcatgtacaaagataaaagcgtttgtaatagcctattgaccactaaccagccgactaaaatctcaatgtaaagactctaagcatttggcatatccacatagcaaatcgtcacccatcagagtaccataactgctggttatacatatgatatgcgagaattcgagaaactctaaagtttagtagatgacagagat

SEQ ID NO: 39854 - DNA, 569 bp, Arabidopsis thaliana columbia
tttgcggtttttcgtgactgcaattcaatgttcacatttcgtgtggtcctgtgatgcatgacatgtttgttttttaggtggatttgtgtttgtcttccctgatatgtaattatcatttagtggtttcacttctttggttttatatcacttgattagctgccaaaaacaaacccaaataaacatcacatcgttactcgttaaaacaaagatattaacttatagtactaataatatatacaaatttcttaaacatgaaatacaaatttaaacaagctaagtgaagctgccggagtttttatggtttcaattgttgccacgcatataaagaaatgccgtctcgtcgaccacaataaagactaataacgttttccacccgtttaatacacgtgtcaacctataattggcaattcttcgctatctatcaccgccatcaaattcacctaccctcttcccttccatataataagtaacaatcaccgatctaacataaaaacgcttcaacgtgtcaaaacattacattccactctcacattcagacgcccaatcctctgttttggattttgaagaga

SEQ ID NO: 39855 - DNA, 504 bp, Arabidopsis thaliana columbia
gctattgattcagtttcagggagttgttttctgatttttttttttccggagatttggtttctgtaaaccatgtagtactcacattggtatgtagcacagattctagtcttagagtagaagaatgtatatattcctctgttttgaatttttcatattagctaagaaactagttggttgattctctgaaactactgaaccattcctgttgaatttgcttgtagcatgatatgttttaacatctgtcaccattacaataaactagggaagattacagatcatgggaggatatgtatgtttagctttttagcttggtataactttagtatcatgaatcgggtaaaattgctaaaagatgattgtagattttactttaaaagttcagaaaactatattagtgttatagattaacaattcaaagttcaagctaagaagctcacattcaatcaaatcatgaatttacatgttgctgtcttatccttgtaaggacaatacttgggttttgag

SEQ ID NO: 39856 - DNA, 515 bp, Arabidopsis thaliana columbia
ctagtaacggactacacaaatttagaaaaggtagcagtgtcgtgataacgtttaccttattaatccaaaacctaattcaatgaaacgatactaaaatgttaatacaagttcgcccaaaaatgtaagagaaggaaacatccttaaagagacacacttcatctttcttacttatctagcaagttatctatttatatgtatatatattacattcctgccacatcccccaaagggatataagctattttacaaattgtaccagactacaaaaaaaagacggagaggtagaagacagtaatcagtcacagagtaatatatgtatagtcaaagaatcaccagccagatcaagccactgaactaatcgaagagtctggaatctcatttcttccttttcgcgaccttacacacagcataagttagcatctacgacgattcttctgcttcaattggcacttaagctgagaaactcttcaagtcactcaagttattcatcatcatcactccacgacttgcgactg

SEQ ID NO: 39857 - DNA, 387 bp, Arabidopsis thaliana columbia
tatatgtatagtgctggattgtgtgaattttttttactctaaagcgtgcacgaaaatcacatatgatgatagtgcaaaataaaccgtctcaccgtacgacaccgcacactcttgtttttgtaatcaccaccaatcacatttcacaccttcgagatcttatgacattacaatggtcataatggatgtgcctatataaatcggccgcattctagtatcttactttatagtatatatattgatactatcagaatgacggttctatctactaacgtgttgtatacaagtccatgtataaacgtgtgtacatatcgagttatagatcatacattgttttagcatagatacttaatttttcttgtctatcgtccttatggagtatgacaaagg

SEQ ID NO: 39858 - DNA, 491 bp, Arabidopsis thaliana columbia
actacattaatttaaaattatttattaactttatgtaatatcaattaaaaataatattcatatatagtttaagcttatgcataatggagcttatatatagataattttatttttcatgatatataaacaatttaaacattaaattaacaagcctgattctaaacaattttagcataaaaaccaacttttatttattataaatacaagtcttagtttagactttagagactccagtagaggtgccttaaaaaaaacatacatttcatattttcattaacagtttgggccaaacaggcctaagtcatcataaaataggcccaaaatgaaattaaacaaaaacgcatcgtcttgtcttaagctgcttccgaccaaactaaggtttctctctcctccaacttggaacttcccgtcttcgatcttctcttctctctctcttcatcgcacgctgtgccagccagctcaaaacactgcacttccgctttttatcaaga

SEQ ID NO: 39859 - DNA, 468 bp, Arabidopsis thaliana columbia
ttcctttcaacagtttattggtcagttatcacaaatcttctcgcactaatttactgatagtaggattttatgagtgagtacaattgataaacatataatttagatttgatgtttgcatttttttgaaagaaatgctaaatgaaacagtttataaatttaaaataaaaataaaaataaacattacgtaaagttattattaaatttgttcatctatttgcattttgtttcctaattcactcagggtttgaatgattgcgacggttggggcggacaaaaccgtcaacggaccagaccacttttatttaccattcatcaattatactccgtagtggtctgaaccaaaaaaaatagaagaaaacgtaaccgcatcggaccatctgcggactgtttttatatacaaataaatttggtccgcatcagtttattgtcacccaaaaatgagaccggctagacagcagacaaattaga

SEQ ID NO: 39860 - DNA, 184 bp, Arabidopsis thaliana columbia
catttttagattttaagatttgataattttaactagaatcgatagatctgattaaactcagcgtccccatgacgcacaccacatgcgagcgctactctggattctcggccacatatgagggccgggcaagagcgatcggtaatatgttacgcatcgagtgcagtaccgcatgtcgataggctca

SEQ ID NO: 39861 - DNA, 503 bp, Arabidopsis thaliana columbia
tggttaaattttctgaaagaattttacagttaaacgtatttatgttggagcaatttcaagatatgttgcattctaaaaagtgaatgtcgaaattatacaatcacaaaaaaagtatgtggtaatttgtagaatggataaacaagtccttaaaattttggggacgtagcataccgaattaccgaccttcggataaggatgaactcataaaccagagaaaacttggggactactaagaggggaaaaaatctgttaataaattaaattgcatgatggttaaagtaaggaggaaaaaaaaaatgcagcatgattataaatccagttttcactgtatttccaagaaacggttatattataaagtgtaataagtcgtctaccagaacaatgtttatagtgttttatgatattgcattaatggcatagagctttgttttggttggtccatattcttgccacttttcaaatattccattaatcatcttacaggttagtgccaaataatgttt

SEQ ID NO: 39862 - DNA, 141 bp, Arabidopsis thaliana columbia
gatgggcgagtgacatcggttgctgtttatgcctaatatacttgcagacgggactgaattggcttacgatgtgaaaacgcaggttcgttattgcagacaaataactcggactacttatttccgtgaaatgtgaatcgaact

SEQ ID NO: 39863 - DNA, 367 bp, Arabidopsis thaliana columbia
cataaacaaagtgaagaacgaacaaatgaagtcttatgagtttttcgtatagtttccgttttttgttgttctttcattttcttgttctttcgggtattttgatgtattttgattgttcaaggtttgatatgtagaaatacaaaaaatgatgtcccaaacaaacaaaatgaacatgcaaaattatgtagatgcttcaaaaagatcattaagaatagaagcccccaacctaaacaagatgggtttcaattttttcaagtagagcaagaagctccaaggctggtgcaaaatatgccattgtacaaatatgtatataaagcgtatttaaagcagaataatgcacgtacctattacgttagccgcgggaatt

SEQ ID NO: 39864 - DNA, 485 bp, Arabidopsis thaliana columbia
caatgttgcgccaaacagaagatggttcaaccactataatcaaaccatttttcaaatgatttcgttttttttgtttattttttggcttttgtggattacaaaccaaaacaataatttaaattatgatgatctctactttagtctatataaatacaatgaccatgaaaaaaatacactatgggtttggctgttttcgttccaaatgttggcatgacctccaccgataatctgttgttgattaggtatttttaagtctgtcaatcgtgaatcgacatctgattgtcatcaaactcttattctataagatgcaaaagtagtaaagcataatcatttattttacataaacacattgtttattacttttgtacatgttgcaaaccgtcgcacggcgccgaaattcgttccctatctccttcacttcaaaagtcactgaagacatcaaaaagcaatattgtcgacatttaccacaactcttttaaaaacgt

SEQ ID NO: 39865 - DNA, 652 bp, Arabidopsis thaliana columbia
  unsure (1)..(652): unsure at all n locations
agatttattatagcctcaattttctgagctaccagagaagtgagtaaaagtcaacgatacaaggtttggattttgacttttaagctttattatccctcctaatcaagacaaaagatgtgaaccagatttactttaccgacgtgttgttgtactttcaactgaaaatctaaactacagttctgaaaaagagatacgtaaatgtacacgtgtctatccacgtgtcaactcctactaaaaaccctaaacccttccctctctttatattagccgtcctaaactctttatcagtcccagtacactgcgatcaaaaatggcttcagcttcatcatcggcggcgagatcactcatccgcgacggaaaatcgttgacgaatctattcctccgtggacgtaagatcaatctcaccgagacagtacagaacaatggaccggccattcgatctctgctttgttttaccagatgccggcgcgtagcaataccctgtttactctgaaacttttccggttatgaaatccggtttacgtgtcggcttcgttcagaaggaggccgtttcggagagagtagggaaaatggaggcggctcatgganagcgagtggtggacacaatgatgctgattcagaggaggcnctgattttgatgaagcgagatgat

SEQ ID NO: 39866 - DNA, 593 bp, Arabidopsis thaliana
atcctagtatagttcagattgaacggctgagattggatttcgagagttgtaccgttctatagctggttcgaagcttcactgctgctaaaacctctctctcctctaagaaacacgaaaatctctgaaagtctttttgtttgaagaagatgacgcatgttgaagatgataaggaattcaaggagaaacctttggttcaggttctgagcgacgacgacagtgaagtgaaggaagccaaagacggaggaggtgaagaagttaccggcggcgacggtgaaggagaggctaatgtagaagaggaagacgacgaagcagaaaatgaagacgatgatgatgatgatgatgatgatgatgacgacgacgaggacgaggacgatgaagaaggggtatgaatctctttagtttttatttatttattttgatttgagctgtaaatccttaagagaagattatagatctagggttttatgcatctctttagctacgaatttcgtagaacatgtgtgttttgttcattttacattcaaactgtgcaggaggaggatcttgggacagagtactagtgaggccggttggtgaggttgaagatgaggatg

SEQ ID NO: 39867 - DNA, 631 bp, Arabidopsis thaliana columbia
tgatggaataattccaaatcataactagttatcaccataaacaaattttgcttgctaaatctaaaccataaagataattagaaggaatccccaatcaaaaactaaaccctaaagataattgaaagggaacccaagtaaaaaaaaaaaaacacgcacattaataaatctatctccaaacatgaaattcatcttctatatgtgaggtacagtgatcttcggcggaggtgtataattgaaattttggttttgaaattttggatcttggtttttcgatagatgaaagagatttaacaaggaagcttatcaaaattgaaaaattcaatcaaaatcacacaacaagcacatagagaaactcaaaatcaaaaattaaaacctcaaaatcggaaatcaaaattggaaatcaaaattggaaatcaaaaatcaaaaactaatcgtcggattaagacaccacaataataagccgatgtaatggcgcaggcattgacaattcgttttgggaattgaattcaagaaccaatgataatggttcttgtgtcttgctgggaatttagttttggaagataacgaaaatgcagcttcaatttagaattcagtgataaaggggcaaaatagtcatttctgagaataaaga

SEQ ID NO: 39868 - DNA, 535 bp, Arabidopsis thaliana columbia
ctaccatttgagatgaataagttagaaaagtcatttaacccattcaaccaaaaaagttagaaaataaactaattacaaagaaaatttgttcaacttatttatctactattttgtagagaaatgagctgaataatgtacaattcttttgttcaattcaaaattttccagtcattcatctacatgcaacatttgcagccgaagatttcatgttttgtgaaaaactcacaacaccagtttgcttggcatgatcggtgagcttttcttaagcagttttgttgtattattccatgattgtagcaatcagtatccaatcatagtacttcttttcaattgttcgaaatctttgagcatggtttagagaggtcggtcacggatgagttatgtgttcggccatccaattacatctgttttggctgagctattggatccaagaacatcgaggtgtgacgttgataactttggctgcatctaatgatacctatattatcaaatcaacgatttgataaatcatttggatgaaaatgcttcgagagaa

SEQ ID NO: 39869 - DNA, 494 bp, Arabidopsis thaliana columbia
ttccctttcttccgctttggtccacctccacggcggtaataagaagagcttacggcttgcgtcgtgtccatatcgtcctcttcgttcctactttcctcaagcgacttcttaattgctgatctctaccgtcggactcctccagatcctgcaagttctgcgtttcttcgtcttgtgttgattctaaatttaaggctttttcagcgacattctccacggaaagacttccttgctctactacgctcggcttctcgattacactagggttctgcgacagagtttctgcatctcgatcggtgggatctgacggcggagaagaagccatggatgatcttcgcctcggaaaagctatactggagagaattagacggtcgcgagaccaaaagcccttctgcaacggcatcttacgatcacgaagaggcacgtcaataatccgagcacttatctttcattggccagtgccgcaaggccatacactcatttaccagtatttcatg

SEQ ID NO: 39870 - DNA, 532 bp, Arabidopsis thaliana columbia
aatctattgtcatatgttatattgttttattcataaaatctaaaatcattcctaaaatcacggcatacttattaacagtggcaaagctagaactttctgttatggggtctaaaatatatttttttaatataaaatcatacattaaaaaaaaatatttttatttttgtgttttgtaaaaattaaaataatattaggttaatatttttttatttaaggtaaattatgggtctaaacttttagtaaaaatacaactttcaaatatttgtactattttttctttcatattgcaacaataattttgtactggggtcaaaatttatcctaagttggggtcattaaaattattgctaatgacagataatgaatttttgaaaatttatgagggtcaactgacctccttgtcaaacctctgcatcggccactgcttattatccgggcatacttattttttttggttatagtaagtgatgttaaatatttctgtcaaaaataaaataatatatatatgtatttgtcaattgtaaataaccaa

SEQ ID NO: 39871 - DNA, 428 bp, Arabidopsis thaliana columbia
tcagaacaaatcatgggcataatcttcaacagccacgtgtgaaacctacaagaattggaatgtagccgttgatccacgggcgttgctacatacgtttaaaactcataaggtgtttaggactaacctggcgtctcacttcctctgaaatatcagcatcgataaaaaccgaatagcctgacaaggccaagtccttgcttcctgtgacctctattccttgaactcctcctcctctatgtagtttttctaccgcgtaaaccgactttaatccatcttcattcaccttagtctcttcgggatttttgaccgcgtagaaagactcactcagcttaactacaacaaaatcacatctagtatgagaaataatcaacaaagaatgtgcaaactcggttaaagacatacacaccatttctacagacactgtccacaaa

SEQ ID NO: 39872 - DNA, 418 bp, Arabidopsis thaliana columbia
cgatccccagtccagtcgtgatactctatgccacaatacaatcaggcatttgttctgtgctcgtaagatcaacagcgacaaaactcttacatgtcactggtcagaatattgcactattaacagctcagaactatagatgcaaatgttctcacaaatctgtaagcattcttccatatcatatatccctctaagctactatgaaaccctctatcattagcatcttttctaactgcagctgtctatgaacaggacgatcccacaaaaccagattccgactaacctgagatacagatgtctccgcactcttgggagctgctgataaagtagctgcagctgatgaacgctgcgtcatggacacgagaacaatctgcggatgcagaaccaataccaaatccagcaccaaacgcaatcgacgccc

SEQ ID NO: 39873 - DNA, 475 bp, Arabidopsis thaliana columbia
ttaattttgtaaatggacaccttatattaaataaaagttaatttttgtcattatacgaaggtgagaaaatcgccggagaaagtggataaagtcctctccttttgtttatccaaccaccgtcaatttaaccctctccggcaacataaaaaacaaccggaacttacaaaagagagttagttgtatagaaagagagacaacagaagaaggttggttcggtcctctctctctctctttccccgagtatggtgagagtactagttagcagtaatggagagagcaagagactttagaaccctctttctctttctctctcttttctattttttcttctgtcaatttaaaaacccatcagttacgccaatttctaaagagagagttttcttttagcgaatctgtaatgaatgttgaagaagcaacaaaaggggtttgggagcactaatggcggctttagcttaggtgagaaagtctttacaag

SEQ ID NO: 39874 - DNA, 450 bp, Arabidopsis thaliana columbia
cgaggtaagaccgaaactgacagtacacaacttcaatttatcaagaaagaggtgagaagaagtttgttttcataccttctcatgtattacaatttatgatccttatatttatgcgataaaatgtatataggttaaggacacaacaacggaaactatgacgaaaggatgtggaaatttcacaagatcaaagagcaggactagtttcatattcaagaaaattgcagccatgggatgttcatacagagggcttttcagagtcggtgtggtagcggttgtgtgtgtgatgtcggtctgcagtctagtcgcataaatccgctgaatgtgatgtttgttccgatcaattcatatagtaagaataaagaaagtggtttttacgggtggagagagcgcggatttgtgtgtatacaggggttttggccctggtctgcatctgttgtattgctgttgttt

SEQ ID NO: 39875 - DNA, 530 bp, Arabidopsis thaliana columbia
tgaaacaagattatctcaaatgcgagactcgtgatatgtgagacgtcggtgtgaagacgagaatctgaggaaattaggagcattgggcttggattacgctccaatgcccttgaatgcatagccttccccaattcaatatcgggaaaacctttgcggtttgcattggatctcttcttggtcttcgtaggcggttgtgagatatgaacctcaacaccgaatcttcgaagcatatcgatgactcctccattaagtgcattggattggacgaagagatcgaaatccaagataccccaagacaagtaagatcccaaaaacctaataaattagagaaagtaccagatttataaactggagaaactttagaactaaaatagaaatattgacaaaaattaaggattgattaattatcgggactaggagatcggcacgcctaggaataggttgagaactcttcgacgaggaggactcggcggtggctgcagcatagagatcctacgtgcgcgtttggatccagaagtaacatgtccaag

SEQ ID NO: 39876 - DNA, 1228 bp, Arabidopsis thaliana columbia
ccccattatctcctttatgtgattcttctgttaaagttccggtttatgtatctgatccgaatatctcctttatgtgagtcaaacatatgtgtatgagtgagtttatgtatctgattatttaattttatggcttccttaattgaatgatttaagattaatagtatgtctctaactatttggccaccatactcacattcggaacaacataaatgataaagaagctagcgaatgggtccgactccttttaagtgctacaaaaagcgacacgacgtccttagtttcatgcatccatccacacgaaaatgtaaagtgagaagaaaactcaaaaactaataagaaatgttaaaattaataagaaaaaacaagggccatgtcgaatcattaccctatctctcggtactccgatcacgtgccaactttgggttctataatgcttttattattcatatttaatgtatttttttctttaatttcttttattatctgtcttcgaccgtatttagtccaaaccatgtgaagatttccggtctactgtttttatcattatgaaaaagaaaaggaaaaaagctatggtcctctctaattagagttgattaaaaatttgaataagaaataattaatttatttcactctctccagcttgttctttgtggtttggcttatactgaaaaattgaattcccaaatgtttggtcctattgagtaaatatcatccatttatctaaaatgataatcatttcaaacctaaacacaacaagaaggattttaaaacaatagacctgaactcaatcttactaattcattggttaagttgtcacgacatgtatatgttgataacaaaaggattggttacaatatgggtgcaaattgtggttgtggcttaatgtttttaaaattcacaaattttcaaatattgtctaaaagtatcccacttgtcataaattaccatccaagatccttccaatctctacatgcatatatgtccaataaaatctagctagagtacgagaaaaatatccaaaacttttgaatttgacaaaaagtcttatctttccaaaggaaaataaaagtttgtattatttatttccaccagaaaaaaatctactaaaaaaaaaagaagagactacgaaaacaatacatgcaaaatacacaagagacatgcgtgtctgagtgattgtgtttttgggaaagccaataataccttttccgtttagtgtgcacatgtgtgt

SEQ ID NO: 39877 - DNA, 510 bp, Arabidopsis thaliana columbia
tgaaataatcaagtttcgttgatttgatcatttttgggcatgttgttaagtttccgttaacaaagttaaatttccattaaaagtctctgttaaatcgaaacgacgtagttttgaaagctttatgcaagattgtgctttgtcttaacaaataatatatataaagaagtttaatgatttagcattttgggtatgttaacaggtttatctcctacggccggagcaggagcacccgcgttgtccagtggtgcaaatgcggcaactccagtttcgtccccgaggagttccgatgcgtccttgctctctgtatcttttgcatttgtcatcttcatggcactcatttcttctttctattgagtcttaaaatttaattgcttcttgttgagttatttttgtttgctatgtagctgaagagtttggtgttactgatcatatttacctttcatgtgtcaattttaatgagaaatctccttttagttaacctgaatccattctcacacattctcacatttg

SEQ ID NO: 39878 - DNA, 703 bp, Arabidopsis thaliana columbia
tattcaccagtgtttgaacatttgcagaattgtgcagagaaaggactaaaggagaatgaacaacattttattggacaaggaaactctattttcacgatttcgcaggtatgtctttttataatattacttatttcataatattttgatatagatgattactcaaacaaaagaggtgaaaactcttgtaaattttcagtatttaacctgcaaaacagatactacttttttacttgatttatcaaaccaaagttaagacttacaaaagcaccggtgacaatccgacattgttgccatgcaaagactcaaaccaatttgaccgtcgacgcttttttagtatttcaaaaatatttttatcaattcatgaattatgattattgccaaacatcgattcagtggagactaggtttatgaattatgaccgtagaacatatgaaaactgtgtaaaactattgtataatttatgtattaaattttgtattaatcaactgatatgcggtcggaccggatccaaccggcgatcgaaacataccatttatattttttctttttctattttactagaaataaaataaatagaaacctccgttgcttttttggcaaacactgtgagagagttgaccaaaatcgacccagtgggaggactaggtttatcgaaagctccagttttcatagataaatccagtaaaattatacacgcaaattc

SEQ ID NO: 39879 - DNA, 593 bp, Arabidopsis thaliana columbia
gagaggaattaagaaagagggagacagaaagagacaagaaacttcatcttagttagtagatgaaacccaaattcaacattacagtaattgaaagagcgataacagtgactcctagggacaatctaatcaacacaaacaagtgggagtgggcaatataaatgtttcgctatatctaccaaaaaaaaaacccactgtggaaagtaacgacctttataattattcccccatggatatgcaaaagaagatttttttataaatgaattacagaagaaaatttaccagactctagtcgatttgcttcgtgtgaaaaaaaagaagcaaaaaggagaattcttttatatctgaattagaatcgactcggccttttgaattgtttgatgcttagccaaaaagaaaaaagtgtggggttgcgaaaaaaggtgtcttatacttccatggcggatgaaagagagagtatgcgtctacacgtttcagataataataaattttaggtctttaattttcgtaaattcttatgtttcaaactttgatttgttcttgctattcaaattcttaaccttaaccgacaaaagaggaaactttgcctcttacat

SEQ ID NO: 39880 - DNA, 709 bp, Arabidopsis thaliana columbia
aacacttaggattgtcatttggttcttaaaaccatgggcctgccaggtccaattaagtatggacaagcccaaaatgaaaggatttaatttggcccaaaaaccatttgggtccaacaacaattaaaggctagggtttcagtatatggggaaaattttggaaactccaaaaccaaaatcgtcgctctctgcctctctcgcatctccaaatcgaaatcgctctctgcctctcttcgtctccgtctccatctttgtctccggtgagtattgataaatccgatctctgacaacattagatttcgattgtaagttctttaggtctgtagattttgagtaatgggtttgacaacattagatttatattgcccactcccacttgtttgtgttgattagattgtccctagaagtcactgtttttgctctacttatcgctctttcaattactgtaatgttgaatttgggtttcatctactaactaagatgaaatcaatttgagaagactagtggataatagtgaacacgtttacatgacttttgacttgatagtttgctatacttgttgtatctgtgtgaattgttataggttgcgtgagtttgatgttcaagggtcaaatttgataatgtagcttgcgtatctgattaattaagattctaatgcagttgagtttttggtctgaagattaggcattgtatagaatacaacttgtgaaga

SEQ ID NO: 39881 - DNA, 308 bp, Arabidopsis thaliana columbia
gattctataaatcatgaatattttgaaggcaaacactaattgaactgagtacttgattgacagtttcaacaaaatatgaaaagcataacaacctgcagtaacttaaaaccacattgtgtttcattgttaagatgtgtatgtttcacgcaatctaagaagtttgctacatagattaaagagttatagctagaagattaagcaaagagaattgtcaaatatcgaaataaatcacccaagactgtacaagttccattccctgatgagagagcattttagaggatagtgaatctctacgacttgttcaatgg

SEQ ID NO: 39882 - DNA, 529 bp, Arabidopsis thaliana columbia
ttaattatatgtattgagagttcttacataatatctaggttgcaatattataatcaactaattctataaaaatactttagatttttttttatgtttaaagaggtggaaaatggttttagagaatttgtagactttttaaggagccggagatgttgatattttagagaaaactctagaatttggattattgtcccaataattaaacttgatgtaaaagaaagtttaaatttagacaactaatctgttcgtttgttcgcctcttgcagttgcggcaaacgttaccgcaggttcgttgttcgtttcattattctaaatttagtaacatggtttttgtggctacgtttagttttacaaaattcggaagaaattggaaatatgtatccgttggttacaacttcaaaaatatacatcctctatatactaataatgaacaaatttcatccactcataccattcatgcacaaatttcaggtcgatgtccagatttccaaatggcataaaaaggaagagaaaggaagccatacgagga

SEQ ID NO: 39883 - DNA, 547 bp, Arabidopsis thaliana columbia
cccgtgatcttatttgtttgtgtttaagttttataaattcatttttttttgtttgaatgataaaaagacagacaggaaagatctcatgacaacgacagttaaccgacctggtccctctaaaataaagtctgacacagactctcaaactttgtcaaatccaattcttattattattggtaatgagactttttcttcacattctccagatatgtatattcccgagaaaatgagggaaagtatcttctaatcgggaaaaacatctccacgttccttgcccgtctcgtaggttacgcatcagcagctgggttttgtctggcaaaactataaccaaaagcttcctttcttataaattgccttacgttttaaggtgttctcttctcacttcttccccatgattcatcttgactccacaaattcagggcaatctttgattctctttggtctttgatttgaggattaatttgttttctaaaggtgtctgctgattcaattgagtatggagaagaaacgagatgtttctgagtacagagagagacttaatgagacc

SEQ ID NO: 39884 - DNA, 552 bp, Arabidopsis thaliana columbia
aaattggaagctaaggaaccgaaagagcatccctctcattggcccgatgacttcacccgcctcagttttgcgctcccctttttttttttggtaaatagttttttctccaacaatttgactatgcttgtttgtttcattggtatgaaatgtaaaaaggcaatgggaaaattcttttacgatttttatttcctttttctattttgtagatctccccaattacatgtaacaaatttgctattgttttgtaaacagcgagagtaaacggtagacttttatacggtacgttctataatagtacgatccttgtgtatcagtgcatgaatcaagacgtttcaaattttttatgaaaatgaatagccttcaaaatatccctagtaataaactgctagttatgaccatttttcttgtctcactttatttttattccaatataacccttgttttgttttccttttgaacatcaattcaaatggagaagctagtgaacctacttaccatttgatacttggataagagtcacagtgaacaattcgatacgacattatgaaaatt

SEQ ID NO: 39885 - DNA, 476 bp, Arabidopsis thaliana columbia
gatattttattttgttgcttctcgcattttatcttaaattaaacatgagttggagaatgcaaatattccattttttagaaagatttgtatcattcccacgtatgtcatcgagctcatacatctcttttgcaaaaccccacgaaacttcacttattattgaataacattttacattcttaactatcattctacatggtctagtggtttcgttagatgtacaatatttttattacagcggaattcacattaaacatactctacgaagtaatatagatttcagcttccaatctcccacctacaaaaatagaacttacagactccacaaattatgttcaatcatcgttttccacattgatatttaagtataaaaattttattaaaaaaattgtaaactccttaagagacacatgaaagctaaaactgcctttatcgctagaggactaatttatgttcaatgtctacgataacgcgaaaag

SEQ ID NO: 39886 - DNA, 550 bp, Arabidopsis thaliana columbia
ctaactccagtgactttccggcctaatcgagatggtgttgagcagaacgagacggtggtattcgagggcagtgatcggatagtcttaaaagcgttgatcatttctctgcttttggaggtttcttgaagcttaaatttatagagtaagtagtttttattcttacgaggagatgataagttttaaattaaaaccctttagtaaggtagagttaacgaagttaaatacgtcaggtttaagcttaattaagctttcctgtcttccgacataatagtacgacggtgtcctgatcagagtttgcctcgtggtgctctggtgacaggtggcgggacttaacaaggatttgaatacgtgtttgtcaggactgtgacatgtgttgagcgctgcaacgggttcagatttctatgataaatcctcttttagcaacttgggccaccaaaaaatctaaatggcccaagtaagttgggctagaacaagtcggtaaagacatcgagaaaagagggtgggaccacgtgaccgttaaaagaagacggatggaggaagtgggagtgat

SEQ ID NO: 39887 - DNA, 541 bp, Arabidopsis thaliana columbia
tatatgcttcgatgttttgaccatgtatggttttgtatcccgtttagaccaccaccgagaggacttccgggggttattgatcaaacaagaggtcttctctattatgtcgaagagaattgtgcaaaagctgtttacactcctgagctgaaatatgtctgtatcgccgggaggtaatgcttcttctagaaaccatatatgtgtggaacctctgtccaatctgaatttagtacttcatgtgtagatacattcgtggagctcgtttggttgacaatgcagatgcagatattgattctgatgtaactgttggaatcgacagtggagaagggatttcagaacttgctatagcaagcaacaagaagagtggtactttccgtgctcgttttgtagggcaaggatacaagcaagtatgtggaagagctgatgtgtggggtgatggagtagttcctgaggtttcagctcatcttgaaggtgcacttaatgttagcttcgacggtgtttccattcacctgttggttcagccgatgaaaccagaccttggtat

SEQ ID NO: 39888 - DNA, 509 bp, Arabidopsis thaliana columbia
tcccctgatcagaaagcaataggcaataggtggatcatggatggtttacttaaacacataaaaatggagtttttgttgttgttgccttggagtcaatttagacaaaaaatataataatggatgttttgatgggctataagaaagaagggtaaatagtaaaagttagttacaacgacagtccaattaggtattgaaacagtaaaatatggaaaaaagaatagaaaaggcgatggatgtgtttattagacttgtgtcccactctccttatatatatgaatctcacattttcgagctgtatttttgatatatattgaatatgtacatttgtgtgtcaatgtaattgcttgaaaatgacaagttctagatttggaacactctgtgctggctatctaaggaaagaatatctgtttatttttaatgctttacttcttccttcccatcaatgattccttcaatataacaaagttctaaagcaatgcctatctctttaattggagatttctaattgt

SEQ ID NO: 39889 - DNA, 497 bp, Arabidopsis thaliana columbia
ccgatgccttgtatttctgcttgaacctcttttttttatatacaagtgaagcactctgtttcctgatagctagccgcgttaaaaaggtactgcagatgaatctatttcacacatgttattcgatctggtttgtagaacgaattgttttatgtatggctactgtgtagtatcttcgagaaatcttatgatgttttgaatgtgcgtttgcaaacgaagcttgaatagtaaactccaagtactgagatgaaatgtcatgaaaggcatgaagttaaacacataggcagcctaactagaatattagaaatgttgcattcgacattttaataaaaccaagttatccattaacttctctactatataagatatctttgaaattgttctctgttctttcatcttttcattctcttatttttctcggttctcttttctttctttcatacaaacatatcatatgtaacaagttattctataagttaaatcatataaaaaggtttgag

SEQ ID NO: 39890 - DNA, 619 bp, Arabidopsis thaliana columbia
tgtgctctaaagaaaattcaacaagaagatcaggacttcggtatacgatattcttggtgcattgatcaaacatgttggcccgtctatgaacaagaagaacgtggcctctttgactgacatgattcgaacctgttgctttgacattctgcctcaagtcggagaatatggcacaaaagacacctcaccagctgcaaatggaaagtctaaggcgaactcagctgctgtcaatgcagacttcttcttgaaccccagcctcaagcaaggtcgcggaacgaacgcgacgactagaccaccaaggctcgttcgaaccgcctccaagctccttcaaattgttctcagccacatcgcactggaattcctcgcgcccccaatccgcgcagagatcgaccgcaccatcataatgacctccgacaaggacgccatgtacgccagcgttctcaacccccacccagccgtgaaaggacgcggacgaactattagcatcattcctttcctagccaggagctacgcatctgacatgaacatggaagcactcattcgaccccggctgcctgttttggcgccttcaagttataccggccactacgtcaatattgaggaagacgatgacgaagaaatg

SEQ ID NO: 39891 - DNA, 388 bp, Arabidopsis thaliana columbia
  unsure (1)..(388): unsure at all n locations
ctctctctctctctctctctctctctctatctctctcactcgctctctctatctctctctatgtaagagtctttagttggtcatggttcgcaaaaaacaagctagctcctcataattatgggatgggtgcaatcacgtgtttcttcattcaggtatgagagatggtatgcagattttccatcacttaggagttcgggtatacagattttgtcgaatttgagatgtctatatgagagaatttctcggatcgtagtgagatcatggatagagaggagagatcaatgatttatncggcagtgattgactgtagattgagatatatttggcgatctaaatcttaggatagacatacatctgagacacaggcggctaagaaacgacttctgct

SEQ ID NO: 39892 - DNA, 591 bp, Arabidopsis thaliana columbia
  unsure (1)..(591): unsure at all n locations
tttgtgttgataacagcttatttgctaacttaatgataaataaagactacaatatatgagagagttataacccttttaatatttgaatttcaacagttaataatatcatttattaatttgattatgttcctcctattagcaaatatgcagaaagaaaacccgacatttatataaagccacaactactaaaacttgttagatgatctaattattgactcgacctccacaagactaaatttagagttgaagtttttggatatatatgtatacatatagagactagagagagtacatattaaaattcaaaaatgatatatttgtatatagaagattccaacctgaagatgaggatgcaagttggtggaagtgttgtgggatagaaattcagacagattttgtgatgtgagttaagtcttgttgtttaaaatattaagaaaaggtttccttagcgtgatctctctcgaactaaacagcaagaagttacaatgctaccaaaggacgcaatgagctaggtcaactcaagctcctccaggatgaaactgaaagtgtacagagcanagcctctcttgggatttgagcttagtaggtgaa

SEQ ID NO: 39893 - DNA, 461 bp, Arabidopsis thaliana columbia
ccattcattatgaagcgataactcttttttaatctgaagcccccttaaccaaaaaagggcagattcagttgagatttccttttcttaattaaatacgattgatttcctttgacaatttcttttctttctcggtttttctcctttcccagttaatatactgtctgtcgcagtatattttttcatatatgtttctactagctactgatttaatttttccaatggataacttattcgtttattcacaatataccataaatgagaggtgtttctgaagttgtgtcgataactcacaatttttgtttacgtccattataatacataaatggagaagtccctttccgacgatcaagagtcaagtttgactccagcagatgcataatatgcacaatagacaaaatcgatcgtatatttaaattaaaaacaaaaatgaatacgacgaatctcatgattggcccttatgc

SEQ ID NO: 39894 - DNA, 567 bp, Arabidopsis thaliana columbia
  unsure (1)..(567): unsure at all n locations
caagtcatatgatgcaatatttaatcacgactattaaagtatgatgaaccgaatgctgataaatatgaggtaacttactcgacgtgggagagaataggaaacggtgagatcggagatggacgacggcaaagttttgtgttaacttggttggctaggngcttctgataaccgtgtttgtagaacaattaagtttaaggattgttcttatatattattcatgagtaagtaataaggagaaatatatgagatacaacttaaggtttagattagaacccaagtaatgtagaaacctctagaatatcctaatgggcccataatagacatccatataatacatattttgtgtgaataacttgagagttttaacttatgttttcgacgttgccggtgaaaaggtaattaagtagttgaattttcaagtcttctaaattccctatggtcgttaaaaggatgaagacaaacaaatataaatgtatggtataggtttccaaattcttacaaaaagacatttagatgatataaacaaatgtttatctttgttgatttacaaatgccacgtttattttg

SEQ ID NO: 39895 - DNA, 597 bp, Arabidopsis thaliana columbia
ggtatttcattgaacaaagattagattcaggcaacggtttggatacctggatccgcttcagtagctgtctcgtttgtggtctctgcagcaaggctaatagtaattggtttccatcctgtttgatgatgggtaatccatttctttgtggttgctgttatattcaagatctgtagtatgtcacctaaagtaaactcttttagacattcctttttcagaacttgtgcagcttcatacctatatattagatcaaaagaggacgaaaaggatgttataacattttcatgggtaaggaaggaactatagatccttaagtaaacaaacattctaacctgcacgtagttgccgtaaactccacacgcccagaagatgaggttagaaactgttgtattctatcccaagtttcttttgggtattgcttagcgtttgcccctaaagggtttacacagttccatagagcttcatttttgccaatgtagagctttagtttcctacatttgtcatcatgatcatatgatgctccaaagcactttccaaagccttctttacgtcagtaccgtgatgcttaggatctccatactgaatgcaatccgagatatt

SEQ ID NO: 39896 - DNA, 867 bp, Arabidopsis thaliana columbia
tcccacatttttaaaaggatccaaaattaaatacataattccgttcggatatgttattgatcctaaagtgggtttcatttccagatgaatgaatttgaagagttattatctcgagggggagaattaaaggaatcccacatcgataataagtcgataaactttagtgaatttgacatccaaaccgagataactctaatgatgtcatatcctaaaatttatgactttaagataaagtggaacatctaaaaatgatgtttactcaaattaagctttaatgaatcgttcataacggaaatccaagagattgcaaaacgattcatggtgatttaatctccatgattttacatggaacatgcagttttgcatgtagtaataattatatataaggccaacgattcataagaaatatttctctcatgttatttatacatgattagagatcaaatatttatcattttaaattttgtgggtgtgaaatatatattataaatgctcttcttcaccatataaaatattatccaaagaggatgaaatttatagatgttggagataagcagtggtggatttagaactttttttctatatggggcaatattaattatctataaataacaaaagtatataatataacatagctaaaaatgttacatttactaatttttcataaattttgtatggttttgaaaatttgtttataatattataagaatatttaaactacatgtataaatatttacttgcagacatatatagccattaagataagaaataaagaaactaaatttagagacataaatataaattagtgttaatggtggaatactgaaattatgaaaggcaacaaaatgttttgttgcgaggaaagac

SEQ ID NO: 39897 - DNA, 284 bp, Arabidopsis thaliana columbia
gggtaggagcacgacaattgaattagtgtgcttgctggtaattgtgatgtggtctaaattactagcatttgtattcttcttctctttggtttggacgtacaaatccagtgggataaccttctaatacacaaactaattaacgtgtacgtatactaagagttgtaatcgagagactcgcaacagtgaggctaggcactagaatggagagatactagaagggctagagtagtatctaatcccaaagaggagaatattaggtattcacgcatgaagactgagaaatt

SEQ ID NO: 39898 - DNA, 344 bp, Arabidopsis thaliana columbia
tccccgaggtaacataattttttttacggatataatgtgacgtttatctattctgttagaactaacaacgtcgtttattgtagagacaaaacaacgtcgttttgtctgttgaaacaaatttaaaccttaatccccaaatcgatttcattacctcaaaatcgatttcagaagtcattcaaattgagctggttgagatggagcagatggagctccctgcgaaatttgagatggttcaccttgtgatccgtgccatggttgtccattccctcacaagatagtcctcgaatcctgttttgagataatgaaatcgatttggaaatttagggtttaaaaatgtttcgaca

SEQ ID NO: 39899 - DNA, 533 bp, Arabidopsis thaliana columbia
gatcccctctgaaacttcatcagacttacatactctgttccatgaaacagagctttgttgtgttcatttgctataatacatatcgtttgccaaaaaaaaaaaagcttcataggtctactaaatacattttctttaaggtgctttgataagctaaatatgggactttgataacaatcacttgtttccaaagattaggctcatatcattcacacaactttactcttaaacattctttttagcaaatcatataggtattggactttgagctggatcgtggttataaatcaaccaaacaaaggttatagtatgtcccaaaatgtaaatcaaaatagataagaaaaaagaaaaatgaaaaaagaaaatgtgttataaaggagagaataagcccacacaggcacacaccacaccctgacagtagtgtccactatctgctttgatacaaagacacacagacaaaaaaaaaacagcttggagtccttttgtgtatggaccgttgtctgatgataataataataatactattaagagacttt

SEQ ID NO: 39900 - DNA, 272 bp, Arabidopsis thaliana columbia
aacgtttacagcgagaacctatttgatatatgaaaagcattcatataaacatatagatatacaactgaactttcattggatgtgtcaagtacctgtctgcctcatctgtccacgaaaatctttgtgaaggagttgatgtagtctttgaacttgcgtactggttgataatagacgagcactggccttcatctacagtaagatcccttatcactgaattatcttgtagattatgctccagatgctcttctaatgaatttagaaacttctcacta

SEQ ID NO: 39901 - DNA, 513 bp, Arabidopsis thaliana columbia
atccccaaaaaccaagtaggttttagcaaaatatcttattttacttgctgatacgaatatcatttgaacattatatgggggcaagaaaattcgaccgtgtgtgttatataaatgttaatgtaataatacagtcattatattaacaaaagataagattagcattgatgactcctctggcataaaacaaagatatgtgtataattgcttccagccaataaagtagtgtcgatatagatcgagtcgaaaagttacggttatagtatttctattttcgtttgattaaagatggaaaaagttttgtaattaacaaaaacgatagaagatactactcctacataattataaaactaaattgtaaagtagggatcatcagaaacatgttggggttaagtcacaggcgtaatgatttaagaataataatcaccatcattatcttgttatataattctcactttgttactttgtctcttgtcatttttggagtacatgttattttttgttggtacacttttg

SEQ ID NO: 39902 - DNA, 609 bp, Arabidopsis thaliana columbia
  unsure (1)..(609): unsure at all n locations
tcgaattttttttatcngncggcaaacttgtttatcttattgagagcaaggagtctccgaagtcctttgataagagcggtccatttgaatatgttggtatcgtcacagatcaattgaatatcaggatctgctactttctctcgctgtacctctttgtattctttaaacagtcgcgctcttgatgcctattacatcaatcaaatcaaatcaaatcataaacatacacagagaatttgcaacaaaacaaaaaaaaaattaagcaatttacctgcatctctaatttcccaaagagaacgaattgtcaactgcaaaaagatcaatctaaaatcaagaagaaataaaccctaatttcttgtaattcacagacgcaattatcagatcccgtaacaatctcaatgattaggtgaaaagtgttttatacaagaacagtgataattagggttaagcaatgactctgctttaagatctagaaagaaagacataggagggatgcgaaactataattgaacataaagaggacgaattcacgaagctttacctgcaaatatgagagcgagagagagagagagagagagagagagagagaatagcgatgattatgtgaagttt

SEQ ID NO: 39903 - DNA, 577 bp, Arabidopsis thaliana columbia
tcccttcatgaataatcttgttcatagtttttgtttatcgatgtaatcgatcaaatctgagttcttctgactttaaaactatttagaggataagtcacaaatctatctattaaaaatattcagctaatcgaatgagataatacaaaattctaagttggggttagttggtaaaggaaactgaagctaaagttgataatgcgcattagcgttggagtcttctcaccgttgaaaatagagaagaactatataataatcataatatattttttaagggaggagggtaaatatcatgtcagcatcttttctattaagacaatcaaatacgttacgaccactaatacaataatgtctccattactgatacaaagccaaaataagtttttgttttattacaacatcccatctctgcttgcccattatgcattcaaatacaattgcgtgtactaggacttctctcataatcgattattatctggagagatgaatatttgttacaagaacataaaaacctatctattacacttcatgataaattagggttttcaacttctcatggttcatttttgataaattggga

SEQ ID NO: 39904 - DNA, 782 bp, Arabidopsis thaliana columbia
caaccaactggccaaagttgtctataatgccaacctgaaagacaaggtacagaactttagcacaggaaaactagggatcgcggcaaaactggtaggaattatatgtacactcttttttattggcaacatccatatatatacacttaaaacacaaagttctctcatcagaagctcactggaagcatggcgtacacagggacataaaagctctctgtgaagtcattacattgctctgcggaatgaacatcttgtataagctgaaagaaaaacaaagtggttagatgaaacaacgtccagcttaaagtcaattctcctaataaggaaatgaatttatcattcacctgattggcttccaagcatccaacggaggtgataggactaacactagtataccttccattcccgggatgatcactctcggcaataccaatagaatcaagagacacaggagcaagtttctcatcgttcctaagaactgaatgctgctgagattcaattgcagccttagcacagttcttcaatgtactagaagaaagtggactctcaatagatctcgtcggaaactgtacctaatccaataatattaaacaatctatgttacattaataacagaacaaagcttataactttaagagcttcacacatatttgggatcaaatttatcatctttccactaaaccctaacttaaatagcttaatatgaaagtttgaattttgagagagagagtttcgaagtttgaaccacatgatttggttgctgtgattgccgataagtagtacca

SEQ ID NO: 39905 - DNA, 750 bp, Arabidopsis thaliana columbia
cgaccaacgagattagtggtctacgcatatatcttatatatgcatgacaaattgacataatatacaaatatgtgtgctttacttattatacataaaatagaaatatatctcgaaaacattggtctgatttacaatttgacatatacatacgtgtatacatgacacattgacataaactacatataggtattatattgcaccgaatgtggaaattaatcacgtcttattttattagctgggacatagaacaacgtggagtaggcaacgaacctaacattaataagtaaataaaatagttcttgtatgagtttttagttcgagatttatagacttatggcagcttaaatgtccaaaggtaaagaattgtaccccaaaaacatattaagctaactaatgccataaaattgatacattgttttaaaaatctcgttttcatgggtactaattgatgcgtgtgtaacgtgatgagcaaacaataaaaacggagaaaaagaaagaagtttgaacgaacatttttaacagcgtcagaaacagtgtcattcgtacggcacgagatccacgtatcaatgtcagtatccttcgtggagagcacatccgccaccgtcagattctccaaccctttctccggcggcggaggcgaagttaagcaaccaaaaccggccgataccttcctctgatgaatctttgggacctcattagctcttgctaatagtcctctcacaaaagctttcattatataatcttattagg

SEQ ID NO: 39906 - DNA, 583 bp, Arabidopsis thaliana columbia
gtttatatatatacatactattatgatattttctatactagtttgaatgtttcaatcccactcgacgatgcatggattaaaacatccaaactacttgtattatgtacaataccctattgacaagacttcttttatattttgtatttataagagttttgtatagttagaaataaacatagcgtggccagattacttcaactcagttacatcgttgctttgagatttgacaactgcgctatttctctctctctcgatctcctgaggttcaacctacagaaattatggtttcggttttggatggtcggtcagtttccagcaacaagaagaatagacggttttcgcggatagtccgtacttattatggaattatcaggcgagcccgtcaacgccaaaagttgcggaatgacaaggagacttacggggagctcgaaaatatcgaagtgatagaagagaagccaagagagacacaagtagaatcggttgtctctatcgaagacaagaacgagcaaaaacttcgagaaatatgggtgatgctctaaatgacaagatgaaacacttggagcaacgctcaactagttgggac

SEQ ID NO: 39907 - DNA, 729 bp, Arabidopsis thaliana columbia
aatttggatatatgggatctaattttttcacaatatatgtataaattctttgatatatgaaataaaaattgaatttcattttttgtctacttttattattgaaatatgaaaaagccaaagaagtacaagccataaccaaaaaaaaaaatccagatgatcaacaaattaaccccttcataattatatttagtaatttaagtagattttgcgagagagaaatgaaatgtgtcatgggtaacttcatctcacgacccccaaaagcaatatgaactcgtgttgtctatgcctggtatcgtagctctccacgtttacgattgcttctacaaagatagtttggttctcgtggtatggtttaaattttggtcccaactttggaacctcccttctcttacactcttgtaaataatctgtcatggttttgttcaattgatttatcatttcatcagatttattttgtatacgtaaatttgtgttttgttatcatttttgttttgttttaattagctatgttgagaatgttcaaactttatattataagattaataaaatcttgatttctttttccggtaagagaaagaatttttactttttctaaatatatatatgaacaaaaaaaaacccaatagaattaaggttatgaacatttttttatacctaagaaaaacaatttaatatagaaaaagaaattcttctttatttatataaatagagatattattttattatatt

SEQ ID NO: 39908 - DNA, 885 bp, Arabidopsis thaliana columbia
tcccccacaatctcttcctcatatttatttctctggtcttatttatttattaataggcctctctgaatcttcttcggtacgagtatgagccacgatagagagttggtttcgatcgttaggggtattttggtcaattgacatgttcgttggcccatctccgccgcacacaccactcgttaaccgccgtaacatcaacaaccaccggcctcgtaacgcaaccgtcacctccgctttacctgatattttcctcgcggcggtctctctccttttcctctggtcatctcctaaacctctagtctctcttcctccgaacagattctctttccctctaaatcctcgccgtcgatccatcaccgccatgtctcgccgatctcctcctcctcctcctcctactcaacgcttcgctaatcctcaatctctctccgattggctcgaatcgcgattaccttccgattcattcgccgcttggggagtcaaaccgggaaccaaaaacgttcataacctctggctagaactctccgacggcgaaacttctctcgccgattcaactcctccagtacgcaccgtcaacgtcgtcaccgttcgagtaatcggaaaaaacggacgaatcctagtggaagctcatcaggaattatccgatgggagtattcgtgaaagatttcgtcctttatcagagaaaatgaagcctgaagaatctcccgacgaagcagtttttcgcgccataaaagaagagctcggatctatcttcaatggcgatggtgataacattggacagagaattaagattcttcccggaacttataacagaagagttgaagaaaggactcgctatcgtatccaggattacgggcgcgttagcgtctcactctgtgaatgcaacggtgg

SEQ ID NO: 39909 - DNA, 646 bp, Arabidopsis thaliana columbia
ttgtccaaacatgataaaatgcgtgatgagttattgaattaaacaaccatggaccacgaaaattgataaatatcaacctaactaattgtttaattcattcaatcttaatatgaaaagagatggataaattttagcaaaaacattagtgtataagtgattattatgccatacgaattgatgaaatgaaactgtaacgaaaaaacttgttgctattattgtcattcgaagaagattatgctccaaaaaactgtattcgaatcttagagactccggtcatgataaaaagattcgtgaacttcgactaggaaaaaagaaattaatgtaattcgaaaacaattgtaacttatagtactaattatatactagctatatatgtaactcgtgaatcgtgatgttaacgcatttgatagctcttaggaggaaaactaatttgagtttgacctttcaactaaaaacatagattccaccaaatgtagtactcatgactacacgccaaatgttacagtatctctcaccactctccaagatggtctaatacaataatgtttgtaactttggataagcttttgcatattattgattggttagttaagaaattgagatatcctaattttagtaatggatctaaaaatgtagtattacaggt

SEQ ID NO: 39910 - DNA, 699 bp, Arabidopsis thaliana columbia
tgtaagaatctattcaaaaacatgaacaaagaagtggtgacgaccattgaaagttgaaagtgaatgattcagtcaagaagcttcttgtttacgatcaaataaagttgtaatgaacccacttcgcttctttgaccccatcacttcttcttcatatttatccatcaatttttcacaaacatttttaatagcaacattttactaaaagaaaaacatttggcaaagatgcaccaccgatttttattttatttttcactttttgaaaaaagaggttagtgaaaaagaaagttttttttttccacgcaaaagcaaaaagcatgtaaagctgtcacaacacaggaatatcaaagcctgaaaaaaagaagaagaattttataaatccaaacataaaaagctgaacccttccatcgatccaaaaaccaaacaccaagaaaacaaaagcagacttaaaagaagctatgatcaaaggaaacaatggaaacagaggatcttcttcttctggttactctgcagatttgttggtttgtatccttcaagaaccacttagctctgactctaagccatttgtagccatctcgtcctcagactcttcactaaccgtcgtcctcacacgtcgcagctcagtaactctcggcggcggtggaggaggcacggtagcctgttttgtgggctaaaagcaagtagtagaatatgggaggtgcg

SEQ ID NO: 39911 - DNA, 461 bp, Arabidopsis thaliana columbia
attaatgccactacgcgctcttgcctccttcttagtggtcttcatttaacaaacgccttctctcttttttcctttaaatctctgagctcttttttcttcatttgtttttttgccaaaaaaaaatatatatattgaatcttcattcattaaaaaaacaatttttatttttccctattcatcttcggttcctcaccgtccgatgctttgactctgaccaatcagtcaatttgagcttcacaatcaacggtcatgggtcattgttacagccggaacatctccgccgtcgaggacgacgagatccccaccggtaacggagaggtttcgaatcaaccatctcaaaatcaccggcatgcttcgattcctcagtctccggttgcttgtggtactcctgaagtcaactcatataacattagccctttccaaagcccgttaccggcgggagtagctccatcaccggcgag

SEQ ID NO: 39912 - DNA, 884 bp, Arabidopsis thaliana columbia
gtttgtgttggcacaccacttcgaggagggctcggggtttcgttgccttctggtggtggcggagcagcaatggatctttgaggatagcggattcaggagatggcggagaggcatcaagggcagggtctttgccaggaagaggtgtatcgataaggctgcgatggttcgcataaactcgggattggatcaagaagtgatcttgagaagaatcaaagacctctacaatctcttcaagaaatgaattgtcatcatttaaagagacacacaaaaggttgcatagagaaacatagagattagtcaactaccttgagagttaagattcagaggaagaaaggtgaggaagatgatggagaacactgttcggagattgaatctccgccgtctcttggaactcataggagattgatttctttgcttctgtggttgtttccgaaagaaggaagaaggaagagaatattggaggagcagttgaattcgtcgttgaggattaagaagactaatcaacggttgatgctctttcaacctttgtttaattatcgtaaacccaacgaccaattttcattactctcttaagatttttcttttctaaaagaaacaacagtttgaagtttattatacacacttgtgcaagttgcttaacaaagtcatagaatttaaatcatgataagtttcttttaccaaatttttacctaataaatatgttcttgattttgtagactaatccaaatatgtgacacgataacggctttgaaacatacaagattatgcaaattaaatacctagttctttggtatatataagcatttgtacaaaggcaacacacggctgctcgattggatcgatggttgaagcatcatggatcagtgcttgctcgacacaaccag

SEQ ID NO: 39913 - DNA, 597 bp, Arabidopsis thaliana columbia
tgctcttagggtttattccttcttgtaattccttgtttaaacacttcttgtagtagttcttaggaacacagtttattattgagtaaaaaacagagttttttttttgtctcaagtgaaatttactaaaccacaaaagggtaaataagcagggtaacagtgatacccaacaatggcccattacattaacatctatggcaaaagactgtttgatattggactctatctaaagacaagtgttgacctaatattacaacagcaacacgttctgatgagtcaacagaagtttaccgacatcagcctctgccatcgagaagcaccgaatccggtgagtaaaacatcgtcgaaacttcgcacgaaatttccttgtttaccaccgaaatatatctgaacggagctctaaaagagacacaacatgagagaatcatcatatgcatcagaatattctgcaatcctttaaaccaagatgaaattgcttgaatgatttcctgcaaattgaggtttctaaagacaagccggagacattagttttaagtaataagtacttaaaaactaattatcaactcaaatctatagaaattattgaaagaaaacatgaaa

SEQ ID NO: 39914 - DNA, 1145 bp, Arabidopsis thaliana columbia
atccccctactctgaaaagtatcacattatctggattccaacagctgtaggccagtgacaattccaggctgcacagttcactgctttggtgaatcactgaacatgtgttcagggatgttgacaatctgcttcttggagcagcacaaggacttgtattttctgaccctttcagatctgcggatctgcaaagctacgacatgtatttgttcctaacatatcagttgctcctccattgcccctccttgtggctaatgttgtgggtggtgatggtgcaattattctgtatgaaggtgaaattcgggaggtgtgtataaattttgcaaatgctggcacagttccaatagtacaggcacatgtctcgctctctggaaagaatcaggatgctgttatctcgatcgcagatgaagctttacagtctgctcttcccttgaaacctggggcacaagtgactctgcctgtgactttaaaagcttggcatgtgggtccaactgattctgacaatactatgagcagtggcaggaatgctgcgggtaacacaggaagaccaaaagacggaaccagtccatcattgcttattcactacgcaggtattcatttcttccttgacgtatgtttctatgtatcttactttttcagtgcttcatgtatcctcacgatgactaattactaaaagcatttttgtattcatatttttgcagggccattgtctaacaatggggattcccaagaaaaagaatctatcgtgccaccgggcagacggcttgttgttcccttacaaatttgtgttttgcaaggtttgtcgtttgtgaaagctcgtttgctttccatggaaatccctgcacatgtgagtgacaaccttcgggatgaagacattgaaagagagagcaatgcagacagccttgtcaagatcaatccctttaggggaagctggggactacggtttcttgaacttgagttatctaacccaacagatgttgtttttgaaatcagcgtcttcgttcagctggaaaactctgccaaggaagatgattcttcaccagtacaagattctccagagtatgaatacccgaaaacaagaatcgaccgggactattctgctagggtactgattccattggagcattttaagctaccggttcttgatg

SEQ ID NO: 39915 - DNA, 499 bp, Arabidopsis thaliana columbia
aatgcacatagatattctcaagaatacctaacacttatgtgatgaatccttgagagttatttcttacaaatcatgtagttgctgctcttcctttagtgtccttgtgattgttatctttgttgtgtttctactagaacccgaaaacttatccatgtagagtccgaggtacgatataagtgggtcggtcctcgctttgtccaccacaagctttagagaccgcgactcaacaacattcagaaaccgtaaaagccttttgttaccaaccgtcgtgccgctcacaactctctcccactcaccgcttccagtcttccgtgtctcgagatggaaagatgcgatcctttgacccatatggattggttctcgaatctcacaacacattgaagctagccaaatctttaaactctaagtataacacccattcgttttgattctcttctggcgcccagtacttgtctaatacttcttccaaaacattcttaggaccaactgtgaactttga

SEQ ID NO: 39916 - DNA, 519 bp, Arabidopsis thaliana columbia
aaagtcaagtgttgtttttatacacttctctgttgtttcacccaatgtgttttaaatccactcgaatggcctacaaaagtcgctaggtcttgtagtttagccaatagaacaaatgacacatgttgtagtgatctgtttaacgaagtcacatatgcattgatatcgatgtacactaattttattttatttttaagttgtctgcatgtacagtaataataatgcatgttgtatttaaacttaactattttccctgtctcttactaatatttgaataaagtagtcaataatgatcaatacatacaaaacaaacctttcgatcaacaactgcgttgcacaatctctgtttcatttttatttatttttgtctgcatgtacgactataataatacaagttgtgtttaaatttaactaattcgctgcctcttactaatagttgtataaattatccaacaatcatcaacacatacaaaacaaaactttctcaacaactcttgcacaatctctgtttcatttttattt

SEQ ID NO: 39917 - DNA, 842 bp, Arabidopsis thaliana columbia
ttgtgtaacctttaaaagatgagtttcaggggaaatattaagcatgggatcccttctgacttcaaagacctcacaagcttcagcatttgctttattggactgaagctccaagtgacttccagaatcttcgggaagatttgcaggactctcgtagcaagacaaactgaaaggtgtttgtaagatctccagagtccccatgcctgcggaatctatgtccggtgtcatctgggaaaatgactcgtctaaatctacagcagcctcttcagctttatgtggtttactttcaggagaagctctctggatatcagtacacaaaagactagattctccttcctccggtgagtggcgcaaaacattagaaaactgagtcagaacctctgtttgattcacttctgcattagtacagatctgcggctgaccaaatcctggaaatccatggtcacatccagccttgtcatcactccctgcttcctttacctctgactccgtggaagcaggtgaatctgcgtcattgttcgtcttgcaacacaaattcacagaagagctactttctaaacaaaccactggtgacttctcattaaccgtaatctcgtgaggaacaaaaggaatttcaagtatttcatgaccagcaatggattctatctccatctcattgtattttctagtgcctccactgttggaataaactaaggaaggtattggtaagtcttcttgttcactgcatactgtaacttcagtttccattgccggagatgactgatccatagtcccatgaactctttcacagtatggtgaagaattcttgaggaatttctccatgtaacttgccccagagcttgagt

SEQ ID NO: 39918 - DNA, 462 bp, Arabidopsis thaliana columbia
tagttttcctactagatcaatatgaaataacccaaaaactcatgaggtctctcatttagctagctatacatgatctatctatgtggtactttgtttaggtttataggtttgatgtggtttatcagttttttggatttttttgcaaaagcaacgagtattggttatagccttataggtttagtcattgatcatttgtatactatagtctataggaccatttattagcctctaaataataatctgttcacattctcgtacattcgtccatgaattttgtttctttctgtaatcatataaggtaatgttacaaaaaataagaaaaaaaatgttacaatttattacttagacttacgagtcatgactaacaatggtcatattttcagagcgaatactaatgcaaccaatcataaggcaagacaaactgattgtatttatactcctggaaaaacaaatttgtctgaa

SEQ ID NO: 39919 - DNA, 396 bp, Arabidopsis thaliana columbia
ctttattaaaagtgttataaaaagtttactctcagcttttttgtacaactctttctaacagctttgcactattcaaataaagctaacagctaaaaaacttgtacagcttttggttaccaatcagacactatgtaaatttttggtttttgcttttgttacttttgagaggtcggctcttttcttgataggataaaattgttgttatttttgagtttgctagcatcaataatcacaattaagatgtatcttattttgagaggtcggctctttctttgataggataaaattgttgttatttttaagtttgctgagagaattcaagatgataaaaaaattagaaaaatcacaatcacaaggttttaataataaggtttcacatataaacttttatttttt

SEQ ID NO: 39920 - DNA, 534 bp, Arabidopsis thaliana columbia
cgtaacgagtaattaaacttaggctatgcggttggtaactagtagtcttgtacaaactattatgctatatatatatatttaaaaaaactattggttttgaatgataaccacttaacacttttaaacagtgtatacagttttgacagttaccaatcacaaattttttattaaaagcgttataaaaagttttactttcagcattttttaacaacttttctatacggctctttctaacagctttgtactattctgataaagctaagaactttagataacagctaaaaaacttgtacagcttttggttatcaatcaaactcattatgctataatcttagtcaaagatgcataatgtgagttcattttcaaccacaaattaaaataatcagatatgaatacaaatgcaaacgcacgtattcattttctataaacagtcaatacctaaatcagtccacatctataacagtgagattttatataattaacaagatagaaaattctaaatatatgttcccttgtttcctaagcaacccatga

SEQ ID NO: 39921 - DNA, 861 bp, Arabidopsis thaliana columbia
catacatgttagagaaaacaagaactaaagctctctgggattcggaggttatgtctttggttttctacatgatgaacaagcagcaaacataaaccaaggataatatacagatggaacaaattaagtaaacaaagagatatgagaagagttaagcatgcaaaaaaccaacctcaaatgctgtaattgtaactaagcgttcatcacagtcaggatgtctatctcccacacttatagaagcatctgtcacacttcgagtcttgataactacactagcactttcgtttgaacaaagtatcttcagatccacttgtcggatatcatcctttgatgcttggagtggctgcttaatggtgacagggggattctttgaagcagaggtaatgagtctgtgatcataacttgggtgcggaagataatctatccttggctgagtgattgttctaaaaaaaggcctaaccagagcatcttcttgactgatctcaacatgtctatgcaaggaaccatgaggatcaacttccctatactgttgtgacctgtattccataggcctgcgtagagcatcaggaaccgcctcagcatgcaaagacgccgtagaaatcggcggacaagcctgcaagcgactggatatggatactagtgccttcatcactgcagaaagtctatttccttcgatctgccacatttggtaggtccactcagcataagaaattataagattctaactttatccctagcataagtaccatgaatgattctacaagaacttgacccgaaaagaagtgctttgatcaacgactaatattttccagaaaacaaaatcacgagttcgtaccttgagcactacgtcaccagggtttgtgc

SEQ ID NO: 39922 - DNA, 700 bp, Arabidopsis thaliana columbia
tcattattttctaaccaaaaaacaacaaaaacaaaagtattagatatagtctaaattcatcgatttataaaaaacagaataaattattaatcttgcaatgtatattgaattatatgtcttttaaataaacgtattattaaaaaaataaacaaattgatgtttaattttaagagagggagttatatgataggacaagtttggatcgatcttaatacgagacggtatatacaagtcaaattttagaattaacaatcaaaatacaattataattttaaacgctaaagaaaacaaaaattacttaacattgaaaactttagttattaaaaattgatccacggtttatcaaattcaaacataagtttatacctataaaatataaaaatacaacaatatcaaaagtttataacaaaaagtatatatatttatcttgcgagtcatattctagtaatagtatgtttttggaagccataatagttatttatttaaaggctattttaatcatcatactaatgtttagtgacttaactgcggtatagtattataatcaaatgaaaataattaagaagatgatataccaacgagccgactctgcgggattcgctcggacgttgttttccgaaacaagcgagttgatctctgagccaaccatctctgttgactctccagactcggggatcgtggtgagtgagcccgtcttgtc

SEQ ID NO: 39923 - DNA, 839 bp, Arabidopsis thaliana columbia
gaagagaaaaagtggtatcatggataaaaccaatttcttacgatccggtttggttcaaatcgaccaatatatataaaatattaattttcaaaacaaactaattcccgtaaacgcgccgagagttggtaagggttaggttgagagttggtcacttgtgtgttgcaacttgagaccggttattcaatccgactgtgaaagcggctgaggtacaaaccaaacccggtttgatcaaacgtaggtaataactctttgaatactcgtctctttgtaataattaaaaaccaaacaacttcatggatcattaagaccatgattattcacataaaatattacaaatcaacccaatttgatcaaaacataggtctttactattgtgcagagacatgatgaatatttaaagatttaattaaaatgaaaacgcttgatggatcaaagaaaacataagtcaagatcaagaagatagctttcttgtttgtaggtctaactcctgcaacgagcaattttgctgcaaccacgactataaggattagcctgagctccgttctgacaattgtaataagacgcacctcttcttgaacaaggcacactgttccgtttcaaagactgatagcttatgtattttgtggtcgccaatattcttctattgatctctgagtccatttcttcttcctccgccccgatacactctgctattgaaccgtggcagcctgaaccattgtctccagtcgtagcccatgctacaccaccgaggtcgttgcgaagccggcttggaccggaggtgaagagatgatgaagacgacgagaatcgtaagagttaagaacagagtaaaggacttgtc

SEQ ID NO: 39924 - DNA, 761 bp, Arabidopsis thaliana columbia
cctctagtctgattaattcccaaagacccaaactaagagattgattttcttaatttgtgcaagtaattagcgttacacactgaaccgattttttttctctcgataataatgtacagacctatttaaagtctataatgttaaaacgaatccagaaagtctaaactgtattttacttttcgtatagtaatttttttttttgttatctacatattgaaaatgggagaaaagcctacaagagaatgtagagtagtaaaagaatttttacgagagagtaagtacgacgaaaaaaaaaagagagagtaagtacaaaagatattcttctctatcgagactagttcatccccaaagtggaaagatctacggaaatgggaagtcatcatccttggtcatagattgatatgcactgttaattaaaaacaaaagaaacagcattagtaggatggtatcgtgtaattataaataataataaaatgcgtaacgcattttaggccaaaagcatagcttattggtcccacgtattcttcctttaaatgtatactatatagtatacggtctattaatctttagactagtcactaaagtcataactaatcaaataaatgttaactactacattaaaaaaactttggcaagcactaccaactgtgaaaaaaaaaaagttctttcaagttatagaacgacataaacacggaatcaagaataaacaaggagatatttttgtttatgcattgtattaaatatttaaagttatgcgtagtttt

SEQ ID NO: 39925 - DNA, 747 bp, Arabidopsis thaliana columbia
gcttcggagctcatcgtcgtcgccgatcgattccatcaccgaatcagtagtagcatttgcagatgaaggaacctctcagaattgtgtaatttgcaaatcgttttgacgaaagtctacatttttattattttttaattcattaaattattttctttcgttacaactacgaaagaatggtatacctgtatgtaaagtgtgtgagagtatcaaagcctactatgatttacaaactcaagaaacagaaatcaagagagtgattttgcatgtttaagcaaagaagatgatttcgtgtagaacatttgttgttattgttctcagaaacaaaggcaaaaaaggtatgatcactagtttttattcttctcccaattaatttttgatgagattacttttctttctactacaatttcatgcacatacatatgtcacaacgtacaataaaaatagcagaaataattacaaccacactttgaataacgatttcttcattttaacttattcaaacaagatcttttagtttactaggctttggacttaaccagaatcaactactttgtgagtccttaaatgcttccgtttagccttcttgggctcaactcctaaccattgttgaatgagctcaaacactctttcatcacggagaagcccgcggtggctacccgaaactcctacgctagcaactgctttaaactgagctgcctgctataacaaggtaagcacgtcagggttttgttaaggtccatactagtg

SEQ ID NO: 39926 - DNA, 963 bp, Arabidopsis thaliana columbia
gtcatcaacaatattattcttatcttatgacaaatatagctttgggttcttggacactaacttcaggtttcaatcaacatggagtaaaccattaatcatattctaattaagtgttcgcattttattaacccttggtagtttttcgacgagctaagtttacaaaatagggatttcttttattggcgaactccgtctccgctaagaaagaaagagggatattacagttttcaacgaattaacataacattttaaaaatcgaggtattacattaatcttctgatgccaaatctggttttggatggatggagaactctaaaactttgaacaatttgagaaatcatagtttgcatttccatatcataaaatgcatagtttgcatttcaaataaatggactggtttaagttatgtaccattgttcgtcccttgtcatttttgttttgaaatttggtagaagcattttaaggaacatgtatgaattattttttttgtcaattaattttgaattgaaaattcatgattctggatacagtatagagtctaattgaaaattcatgattctggatacggtattagagtctaacaaaccaaatagataaaattggtccgaacagatgattaagttcggtattagatgaatgtgccaaagagccatcttctcaaaatcatacgttaaaaatcacactagtagataaagattaatattagtaatttaatctattaccgattagttcttatttggatcttcaggtatctcacattgtctatttttatgtatcaaaaaaaattcttatattttgtccatcatttgagtattgttaaatattataaaataattccagggttatctcaatggatagatcaggtagaaagcgattcttgctctttcaacgttagaataatataagtaatattaatttcggagaaaaagtcgaaagaagaagtaaattatgattattttaaca

SEQ ID NO: 39927 - DNA, 459 bp, Arabidopsis thaliana columbia
gataaatatctgacattttaactaatagcaatgtcaaaacctcttccaaaaacagacgtcaaaaaacaaatctgacatttaactctaaaagacttacatctctgtgagattttgacccaagttacttgtcagaacttgctttatttcttgaaagttacaaggaactgcctacaagataaacaaattaggaatagaacaaacaatccgaaaatgtttacagactcaactataacagtattcttaccttgtcctgcaacgaggaaagagccaacgagtactctttcggaacgagcttcaacgtagccacaaactgaccagctttcacatagaaacctttattactttcacacagtttaagaattcgtttagcagaccgtgaatgaacctacacaatcaaaacgaccaaatgttaccatatcacatagtactagtgaagtatactgcaaactttaaacaagc

SEQ ID NO: 39928 - DNA, 666 bp, Arabidopsis thaliana columbia
atgtcttattggcttagcccaataatacgatgatggatacccgaatcaaaacaaatcgagctttgacgaaatacaactttgtgttctccgccgaaaaagacttcgaattgtatccctcacccaactctcatgtgtcaacaacatctttgattcctttttggatcatcgcctatgtgcctccatttttgggtttatctcaattttgatcaactttttaaggtaagcttcaagcttcttttctcaatttaatttcaaattgaattatagatgtttactccaattgtttcatggcatcaaattttactccgttttggttattatgattacatcaatttccattttcgattatcatttgttatttgattgaatcaatcttttggtacaacatctccgcgaggctcttctcgattagagaaaccaatgcattttagaatttatcatttgttttggtcatagaaaacccaatctctatattattgcttcatttgtttttttttctgtgccacttaattttgggtaactataattgtgtttttcgttttggtcggttcatatgccactatcgagttaaattttgttttatgaacttctcatttctcttaggagctattagtgggggtgtttgtaacacctagtttcaagaatacggtaatgcatgctttaaaa

SEQ ID NO: 39929 - DNA, 557 bp, Arabidopsis thaliana columbia
actatacaatgaaaattaaaagtgaccaaattaggcgacacagaaacgaacaggtccaatatataatactttgggccgctgtaaaaatatacacgtttgggccaagcctagtaaaaaaaaacaaaaatttggcctcttaactaccgattccaaaattgaaatgtagcgttttgattattcttctttaaattgtcaggttctacgaaaaccctaaccagagacgcttgccagcggctgaagagttccgacgaaagcagaggaagaaaaatatatcggttaaccgaccgaaccgaaacactgggtaaccaaacataatttacaaaccttccgatcggttttcctttcctaaccgaagcaaagcccggaaccaaaaatttcggttcggagcggttcggaattatcggttcgagtttgtctcgcaggcctacaaaaaaaactctataaatatatgacatatctaagggtttccttaacctaattcattagctttttctcttcactctgaacgtgaaaacaaacacagagagtttgtcttaaaatcaacaagaagatgacga

SEQ ID NO: 39930 - DNA, 843 bp, Arabidopsis thaliana columbia
attattaatttatagaagttttactgtaagtagaaagtggtttttggtttaggataaagtgcatacgttttgtgtacagttttggaattagttttatctttttcaaacattttagtgaatcatttggactatgatcattaggacatcatgaacttattatctatggtggggttgtggaaaacttattggattagagttactgttgcttaataatattaacttcacaaaataatcaaaatatgtttgttgttcctataatacttttccacgaaagacttgggattcttttgatttaagggtccctacactttatgactcgtcgtccttatccatatctccagctctatacccaccttgcattttttttatttccacacttctccctcactgctcacgcttctcatgatcaatggtttgatctatattataacattaatgttatatattaaggtcctttaaagtaggcttatccacatcctaatttccaaagatggcgtgtattttagctctaaaccctggaagttgcatgttatattaaaatgttgtaaaatgacatattaatacataacacacaatttacaattatattatgtattcatgttgtttattgacagagaataataacattttggctaaacgtatcaaattttaacgaaaattctatgtgcaagtatataaacttcatttggtaattaagttatcaattacttgtcaattatttctagtctattatagtatttctctagatattttgtgggtcaaataaaaaatgagagaactagtcgacaaaggaaaagagatatttttacgaatagtttcaaatgagtctactaatagatgaag

SEQ ID NO: 39931 - DNA, 432 bp, Arabidopsis thaliana columbia
atatctgttcgatttctcatcagacataatacttgaaaccaaaagagagtcattatcaaaacggaccaaaatgcctaaacatgctcgacttcattgagctgactcggctcagtttaaaacgtattgattttgtcatgtgccgattataaaattccaatttcagtttagtatcaacaagttttattacttaaaaaaaggagtttgcctcgttcattataactaaatattttctttaggaaaatacatgtcatttgattagcttcttttctattcctttttattagtcatagaaccaattctttgtaggttttcaaataatcttgtacgtacctttccgtctttctaacagccgtactttattattactaatcgttaaacgtatacataatagtgcgctacactattcgtatagtatccatacgaacgtggatt

SEQ ID NO: 39932 - DNA, 383 bp, Arabidopsis thaliana columbia
ggacaaagcgaacactacatattctcttttcgttgcatgcatatatcacattaagctaatcgtgagtaaaaaaactccctgtaaatcacttggactacaaattagtgatgatgtgcacagtttgcacatttactcgaaatatttgctaaaatacttgtaacattttttttaattacaatttaattatttattggagagacaagaatttttttttatatatatttgaatgttgaattctgaagttttagataatctatgaattctgaagtaaataattttgtctcacctctgtgttgatacgttataaacgcaccattgataagcttccaacacaaaccaacatcaaactacatcgatgtatcacttcttcacacacaatactc

SEQ ID NO: 39933 - DNA, 557 bp, Arabidopsis thaliana columbia
gtatctttaagctagaagagaagtatacacaaccctgtccaatgaagaaaagagagctcattcagcaaccagtgaacatgacagaagcaaagcatagatatatggatatctcaaagatgtaaatgatgtgttgtgcaaatgctagttagttagtgtcttttgtttccttctccggctggtgtgttattttccttatgtctggttatgtctggtctcaaaaggttcaagatgtgtacagaaagggctggttcagtggtggcacagactggattaggacttgagggtggctccgcagcgggttctggattcaaagtcgggaggatcattgttgttgtgtttggtggcttgtgatcttttctttttgttccttgtacttgtggttgttgtaggaactcgagtgtttagatcctgttctgagtttagaatttggagatacttaactaaattaaaataaattaataatagtcctttgttcgttataattcgattacaaaccctaataacagatgatttctctaatcactaaacaacaatggtgatgtgtcgtatactacttt

SEQ ID NO: 39934 - DNA, 990 bp, Arabidopsis thaliana columbia
tgatccacaatagatactgaaacaaatcatctccccatggtctacaggtgtttcagtcttcacatcaatcctggatacctacagaatagattatcagagagtaaaagcagaattaaacgaagcgtctatacgtcaagaacataagcatttctaggccatgtgaacaacaatgtattagcaaacacatgacccaatacctctgtatcgcaagcatggacaagattcctatattgattcatgagcagagccacggtttcctttgcactagacacattatcaacaacacgaactctattgtatattttcttgaggtttgcacggacttgcgataggttggtgcattttccactttggaaatggttgctgttttcttatagctggcattgtcaagagtcgtatcactgttaagaggtttcagagtcacgtctgttgtttccccaacctcaatatccttgcttggtaatgctacgaccgatcctcttatactattcgtttgcataaagccattcaattctctaccaagtgtggtaatatcagttccaggcttcagattgtaatcaaagttctggccgtttccataagaatggacatcatctattttggggacaaagccttttaaaatataactgccattaccaaaagcatcatcctggttgttagcatattctctatttcttcctcttaacttattattgacttcctccctccaagcacttacagctccagcttgtttcacagttggcggaaccattctcgccgtcttagatcccaaattaagtttccactctccactaaactcaacagaggatgacctttgatgacctgaatgatgaaacccatgagaaccaccacaatcagtagcagtcgaatatcccgcatttccctttatgattgctactttcctgcaaatcataaccaccaaaaaatgatatcaacacaaagaaaaacaccttcaaactcagaataataacaaacctcaactaaaataca

SEQ ID NO: 39935 - DNA, 567 bp, Arabidopsis thaliana columbia
attagtactcatttaattgacttaagtgggtgtttcaaactctcataaaaacaaaacaactatatatacaacagagcagaagcatggataataaaccaatctttcttgtcatcgatcattcttcttcaaaccccaaaaaatatgaaatcagcaatactatcaaacacatgtcttgcagctcataactgctatagaaaagcacacacatagccataggataatcttaagacaaaaccgtatctaatcatggagagagaagttcccaacagcaaaaacgattgaaaatatatgaaacggcacccaggcccggcccgtgacccatttgtaagaaacatgggtatagggccaccaaattttttaaggtttttagtattaaaattaggcctcaaaaatatttgttattgcaaaatataggtctcatttttctgagattttcaaatttagcctcagtttttaatttttatctatttgctattgaataaataggtctcattttcataacattttaagactttgtctcaaactttttatttcttctataaacccattaaaaaaagttgttttgta

SEQ ID NO: 39936 - DNA, 597 bp, Arabidopsis thaliana columbia
ttttctctttgttgctaaagcaagattaaaaattacggaatgtgtcagatctaaaggttaatcgttctctccgcaacaaaattaaacttggggaatggggactcacgttacgatgctagcactatcgtttggtaatagtgacaatcatacactatctcggcttataactatagttataacagttcaggattggtcgacctttgttaccaaatgccacctaattaattttggtccttcattgagttttgtgacctttgtgatggaagtcaaatcctactaatttctcacaatttatgaaaaaaatttcaggttgaagaaagtcttcatataacaagacaaagtctgtaacattatacaacaaatcaatacttcttctcactatacaacaattacgataacatgtaaagccttagcctccattctctttaacacctgaagacaagaagcgaatactcttctacatctctagctagcttgaagcagcacatgcatcaaatttgacaggaaaagtcttcagcctcacatgtaaaaactgaggctaaatttgaaaatctcagaaaaatgaggcctatattttgcaataccaagatattttga

SEQ ID NO: 39937 - DNA, 568 bp, Arabidopsis thaliana columbia
gtcaacatgtcatcttgaccccgtcccgtttatggaatactcctcttcttcttttttttttttttttgttctttagaaaatttgtaaggatattttagttgaatattattattatttttagctaagaaataaaaaaatcatgaaaccttcaatacaaagcaaaagagaaaaatccggcagaaagttatatatatgtcatattcttctttctattactcttccaataaatattgtttccataatttcgataagtaaaaatatcatagtcaaatataaggatatataaccaacccttatattttgtttacattgaaacagaaaatattatttgtaaaacttcttctttctctttgatttaggattattatcttatctcggaaaacaataaatcccaaaactagaggaaagaaaattaaaaaatacgataattgggttttgggaccaaaagaacagtacagtggtagagcgtggaagacagacgccggcaaaggcgcgttgaaaacgagggaaagagacagtggaagaggtaaaaagctgacacgtcggacgcgcgcaaatgtcgctgttg

SEQ ID NO: 39938 - DNA, 497 bp, Arabidopsis thaliana columbia
tgttagagataacttaggtctcttttattattatccgactatatacactgattttttttggaatcggttatctcgttagtagctacaaaactaatttccttccataatgtttcgttttctttgtaaatatataaaaccaaaagaaaattgaagtgtcatcaagaaagaaaaccaacagaagaaaaaaaggaaaagaaaaacttgtgttgccattaaagctctagtttagaattggagaaagtttttataacaaaagaggaagaagaagaagaaaatgagaggggaaaatagtgttgcgattaaagccctagtttggtgtcttgtattacaagctatcatatttcaaggggattcgatggcaggagacgtgggtttacgctaatgatgaagaacgaaatgtttggcttgaaacgtccatcggttctctaccggtgcaaggcttatgacaaatcccttcggtggcacgtatcgattcccacggcagaatttacatggga

SEQ ID NO: 39939 - DNA, 808 bp, Arabidopsis thaliana columbia
tgaagacccatcacttctatgccaagaatcatgccctgcaggtttgattcttttcaaaacaactctattctctgcagccgtagccgaagaaatctctttgctaggcgttgctgtatcattttgatcaaccactgacgtagccaccccttccactactccatgtgcttccaaactccttgccacggtttcttggtgttgattttgactgcatgaactgcttttatcatcattcttgcaatcccgtgcttggggaccactagcagaatcaccatctttctgctggcaggaacttttccgtgcatgttctcctttacttgacaatgaatcattaagaggtctgtctcctagattctctatatccgtgaaaggatcgtagagggcatcagacgagggaagaatataaggtggaattgtaaaagatgctttaaaaggttcagaaggttcccagtcatctgaagaaactttctttttagtgctagtagtgttggcttctgcgcctttatcagaagaaacagctaccccttgcagcgttggaagtgatccggatccagataaactattcccattttcaaaatcccccaccgtagaagcacgatcattcataggaacagaactggataatgatcctgtccaggctggtccagcagatcccatgtctgtttttaaataggaactgatagaaggtctatgctcatgaacaaagctgcttctcaatgcgaaggaattggcgttattaataactagagacctgttgtcagtgaaatcagcaccatacgtttgcttcaaactctctcttctaatgttttca

SEQ ID NO: 39940 - DNA, 689 bp, Arabidopsis thaliana columbia
aatacgctatatgaatcttggccaaatagcataaaccccaacgtataaaagaaatcatggcattggctaaaatatctgaataaaactatataaatcgatgtaaattttatcatatacagtttttcgattaaataatttgttttgatatggatgtaaagtgagaacatcaagaaaagcagaagaaagtcaatcttcgatatacatgtcaaacataatttgagacgttacgaaagaagaagaaatagtaccaattgtcagtcgacgtagctttttcattgtttgtcatggcactaatccgagcgttttcttggtagtttctccaaaagacaaacttttaacaatcatacatcataccaattagacaattattattttgttggtaattaatcagcaaaattgtaatgttgttagttatcacaattcagcttttacccattacaaattttcttcaactcataagtttcgttcgtgtatttaatgatttaaaccaaaataaattttcacttttaagtttataatgaagccatgggtttccgtctcttaatatatacttctagagatgcatttcggaaagtataaattaagtctattttttatcatcaatatgttaaattgaactataacttcccaatcaatgatttaagttcaccatatatactccagaacatttaatttatttaatttaaaag

SEQ ID NO: 39941 - DNA, 524 bp, Arabidopsis thaliana columbia
ctaatccacaacgtgacgcatgctaataaacaattggtttgcgagcttatatggatggagaagagcattattagctttgatgaagagtattattattctttttttggtaatcagagtaataatcgtaatggaaaagattggactttttttgtaaaatcattacacattttttaatgatataaaaatatccattctttttatgattatggaagtgtggtatttatgtacagagggacagcatcatctttaaattggcttttatgttaaagaagttgcagggaaaaaaggtttcatcattgaatttcctcaatcctgagctagatggtaagttaaatttaatcatctgtacaatttgtacattttctacaagggaaagactctactgtattatatactgagcatacaaattcagttgcgtttttcatgagcatgtataccttttaagtttaagtgtaacttaaggtggaacatggattactggttccatttggatcgtctgctctttctacgtgcagatcaattgc

SEQ ID NO: 39942 - DNA, 510 bp, Arabidopsis thaliana columbia
tattacaaattgtaaacatatatgatgacataaaagcaaaaaaaaaaagaaaaagaatacaaatcaaaaggcttacaagaggaaactaaagtccaagatgagaggtctattaatgaaattgtcaccaaaggaagaacatagaataatctatctccagctcaagacactgtcatgaacttaaatgaaagcacgtacctagaaccaattatttgataacaccaactaaatgagcaaacaaaagagcataaacataaacctagaaccaattattttgtgtcaccaatccgttgtaatgctaatgagaagtgaataagcagcaaaagggtcacatttttatcttaaaaaccaacagatcaaacacaaatttgaacataaaccaaagcccagaaactctatacgaaaccaagagagaggagagaaagagaaaaggatgataacttattttgttttattggtcctccatgatatagtgcacgtcagcgaaccttactcacccaaaaataccttatt

SEQ ID NO: 39943 - DNA, 1056 bp, Arabidopsis thaliana
tgatatgttgtgtacagctctttcatgtccacagcttttagaagctgcacgaacgctctgtgacattgcagtccagtccgcaaaccacgacaacccaaacggaatcctcagatggccaaagaagctctctcagaaatccatgaaagcccgcaaatccagactaatcgaaaagcctctggaaaggcacaggacaacggtttcatccatagatcttaactcaagcaacaacaacaataacaagaaccacgtgagaaaagattcagcagcagagcataatcaccaccatcatcatcatcatcctaagccttcaaagagactgaaactatcaacaatggagaacaagaagagatcattcccgagctcatcatccccaatagaatcagatagaaaacattcatcttcaagcaagttcaagaatcactcccgtatgatgttgccgcctccaccaccaacgagaacactccaaaagtcatccacatatcctcagaaagctcggaaatttccatgaaccggttgaaaataagagtggtggatccatataaaccaatcttgattactcaaaagaaaccggtttggttttacaaggggacataacggcgtcgtaggagtcgtctgtaaatacgaatggtgtcacggtgtaaggtaagttcttctctatgtggacagtgtttaggtgcagaagactatatatattgtattgccttcaatgttgtaacatttttttttttcagttgtagttgtagccacacagttctttttaaggtctgttgtgtttaaagatttttaattctacgaggtcaatgataaaattctcaacttgagtgtcgtttgtatattttgggtgggaaaggttcgaactctcgaccccaatccgcttcttctctgctctttggctgctgctaaatgccctgaccgtctgcttcgaagttaattgctaggcataacaaacaagaaaatttttgtgtttgttgaggacgtaaaatgcacgtaccacccatgtgtaatgtactaatgtggttgtatatgaaaataattattataacctaagataatata

SEQ ID NO: 39944 - DNA, 457 bp, Arabidopsis thaliana columbia
taattaggtccttataacagttcaaagttagctacaatacttattcattttaccatggaaatttaacacatgtaagaatacgcaacgtaaacaaactctatcaaaaccacaccaagatctaactaatttttttttgaaaaaaagtctagtcaatccgaatcaaaatgattttggttataacttataattcaatcatattataatgaaaactagattagtcaaaccaacctacacaaacaatatcccaatataaaccaaaatacctacaactattttacaagaaagcgaggaaacaaggaatagaggacgaaaaaatgtggtaaaccaacaaaattagctagggaaacagaaaaaagagaggagaagaggcattgaggtaacgtagagctcaacagtcacttgcatcgttacgcatgaggtaaagcacgtgccgtcacgtagaccatacctctctaga

SEQ ID NO: 39945 - DNA, 478 bp, Arabidopsis thaliana columbia
acgatccccaccaccaccatacgtaaaattgaatagacatgtttgttcttattccgttcgtcttaaaaaattcaacgatcacaaaaattcgtgaagtagatggaaagaaagtggaaaacaagataactatggacatacacgacccgtcttacttgtcactcaaatggtccttcaatcgctatgatggaaattgcatctaatgcttgcaaagtttgaagactctccaagtggaagtggacttaaagtttccccttgttgaagattcaggtcgttgttctaggccagaaaataaagccttataaaagtgtaataatctaactattcaacttagactccataacgctgtaaattgcaagaaaacatttctattagtattaagttcaagaattagtctagactttggatttaggaagactctgattattggaaaaaaaaaacattgcctgtgtaagggtcgcttgaattttgagataaaagt

SEQ ID NO: 39946 - DNA, 560 bp, Arabidopsis thaliana columbia
cattaaaagtccgtcacacaaatacatgatacatcttacacatttattatatggggagtacataatcgttactttcttatttgaaccgtcagaatatttgggtagtctagagtcctctactccctgtctttctggcggcgacggcggccgttctccttagccttcactgctgctgcaccgccgttacggctaaggttggtcgggagcttctttttgtgctcctcgcagtcggtacgagtgcagctctggtaactatcggggcatattccgatccctctggcgaacccatccaccgttccaataatcgctccggcaatccctccgacaatccctccaataagcgtatcaagcatttttatatattaattctgttgtttttctttgatatgaataagagcttacaatctttcagatgtttgtatatatttatacaattctcgtagtgttcacttaagtttgtttgttatggcaattattcgtcatatgatatccatgatatgataagaatcttattcttttttttttacaccaccatacgtaaaattgaatagacatgtttg

SEQ ID NO: 39947 - DNA, 543 bp, Arabidopsis thaliana columbia
gttcggttcggtttattagggttttgtaaaactttaatcaaactcaaccgaagttagtatggtttggtttgggtcaatctatatttatttggctttagttcggtttggtttaaattcggttttaaaaactaatcaatgtaaccaaacaaaattattttgttcatttgtttgaattttgaacttgataatagttaactgaagcaacaagttgtatatttaagtttagtaattcaaataaaccaaagaaaaaaataaaaatgcaaacaattacatatttagtaatatacaataatattattaattaattaataaagtaatcacattgggttattggttgtgttcgattcggttaaattgcgaacaccaataactcattatctactttgtttgataatcaattattcaatttgttacgaaaactaggtttgtgttacactttcagcttttggtatttttattacacttttcaatatccaaattctcaaagaaaaatgcaaaacttttaagtaactcatacctctagattaagaaagttagtgatga

SEQ ID NO: 39948 - DNA, 871 bp, Arabidopsis thaliana columbia
cctagaaagaactctaacaatagaagtcgaactttttaaatccttttcaagtttctccaaccttcgaattagattagtcccctcactttctctcgcgcctttgcaaatcctcatccattgtcgtcgtctaagccaagaaccagtggcgactgagccaaccaatccaacgaaacctaaagacaaaacctttttcccaatttcaccaaccaccacgtaattcaccgcgagaaccactgaaatcacggcggatgataaaatacaaagcgcttccgcgaaagaaacaaagctgcccaaatcgaaaccatcggaactggcgtcttctagtaagttagaagaagagctatcctcgaatgatccgatagaagacgcatgagctctataatttcgatcgatctcgaaattcgactgggtagagatgacgtggcggaggaagataggctgggggaatgatatagaatcccggcgagaagctcgtgcggcggagacggcgaacgagaggttgctcctcctgctgatgcgaacaggagtcgagccggagaagagagcgtatcgagaaggaagcgataaggacattatcgtcttttcgggtctgtgacaagtgactggttaaatctcaggtcattgcaagaaatggctaccgacttgacgtccatcatcagaagagaacctcttacaggcgcatggtagcaaagcctcgacaataaaagtttaaaatgcgcggaacatctttggagttgatttgctaagcgaatagaaagagtcgacactttcatttaacagatttcagctataacccaatagtcccaattatataagcaacacttgatccaatcattatatgcatcatatcaaaacgatatgaaacttataa

SEQ ID NO: 39949 - DNA, 1138 bp, Arabidopsis thaliana columbia
taattaatgaataatgatttcaattaatggacataatttaggaatattactgatctagcaggggaaaaatcgctgacttttctttttattgtaatgaaagaattctaatttcctcggttatgaaaaagctataagtctataacgttatgaacttgagaaaataataatattgtttcggagccaacaatttttggtctcagatataagacaacgatttgcaagatctactaaattaatcaagattctccttattatgtgtcctttggttaggacaacgggtcaagacaattattttaaatatatttttcaaagcttggagctgttgatatgagtccatacatacatgactccaagattcatagtatgtaaaatgttcaacttgagatttgagagacgtataccacactgcctctacatagacctctaaagactccaactgttctaaagctggagcctagttgtgctcaagatctctggtgattatcattcatcgaccactcttttaacattcaaaaataaacacataaccctaaaatataatcaacgcttacgttctttcaaaaggtgatgaaaacattaaaaacagaagcatcgcagaaacattattaagagttaaaaactcaacacacacctagagaaaagcaaagacaaataaactgtgtttgggaaaatattcataacaaggcacgcagaaacaagttcataacaaagtacgcaaacaacaagcagagtgacattaactcaagcaatactctcggggttagtagctaaacccgacttgttgctgctgtggtggctgttgtggtggttgctgtcctgcctgtggtgtctgctggtaaccaccgctgtatcctccaccagagtagcctccgtaatatgcattagggtcttgaggcatcgtgtacccatactgctcctgtccttgtccatacccaccgtagtaaaactggctcggatcccccgactggaaaccaatatcaaaaaagcatttcagattataaaaagctacttgaactcaactattttaagcgattctgctatcatctaaaacaatagcctggactacatagttcttagaacaaaagccgatacacggtgagagaagctgcgatagttcttagacaaaaggcgatacact

SEQ ID NO: 39950 - DNA, 1097 bp, Arabidopsis thaliana columbia
gttgcggcagctgtaaagctccatggatctcctttccataagctctgataccatgaaaaggtactcacatatgaatttaaaagggattttcaaggattagacgccaattagtattttttataacaatggttttgttttggtatatacgattgagtgttcttagaatcgatttcccttttgaccgtacaaggatatagagacaccattgctaatagtcatctacatcagaaatacttacatagtagttttctaatgatgatcctttttgattagtaaattatggtacttgaattatgatatatgtgtaatttagaatcagaatgtttctgtgatatatatttcttatttatttatgacagagaaatataattaaagctaacaaataatgtacgtactgaatgtttgcttcccagactagcaagacgcatcaagggaacatgataatttgctccacataagagagacttggtaaatttgatgaaggtaacgactaacggagtaataactccaatctcatcttttgtgtgttattcaaatgcctatcttttgactgattgcaagatacatgtttataatattagttttaaaggatagacaaaatccacatgcaaacttatatttctactataatgttttgtaactttctcgaagtcgtcattagtaataagctaaataactgattgactcatggcaaagagtccattcatggtatccgtttacagaatattacactgtcggacacttttacaaaaatatttgtcgttttgagcattttcaaaggagtagacactttgccttgttaaattgtctaatttaccctcaaacctattttctctttctctttagcaacatttcttcttttcttcgtcatctttcttacgaaaacttctcttcttcatctctctcttgttctagaatcaaaatcaaatattataggacaacctcaatattcaaaattcaaattcaaatttgaatcttatagggtttatcatcatcttctctatctctcaacaatctaacggtgacaataaacaagactatctttgattaccacctccactccgcttcctccgtaacttccagtttcacctcctcct

SEQ ID NO: 39951 - DNA, 626 bp, Arabidopsis thaliana columbia
tctagtaacgtgcgccagtgtgctctaaagccaatactatggccgaacgaacagccacggagtcgcctttcatggctacctctgaaaccgcatgcacagcaccatctaaggaagggtgctgagtccaccttccgatgatgccgtgagagacagacgacacaactgtagtctcagaatcggtgacccggatgaaataaacattggcgtccttggtgcccgtagagaagacagaccatccctgcaaaaaaggcaaactgtacgccttggaaacggtcgaagatgccaagtcaacgtggtagacttccgcccatgaaccggatgccgtctcgtactggaccaggaagtggggcagcgcattaagggcctttggggcgtggatatagatggacctgatatcttctccgctggtgttctcaatattaacctgcgtcacttgttttgttccgatgacattaaccttcaacgtcctatgcgacttatctgcccaggcgatgacaggaaacgcggtgttggcgccacaaagagaacggagtccggtccggaaacatcgctgtcggagttgagaatctgctgagacgcttgtcgaccggttagaggatctagcgaggtgacgcggattttgtaac

SEQ ID NO: 39952 - DNA, 1160 bp, Arabidopsis thaliana columbia
acgtccaacttttcccatctttgcccattcgtgcccattcatgctcatctttgcccgttgaagttttgcaacgtttggcatatgcagtcaattggctttgcattcaggcaaaagtttctcattcggtcctttagccgtgcccgatgcccttatgcgggtcactacattctccgctccttaatagaattcgtccccaaattctaacctttggtcattcccaacttcaatgaattctcccatcattttcacaaaggttttgaatctccttgtgcggattatacaactgtatgttctttggaccgaacttcccttcttttgcatgtttccctgaagtatgtccgttttagacttatctcgatccctcctgatttcttttctctcattcctcattcggtcgggcgttgctgatgtacttccgatggtgtttcaaactcaaacacaatcatccaatttttatacaagtgatttctcactcatataattgtcggccacacacaaacaagcaaatacttaacttattatacattcaaaagttcatacaagtcataagtactggattctagacttagtcttacatactattcaacaagttctaagccttagcatatttacacacaaaattcgctatgacctagctgattctatacttagccgaaaatgatctcacgaatcattggtcaagggttcctacacttgggacactcacaccttacccacaaaaacgagggcatcccttcattcaaacacttctcctccgctaccgtagtcattaatggcctgactcctctcgaagatccttcgctcgcattcggtgcaacgtacgggcagtacatggacatatgtcccacccctccgcaacaagaacacttagcacaatcatccatatatggcatagtatgtggtggatacaagcattctttggtcggatgatcggtatggctgcatatctcacacgggcgcttagccggagtggccaacttcttcccaactgacttcctcgctgttgcctgtattctgggcttaaccttggtgttaatcccatattccatcccaagtggaagcgggtttactccaacgatccgttggtccttggccttctccgattccattcccatttctgccgctctctttcccttccatctctcgttttcttccgcttg

SEQ ID NO: 39953 - DNA, 568 bp, Arabidopsis thaliana columbia
gtataatatttaatttgcgggtgaattttgatataaatgaactaaaacaattgttgccatttgctaaaagataattataaagtcaacttgtttttttcccaattgtacttattaactaattattgatgacgtgaattcatattattgtattaaaattttgaaaattcgtaagttttattgcacacaggattagttttgctatcggttataggattcctggtaaaaaaatgtcttattattttctaagcaatattaaagatgaggtaatgagtaaaaattattatttttctccagattctagattagatgagccagtgacagagcttccacctttgaaagtgaaggatcttccggtaatggaaacgaatgagccggagaactttaccgggtagttaacgacatggtggaaggagccaagtcttcttcaggagtcatatggaacacatttgaagatcttgaaagactatcacttatgaattgtagcagccaattacaagttccatttttccccgatcggaccgttcacaaatatagcgaagatcctcaccgaagacagagacaaggaaga

SEQ ID NO: 39954 - DNA, 843 bp, Arabidopsis thaliana columbia
tactttcatcatcatcctaaccatgtagcaaattttttgttttatttgtttggtcttactatatctctctacctaataaacgtaatcgtaacactatcttatatacttttaacagaaaattcaacttaataaacgcatgcgagattttaatgcattcggccgcgtgtgaattatttaaaaccaaaaaaaaacggtgagttgagcgtttctcggattcaactagtacgtttaaaaaaaaaaaacactagtacgttttagtttagagtattttaattagtaggtcaaactataactaaaatttcagagtaaatcagaatagattagaagtgagaacttcaatgttccttgtaaattcaaattgaccgatcattctagttgtttttatagtggacaccaaaaaccatttttctatctcatagtaaaatactttgccaatattgttattaaaggcttaaagctatttttgtatttttaacctctcccagttgaaatgatatagcaagtaaaaaaaaaatgataatcatttacctatattttacctcatcgttatttagtaagaatagtcaacaagaaaaaaaaatcattggaagagaggagaagaatgttacaaatttacaatacaatgtatgcaaaaagcttattatttagatatctgaaaaaacattattagttttcgcagagactctctttctctctatctcccagcctctttctcctgatacaaccaacacacaaactctgaaacagaacatcgtcgcaaaatacataacaagaaccaacaagagctctagatttgctcttaacacaaccaagaatctcaattgttctctaaagagaactaag

SEQ ID NO: 39955 - DNA, 1526 bp, Arabidopsis thaliana columbia
caataagttacctttaaacattttcgaataagctcttctttggttgcctatgatgtgacagaggccatacttgatgcaaggtgggtatagatcatgggtacaggaaggtcttcgtgtgaaagagccaaaacctgagacaacacttaccatcctcaacgaggtaataccatatgaatacaaatatgtttggactgtttcttcagctagatgaaattgaaactgctctcaaatcttttcatcagtaagttaaacatatcttaaatgcttttcaggaagctgaggcgatttttgaggacataaatccctctccattgcaactatttggagttggtgtggtatgcttctagttctatttttctatttccgtttaataataatcccatcctgactaatataagaagatatatgcagggttttttcgcagcattgtatgctttgtctggtgcgtttaattctttctcatttcccctttagaatatctcatattctccacaacacacaagctcctcacatccacgttttgcactaacatgattgctctatctctcgcagagtgggagaaaacactgcaactcatagctgtcatcggccttagtctggtatatactagcctttccagtttctaagttttgtcaaattatagttgctttgttttgtttttcaagtttcaaacattatgcagactatatacctacgactttcttcatatgatgactccgaagacttcaaacaagacgtcaggtataaaagcgccatcattagaccctttttccatagcaaaaactcagcgaaacctctgttctgtcttaacaaagattgtttcatcttcttcttcaaggctgttgcttgcacctgtgaaactcggagctcaggctttctcgtgggctgcaggaaaactagaaacaaatggtgttggcctcccaacttcgccttcttcttcagatgttcgaagccgggttttgcaagctgctgctaagcatgaatcgaaaccctctgatgaaacttctgaaagtctccaagatgcatcatcgtcaccagaagaagctttgaacaacgttgatgtctccgaagcgtaaagactctgaaaattgttttctatttttcttataattgccaagaattacttttgttcgtctcttggaaccgttaacatcggcaacagaaaaagtgtaataaaaaagaactgttttcttttcgttcggatgctgagatttgttttgcaaatttagaactagctaaattgggtcaaaagttataggttacacgtaaaattattacagcaatttctcccctaataactttgggctttaggcccaataacagaaggccttaaagtggcatacttagggtttagtgaaaaggcaatcgtcatccttgactcaggggtcaggtgaaatccaggagaaggagaggtaatcattctacacagatagaaacatttattttttgtttaatcaaaagctaacattttgttgtgacagttctcgtgttgtcttaatatagatggcaagactgataatcgtgcc

SEQ ID NO: 39956 - DNA, 715 bp, Arabidopsis thaliana columbia
caacaaaagcaccactctcaaggagtagttttgtaactcgttacttggctatatttcaattggaaataaaagaatctgcacctcaaaaagtcaatctattaaactcattatatgatttaacaataacaataattaaactccaaagtagacaacatgaacatcagaataaaaaactaaacatatatctcaacgaggttcatatattagaagcctaaaacatatatcacagattcaatcactatagctaaatatcggacgatagaattcattgaatgaaggatctaaaacttaacattattaagtaaatctaacatgttcatctctatctcttttttgtgatttccatgagaactaacagagatttccagtaagaaaatacaaactttgaagcaattatcatcagagttcaatctgaaattgaggaaaagaagaagaattaccgagatttgtgccttgagtctgtgatgtgatgagaattgttaaatgtaccattttttttttttttttttttggacaaaatttttccttcaattaaaattacaaaccggccggtacaattgttctaagaacaaactttgcaatctcatcagttgtggcttcaagaaatgaaagaaaagctagagaattgaaatttagaagatagaatcaggatatcatggagaacccgtggagtccagtggtggatccccgtgttgatacttcgacacttgttttg

SEQ ID NO: 39957 - DNA, 1578 bp, Arabidopsis thaliana columbia
tctccgagagaggggactggggcggaatcggagggcggctgcacaaaatccgaggggggcggggcgaagagtgaaagattgtcgattatgtcagtgattgcaccccaagataaatcattttctaaacgtgctatttcttttccagtttggaagactatgatgatcggggcattgaccaaattgtaaagtattgcaaagaatggattcgtcaaaatattggctttacgtaatataattaggttaccataggtttcagacaatcgggccagttgatcatccaatatagtgcaccggtcatcgcacaacgaggatgttaccgtaaccacgataggaagttgagtcgtggtcagaataagtcgccattcaacttcgttactcaaccatgtcacttcccctacgtacacacattgaatcaatgaatcatcaatcaaagagataatattcattaagattatagtaatttaatctatatatatatgggatggttatttataccttgactaaagccactacccaccaagtacattagcattactaaaccgtacagaccctttttctcaattgatcgatagtatatctttttctctcgttttcttataatgtgtagtctgcaggatttgttgtctcgttttataagcatcaaaaaggttgatggttttacaattgaacaataatgtataaattaatgaccaatcaacaccatctctctttttactaacttagctgtccatacttaattactactcctaatgtgaaattcatgatacttttatcatatcaaaagtcaacggttgcatgttatgttgtattttaataacattattagaatattttttgtaaaaaatccaaacattgaaatttgaaatactagattttttattggagataaagtttattttttaaaataaaattataccttctatacatttttattacattttagaggacaaccttgagttctaaaaaaacttacaaggaataccattagaattaaaataacaagaaaacaaaattttacactcctggtctaagtgactaggtctagctaaggaaaatgcactttttcattatctctaatttgatccatccatatttgttgctgcaggttagaaagaaggcgacgtctcctttctttttttgctttttatagaaaaaaatcgtacctgatctttgagatttagatttctttcaatcgagacattttttaattgagaaaattgttagaaatatacatattaattatgatgtaaaccagaagtcgaacaacatgcccgtctagctcagttggtagagcgcaaggctcttaaccttgtggtcgtgggttcgagccccacggtgggcgttatcttttgttacgtatttttataaaaccctttttattcgtttgaaaatcatcagattctgtgaatataatagcttatgcattgggccactggctgattcaaaacttgactatttggagatatatgaaaaaattaatagaattatatatggtacccgtatacatgtgatgcgatacacgagtctaatgttggatgagtctgtacagtacccgattttgtagatgtatcatatata

SEQ ID NO: 39958 - DNA, 509 bp, Arabidopsis thaliana columbia
attatgtgatgagattcttatttatttaccctatgtcaatattctaagatgagaatcgagaagattggaataatgcatttttgtttaaatcatgttgacaaaattagtaaataaaaactatgtaaactatagttaaaaaccatttaaaatgtaaacattttgaataatcaaatataaagtttttaaaagtagtttttacatgaataaatatatttttttaaaccataaaaattaatctaagtattaaatacattcgcgtgaaaagcggttgaactaataacattctcttacagacgcgtcagatgggaaaagtgcttaacgggtttattttcaatgcattgaaattcaacacttagattttttgaaaacaaaaatatgttctataataaaaaaacttagttaattctaccaaaaaaaacttagtgtaacgaaaaaaatattttcataatcaaaaaatagtttacataatagagatattgaaaaaacaataaaaattaatctaaacatta

SEQ ID NO: 39959 - DNA, 583 bp, Arabidopsis thaliana columbia
caaatatttttattatgtaaacttattttattatatttttgattatgatttttttagttttaactaaagtttttattatgtaaaatatttttaatttttaaaaaatttaagtgttgaatttcaatgcattgaaaacaaaacggactaaacatcccgtcccatcctacgggtccgtaaaaggtgttatttagttaaaccgcttttcacgcaagtaaattaaactcttaaatgttttttttattgtttttattacaaatatttttgttatgtaaacttattttttaattaaagttttttttatataaaatattttggttttcaaaaaatctaagtgttgaatttcaatgcattgaaaacaaactgggctaagcatcccgtcccatcctacgggtccgtaagaggtgttattagttcaaccgtttttcatgcaagtaaacttaaatccttagattaattttttatggttttttgtacaaatatttttattatgtaaacttattttttaactaaagtttttcttataaaatattttggttttcaaaaaatctaagtgttgaatttcaatgcattgaaacaaactggg

SEQ ID NO: 39960 - DNA, 851 bp, Arabidopsis thaliana columbia
tgatgtcgacgagatacagccatcatcgggctttgacatgagagagataaaagcagaggaattagaggaagaagaagaagaagagagaggacaaatattcggagagtcatgcacgaatgggtcaacgtcgaaaagctcatcggaatggagaaactctgtcaaaactgacgaccctttctcaacgtcctctcgccggagttgccctaaatgggaatcttacaccgtcttccaaaagtacgacgaagaaatgacttttctcactagaatctctgctcaaaagcttcacgaagcaggtgaaaatcatcatatattatagagtaaatattgaaaagagtgttcaatatataggttttggtttgtattttattttctaatttttgtctatttatagaatctttgaagtcaattatggtggagccaagatctatctcggagaggatcgttcacaagttatcatcaaacggtcacaagaaaaaacaaaaacaatatccaggcagcaatgggtcgagaccaaacccttacgtggaactagaatccgcttacgtggcacagatatgtctaacatgggaagctctaagttggaactacaaaaacttcgagagaaaaagatcaaccacgcaacgaagcttcaaacgatgtaggatgtcccgccggaatcgccgaccaatgtcgtacgtatcacattcttttacaaagatacgtagaaaatgaaccttatgaacatggaagaagaccagagatttatgctcgcatgcgaactcttgctcctaaattgcttcttgttcctgaataccaatggtaactattgagggtatgttggtatatacggtaactatagattctaggtaaga

SEQ ID NO: 39961 - DNA, 597 bp, Arabidopsis thaliana columbia
ctatttgatgattagatatccatactatatgttttgagtcttaaatcatgcatctcctttagatagcctaatgttctagattaatatcattctatttctacgattcagagaagcaacactaaactcaagtggcaccaaagataacacaaggaggaaaatatgaaaatgaaaaattgaagaacaaagaagaaaaagaagaagatatataaaaataaagcactgaaaaaaaaaccctaatcgcgatcattagctaagagtgtagagacatcttagctgttgattagttttattatcaaaggtctatacaaaatacatatccacatcagaatgtataagtgcaggatcaatgacgtgtcgctggtgttgaccttacttgacccggtccagctaagaatattgagtaattgagattctgtctgatttgacccggtttagcagtttagttgattctcctaatatttgtgtttggtttaagttagtgaattgaaccggattggctaatatatcaagctaaatttcagccattaatttagcgtcacatgttttatcaagctattttttttttttgggtatcagtatatgttaagtgtgaatcaa

SEQ ID NO: 39962 - DNA, 941 bp, Arabidopsis thaliana columbia
ctagacaccgaacatccgtatcactcgcatgtaccactagaatcaccagaaccttaatccttccgatcaaaagaacaatcagacccattccgctctagcttaagtttctccaaacagattcgctctctgatggcatgatttaattgaatcgctcatcgtttgatctcagatacagacttagacacctttcgtcttccaaggccagaacggattccctaacaacagggttccctaatcgcctctcggatttctaaaccatcactcggattttctctctaattccatccaactatttctctccccttctctaaggataatcgcggcgtacttgtgcccccgccccgctctaacgctgcctgagcaatacttataagggggacaagatgcttggggatctttggatctacaggtcatcttcacagaatattcggatcaaatcttgtcagttagatcgcaatctatcctggccaaaatatctggctcgccaatcctccagaggatctaaggaattttttggtccaaatctcgttgttaggatacgcaatcctatctctcccaacaacatattcgcatattcctcggtccgcccaagcccgatccaatcccttggacctatcctggttaaacgtgcagacccttcgagttaaaaccccttaaatcctgaataaaacacattcgctcgactcaaacttggacagcgccccatttactcgacagatttcatagaacagcccatacgtttggccaactctcggcccaaacaaataaccttcgtctcagttcctcacactcgaattccctagtgcccggcccacagacttagggagacggttattacagaaccccctaactcggttctagacgtgggtagggatcgagggatactatcgaatatcgacacgaggaatgccactgatcggctttgttgcctttttggagtt

SEQ ID NO: 39963 - DNA, 502 bp, Arabidopsis thaliana columbia
tatttagtgtcttatatatcttgattgatcttctcccatctatggactttaaatgcagtaatgacattccaaagttgaaagcagtactagtgatgttacaaagggtagaataatggctaatctctaccgatctgagctagctatacaatactgcctgtccaggtacacacttagtgttatatcaaaaatttatagcctgaatccgataaaataagaaactacaggcttccaaaactatccactcggcaactctggctttcctaataaaatattcggccagtgattgcatctttctttcaactacattcttatataactccctaatcaacctcagaggaataggtagcttcatggagaaatctcgaatatatctaatcaatacagaacctcggcagatactactccgtcactgaattaccactcaaaatgagaataaaacacaggcaaacaaaaatggagataattgagagtaacttctcattcttgaagcatgtacgaatgt

SEQ ID NO: 39964 - DNA, 765 bp, Arabidopsis thaliana columbia
taaagtaaggtctgcaaccatcctagttggaacaaaatgacaacatgtttcaaatagattggatacatactcttgctggtagcagggtgtcaggaagccgcagagtacgaagctgggaacgttcactgatctcagtcagcttccaagtctttgatttctctgcatcatcagcgattcgtggtttgacatctggcagactgcgattatctccattctaaaaccaaaaaattatgaataaacttagcaggaattcagtaaagcgttttgaatgaaaatatctaaccgaacaaaatatcttaaaacatttcacaggtaggattccaatccagtaacagatgccactggtccacttctttcacccattgatagactcattccagtgcttgaatttggagtgccaaatgtgccaacaataggaccctaaaacaaaaatcatgcattcaaattttttgttttctgcaatagcaaccagccagaacagaataagaaagaatatgatgacaagtgtttaccttagcaactgacccaggaggagctctagagctatcaaggccacggtttgccatggaatgcaaaattctggaaccttcagcattcgctagaatcttaattccgttatcagtagttgagacggccagcagagttccttctttattgatccttaagcaaggggaagactattgatattaagttagcaaccaattcttttaaaggtcaatactacaaacagcaattgaggtagacatagacccttacccggtaaac

SEQ ID NO: 39965 - DNA, 741 bp, Arabidopsis thaliana columbia
cagtagtgatctctgtttattataagtgtatagatcacaattatgcaaataactcatccctatcaatctgtaatttacgagattagtactgttgagtttagttttgcttatgaagtattttttttggataattacgtatttacatctttaaataggtttcactgtgtgttgtatatgcgatccaaggtgctttgaatcgttaaattgatatgatggtgaaattaatatagcttactatctcattagtgcataagccaaacgtgacaaggtaactcatacatggcagagagaacattgctctgcaatagcttcttaccttgttgtgacctgtgatactagtgtgtgacaacaagaaatgaaaaatgtaaagtttccttaaaactttaatcaaacagtataatcaagcaatgaaatgaacaattttgtttttaatttcaaaatgattatcaaagttctattcatgtccgaatattcgttttattttaaggttatttcgttaagattcacttttgcagagcgtcgccggcagctcaacgatggtgactcgcttaagactcgtttcgagatcttctcgttacgccaccgtcaagttcactgactctgtctcagcatgctcatgtcgtcgtctcttctctgcctccaccgaccccgaacccgaatctcaacccgaacaagccccgcctacgaatcccgtcaccggagacgaaaagctacggaatctccgagttcttctccagcaga

SEQ ID NO: 39966 - DNA, 528 bp, Arabidopsis thaliana columbia
ctttgctcaaggaatatctttctttggtcatccatctgaaaattcgatctgatcactgagaaactacggcgacgacgaagaatacggtggaggaggaagtacaatgagaatattaagctacggaatcgttattctctctttactcgttttctctttcattgaatttggcgttcacgctcgtcccgtcgttctcgtcctctcaaatgacgatctcaatagcggcggcgatgataacggagtcggagagtcctctgacttcgatgagtttggagaatccgaacctaagtccgaagaggagcttgatcccggttcatggcgatcgatcttcgagccagatgactcaacagtccaagcagcctcgccgcagtactactccggcctcaaaaagattctatcggcggcgagtgagggaaatttcaggttgatggaagaagcagtggatgagatagaggctgcttcttcagctggagatccaacgcacagtcgataatggggttcgtttacgggataggaatgatgcgagagaag

SEQ ID NO: 39967 - DNA, 472 bp, Arabidopsis thaliana columbia
gtttggtgaatccgaacccaaatccgaagaggagcttgatcccggttcatggcgtcgaatcttcgagacaaatgagtccaccgtccacgcctctgcgtcgccgcagtattactccggactccacaaaattctctcggctgcgagtgaaggaaacactacattgatggaggaagcggtttcagagatagattcgtctgcctcgtcaggagatccacacgcacaatcagtgatggggttcgtatacgggattgggatgatgcgtgagacgagccgaagcaaatcgattttgcatcatcatttcgcggctgcgggaggaaatatgcagtctaaaatggcacttgcttttagatatctaagacaaaatgtaagcaagccacactgaacatttcaattggaacttatctaattttgaagttttttggtttcttgtgatccttttcacagatgtatgataaagctgttgagttatatg

SEQ ID NO: 39968 - DNA, 293 bp, Arabidopsis thaliana columbia
  unsure (1)..(293): unsure at all n locations
tgatagctatttagattatagaaaaactataaactggacaaactcatttaatccattagtcgaagatgatgacttgtaattaaaaaaattttaattttaactaatcataaatacagaattaaattcataaataaattaaatttacctcgccctctncccttantgttnacaagattgagtttattgtattatcgtttttcgtggcggtgccgacatgcaacctggtttggagctttacggtgtttgcaaggttcttttggtggttcgtcatgttgatgcaattctttctgggt

SEQ ID NO: 39969 - DNA, 318 bp, Arabidopsis thaliana columbia
gagagctgtgtctctgtgtgtgattctaatagaggtgtagtacgtcgctttgctttcagtccattaaaaccattccataacctattccgcaccgacatgtctactcccccttaactttataagcctctctatctctatatcactactccgtcttgattttataaacagaaggatgaaagagagagagatcttcctcgggattgcaacatgttggactacgaatgggataatccttcctccatcgttctctccggagatgacagaagcccgggctctgacccgacccggtcatccttctcctttcccgaccccgtctcc

SEQ ID NO: 39970 - DNA, 1339 bp, Arabidopsis thaliana columbia
attttgccgtttccgtccccgtatccgttttggttctacttagtttactatattatcgtgagatgtaaatgcgtagaacaggattgttaatcttcccttttattctttgtgcatctggaatcttgacagggacaaccagagcaagggaaacaaccatgggaaggggtacattagaattcccctagtcttcttcgtccttggtattatccgttatagaataggaggatcccgtcgtttttgctactttatctgacgttattggcgttttcaggtgagagaacgatgcaggagagagtggacaatgtttcaagacagattggatgatgctgaaaaagcttattttgaagcatctgctcacaagaatgcttcttcacggcctcacgggtaataaggaaacatatagtctctccctccgacttccactctctttgtttacctgttaattttgtcccggagctgtctttgatttcgtgtttatggaagagaatagtctggtcgagagaagataaattgttagcagctaagcacattcattaacatctgattagtctttcttttttcttttcttttcttaactctgttaactcttattgttgatgagaactccggtggagagtagagttagaggtagacaacaataaaaaaagggagattaactgtgatgggtaagaaattaggtgttattaccagaacacgacagaactttttttaattactgttatattttcgagttttttttattacccagcgtgcccctactaaacgttaccggaaaaaacgtaattacagggaatgccactgccacgtcagaatttgctgacgtggattaaatgaactcagccggctgagttacggtatgttgcggctgacttacgtcaaaaatatatgagtcataacaaaacggcgaagtatgagtataactcagccagacgttacggctgagttgaaaaatgttgcctgagttatagtataactcaggcaacggtatggttgagttaaggatgttcggccgagttataagaagttatacgataacccagccaacaatatggctgagttatgagaaaaaggctgacttatttcctcgacgcggccgagttatagttttgattggcttagttatggaaagatgtgacagctgagttatggtcgagtgatataaatcagccgccaatagctggattacgatataactcagccatgttatggctgacttatttttaaaagattaattactataatatcatgcagttatggccgagttgttgaacgttacggttgagttagttgagttacgacattacacggctgacttaactttattttttttcctttttta

SEQ ID NO: 39971 - DNA, 384 bp, Arabidopsis thaliana columbia
aggatcccccatcttcgttacggtaatattgaatcgtgtcgtaaacgtgcatgcaaagtaagttgtcttggtttcacggattttgtgtaatatgatcaatattagactttcttttttgactttggtgattggtgttgtgacagatatctgtatggacaaggagccagatggtgtggtggtctatgcgaacggtgattcgtgtaatccaaaccaagaaaatgtttctgagcctctcttagattcagtatcacgcgatgatgctaatgtacatacagagcttcgatatggggaagagaacatcgaagtaaacgaatatgatgttaaagagtgtactagtgagatccccgttggtaagccgataggagatgattttgagtctaaaga

SEQ ID NO: 39972 - DNA, 509 bp, Arabidopsis thaliana columbia
aaaacatttagggaaagaaacatacttgactgcttccatttcttcagtttcttgccgagcgtgacacctgcagatgaattagcaagagatatagttgagctcttttatgaaagcattatcatattgaggctgtattagcattagtattataagtatttaccatctgacacaatcaacccagcctgtaccgtcatcaacaacaaaatcgacctgagtgattctgttctccattctagaaatccgtccaacgattacaacctatacacagatatcaccatagcgtcaaatgcttgaatcaatagagcttaaggcataacattatcagcaaacaagttttaacagcagcagatgaaaaggagctcacagttttaatatcaacgccatcaatagagaaatttgattcgccagtggttgatgcgctgctcaactgcttcagtgtcaggggaagcaaggtacgtacatcgcggttctgcaaaatagtggtgaacactctcatacattgctggact

SEQ ID NO: 39973 - DNA, 630 bp, Arabidopsis thaliana columbia
  unsure (1)..(630): unsure at all n locations
aggattaaaaggctgtataaagaataatataagctcctgaacatgtgtattgtgtaacctgatatatttatataaatactaatcgaatttatctgtaggaaagaggaagaaagatatttaaatatctcaacctttaacgataagtggaaaaatcttagtaaaaagttaacagtgatatggatttgagtttgtcagtattagcaaactgaattagaggtcgaagaagaatttgttggccttaattgagctcaagggccggataattcatattaccaccttaattgagaaagtcatataactttattgacatgcacttcttgtttatacatgtgtgtgttgatgtcgtttcgtatcatttcctccatatccatcaagaattcaagatataagcttagtccaatcgatagaaaaagcttgaaaaagaattttgaaaagacgaatcaaagtataaccggctttattttatttttggaccaatcatattcaactttctgaagttgtaaaattagaatttctttttgaccttttttggttttactttgtcaattgaactgccatttattataaaaaatnaaagctacatcatctttgaacaattcaagaagataagaacaagcacctcaaaagata

SEQ ID NO: 39974 - DNA, 374 bp, Arabidopsis thaliana columbia
catctactgtcctttcgttttttatacgcgtcaaatgagtctttaacttcagattagctctgtaaacaatcgcgattagtccggattgcatctaaggattcgttgatggcggcgtcgtggcagtgggaaaatgccaccgccggcgccgtcgctggattcgccaccgtagctgctatgcactctcttgatgttgttcgtacgagattccaaggtctggtttttcactcctggattaactcatcgattttgcttttaaaaagttgctaacttgattgaacaacagtcaacgacggaagagggtcaagtctgccgacgtacaagaacactgctcacgctgtcttcaccattgcccgtctcgaggtttcccagatgaa

SEQ ID NO: 39975 - DNA, 550 bp, Arabidopsis thaliana columbia
acaatagggaatcagggagtagcttattgattaattgttatgctttgtgaatagcgtgtaaagcttgattgtgggcaactgagctcttgttcacgtctctcctttttgaactccggattgatatataaaactgtcatctatctcattgtgtgcaattagatcttcttctccttttctcgttatctcttttttttttgttcagatgtcatctgaatctcgaaattcttttacacactttgaaattcattccttcaggtaatgccagtcttgaggctgcagttaattgggtggtggagcatgagaatgatcctgacgtagatgaaatgccaaaggtgggtgttttgtcaattattacttttcagcagaatgtctgttctggaccgttttgtttcttgataattgcattccaaatctcggtttttagttcttatctcaaagtggttttttgcttgatgcgacaatttggaggtcaaaattttctgtatatatcccttcaacaatcttatatcttgttatatgacatgtatgtggtcttaaaattactccattg

SEQ ID NO: 39976 - DNA, 513 bp, Arabidopsis thaliana columbia
gatctgtctgaggcaatctcgtactcactaatctcataacgcttgttactatctctctcctccacgtctcttcttcctcttctgtcactttcttcgcttccatagttttcaatccaagcttttccaatttcctctaccaatcagcctcaggactagagtctaggtctctaggagctcgaaatatcaaaagcgtgaacctttaaacgagcctagtcttcccgagtcgcacgaatcgagtctagacgcgttggaacttatttttgcaaatttggctgtgtaccgcagataaaaagaagttccaagtttttaggttctgtctgcaaaaacatatcgcgaaccaacttaaaaggcttactttgactgtagcctgtgggcctagagttagaagtcgaaaaatctcgcttttagattcgttcaggcatttcgtcgagcaccttctctgcattacgtctccctacttctctctattcattctttcaatgataagtcctaactaaactccgagagaacact

SEQ ID NO: 39977 - DNA, 587 bp, Arabidopsis thaliana columbia
tagtaacggccgccagtgtgctctaaagagctcttcgtcctccctttaccgtccattaaagaaaccagccagggctcgagttcggcttactttcgcatttcaaagagcgagaattttagtcgaaaatcgccctcaactttgatggacaaatcgccccatacgaagaacccgccatctagtatgcagtcagcccggtaccttcaatcgccgtggaattagctctttacctgtgttgtctacatccttcagtcggtgcagcgacgaaaccagagtcccagtcaatgcagtagacggtggaatggaagctggcgcgtcctcctgagcatcgtaaagactgcaggacatgaaaaaatagggactctgcaggtagtgcctggtaacgcagctgaattagcccactggttgccagcaacgcgaaaaaagatcctgtcactcactgagctagataagtccctcctccctcacccgaatttgcacaatcggcggcgggtcaaccggtttgcgctctgcaaattgatcgatgcccaggtcagttctcgcttgtcctctcgaactgaatggatgcgtacgtcgctgaaatcgctgtt

SEQ ID NO: 39978 - DNA, 584 bp, Arabidopsis thaliana columbia
tctagtaacgtgccgccagtgtgctctaaagcaaaaccaactggccctggcatggctactgagagagcgtccgttacgtacttgctttgtatggccaggccttggagcaatcggctcacactcagcaggcatcggcccttcatcgactggagagtctgagccgccagcgcgcaggcactccggagattccttctctcaacagaaactattcccgaagtgctgtaaacctgcgtaacggactgctgaaactgaccactgccgagtcgtcgccagctgcatcccgacccacgagtcctccatcatctgctacctcaccttcaaggccacaaatcgagtctgaactaaaacctcccggacagcctccgttgagtcccccagttagtgaaaacgaagaggcgactctgatgtccgctttgcaacctgaagatcgtggaaaagcaacagccatgggcatgttcaataagccgcggactgcctatgatgatagtcaattttccaccgtcaacttcaactgttccaaggtcgaaacacaccgcctctacgacaacaatctccagcgccacgaccttctcaagatgaactga

SEQ ID NO: 39979 - DNA, 1889 bp, Arabidopsis thaliana columbia
gaaactctacagttaagcgtgcttgggctggagtagttttaggtggacgactttccgaaaagtgattgtggaaccatgcgagtgaggacaaagcatggtaaaagatcatatagtgatttttttgttctgtttctccgcatatgccaataacatatatccagagcccacagtttcactatagccactaatcccatagacaaagccactcctactgaatccgcaaatcacaaaatcaaattcgaagcaaatccaaagaatccccaaacgcaagccggaaatactcactcagacctaaacaaaatagtcccaactactcgaaggaggaagagcaagaagaaagtttacccaaccaataaacacacaaaatctcaggaaacagaaccaaaaaacatcaccaaagagaagaaggcaacgccggatctagacacgcccatgagctcctagaacattccacacaccagacctcgttgatggcaggagctacggctcgtggaccatctcttgcacctcgtctggtggtgttgtcggcggcgcacgacataattcttcaaatcaaaaggatcttagggttttggcgtttgggctaattttacttgggctcacaacattgtatctcttggcccatttcagaaaattgcgagccaactccaaaatctgcttggcccaagtctgatctttcaaacatattacttagcccaataaatttgatacttcgatatgtgaaattgtttgaccgaggacaccaatcaagttctatgtcgatatctttgcaatgggatcgtgatactatttctcgaactttggtcaaaagcaaatcatcgaattcttcatatttgtatcttagctctaggctacttgatattatctctttagtggagagttggcgttggtatggttgcttaattccaagcaacaactccattgatctctctctaaagcttctcccaatctcccataccttacagattctcaaaatcccttgagaaacattcatttgttcaaaaaattatcttgaatcatattatagagctttaaaccaaaatttattcgactttaagagcctcacttacctgtcttacatgttctttgagaatcctatgttccagccttcttcctttatggagagatcttttacccattcctcctaattccaattcaccgtcctcggctttcggctttcaagccgtgcaagcacctaatgctcctaaccattctactactttgtgtagagcttctcgtgctggcgaatattaaagttttagaattattttcaacgttattatgtctattcagcagactaacttctcacgtcccaaagtttccatggttgtgaatccgacgcaccgttttctggctagtggcaacttcaactcttgtctacgagatttcatggcttgcttgtcgacttatccttgttatcactttgttgcatctattttccaatcaacaaagtgataatagtttttgttgattggaaaattattatcactttgtcactattttcgtagaactatctatctttgtaatttgtttcatgtgaatgaattcaaaagctttggcctgaaaaaaaaaaagatatatgactgaaatatctaatatactttcggtataattatttacctccacgatcaccgtaatatttttttaagattttcaaagtgttagtgcgagaaagtaaattttccaatcaacaacaagtgttaaattctaacaaaataaataaataatttttacttaacactattttaataataacatttagtttgttaatatgtctatatataatattattttctgacacatatcaaaagttatattgttaactatatatgtcaaaatttaatcaattattgatatgtgtccaaacttaattatttgtaattatgtta

SEQ ID NO: 39980 - DNA, 891 bp, Arabidopsis thaliana columbia
tatatgcttccacaaccgtagtcataccggaaatatcataagaacctgtgtggacaaaataatgaacaatctggtatatcactgtgaatgctttaaagtcgtgattacggtgaaatctaaaagatttttacctcagaccgttgtaaaagagtggcaagaacaactatccattctttgaatttgacggagcacatctgagccaatagaaactctgcatctaaccggttctgtagctcactcatttgcagctgagggatttcaatagttagacttcgatgtaagataagtttactcaaatatgcagacttttacgatgcgatagggatctatgttttagttatcaaattgtttcaagcagcagaatgagagggaaaaataacgagttttgaacatcaaagaaaccacaagggggttgattctaaccttttgcccaatcagttcaagccctgcagcaaaattctgcagctgcgcacaaccatatctttctcgttgaagaaaatcctggaattttggtattgttagtgaatgactatataccttattggttccaagcatgaaaaggtgaatggtacaaattgtatacgtaccacaatatcaaactggggtgcctttgacgaatgcaacaagctttgaaagttctttaccagacatcaagtaactggcatgactttcaagtatgctctttacagaagcaacatgaggactttgctctttgaacgaggagctacatttagggtcacgttttacaaataaatcttgatcagaagacagttgtatcactctagaaaatcaaaaactacaatcagagttgtagtttccactcttatcgagtgatgatttcttgtggctggagcaaaaataagaaaaccgagaagcttaggcgataatgaa

SEQ ID NO: 39981 - DNA, 588 bp, Arabidopsis thaliana columbia
taaattttgaaatttttaagtttaaaagtttctgttggtcattaattttttgttcgtctaatggtaaaattcttcaatgggtttcttaaaaagaaaaaaatttattattaaattaacaattacaaatattttatttcgtaaaatttaataattaatacaaatacttaaattgtaaacatacatcgcatatatttttaatttgttttcaaaatgttttgtggtttttaggcagtgaatggagacacagtattcgcggattttaaagtgagagtgtggaaaaacgtgacttttcaccaatcaataaaactaaaagataaattgcgttttccaaaaaaaaaaaaaaaaacagatgcggatttcaaaggataataacacaggaccgcacttcaaaactgccacactccagttaagcagtggtccagtaaaattcgctggtacaatattatcttcttttataatttctttttctattaattgtttctccttatatattggtaaattagtgtagagagaatttacgaacaaaacacaaaaattcattctctctcattacactcttttttttttctactttgatattaagaaagt

SEQ ID NO: 39982 - DNA, 586 bp, Arabidopsis thaliana columbia
gttcttttttttctttgatccttaaataatgatgataagattgaaagtctcagatcatggttgcataacattagtctataaaaggaaacataagatgtaatcaaaatcataaagttgtcatctttaccgttatcttatccttttcattttctcttcacaaagaagataaaactagaagtactaccatcaagttgtaccaattaggcgtggagccatggaaaatatgcgtgtaaaaacatcgcagatatggatggacatgtgttgtttcaatggtagacacaattagttttttgaaaaaatggcatttggaaattgggatgtcactgttgagtaactttatataccggaaaacttactatttttcccaaactcatctaaattatatctaatttatatgtctttatcaactcaaaactatgaattaaaagtatgatggaaatgaatccaggcataaaatatttacttcacatgagtagcaaatagaaatatagatttgggatatttttttggttgggttaaaggttgatgcctcatgtggatacaatttgttattaacacaacactggttaatttagctgtataggat

SEQ ID NO: 39983 - DNA, 596 bp, Arabidopsis thaliana columbia
cgatgtatctatcaaaaagacacaaaacattgttgatattggaccttttgtttctttatgctcaaaaattggattccgtgtgaaatttgaagtgaccgttgtggaatctttttatacaactagattaacaagttgtcaactcttttcattgaattattgagtgtttttcaaattttgcatgaatattatagtttagtggtcctgaccttaatgatatattgataatatataaagtttgattattgctaattatttttagttcgcgtttatatgtatctggatgagaatcgtgttctctctaaggaaaattagggtaatgagcctttataacaataataaactatttaaaagagaaattgaaatttatgtgttctgatgaaatttagaacttaaaagagttcaaccgctattgattttcatactattttttcaatgaataactttgtaggtattttgaatttttggtaagtgcgtctaaacggttcagccgctagagcgaacatgacttgactccattcagtatttttggagcgggggcaaacatatacgggagatgagtgcggttgaggaaattggtcccacggaaagttttgtgt

SEQ ID NO: 39984 - DNA, 448 bp, Arabidopsis thaliana columbia
aagtaatcttctctgatttatatttgccaaccttatgatcctgatgtttttgggtttaagcgtttagaataacttttttgattcgttcgtccacacgtccttatcgtatgatctgttaatttgatatgcatatttacagaaacgggccctagtgcttgttgttgaatatgggcctggtctggccatattactatctcagaagtcagatcagaagcttgacccgaaaaagaaaaaaacgagagagataattcggaaacacgaacaccaatggtttaccgatgatgatgatgattggacaatggctacataaatggaatacgcggtaactaacatgagactactgagtaacatgatgtactctgcttcggcgatttcgtttccaagggttcgtctgcattgtagtattccgacagagccatcctgccggagaaacccattccgacagagc

SEQ ID NO: 39985 - DNA, 400 bp, Arabidopsis thaliana columbia
caattacctagacaaaatggttttaccatctaaccctttttttagattgctacagcaagtcctctcgtttgtggcggaaagatctgatggaattaattttaaaatacttcgtttttctatgttcgacacactagcttttagcctccttccattgctatctgatatctttatctaaaactgttcccttttttggtgctcgttacttctctggtttaaaaattttgatgttaaaatatatctgttttaactgtcaccctcccccgaagttcaaaatgctgctggaaagatgtcaaccagttttgggcttaggtagcccttgactgctcgattttggccatagtatgcttttactaggaaggtaaatgcagtgtttggcagtatcatgcattcaaagagtgaa

SEQ ID NO: 39986 - DNA, 560 bp, Arabidopsis thaliana columbia
cctcttttttttttttttttgcttgagagagttgtgtataaattattttaacgacgtcttgtgtacctttggtttcgggtctgtatccacttttagatttagatccatttaaaacaaaattaatctctgattaaaagtttcactttttttctctcgaatctttgattatgatgtagttaatatggaaagctcccgctggatttaaactgacatttataaattaaattattaaactcaagaaatatagattaaataaataaaaatttgtgattggtgaattcaaaaactggttatatattgtaaatacttaaaactagaaagtgaatcgtgtaaaatatccaacctataaggctacccactatcaaattcggattcaaaaaagggaaaataaatcagagagccgtttgatatttcttttgaattgtatttgtggtgatcctctgaacagatctctaatgtcggcggcggagaaggtaatcattgatctctgtagctcggaagaggaggaagaagatgttttcggtgatgagaataactatgactgaacggaagaggaagaa

SEQ ID NO: 39987 - DNA, 581 bp, Arabidopsis thaliana columbia
ttttttcttaataaaaagataaaaaaactgcataatacaggcggaataaaatatcatttaacaaaatactttgatgcaataatataaattcacgtggggtggaatgggatttaaatttaatgcataaatgcatggggttctttacactccaactaaccctattattttaaccaaaaccaactaaccttttttgggtttagttgagattcttgtctctgcaaattttaaaatgtgtatatacaagtatgaatttctacaattgtggtaactgttcgtaaccattttttttgtttatacgagagaaatatttatatcttgcaaaaaaaaaagcttatatccctaaagaaagtacacagtggtcgaggctggatctcatcatgggatccaaaacataggattcactgtgcacatacggcgactcggcgagttagattctcaaaggccattttacataaagacaaacatattagtatattacagagctagtctttttcttcaaaaccaagttcaagttttagtagttatatagatgtctctataccatttgtctggtttatgacacaaagttttagacggtgcag

SEQ ID NO: 39988 - DNA, 1185 bp, Arabidopsis thaliana columbia
taaacaaaaaaaaaaatcccggaaaaaaaaataaaaaaaaaaaaaagtcaaaaaaacaataagaagaaacattcaccataaaaaaaaaatacaataaaaaaaaccttgtattgacaaaatcagctaacctatatctatcatttatattgaagataagtatataagagctatctagtaaatatgtgtaatttacacttttctactgaaactagaacttttacttgtatatatatcccaagttatgttctttgtgtggaaaaaaaaagttaggtttctttgtataaatatagttgtatctctatcattaatcactaaaaaataatctttcgtctatacaagagaccacaaatgaactcttaatcattgggaattaggacttttaagagccaaacaaaaataaataaataatcatttggagtctcgtaatagaaagagttgcaaagtggaatatgtaaaactggtttgtgcaaaggcgtgacgcgaggaagcttcccatgtgaatgtaaactttggagtatgttatgctgtcgcggcgtggcatacgtggacttgtctgtgcgtgtgcttatttctttcaataccctaactcaatagagcccacacgtttctaatcattttttgctttccgtttaccacataaattaaattaaacccttttgaactatatagtatatcgttaaaataacgtatagtaaattatgtttaatcttaaccatttattttattttgaccatttcattattacatgtggtttaccagccagaacttgcgccatcttatatgatgattcaaaacattgctcacaattataaaaaaaaaactatgatagttgtacaacttatattgaaatatagaagagtagtatgagtaaactatacataagtttgatttaaaaaattgtgaatacagtgatttttttaagcatatagtgggagatatcgttttataaactgatatacaactcttcgaacatttgttgtggttgacccactttgactacaaagcctaaaggcaattcaaaagatggtatgaatgaatcattagctctatagtttatagttttcgacattttcattatacctagatataccctaagcaacattgctcatcctcgatggttccacgtccaccctcgtgcgccaattggaacaaaaacaatcgataaataagttaaagtgaacattg

SEQ ID NO: 39989 - DNA, 566 bp, Arabidopsis thaliana columbia
atccccccctccttggtcggaggaatcttaaattccagaaatgccctcgcttctctgtttcgacggcttggctctgtttttatcttttgttagatatgctcctctgtttgtaaccggagattccataaatgccctcgtcttctctgacaccttccgctctttctctatatccatctccgttacgaccggcagagaacgcgtccgatccagctgaaacatgtctgagcctccacggcccacaatacgacgcatatctccgccgttaccgccgccggatctttgttcatcgaagacgaaaccttccggtatcgaagaagatcgacccagttcaaagtgcctcctttttctcgatctcggatccgtaccaaactgtccattaagcgaaagacctaacgttagctccacgtctttctcatcctcttctgcttcatcttctctcttcttcgcttcttgttgattctcaccatgctcagagtctcgctgacaaaaatggttgcttgcgatgaaaaacttctgcaagagattattagcagaaagattgggtacttgaacgacgccgtttggga

SEQ ID NO: 39990 - DNA, 885 bp, Arabidopsis thaliana columbia
gctacaccgtgatggctgaaacggttgtcaaccttgtggagatgatgtctacggtctcggccaagtataagttcgatgctaatgctaagataagcgctagtgagagtgctgagattgaaaaatgtgtgatgaagttgaagagtgccattaggtcttacgtgaaggtgatctctcagtgcagcacgaaattctctgctggaaagagtattggtttccccacttaccccgttggtttcattggaggtatagctaaacaaggtctcggatatgcgggtaaatttgttggagctcatggccaagttggagccggattcgaaatcggagctaaagctaaggttggagttcagagtgaaaaattcttggagtacggaccaataactaaacccaaaggtaaggttggagttcaaggtgaagttaaagtcggaggtcaggtccatgccgcgggtaaggctaaggttagagctcaagttgaagctaaagtcggaggtgaaaccggcagtggatattatgatggaatcatgaagtactttggaaaaggtcacttcgatgccgcgggtaaggcgcatgtcagtggaggaagcggattcaggccattgagcaaccctcacaagaagcacttagattgaacaaagggcacaagtttatacaacagatgaaggagccatgagttcatctcttatttttatttttactattatatgaaggagggaaacgccatgcgatattaatctctatttgtaaccattttaaaaacaaactatatttgtaactcatcattaatataatatcgcatgttttcttaattacactctcattagtattttcattaagaactaaatcgctttaacatcctttattattaaaagggaagtcaaattaaaattt

SEQ ID NO: 39991 - DNA, 607 bp, Arabidopsis thaliana columbia
gtcccattctttatgaattcaagagcacatgtgccaatttggttcaagagctacgataagtaattgtttttaacaatgttatttcttaattatctatgatctatattcactgtgataacaagatgataaaaatgacgtgaatgcaagatatattaatacaaagctttttttaaaaacaatttactcatttacaaagataatgataacattctgagttaccataacacattaaaaacagagatatctgaaatggtaagttttttccatgtctcaataaaatatatattttcaaatttttctataaaaactattaatttgatattatgttttatgtttcttgcatttctgtctatcatgccagtaatacttgttaatggttcgtaaagagttggaatgagatgatatagtttcacccctcttataattcaagagtaatcagtgattagtattaagtatcttctttgtcatgaaacaccaactccgatgctcccttggtatagaacttcaagggaagtatgaatcacagtactggtatgtcgatgtgaatgcaaagataatagtatcgcacaccgagttgtatgtctaagtaaggtcttggagagattgg

SEQ ID NO: 39992 - DNA, 1195 bp, Arabidopsis thaliana columbia
ccgaatatggaagatcccgcaaaattctctaaggataaagttaatctccatcaccgactcttagatatctggaaatcttccgagaatatcgagggaggcgatttgccaaagccctatataaagcacctccaaggacaaacaaagaggacacgcacaaaaacgctctcaacttcaggctataaaaaacgctctgactttgaaggctaaaacacttattttatatatttctaaacacttgtacgatcaaatcatcattatctcaataatataattaagaacaccgtctgcggtaatcagcaattctgttgttctttgagaatctcacagagatccgttctttgaaggaaccctgtagtgacccgcgtaaggacattggccataggcaagagtccaaattttcgaaagttgcccgaatgcatggccaattgaccttacgtgcccaaaagaccatagaataccaaagggcaagtttgggcaagaacgggcgtgccacgggcaaaactttgccccgctgggcgttgaccgaccgttgaccgcgccaaggacgcgtggctcggcaagaacgggcgtgccacgggtgaaagtttgccccaccgaatgttagtagcttggagccgaagtttaggtggccacgtgtcactcatccgtttgagtagcaaacgtgtcatcgcggttagatgacacgtggattggtgattcgcccatactcatgacacgtggacatgctgactcgccattccctggcctataaaagcccaactcgaccccatttgattggtgaagagaaattgagcgggagtgagaggctgccgagtttaaaccgttagttcgatccaagttaggggcccatagccgagaactctgcctgaatcgttagaagctttccgttggttactgagtgagttctggataatggtttaagtttcataatcatatcctcatgcattcttgattgatttcatgagttatatgaattatgtgaatggttatattagattgcatatgtgatctttagattcttatgctattgcttatggttgagaggttgtgctgagatattgatgattctatgtgttgatttaatcatatgtttcataatatcttaaaatttggggtcttggtacgtggtgcttgtggtaggaggcaaagactataagcgtgccaagatcgtgataagtctggccttcgtagtgaa

SEQ ID NO: 39993 - DNA, 1552 bp, Arabidopsis thaliana columbia
gacttcttatgaagtttgaaaaatattagttaactatttcaaagaattgataaatgaataatggaaaaccgtgtttcatatatggttttataacattaattttggttcgaactatcaattcttatcctaacaattcgtgttgtgttttttcaacatgtacaaacaattttattcaaacatattaaaacttcgaataatctctcagttctctatttgtgcgtaaaaccactattaatcaaccgttactatagtttaaaaacaacttttttatcatttacttttattatttttttgtcatatcacctaaatactataaaaatactattatgataaacaaacaaatggggataaacaaaaattaaccgcttgatatttttaagggtaatattagggggtaacgtaatttgacatcaatattaagaaaatgaccttagtgcagaaaagttgggtaactaacgtttttgggccatgcgaaataacgaatataacctcggtcattgggcgtcaaatctttatttccgacagtagggttctcggtataggatcaaatagggtagtagggatatgattacaccgatacgtaataaaaattcatgcattacagtaatcgatatttttatatgtcacatgttaccttactatgcaagagaacctagttagagctattggttactacaggctgaataaccggattttgaatatgacacaggctgtatataattaccttcagatgatgcatgaaattaaagagatggattactttcctcacacctgcaagaaatgattctggaaaaagagatgtgacgtttacattaataccaaaatactacaaatatcccacaaatatcaaacttcataacgtaacccgcgttatgtataaaaaacacgatgtacaaattttccttagcagcatgtattaatgtaaagtaactgaagtaaaagttttacttgggaggcctaactcgaaatgtactggactggattaccctaaagttgaatgggcttttgagaagaagatccggaaattagatttccgaaacagcataagtacaacgtaaacaacatgttttgttaaaaaacacagcaatcattgttctgccacttgcaaatataacatagtggaagaagtataaaaggaaacagatgtgacagtgaaaagcgcgtgcaaagaggagagtagatatgtatcccttgcattaaatgcggcgtcagagagtatcagcttccaaggtattaaactgttaaaaaatagaaactttttttcatgtgtaacaatctgaacacatgctatatatgtgcttctcacgtacgctacatcttagcgaatcatataggtgacacgtctcaactgacgtcagcgttacgactgagcaagtggacgacgaagatatagtgtatcttacctcaggacaagttaatgtgtaaaaacatgagtatatgataaatcatttggttctattgtcgataacgtgcaatacaaataaagaacaagtacctgtttgatgcgacattcgtgaagagatcttctcgccgccctcgggtgttgggaggg

SEQ ID NO: 39994 - DNA, 590 bp, Arabidopsis thaliana columbia
tctagtaacgtgcgccagtgtgctctaaagagagacaagaatagaccccattattacggacattaatccatcgattctgagtagataatctatcttactgcagacagcggactgtccatgatcttgagatcctcgccgccgtctctctctggatttttccctgatgatcactcggcaacgtggttgacagggcagtcccaccgttcacgggcctacggaagaatcgatagacctcgacggttgtgagaccagtgatgccagtgataacagcgaccgcgcgatcgcgggcatgcgatctgcaatgactgcaagcactgcaagaactcgaacgacgagaataccgtgactacgtgactacgtgaccgctccgcattctggcatgctcgcattgaaaacccgacagctgaccgaacgcagggccagtctcgatcgatcagccaacgctcgtatccacggtcagactcagcgcgaaccaggcaggcccaaaagaatggcattccgcacagcgagagaaacaaagcgagtggtgactggccggtcaggtgcctcgctgtggggtgactgtccgtgatccgcaatgagccagtagc

SEQ ID NO: 39995 - DNA, 439 bp, Arabidopsis thaliana columbia
  unsure (1)..(439): unsure at all n locations
cgttaaagaagcatttatatccctttaatttgtctttgttctccatctctcttctcactttcctttaaaaatttatgctctcttcgcgtttatatttggtcgtattgattcctctctttcgttttgcctttatttataattgattcccccaccaagtttttatgctggagtactttccattaaagatccatcaaactttattaaagaaggaagaagaaagagataaaaaaaaagggtagaaggaacaatggctttcccatctaattggtcacaggttcacttctttgatcttccattactaaatgttctctcctctttctctctttttgtaattactctcttaaattcttcattgatgttttgattcgttttagtaataattttgattcatttccanaagatattcctattcccatcttcttttctaatccgctttctt

SEQ ID NO: 39996 - DNA, 1271 bp, Arabidopsis thaliana columbia
caaaacaacatgcacggtgggtggaattggtccacatatgtcacaatgaattcaagacaagaattcaggtctttcattcccaattttagttggtgatgggcttgttatgagttttccttgagaacatgcgttacatgaaaactcatcagatttgaatattttttggcttttcaatggatggttattagaactttgcaaaaacttttgcgtcatgactgaactaggatgtccaaatctttcatatcatgtcttaaatgtactcgagtttactataacatttgttgtgattatatttatttttgtgcaatataatccgaaagataacattggcaattcttccaataggtattgcctcttagattttatgcaaagatattcaatgccatctgtaacactctcaaaccgttctagaactaagaacgaatccggaagcgttacgtgtgatgcccgtagacgatctgaccgagttcccagaacacatccggtaccaaggtcagttcatccgtgaacatcgttcctcacgaagaacacggcctaaggcttttcaacccataccatgtccgtaagttgtgttagtcgagacaagactaatatcaggagtacacaaggcttttaaagaaaatctttttttttcaataaacattgaaatacttacaatggattgggctctcgagcctaatacttaaatcgagaataactacatatctaactttacaaagacaacaaactctacactggttccccaacgtccgtgctcttctttaggtcttcataactaaggttacctgtaagacaaaaagtagaatactgagtaatctaagattactcggtaagtccgggatctctaaaaatgataataacctaacccaaccccaatcaataagcagcaagcaaccaagcaatgcaacaaaaaaatgtatatactccattgagtatacataaacaatgcgcaatgaaattaaatatgcatgcaaccaactactctaccattaaacctggggccccgcgtattgataacacaactttttaacccgttttagctattggtttcttatgttcagagagcatttggtgccattctagagccaataagaggagaaacacgtattataggtgccaagaaggttttaagagttttgaagctaaaagtatcaaaagacgatcaccaccgaccattaggtcacgcccaagtctttccctttttgcgcagccgccattaggctccttccctgaagcccactactcggcccgatcacttacttatccggcgg

SEQ ID NO: 39997 - DNA, 512 bp, Arabidopsis thaliana columbia
gcatatacaaataatgcatgagagtggaaaatatatataagataagaaataaagcataagaacatgacccatgtttagaaaagcattatgttctcactttatctttgtgctccttcactatcatcatcttctctctaaacctctatcttctctctttctcttttggttctgtgctcgatctcctcacatctctctttaacctttggttcccttctttcgtttttatatgattctcccaccatttttgttcttttgagttttaaagatccatcaaactttattaaagaaagaagaacaaagagataaaagggaagaagaacaatggttttctcatccgtctcaagctttttagatccaccaattaattggccacaggttctttgatcttccattatacctaattctctctttctctactttctttttgtgtgatttttacgctcttaaattcttcattgattgttttgattcttatattaataattttgattcattttttctaaaagatatat

SEQ ID NO: 39998 - DNA, 1676 bp, Arabidopsis thaliana columbia
gacctgatacaacatcggatgattgaatatttttaaaaacttatgttgttatacgtatgtttgagaacgtggagtctccttccatgctatgcattgattgttgagtgtgattagaatttcgccattgtgttcgctctttttatcttttcccttagcttgataagctttatgagatgtggttttcttagtcgattttggttttgatctcttttgccttttctaccttgatgagcaaaaaggaagttttacattcttcttcttatttcgtactcgtccttatataaggatccaattggggtttgcaatattcagtttttgatcaataaagaataagggttttaccttttatcaaagtctacgaacttcctttgctttctttgcaagaaaccaagagttcatagcaacaagtctttctcgtaaaccattgatctacagaaagttcttgttctctgcattaagaaatatgtgttttggcgggaccatttgaataacatgttgtttttcactgtaagacgggatgggtgttacatttgtagcatggaagaggcaaacgccaaaaaattctgaagacttgaggaatccaacaatcaatagaaaactctatacccggctaacggacatgatgacgcacattcggaatggcgcgcttactgcttacaattggggcggagagaggatgcagcaccgtcgttcatcacaccagctcacaactaccaacatatcaagctcgattaccctcggtttgatggcggtgatcccacggagtggttgagaaaacttaaactaatatatcacctttcattagacatcaagggaacaacttgtgagcttttgcatcgtatcatctcacagtggaaggaaacccttggtggaaggggaaacgtttatgcacgaattgtgggtacgatttgggccatcagaaggtgagatttttcacgaagcgttgtctaaattcgtcaaacagggtgctcacgattattcgtattaacgcaaaatctaaccccagatatgtaaaacataagccaaggagtttgagagataaatgaacatggttgagatagacttgttgtgtctatgaatcagatagtcctttatttttctctttcttttatccaagcttcttaatatatagggttgtcgcttcttttaagtctgcctgccacatgttactgtttcgttgaaatcattggagccataccatttctctgtataatcctcttgacggtatctcgttcaatataaattatggcttaatcaatcagagtttgtaacaccttgaataagtgagaagtgatgacaataagcttgtattttaggaacaatcagaattattctctctcttttttttttttttgctaacaacaaatttattctctgttttgcaaatccatttttaaaaagttcttgcttcaaaaaaaagaagataaatttactttttttttttttttgatataccctattggctaatctggtcagcttcggtagaaacgcaccgaagtactacagagtggacttctcccgattcgggtagaattggactaccacactctctggtccgagtttggaatgccttccgactaatgccaagggataatcagaccgcctgcctttctgactaccaggtaaaccaagtacgtcaatgcccaactgacagacttttgattcaaaccttgttt

SEQ ID NO: 39999 - DNA, 494 bp, Arabidopsis thaliana columbia
taaaaggtgtaagctttttatcatttgttcttagctaacaagggaaagaaagataaagagggagcgtgtatatttgtacacgaatttcttgtattctctccggcaaactttttattggcattggtgggtaagatttcagctagacgtaggtgatatacataattttgtatatctataatttttctaggatacatcacatgagtttaggcctcttaagccaaataagtaagccatattaataagctttaaatttagacttatttttcatgtgtggtttgtttaagtgttggattagagagtggccaatcaagagattaaaatagtggatccctttacgaacacaatgaagatcccaatcctcttctttaggaacctctagactggcagagactaactcaccatatgacaccacctttctagtcttcttcccttaggcctcgaccaacttgtgctttgctatagaagcctttcattctcagccgattttggggtaa

SEQ ID NO: 40000 - DNA, 361 bp, Arabidopsis thaliana columbia
gatatcgtggcaatatgagaaaaatgaaagcaaagttgacgccaaaaacaaacgagagattgacaaccaagtgcagatgcctcacagtcaataaaatgttcgagcatgtgtggccacgataaagcactcctcttgcacaaaagactaagattcgaaagaaaggtattgtcggaagacgcttcatgacgtggaacgaaccctgcaaacccacgacacagaaaatcatcagtgaacagtggaaaggcaaacctcgtcgaacccggaccaactaagaactaccaggattaaagttccatatgttaacacacgacgaattagtgtcgtcaacagagacatcacttagtttcgcgaagaagaaaca

SEQ ID NO: 40001 - DNA, 413 bp, Arabidopsis thaliana columbia
ctctgttatgctcttatctgagggtttatttctttctttataacgaactctttgcttctttttcttcgctgtgaatggaataataatagggttagtgacaatgatgatggataataaaggaggtttaggagacaagagacatgttctctccaaggactactcttagattttaatgatttttaaatataactaagaaaacttacatgtgatatagatgaccaactcatatttgtggaactggaatcattcaaattaaattgctattgaaatttcagccgttaaataacaaaaagatgactttatttatttcctcctttattataccaactatcatcgtccgattccaataaatacactatagtattgagtttcacatcattgatgactacacacatggaaacgtatgatcttat

SEQ ID NO: 40002 - DNA, 120 bp, Arabidopsis thaliana columbia
aaacaggctggatgctgggagtgtgtggtgacacaggtcacccatcatcccctgtgtgcccactgcctacccaggggcccatccagatggtttttcaggccctactttcatcccaagagc

SEQ ID NO: 40003 - DNA, 1267 bp, Arabidopsis thaliana columbia
  unsure (1)..(1267): unsure at all n locations
agtaattagttatatagaaaaaaacaattcatacaatactcgtgattgattgtggaggtagaatcatggggactaaatccaaattcaaggttaagaaaattccccagatcgagaaagttaccacttagaagcaacagtctgatacgcatctttcacgtcatccactgagctgtacatctttacacccaaaactaagaactcaaaaaggaaaaataagaaatcaaatcaaaagaatcaaaaccggaaggtaattgtgtagcacagtacatagtcgagagagaaagcgagcttagagaattgtgtaccgtcgtaatgagaaggaggaaaggaacgaggaagaaggaaaagctggaagaacatagcgaggacgaagaggaagataggaaccgtgtaggctttgagaccagaaggcatcgacgacgacgccggagtttccttcgccatcggggattttgggaaactccgatcaaagagtctcgatgtgataagtgtaaatctccttcggttatttttccgcgtttttcttaataaataaaaaaagggatcgactcttagcattaagtaagtaattatactcttttattatggttaaaatcgtatcttatcagatcacagcatactaaatctctctttttctaaaattaaatataattatggtttaagattaatatgttatttttaacaaaaacaaaaaaaaagattaatatgtgacgactaccaaacaatattagatagtattacgaatttacagataaaattgccaaaacctttataaattttaaaataaaatacaaatgatcaactatctatttccatggtaaatacattattactaccattttgttttgtgcaaaagtttatttaatacctgaatggaacacatattgtgaaataaacaaaataaaactctcatcatttctctttacctctctctatatactttacatacaagacacgactccaaacctggtcatgccaatacctcaactggacacattacgttcctggaatgaataaccaaagacacatgcaacctctggatattttgtctaaccttttctccaaagctggttgtctaaaaggaagatccaaaagacgagtaacaagcanaattgcagtatcaaatttctccatatattgccaacaatgacaagaaacatctatggaataagaatttgacagttaaaacttacttcatgagaccaacaatgaacactaaggacaagtgcagggtaacacattgcattgtgtttgtgagagtatttgt

SEQ ID NO: 40004 - DNA, 395 bp, Arabidopsis thaliana columbia
cagtttctcaccaaaatctctcatctacaaaagaaaacaaaataataaatattatagtttatttttgataaaaaatattctcaaagctactaatttttgcaactataccatttatctccaaaatatgtaggaccatattgcgtattattttttattttattattctacattttaatttgaaaatagaggataatattgcaaatactaacaactttaaagattttgttttgcattaaacccttaattgtaagagtttctaaagagagttgagagagtttctagtagtctctcactctctcaacttttatatagagactttcataagagattttggtgaaagactcaccaatgcatatgctctaggacttgaacacccgaaacacatttataactcg

SEQ ID NO: 40005 - DNA, 550 bp, Arabidopsis thaliana columbia
gttaacgatgcaatgcaactcaagtcaagctctttacaaaatggctgaattgctgaaatatcgttaccaagaggccaaaacaacaacaacgccggcatacatttcgtcacctctgcaagtctgctccgtctgtgaagaacaaccatcacaaccgtcattgaatcatttgctaacatgctatatcactctgttggctttgctattttattttatttttgttttttgcttttttttttgttatatcattcggcagacctagctattttcttgattaatcgtgggttcttgttcatggaaaaatttgaaacactgatccttagataacgaaacaaaagacaagattcatggagttttgaagtaggacaagcttttaatatatcttgcaaacgagatcataattttacgccataaaaggtgatattttctttaattatctctctatccgtaagtcttgaaaaaatggttcacatccactaacaaagatgctgtcatcacatttcgcagtgacatctagagtttgtgaattgttgttcaaagcaatacaaatatt

SEQ ID NO: 40006 - DNA, 104 bp, Arabidopsis thaliana columbia
tcctctaccatgactacagcaaacaacaaaaactaaaattttaaatagtccgctattagaaatcattaaatcctagaaaagtcagatttggaaatagaagagtc

SEQ ID NO: 40007 - DNA, 485 bp, Arabidopsis thaliana columbia
tagaggagaggatcccccaagaggttctaaagattactacaagtgattatgtcttggaatttaggcccatctcccatacgccatacattagacaatttaaacgtagttaataatggataagctatgatttagtgaaatactttctattgcaaaaccaagctgtgaatatcatttcttgggacgagtgaagggagaactgagaacgattaaatccaagccaaaattgtattagttatccaacccgaataataaaaatagggaaatcaatattcttattgtattagtaaaaatgaacagtgtaattaagcataacccccagaaataacagataaataaaaaataaattattattattaaactcaaaactatggtctcggtctctcggacatatcaattattaaacaaaaattaggtgtttttgggctttgtggcccatgtgtgttcacgagcctctcttatctgggcctggtttccccttgtggcgt

SEQ ID NO: 40008 - DNA, 513 bp, Arabidopsis thaliana columbia
aggaacccccctcggcatcgaatgagttagcccgaaaatctctcattcaattttatcaggcccagagcttatatttttcaacggatccggaccggccctaaacttttagcccattttaacatccttggtcacctcaattttaaaccgatactcagttaacctaaaccaaataaatttataaatttccagatctcttattttttttttcctatttaattactttccaaagaaattttatttatattaaatctttgaagattttcattgattgaaatcatttgttaatatcaaacttctatatgtattttcgaacatttccaaactgtatatacacatgtgaactgattgattcatttcctataattaaatctttccagtttctataaaaggcagtgctttcaaatttgttagcttaattccagtaatcaacaattaaagacagtcgacactatatatatacctaaaacacacacatcagcctatactgcaaaacattactccattcttaaacaa

SEQ ID NO: 40009 - DNA, 532 bp, Arabidopsis thaliana columbia
ctgttcaatcactcccctcacttcactaaattgtaggaaaatacataggcaaactgaataattcgatcttttcctcgcttgttactccctacgatataaaaacaaacagatgattactagtcatttcttatctcttacgcattcatgaaacaattcatgaaacttaacgttatataagacttttgtattatgaaaataaaaataaaaaagttttggattgtatatcttaccaatttagccatatccataagacaatcaccgacggtatcgaacacattaccctgccatgtctcatacatgggcacgccatccggcacattgacctaaaataatcattaatccaccaggcacaagttcttccgctctagcgtcaataaaagcctccatgtcttctatgaactgaactttgtaagccttggtcacatcttctaataaattgttacagtgcatgtaatgtttgttccaggccggagatttcttgtcacatacatatttgggaactttagaaagccaatgagttgtgtaagaagtg

SEQ ID NO: 40010 - DNA, 409 bp, Arabidopsis thaliana columbia
catgaattaataaatagtctcttatcatatcaattttcagttcctatataattaagtttcactttcttccttaatagctcttcaaaacactttttgtccaaactctctcttaaaaaatgaaggtctctcctcgtttgaactcagcccttctcctattgttcatgatccttgccacaggttcttaattcataccatcatgatacatctaaataaaaactcatgtcaacatgtaatcatctacataatatatttgcaagtctacataatatgatacatatggtatccgtcattgtattttggttaacatatttgatgtatgattaggcagaagcttgtggataagcccatattaattacatgttcgaataatctataacgtttaaggtaatgtcttgtagtgatgggtctg

SEQ ID NO: 40011 - DNA, 596 bp, Arabidopsis thaliana columbia
  unsure (1)..(596): unsure at all n locations
tggaagctttggagaagtcaattaatgcacgtactggtactgacgcaatgcaaaatctccaacaggtgtctcatctatctttctttgtttctttcttcactctttgttgataagaagttttgttgccagagatgtatatctatctatgaacatccgatttttcaggaaaacatgatgctgaagcagcaattagaagctattgtacaggaaaacagtttactgaaacgagcggtagtgacacagcagaagcggcaaagagaatcggaagaccaaagtcaggaattgcagcatctgaggcagctagtcactcaataccaggaacagttgagaactttagaggtctgtattaaatgtcttcaccttatcttatacaattttgttgtctttttgtcgatatgattagatctaacttctaagttttgttttgattgctccttgcaggtgaataactatgctctgacgcttcatctgaaacaagctcagcaaanacagttcatcccggggcggtaccatccagacgtcttctaatactttgtgaggcctcgtatcattttgttccagtgtattttctctgttggtttgtgctatttatatat

SEQ ID NO: 40012 - DNA, 874 bp, Arabidopsis thaliana columbia
taggttgagaaaaaaatagattcaccgtcataattagggtcggtcggattttacaataaacccaaaaataaagtacggaaggtaaaaaagtaaaaaacacaattacccgaataggccatgctcattggccatttcccaccactaggttagtacaaactgaccaactgtcccaataaagaaagacgaaattacaatgtgaggcagattttttgcattcttctcgatcaatcagaaagtgacacctcatagattacgtctttttagttcttactaacgaaacacccaaacaaaaaaagataaattacaaaatatcattttccttatcttattgacttgtcaagattctcttcttcttcttcttcttcctcctcctccaaactcagttccctccgtccatggcagcaaccttacctctatctccgatcaatcatcagttgtgtcggttcgggaacaactctttgacgactcaccggttctgttctcctggcttcttgatttcttctccttgtttcattggtttgaccggaatgggctctgctactcagttacgtgctcgtcgttctctgatctcttcagcagttgcgacgaattcgctgttgcatgacgtcggagccaccgtggcagtgcttggtggagcatacgcgcttgtcttaagcttcgagagtctcaccaagcgaaacgtcattcaacaggtctcttaataatcgttttagttatccacacaatttctccgtttacaattccagttttattcgaacaccactatatgttgaaagaagttcctcaagttgtgtttgcagagtctcattagaacaatgataagcctaggaaattttggtgtgaattagtttttcattctgaatgtttataagaa

SEQ ID NO: 40013 - DNA, 648 bp, Arabidopsis thaliana columbia
tttcaggtgtagaaggagcttacaaggaatctactcgaccctctactctatcaaacaaggagggaagcagcagggcaattcacttgaccccgttactcgatccaggcagctacataggaggcagcagactctactcgaccccttactcgatcctcttctcgaccagttactcgatctagggtaaccttcgctacaagacttgttgatcgttcaaagcgtcttctgatccttctcattccccactcaacaagacatctgagcataagaataggagaggaagaagcaactactcgaccaattgatcactcggatcatggaagcaaaggcgcaaactttgcagcaccctctttactcgatccccaagatgagcattcatctaaaccgcctcaagtctcttgtcttctagtgaatctagggttttcggagtttactataaattggtcactttggggtttgtccaaaggaccaagcttttcttctgtagtttttctttgtgttttagaatcttgaaaccttaattactcttaatctattttgtttttgcatttagttctttgagataaattgttatttttatttagatctatattttgatatgtttagagtaattctgggtttgtgtcttagttatgtgcttgagtagtgata

SEQ ID NO: 40014 - DNA, 703 bp, Arabidopsis thaliana columbia
tatgtgataaagaacaaaatttttaaaattacctaagaagaaagacgaatatatagagttcaacagttataaatatttaagtagaaaactattcataaggaaatatacgataaacagacacaaaaaaaaaaaaataactgtcaatattataacggaaagttgtaataaagagacacaacaacaaaaaaaataaccttaaatatttttacagaaaattgcagtaaaaagaaactaatggaaaaataatcatatatcaaaaagttaagataaaaagacatgaatgtcaaaaagtaactcgtcaatattttaacagatacaactgtttacgataaaaatacagttttacgagaagttgcgataaaaaatactaacagaaaagtaactgtcaatgttaaccaaaagttacgataaaagacacgaatataaaagaataaccgttaatattttaacagacacacctatttacgatgaaagacacgaatgtaaaaaagtaaccgtcaatattttaacggacataactatttacgagtaaaatacagttttacgagaaattgcgataaaaagacattaacaaccgttaactcgggtatgtgattttatgaatttttattgggagattaactgtgatgggtaagaaattaggtgttattccagaacacgacagaactttttttaataactgttatatttttgactttttttt

SEQ ID NO: 40015 - DNA, 893 bp, Arabidopsis thaliana columbia
ccaaccacgtaaacaatcatgaccccaacgtgacttcaattccggtgtcacgacgatgatgatgatggctgggattgagatgagagataaagaagtgatggtgatgaagacgatgtgagaagaagctgcgtgaagagggagatatatacatatgtacatacacacgcttagggttttgtgtgttacttgggttggttgggaccctcttgggcttgggcctcacaataccaatacgttacggctgagttatgccagaagattttgtggtttgaccgagttataagaaaccagatgttattatgagatttcaaactagccaccaaattgttggttctattagtttcaagatctataatatgaaaacaaaaaataaattgggttttcggtaagtgtcgattgacaaactatgttgaccaaacttctaggaatgatgttgttgggtatgatgttggataaagtatatagaatatgagatagtttcatgattccactagttggaatgtgattatgatatgttaattacttgattgtaccaactgatggctttaaggaaagcactttcagggtttgaccgagttataatagtcacacagcttagttatgactgcttcacgactgagttatctcaaaatacagagataaagggtctccgttattgaccagatacgacgtcggttgtgaaagagtctctgttattgaccagatacgacgacgttgtgacataaacaaaagatccccacttataaaccccaaaatcaaccctaagtttgaaaatccaatttctggttcaaatctggatcggggccttattggtccaatccctctagtaatatattatttccgaaaaatgctcaacgacgtagtttaataacttatatacatacttatacggt

SEQ ID NO: 40016 - DNA, 849 bp, Arabidopsis thaliana columbia
atcagaaaggaataagcagtaaacacaactaatccagaagggattcaataaatctacacttaaccaacatattcgaccagaggttccacaactactctctcccatcctcagaaatcctaataactactaagacaacatgcttaaagacaataacatagaaacgaaagatgaacaagcaaatgaaagcaaaatctgaataacttagaagataaaatcgaatacaaagttgtaagaatgaaaagcggctgctgaataataatgcaaaattcgtgtctctaaaagtgcatgtcttagggcgaaacccttacagacttatttatactaagataagaaagcgggcttcgagcccacttaacggcccatggacggcgtgatcaagagattcgactcaaagtgggcttcctgatgggcttcgaatgggccttctcttctcttctctttctgatgctaaggttgtctggttgagtgcggattgattagagggtcgaggtggtggtcgagtaggttggttgacagaatggtctgggctgctcttggcctctgtgaccgagtaagtgtgtcagctattaggatggactggttcttctcctctgcgatcgagtataactggtggactggcaaagtggactgcctggtcgcctctacgatagagtagaattgtaaaatggactgcctcctctcctctgcggtcgagtatatctggcagaatggactgcctggtctcctctacaatcgagtagaattgtctggatggactgctgagctgactgcttccctctctgctactggtgatcgagtatgttggtggaagtgtgacttcctgttctgtttttcctctttctgagcacc

SEQ ID NO: 40017 - DNA, 640 bp, Arabidopsis thaliana columbia
cttcaaatgaagtattattggacgtggctcgctacatatatataatttttcaaaggcgcgtcggatccgcattaaacattcaaaacgcgttcaagcgcgtgggctcggcagaagaaaaagatccgcgtgatcctcgggaacaagcgaaaaacgtttctactccacaagaatagtcggcgacacgagacagaagtttgaccgtccgagaagatgaagcgacagaactagaaggcgaacagtcggctcgggaaatccattcatgaagctcatcatctttctgctaaatcactgagctggggggcaaactgttggggtcggatttcacccaggatagcgagccgaccacacctccgcctcgggaaccatcgatgaaatatcccgaaccggaccacaaaacacctcggaggtctcttcaagaatccataccgaggcgatgtcaagaacgcctcggagcccccgacccgacctcgaaacgcctcgggcataagacttggcaaatcgtccgaggcgggctccaagacacctcgggagcttgtcttcgaataccgcggaccgagcatcccgatcatgacccgaggccagcttaatcacgactcgaaaagattttgaacgttcggcgtatgagtggtgatcggatagc

SEQ ID NO: 40018 - DNA, 752 bp, Arabidopsis thaliana columbia
gtatgtttctctatttcttcaattaatgagtttatatattggctttctatttctttacttattatagtctcctcaatggccaatactcgatatttatctcatctttaaacgaccatgcctcaatgttttccttatcatgctgcactgaacgtttttttatgaccaactttcaattttctatgcgatctagaattaatctctgtaagtcgatcgatacggttgcaacagccacataaagcaacaacaaatcaacccattttacctataagccaaaaaagaagaacctctctcaacgtggaaccaaatcagcaatgagaccaaagggactaataaccatatttctcctacagattgttttccatgggtgtgaatggaacgttcctgggactaaatagcctatatgcaataaaacccgaaaacacaagagatatcatggacaacaaaatggctgtaatgctggccccatcgctagagcccttgacagttgaagccgtgagacccgaagaagaccccgaggagatatctagcggtgtccaatcgcagttgatcgtgtagtgtcctgatccatgccatggtttgctgtccactgggtaccagaatgcgacggacattttggccggcgagccaagcgtgaactgaacatcctgtagatatcaccaatctaggactcttagtttcttaaacagatgttctttatacataactcatattgaccaggtttcagttctaccggatagatttgttgtttctac

SEQ ID NO: 40019 - DNA, 311 bp, Arabidopsis thaliana columbia
  unsure (1)..(311): unsure at all n locations
ctgtatccttatcttaagagaaaaatttcattagcgataatatctctatctctctaatctctactctcctccgatcttcactctttcttctgatgaaagtagtaagaactaagagcatcgagtatatgtcctccttagtaaaagtttgcaaatgcaaccgtttggtctattgtctctctactgccagtggatccactaatgtttgtaagtagtcttgaggacgtttgtatttatatgtggattggactgctgtcagaacatcgatctttgtcgcattttcgtctcnacgtcttttgatccccgtgctgatc

SEQ ID NO: 40020 - DNA, 607 bp, Arabidopsis thaliana columbia
catgaagacaggaacttgcaaatacggggcaacatgcaagtttgaccatcctcctccaggtgaggtgatggctaagaccacttcagaagccgatgctgctggagcaaccaacaccgacactactcaatgagtttcccagctttgtgtaacataagatgatatcttgttgtaatcctagtttacttcctatgtactgcatctgtttcgtttcgaaatgcttatcgctcgtgagttctctacttctctttatcatcctaaaacaaaaaagatatcgttgagtgagtcttcttttactcagttgagctcataaaagcaaaattgttcatcaccactcttctctcctcaatgatccaattgagcatttatctgccgttgattcggttctcttggataaatatcgtttccattgtgattttgtttatagcaattgtcagtaaactccaactaatctccacaataagatgaaacaacacgtaacaacaagatgtgacagagtgacgacagagagccagtgcatgaaacatgcttcttcagcaagacacatgtcggtgctaactgctaaatcaaaagtgggtccaatgttttgttcttaagagtcgaagaagag

SEQ ID NO: 40021 - DNA, 596 bp, Arabidopsis thaliana columbia
catacatgaaagttaattttctggtcaatggtgaaaacaaagaatctttcgatttatttccacttatttatagtcaacccaaacaaaaataaagagaatgatttcgttaccttaatatatctattttacagatagttaacaattatttaatcacaagattttgaaaattggatataaaggatctttttaaaaacaattgtccatctacacttaatttccttctacaatgaaagatagatttgtcacatcaaaactggttcttaagagaagtgccaaaatctaaggtcgtatgaaattttttgtaaacctaacgagatgaaagaattagagttacgtgtattagtagcaacaaacaaaactacaaggccaagaccactagctatatcatctgaataaagcaaaccgttttgtattttggacaatgttatggatggaagaaccgaagacacaatgtaataacttaatatttcattagactatctagtttaatgtaaggaatttcatttcatgtctctttaagtttaacaaaaatgatgagcggtaaaaaaatcatgaactatttgaattaaaaaaatacgttttgagtggacagacta

SEQ ID NO: 40022 - DNA, 520 bp, Arabidopsis thaliana columbia
tatattatctgatctattaaaaatttatttacgactcttgatactttaaatgtatcacctatatacataatcttatatttatgactaatttcatatttttttactaatttgagttttaaaatgtatttagaagacattattcttttgtgtttatttttttaatatattttatttaccagttgcacgataaaccaattcgtaaaactaattaaaaaatatgattctatttgttatatacgagtatacgacgcgtataactcagtaggttaatgtcgataatgcaatctgatttacatcaaacttatttttcttgaaattaattttcgttaccacttagtctaataaaataataattttatccaaaaaaatacaatctaatttaattttgttgacattattgtatttttgacattataaaaaccgctagtataaaacataaaacataaaaagattaagaaacaaaaaatgaatattgcatgcgtagttgggttggccaataaaaatggcggctacagctgga

SEQ ID NO: 40023 - DNA, 454 bp, Arabidopsis thaliana columbia
atttcctttttctttaaattttaactcttaaaagttttcctttattttcttggtttgaagctatatgccaaaaagggaaacgcatatatccagagaagaaaaactcgaaacccttgtcttttcatggatttcaagtatattattaatatgcaattattcgtatattaatatatgcccctatgcgtattttattttttaatgcgaaatgaatgatattcagctaaattttcggtgtgtctattgctttttttttccctttcctcgttcaaaaaaagtacttgcagagtcactcactctcagtctcagcacatgaattaatttgaagcttccctagaattctttcacatcaattaatacgacaccgtctcgggtgaagaatctctcctctcttgccctaaagcgagttagggtttaacacgcatagcatacccttagacttgtgctcttagctctg

SEQ ID NO: 40024 - DNA, 519 bp, Arabidopsis thaliana columbia
  unsure (1)..(519): unsure at all n locations
atcccctgtccattcgtaattaagcaaaacatagtgactacgtacttcaacctattctttctttgtttacatacaggcctatatatatgtttcattctctatataaacattttttttttttttaataaacatacgtacatgaaactcttcgaaagtatcgtattaacattctcaatggcaaacatagacccagtacaaacagagccgtgccaagagacataagcgaaactttttttgtttatattttagtacgttggctttcttctttatgtctagtctcatcggacgaaggtagttggcacaccgacacttctctaacttgcagtcgatcaatttttttatttttattcaggtacgtattctcaaatgccttctttaattagtggttatctatccagctgctctttcctttacgtttcatcagtgtcagaaatcaacttgatagaatatcataactatctatagggtcatcgtacgtcgttatgtggaagttgangataggaaagggaaatggagaag

SEQ ID NO: 40025 - DNA, 527 bp, Arabidopsis thaliana columbia
  unsure (1)..(527): unsure at all n locations
ctagaggatcccctcggaaagaacagaaatagaaagactataacaaatgaccaattttaaaggtatatgagccaatggaaaagaatagaaaaaggaggagttcattcttcatagtcaaaaccatcaaaatttcatttgcaattagattgagatctattgttcatgatgaatttgatgcaacaacagcattttcatgactttgttttctctattttcatactattttttggtgaactttttgtgacgtttttatgataagtatttttgattttataggtttagatcattgatattattttgtgaagtgtgaaccatagctatgcgntaatctcggtatgaatctaagcgaatccattaaaatatccttatatttaattagaatattccattaaacatggtaaataataaacaaacaaaggaaaacaccataatgcttaacaagttggggcgttggttaggtcacactctttagggagactagaagcgagcttgggatctacccaaaagaaccgagccacggagagttt

SEQ ID NO: 40026 - DNA, 562 bp, Arabidopsis thaliana columbia
caatttagtcaaagacaatggatatcaaatttaaaattctaaaacacaaaacatagaatagaacatggggagtctcatctttacaagaactctcaaacaaaattctattctactcatataattagcatactaatctttctgattagtttacaatttaggaattttcaaatggacaatatggccttaggtctttctctctacttctgagcttcaaatcctctatctcttctcatctttttcttcaaaacacctgatacataaatccaataataaatctttaaatgtaccatccaaaaaagttagaatgaaaaactgttcttagagaaatgtaacttctgtgaatgattgtattgttaccatttcttgaagtgggttattcgaactaggaaaagagaattgtactcgtacataatattcatactattaggtaaagttaaaacaaatgataaaatttggtaaaagttactgatcgaatgtactacttattcaagtaaaaaacaagaaagtaaaagaaggaaaggaaatgttatgtcagcagttacagagacaagactcgtattga

SEQ ID NO: 40027 - DNA, 198 bp, Arabidopsis thaliana columbia
tagaaactctcaaagcaaagaggaggatggcccaaaaaatatctcccgccacatgcaaaaggaatgattctttctcgttcactcggttttgaaatgctatagcacgtgcgacgccaactgttttatcacatatcatgtgtggagtacaccgttacgcacgagtgcggcacatgcgacatccagctgcattattagcaa

SEQ ID NO: 40028 - DNA, 395 bp, Arabidopsis thaliana columbia
ctctagagggctcccctcaacaggagtaacacccctaccaacttcgaccccaaccccacctgaatcaccaggtaactgacccgaacccgaccttgaacctaacccgattccaagccctaaatctacatcctgatcccaaatattgaaataacctggagtactaaccctctgattcgaacttacacaaacctcacggaccgtgtcgacctcgtacgactctcgatcgaagaaatcgaagaattcaggttctgcatacatagaatccgatccagaatctgaattcgactctagaaactggtaatatgtattgcgaacgccgatatccatctgattggagaaactcatagcttcacaatccggttggattccagatcgagacacctccacgttggttg

SEQ ID NO: 40029 - DNA, 550 bp, Arabidopsis thaliana columbia
gaaaagtgttttgcgaatctgcgattgtattctttgtttgtggataccacaactctctagaagatctgactataccgacatagtttatactatatcaaattttgagatattattttctgcggtccacaatgaaatggagttttttattcactgaaaaaaagcattaggaatcgaataaagaaaagagaacataaactaagaaagcgtaacaactaacaagaatttcgtcaccatcattaactcatctttcattaattttttttcatagatgtatacgtttcttctctcaacacgtatcccaacgttaactatattttaattaacttaaaagtctaaaatgttgatttaataaaatgagtaaaagttacgtgttgtatcatcgttttgttttctataaaattgagacttggtccgtacgttaggttaatgtagtgaaagattatagctgtcaataataaagtcaattttagtattaaaaaagtatcgtagattatgaaaatacctcatctttgaatggatcaggaactcgataactgtggctgtgtgtttg

SEQ ID NO: 40030 - DNA, 352 bp, Arabidopsis thaliana columbia
  unsure (1)..(352): unsure at all n locations
actctagtagnnnnnnnnnnnnnnnnnnnnnntagtggcggtctagcagcaagtctgattcaaccgagctatgttacaggtggcgggttcaatggtgtagtcaggaaagacattttgcagtggatggcacaaagatgaaagatgatgcagctaagtcccatctttctctgacataattgagcctctctcttttctttttttaacttttaattgcagaaattaatgtgattgttgatagatcctgaagcaactatgtagtaaacatgacaatgtctttttctttctaacgcttgaataaagtttcatatactttgagagatcattactatacatcattaccattacttagtat

SEQ ID NO: 40031 - DNA, 556 bp, Arabidopsis thaliana columbia
taataaactacaatctcttcttccatttatcatatagaacctaagatcaaaccgggtaaaaccacacagtacacactgtaagaaactgaagcttctcaaaaactaggaatcaagattcattcctcaacacaagatggattaaatcttcacttttcatctacctcgattcaacaagatataaagctcaacactttatattgctaagatcaaaggttgattgagcctatgaacatgaccagaatctgaaacagcatccacttaccaaaactatgatttataatgtgagttagaacactgaaactgttaaactatcctctgaccaaatactgaatcatatattactagaccaaaaaatgtcaaaccttcctctgttgaattgcactaaattaaccgaagaaaaaaatatgaacatggaaagcaattatgcatatctctcacattttctcattggcaaactaagtaaactaaaatgttgtcttagattcatcataaaaacatgaacagatttaatcttaaccctttcatctacctcaatcctcaaaacaacaagagaaag

SEQ ID NO: 40032 - DNA, 1034 bp, Arabidopsis thaliana columbia
ggcaatgcaatggttatgaactcacttggttttgggcttaggctaagagacaaaaatggtccctctagtgatttggtcgagtaacaggggactctcagagaaaagattgagtttcagcagaatgctaaaggtaaaagccaatggacacatacaaaaacagacttccatctacccaatgatatagtatgatagcttagaaaatgatcccagtcccagagatgtcctaactctaccctttttctcattctttctctcttttggttcaagttcaaaggggttcttctttaaaacgattcaagagtctagcgggtttggctttatactttgacaaacttaaggcttttcttctaatcttagcacatagggcgtttacccttttctttgaatcacaatgcctaacttctttgaattccaaaccctttactagactaacactttttgtatcccccttaagaactctaaacttttactctctgtttttattctttttttttcattcccattctcttttccaatcattccatacatcatcccaatcccaaatacaagtcaccacctagtcctagctaactcaaaaagcgtcggctaggtctacatgaaagactggtcttgtcggctcatacctaacacgttataccaagctcaatcgaaaaagacctcacaatcacacacaaatgatctttagcttgaaattaggctaggctcaaggtattggaaactgctctaaaaatgagagtcaactacttggattaccaaagggtggtgaagtgaataagataatccaagtatgtatatggtagccatgagttcacaaacaatgcatatacatgataattgcaaatttagttcaggttctaatagatagggaatgacatcagataagcgagtttcgaatcaaagcagtatagtcaagttgtaaattcaaagcagggagcggtcttacttcagagaaccaatcggttatgcaaaagaaaactaacaacctcggcattgaacttacttcattgaatcaaaacatacttaacggtttgaaa

SEQ ID NO: 40033 - DNA, 864 bp, Arabidopsis thaliana columbia
gtctagagagttcttatataagatctagattacattattcaaattatctagattattctattagagtatctagatttttatgtttaaggaggtggaagatgattctacaaaatttctagaatcttttaaggaggtggaaatgatgatatttctagagaaaattctaaaacttgaatttggccataattaattattggataattgatccaataattaaacttgattcaaaatcaagtttaactttcaacacagtcatcaagactcacgtcccgttagaaaacgtacgattactataaccaattaaccatggtccacggtcaaactttaaccgtggttaatttaaataaaagaaacattttatgcttataaactccaaaaacccttattatatagattttctctcccgaatctgttttcattttcacaatcttcgtctcaaaatcttgtttttcttttctcctgcaagaatctctcgccatggaaggagttgttgagccacgtgaagagaatcgtgacagggacgtgaagagcttcgtagattgaacggtcgttttgtcgtcgcagtgttgcttgaactgtccacaagagtctgcaaaagagcagctgctggctcagatccaaacccgacgatgaccggacacgtggcgtattcttgggcgatggagttcaacttgtgggcgcatcttgcttttatgcttgtgattctcaagatcattgttgctccgatggtggtggactggaacagatgagaacagtacgagaagagtgtgacgtgcagctgctcgtgggtttgattttgtcgtctcacgattgctttcttagcgtacctcgctgctccgtaccgggtgagtggtgtgcttgagt

SEQ ID NO: 40034 - DNA, 586 bp, Arabidopsis thaliana columbia
attcgtaagttgtctgttccgacagctgttgatttgtcatggaaattgtgtctagtgcagagaagtgatgatctctcctaatagacagctcggatcgaggcgaggtcggcttctttagaaagctgactcttggggcgatctgtagataggtatatcactgcctagttcatcaggattttcaaggaaaacgatcccgaagctgactggttttatagagttgggtctcatgactggttgcacttgcttgaggtaaacgtttatatctctcagcatatatcttcgattaaggcgaggtcaacttctccgaaaagacgactctctgggcgatccgtagatgtattaacccttacgagattccctgtgatttgtcgggaaatcggccccgtggtgagctggattattcagacggattcgtagttctaaagatcgcatcttctggatagaagcagggataacattcgatagacagctctgatggaagtgaggtcagcttctagggacacctgactcgctggaaaatccatagatgtgctactagtttcgagaatcgttgagacttgtgggggaattgatcctaagatgacta

SEQ ID NO: 40035 - DNA, 565 bp, Arabidopsis thaliana columbia
ccgatccaaagattttacaaccgcaatcgattgctacactcaggtaatatctctaaatgcaacatacctctttaattacatgccaagagccatcatagggctagacattcagtcatcatagggctacacataactggaatgattcatgggccgaaaaggatgacaaaagtttgtatggttccttgtattgaaagacatctaaatacaaaaatttgatttttgtcccttatgaaccttaaccattggaggactatttttataagatactctcattttgttcttagcttagaaataacaaaactttaatagaaataattgttaagatccaaggttaaccattagagatgctcttagtttacatgtctaatctgggatccaaaaagacatagtagcagaaaaaaaatttaaagcttgtaactgatttcatttaaagaaaatttcatgctttatttattaattacactactatatgatttaattgaatgattatgtcactcaaattgtcgttacacaaaagagggccagagagaaagagttcgtgagcagctaaaacaaagtggggaag

SEQ ID NO: 40036 - DNA, 605 bp, Arabidopsis thaliana columbia
ctgcaggtcagaggatccccaggtactttggggtagagttgaagtgtgagagttggagacagtgcagcatagtgatgaatcaagatatggagcgttacagcaggaaagattcaaggggtaacttattcctctcgcggacagttcctcctaaggacgtagtcaaaacaagttctctatcgaaaaccggaatctctagtctgtaggtatatgttgatctcaagtcttgaacaagagaaagctcgctggaagaggaggtttgggggattcaatgtgtggaggaagaacaagggttctttgattctttgtgatggcaagagaaggtgaaaaaatgattctgtaaataaatcctacgttggtagcatgtaaaatctttttcaatttaaatgtgaatgaataatcacattgtacagtagcagattccgaattctttaaatttgtatccatcaatttcttctgtcaattattaatcaaagtacaaacatcattttacttaatagtcaacagctttattccaaattatttttgcacatatttgaaatgtctttttaataactaaacatatttgaaatcgcaggttgtgttgggaaagtgatgactgtggacta

SEQ ID NO: 40037 - DNA, 343 bp, Arabidopsis thaliana columbia
tccccctccaaattctcgagtcagaaatttcaataaatgtgtgcaaaattgattagtgtatgacatatactagtgtaaggtaggtaaacatgtaaataaatgtgtgcaaaattttaataaaataaagaaattgatctaaataagctgctagaactaaaatgaagtcactaacaaaattcaacataaaacgtaacactcaaacatgaaacatgtacgtaacaagtaaagagttctaagtcaaacaattacaagaagctgcctcgctctatcgtttacattgaatatttcacaacaacattcaaataaaaccattgtctctctcccactccatgtatcttcatat

SEQ ID NO: 40038 - DNA, 559 bp, Arabidopsis thaliana columbia
cgtacttatttactatttgaaatcaggtcaagaaaaaagtccatataaatagcagtttacaaacctaaagtaaagataggtgtaattttttacccataaaactgattcgatccggtgtagctggttattataattcatcacatgttttagccaaatataatcaatattattatagttttagtcataagatgagtccgtgtgatcgaatagtttcttatttactttatttttgttgtcttgccaattggtagcgtgaaaagatctcaggttcatgcgaggcgttgattgttgaatatcaactggatgaccccctgtacacgtgagaattttgtatgggggtctatctgtgagtaagcaatataaattatcaagtatcatatgtcaattttggcttttgggtatgttaagttggacaacgaagatagagaggcagtccttggttatatatgaagcaactatatgtactactagtattaatcaaatcaactaacttaaacttatagctttgggatttttaatgtatgtatatattttctctagatagtcacgagtttgatgg

SEQ ID NO: 40039 - DNA, 527 bp, Arabidopsis thaliana columbia
gttcctgttcctgcttttgacattataagaatcgaaccctctaatatgcccggcagctccagatgccatctatatttccaattaatttccatcaattattagacttaagtctttatttgttagccaagagtatacaaaacactaatcaaaaccctaaacccaaaattcacactaaaacaaataaaatagaaatttggtcaaagactctaatattcagattaaaatcatgattagtttatttgcatgtacatgtcacgtttgcaaattatgttaccatgttaaaaatgtcctagtcatttgtcacatggaaatataaacgcaaatgcaaagaaacaatcgtgacctatatttctgtcaaaattttaactatagatcatcaggcgctacacagaaaagtaagaatttagatggtttaaacgtcaaactatagatattgttaggcaattttaacggttgcctcggagtaaggggtggaattaatgtagtctcctgagtcgctgatcacacatactaataacacgtttgtt

SEQ ID NO: 40040 - DNA, 472 bp, Arabidopsis thaliana columbia
taacgaccggatccccgggcatttatgtaattcgaaaggtatatattaagtattctgttcatacacttaagaagtgagtttttaacagaaaaatagactttttaattttctctctcttttttgtttcatttcattttttcagaaaaattacttttatgcttcttctttctctatattattttttcatactttctgtctgtaacggtttatataaatggagttacactcaagtgacgtgcggtgtgtctgtaacggtttatatacgagagtttttatttttcaattctctagtttaataaaaaaattactaacatatctctaaaattgaaacctacaatttttaaactacttatatatatattttgggagagtgaactttttggaaaaattagatctacaaataatattagaaacgtaagcagaacatatgcaaaacttagttttttgccataactatatacacagattgttg

SEQ ID NO: 40041 - DNA, 524 bp, Arabidopsis thaliana columbia
gtgtgcgtaagaattatggaagagagaaaaagtgtttaatttgtgttaaatttcaaaataaaaattattaaataaattgaggggtaaaaatgtcttaaaagaagttaaataatggagaaagtgtcatctccctcataaatgtctcaaaaggaataagatagtctaaaagtgcctaaacgtgtcatattctctttcttaaatgggtaattgggccattttggtttgttagaagaagacaaatttagcccattaatggcccatatgatgtgacgaaagcaagcgagaaaaagggttttgttgagacttgagtatgatgtagtcgtgaacatatatgtgtgtataacttcctcttcatgaagcctaacgccgccgataatttatctaagccgttgtcctagtatttttgttgccgtgaatcttgtggaggagaagtgatctcacgtgggggaagtgatagaggaggcggtgatcgcggcatcagaaaatggagagaaatgggagaagagagagaaggccaccgtaac

SEQ ID NO: 40042 - DNA, 502 bp, Arabidopsis thaliana columbia
cctcgatattagcttttctcttcatttccctttgtaattcagttcgaggatcatcaacattcaacaaaaagacaaaatcagaactatttaatgatgatggttggggaaacgatcagaatatgatccataggggccctattttctttcttaacacgccatagggaaatggcgaccttatatcaatatataccgtggaatcaaagttttgaaatttttacaggtcaaatctaatgaatgtgcatggttttaaattctaacgtacgaaatgatgtaaccgtttccgttatataaatgtccaaaataatgatactctacccactaaagaagaaattaaatagggaaacaaactaaaagtacctctttcagtttgatccaaaaaaaactaaaaaacaaaagtacttcgtgtaaaactccgattttgtaaatatggtgatgtatttcaagaggtttaaaagaattgatttgagtatttatgttcaaaaaatgcatttatttttttggg

SEQ ID NO: 40043 - DNA, 509 bp, Arabidopsis thaliana columbia
ttgtagtttccttacctcttagatctttctcaaggagatttggattcatgtttctgggtttagggattaagggaagagaaactaaaaatagaagagagatagagggagagagcacttgaatggcttttcactgtttatatggtggaagaggaaagagagattctctaaaaaaaattattgaaatttatatttttatttacatttatttgcaagctagttaatatatatagaagaatattttagaaaatgatgatgagtgcagagtggttatttaatgtacatgaaaaacaaaattgatagctgtttattcacacaccttaagaaattgaagggaaagttttgtaaaagcatattcaaatgaattacaagtgttaattaccaaattgtggcctaataatcccatgctaatggttttatacaattacgtgcggtttcattttatttatcatttttttttttttttcagcaaccacattttaactatatttatagtcgatgcctcgatggtg

SEQ ID NO: 40044 - DNA, 604 bp, Arabidopsis thaliana columbia
cgtggaatataaacatgtgagttttactactatgcaaagttgtacctttctctgtgacaatcttatgttttgtttgttgggtttgtgatgtctgtacctttttgggggatgcaggggtgaaagtgaatggtggatattcccagcaggactggtcgtgtgtaagataatgcaatcgcagctcataaatcgacatgtagcaaacctggagatacaagaccgctcgttgtatagtaaggattatgagctgttttggcagtcgtgacaaagtcttgtcaggtaatttttctcagaacaactaaaaacagtcctgccccaagtttggagtggggatttcagtttgttttttttgttcttttgtttctcttcttgtaattctattactccaggtgaatagaattaggatacaaaagagaaggaactctgattgttaaaagaaaaaaagtttatttgagggatataattagggacaaaaacatgtaatctaaagatcctgtttgggtttcttggggctctcggttttggttttgagtggatatggtcgtgttggtgactggtgaagacctccttcaaaggttgtatgtaataagtgagaaccagaatgatg

SEQ ID NO: 40045 - DNA, 2480 bp, Arabidopsis thaliana columbia
tttcaaactctagttaggaataactaatacctatgcgacacatagaaaattgtggtctacgtaatcaaaaacattaattggttttagtgcagaggcatgatacaaattccagtcaaagaagaatcaaatatgaatatagtgttgacacaactgaaaaccaattttcgcaaaagtagaaaacatttagatgataagaaaaactagcttttagctgtccagaaatactttacctgacagcaagggaatgtcatcatcagtatcctcctccatatcagaagaatcagtttcagattcagaataatctgattccatatcttccaaaaaattaggagggtcataatctgaataacgagtatcaccaccggcaaaggaggaatgcattgcgtccctgtggcttagcaaattctcatgtaggtctgaaacatcattagattcacttggtgtaaacatatatttagtccttttagcctccgccctactcttagttttctcctttcctgaaacagagccaaaaatgcatatgaatttcatgtcaaaaagagccagaagccttaagtatccaaccatctaggaacaaaaacttggaagtttaaaagtacatcttaccgagggtataaatgggcctctccatgctatgatccccactggaagaagctgaagaattgcttctggcaagatacttaaaggaagtatcaggaccattggaacatgaaatctttcgctttgaagaggcggttctaagtccaaagtcctgcaagcctctcattcgaggcacagcctcatcctcacaacttggttgatcttcctctttatctctcagcaaatgcataacatcaccaacatggttggtccttagataatctgtggattcccgtgtcccattagaggtatcctgaaccctaactatagccattctctccttggttgcatcaagagagtcatctctagccttttcagggactagtttcccttctcttttcagcatttccttttccagttcaagggcatggagaatggcatcttctctccgagcatacttctctctcttttttattatcatcgcttgcgaagattctaccctctcaatgcattcatcaaaatcgccacaccgaaatggcttgacccgcttggatttctctaaattgtaccaatccctaagcacattaaaatacgaatgctttcagtaatcaatccaaaagaaaagagagaagttcacacagataaagaagagacttacacacttgcatcttctctcccgaggagcttcaccggagttccagatcgtggcgacgtgatatgcgtagagtcaagatcttcttgtccaagtatcctccccggccaccacgagccattcctcctcctcacccacacaatcgatcccacagtccaatcaaccgcacctgatcctggacttgccatccttgtctctccctctctacactcaagatcacactttctctacgggtttcttctacgtcactaaccacacacaagcctcaaaagtccaccattctccaagaaaaatctttctacggttgtgtattgatctacctgaaaatcagctccgccgccggtaatacagacgaatcccggcggatccaaaaccacaactgaaacagacggaagagaaggaagtgaatccggcgagaactaagctttccattcagatttggaaaactcccataaccctacgctctttaacgccggttaggttaaaacctttcctctctactttttccaccgtccctctataagctagctacgtaagcgagttctcgtcgtcctcgtctctctcgttctctctgaaacctccgcgtcctcgtctctctctcgttctctctgaaacctccgtgactctttcgccttctctctctctctctcctccggatgatggtgattgcgagcttcgcagttcaattaatttacacgcgctcctcaagagccgtgcctttctacgttaccgaatcataggcccatcttacgatccaaaatatgggcttttatattttaggcccattaaattcaaaatttacgctgcaacggtcacttgtgcgcaagggagttagggtttatgttcgcctaatggtataaatatccttcatcttcggatctttagagacatagcagaaacgtcttgtttttcaactgtcattttctcaaccagatcaaactttttgttttcattttctctaattcgtcgccatggatttccacagtcttcctcgaagagatcttcaatttttctgtaagaggaacaaaatcccagccaatatgaccaatattgccatggccgatgctctcagagatcttgagattgtaagttgttgcctctcttttcttcagattttgttccagtagtcttcgcatcttgctttttctcagtaatatgaaaatgatttgagatcgatatcttgttaaccatctagagcgtgtcgttgtttgtggattcatctatttctgaaattgcttggacgattgat

SEQ ID NO: 40046 - DNA, 531 bp, Arabidopsis thaliana columbia
  unsure (1)..(531): unsure at all n locations
tatatttgcagactctggtcatcctttaagttagaggctttgctacatcaaatattcacataaaccataaagattaagtccaccaagaaatatcctttattcggagttttgtctgctagtatcatcaagtttacttcaccacgatactccaatagtttccagatattatataagaatgaaaatctattacaaagcatttttataaaaaacataccattgccttcaagggaccaaggaagaacagtaagatcctggtgaagaacacaatgagatgagggttctagtacaaaatcttatcaacagttacaggctacgcacctgctttaaagattcttcaccgagtgatttgtatcttctgcagaaatttagtaacaaattagcaaactcaaaccaagcaacatcattagcatgagacgtagaccaaaagaagactgaactagattccattatctgaagaacagcaagagaagctgagaagggctaatganagtgaagaattactgatacatgataaattaaatccgatgggaa

SEQ ID NO: 40047 - DNA, 732 bp, Arabidopsis thaliana columbia
cgatacgattggattttcgaattttttttgtcaataagttcataaaatttgttgtcagagagcgagaggaagaagataaaaaaagaaaaattacgttttaaggtggtgagtttcaagaacagagcgagcttttctattgtattaatgtacagcttccatttctttcattcatggtgtaacaaaattcatctttttttctttctgtgaagaagaaaataaaaaattatatgtgaaatgattagttatgtcttggatgctctttgttcggttatagatagatacttccaatttcaaaatgctctcatgttttggaagatagtattagttcagatgacgaaacacacaacaatgtgtgggattggatcagcacaacaaggagtcctgtcggaatataggaagttcatttgaatcaagtatcattgccaatttgccattttaagattctttctttttgttgtttgcattaacttgtttgctctgtttgtgagtttcaacgtttaactatcatttttgtttatcaaaatcaaatgttaggtttttgagtacagctgtgaaattgatggattactaccttttatttatacgtaacttccaacaatcttaattttctccattgagatgaaaaatgctatcattacataattatgtgagctttgacaatgcagatcttcgaacctgtcattgtagttttcagctctcagaagtcagaaggtacacccatctcttgcacat

SEQ ID NO: 40048 - DNA, 958 bp, Arabidopsis thaliana columbia
tatcctgttctaccagtttcaaaccattcaaatacttgagaaatccttaacatagctgtaacacccccaaaccgttctaaaactaagaacgaatccagaagcattccgtttgatgcccgtagacgatccaaccaagttcccggaacacatccagtaccaaggtcagttcatcggcgaacatcgtttctctcgaacatggcctaaggctttttaacccgtaccgcattcgggagttgtgttagttcggacaacactaatatcagagatacacaaggctttttaagaaaactcattttattaatcttaaaatacctcaaaatacatttgtgttcggctagctaaggcctaatgctcaaaacgagtcatacaaaaaatatatctttacaaaggcaacgaactctacaccggcttccctacgtctgtgctcccctcaaaggtttctcactatggctacctgcaaaaatagagtgagggatgagcgctaatcgctcagtaagtccaggctcccctaaacatgcaatattccccacccaaaaacccaaaataacaatcaaatgcatgcaatcaacaagcaatcatgcaacagacaatcaatgcaacattcgagtatactcgattgagtatactcgacaagaaatcaaccaattacacttggaaaagtgtaatgaacacaatcaatactaagcatgcatgcataactaaactatccgagctcacacagtgttactactctaaaggcctttctcttttcagcaattctgatttcccacaaggcaatgtctccgatccttagccacaaaggctaaaaggatcacatcccttcccctttatcgtctacaagggaccaactcccttacggtataatttgtactgccccgtcgggtagcctcgattggtaacgagccagtccgagccattgggacaatcacgacatcgcttcaaaactagtcataaaaat

SEQ ID NO: 40049 - DNA, 446 bp, Arabidopsis thaliana columbia
tagtaacgtccgccagtgtgctctaaagatatgactttcaaaaattgtatacgattatctaactagaaaaactggtatgtcttctcacaattcatggctagacaaaaggagcttaaagtgatatcaatctttcaacatcatggttaatgacaattatctgctaaacaaacctcacgaaatcattaccattattacagaaaaacattggtcacaagtcaattgaacaaatctgtactccgtgatattgaacatcagttccctatttgacgttgaagtgtgatttgcaagatgaatgattttgagtttgagtgtaattttcgaaacatgcgtgagattacgctcctcggaagttgaaagactaaggggagtgcgctgcttaatagggagatgccgatgaggttcatctgcgcagcttttaccaatgtcaatattatgactgttgttga

SEQ ID NO: 40050 - DNA, 804 bp, Arabidopsis thaliana columbia
tatttctattcccaaacaattataaaattaataaacctgaaataatttttaaaaaatcatcacgcaattcaaaaaatgttttccttaaaaaaattgtagtgtaaactgaaatttatcagcattattatgcactcatttccttatgaataaaatcagtaaaagaaatttagagttaaaagacacacattcacatatctatgtttgaacattatttagctcgttgactagcttgaagaaaaagagacaacgacccacgtttatgtctttaatctttataacaggagatacatcaaaccggaggagaagaagttgtttgagtcttaacaagagtgtgtgagtaacataaatacaaggagatcgagtaattagtgtgagcatcatcttaagagattattagtgttgtaaagtgttcagagttaagtttactaatgaatgaatgatacttgaggagcaaggattgctgaaatcgtcggagaagatgaacagacgggagaaacgatgaagagatcgcgagcagaattagggttttagaagtcgtcgctctagaagatgaacaaatagagacaagggtcccagaaggacataagcggctagacagtgcagcgacggaggcgacgactgcgcacgtagggttggttttgaaatcgtagggatttatattgggtttcttctagtctcttaattcatatttttattcacttattttgtttttaactgtttccaaaataattcaaaattggtattgttgtaataatttggaaaagaaagggttatatgtattttatccaacaaaataagtaagat

SEQ ID NO: 40051 - DNA, 1209 bp, Arabidopsis thaliana columbia
caaaagaaaacaattcacaaaagagagacaatgatactaacctttcctgtgaaaagagagaattgataagcttccaaatgtccattgattcgctcagcaacgcttacaaattaaacaaaatatagtgaatgagcaaaatgttttatattcaagaaagtgaatcaatgatagtttgacataacaaaataactaaatcgatgagacaataacaacacgattcagacaacagacgaagcttaatcaatctgacaatgaaattctcaagttttatcactcaataaaaaatcaaacattacagagccaaaatccaaaatttgcaactctaatgcccaaataaatacacaatttcgaatgcaaaattgttcacaagcacctagagcagttcaggttaccattactaagacgaaattcatatgaattcgcaataaacaaaggcatgcaaagtagagaaaattttaagaatcgataaagaaaacagatctagggtaacgaattctaaaatcacacaaacatcggttattgagtctcagagattgatggaaacagatctagggtaacgaattgagtggcaaaggagaaaaaaacaacatagaaaatgacttgccttcgattcgatctcgaagtggacagatatagagcggattgagtgccggcggaggttccagttgcacggagagctttcacggcggcgacggagaggcaacggagggtttaatcggtggccggaatagtgagttcgtcggacagacggctgaggactgagagagttttctttcttagggttttcgaaaagttgctttgtgtttggttttttttctcgaaaatgactaagtgttatttggcggaataagtattttgtgttcccgctcattaaaactttatatcagcgtttataaagtgctgtaatattaaaactatattttagcgtttatcaactgctgtaatataataacgaaaattacatgacatcttcaatagcaattgagtaatccgtgctataatggtatgctatcaatgaagactttttttgtagtgaactactctagcccaaacatgcttaactgtagagttttctcaagacgtttgaccgaaaagataagtgcaattaggtgacatagatggccaaatcaattcttaaacctctctgcatgcactatcatattcttgaaactggggtgttacaatccacccccattaagaccattacca

SEQ ID NO: 40052 - DNA, 1496 bp, Arabidopsis thaliana columbia
taacacagtttcccgccacaaagactgaagaaggaagttaaagaagagattgcaacaaacggcctaagagtttattcttccttggaccaattcaaaagatatgctcattaaactcggtgtttagaagttctatatccccttccaaaaaatttggaatataaaaaaaacgaaaaaaaatagaaaaataaaataaaaaaagaagtatggaaaaggaaggaaaggaaacattacaaccgagagagtctagtggcatggttccaaggaaagacatggaaacctaaagaagagatgagccaattacagaagagagtcccctcggaaaaacctaagtttgggggaagcaaaagcaagaaagaagtaaaggagaaagaggtattttaaaagaagaagtggttggaaactgtggacctcaaccctaaacactttaactccaccacttaaacaccaaaatcccctttcataccaagcggcatctaccccgaatgacatcttctaatgaaaaagtaaccgtcaaaacatttaaagaatgtaaagagttgactgacgtgaattcagaaaactgtaagatcaaagcggatggaaaaggactagaaaggtgtgggactattgagcagccgttctaacgcaacttttgtttaatgtgatctgtatgatatatttgagacacggtcactgataacaggagagttcccgcggttttcaaacctctccaccagatttgttcttttgtttgcttgaggacaagcaaagtctaagtctgggggagttgataacacagctttttagcccgttttagctattgttttatgatgtttcagagagaatttggtgccattctagagccaataagaggagaaacatgtattctaggtgccaagaaggttttaagagttttgaagctaaaagtatcaaaagacgatcattccagtgctttggaagtttagcatctggccaaggtcttcccggactcggcatgaagatatttgggtagaagagtcaagattcacgtcgaagtcgaatcgaggcaatccatgaagccgtttggaagatatgatccaaagagttaagacatgtcaagaaccggccgtttagaaataataagtccaaaacacatccgacgatgagacttgaacccaggcagctccgagtagctcaccaccgaccattaggtcacgcgcaagtctttccctttttgcgcctccgcctttaggctgttgccctaaagcccacttctcgacgttcttacctctaaacctaattcttgggcctcaagtataaatacttgatctaagacctaaccctagggtgtgccttcatcaccagcgaaccctagccgtcgccaagagctgcctcctttccgccgcacctcttgaagcttgaaaaacaccatctctctctctctctttctcgtttttgtgtaagactctttaaggtggagctttgcctcttgtattctacattcaaagaagtaatctctaaaacctttttaagtttta

SEQ ID NO: 40053 - DNA, 554 bp, Arabidopsis thaliana columbia
ggaacgatattaccatttgaatttgcaaatactggacaagatacagaagttgtatgcatatccttttgattggctgcttcgggaatgcaaccctttccttccactgatcctctgcgaatagatatagacgttgcaagaccaccacgattctgaactaaatccgtagagcttgaccgtgctggatcccgacttatcttcgatctgttcctccgagcatacgggcgaaagatggcagaatcttctgtttctatggtattctggttggtgtgtgctttggaagatcgttctgactcagaagttctgttttgcctattaggatgtctcaaatttctttccccttcaactgacttgttttcagaatcaaacagtaagagattatctgctgtattgcgttcagaaattgtaggaactccaggtctaccgctactctccaccgagtcaccatgtggtgaggcagtcagggcaaaactatctttgacttcactgtgggggttatgggcaaataatgatgagttatccatgaaattaatgtgggactacccaaacacgaatgt

SEQ ID NO: 40054 - DNA, 493 bp, Arabidopsis thaliana columbia
tggtaaatatagttacgcagccctaaatctcgcatataatacatttacaaacaataccctggtattatgtcagtgtccactagaggccatgcaagtacagctaactcttagctcgaatctaaaagcatgattggcttcaataacaatgctatcagatagataacacattcacgcagcatatgtatattataccttttctttttcaagcacctccgaggaagcatcttgtggaagagatggccagacagccggttttggccaaggcagcatactgagacaagcactgtccataaaatgggtaggagttactactaaacatcatcagcatagcctcccaaagagaaagaaaaatcgacatgcttttttcagcaaagaaagacttgctctgtgtatttaaagtgacacatataattcctcactaattgcgtaatcctttctctacgggaagtcattggagaattaatacttctatataacaggtaacgcacatgct

SEQ ID NO: 40055 - DNA, 574 bp, Arabidopsis thaliana columbia
tttcagaacaaaaagaagagaaacactaaagtgacattgtcttttggaacaagtgttgttcgtgttgttgttgttgatgatgagacatgagactggtacttcgttgatgacttaacaaagaagttgtctcaacatgtttcaaaagaatcctataaatcttgttcctcactctaccacaagcctctgtttcagactctgacatcatcatcatcaccatcttttcttcctcatcttcttctcctttaacaatggtgtctaaccaatcactcactcgctttatctgatacattgtttcccctacttcttcactcctcatctctctccactttgttccattgctgatctcatctaaatacttctcaacacggtttaggtaccaacttcttccttcttccttaagccagtttctgagttcgctcgatgctctgcttaacctctcctttatctctcccaatcttgagttgctttcgcttgcgttaccttcacggttatcactttcttgagcaattagggtaagaccctttctcccggggctctgtgtaggcttgcttgcggataaagaaaccagtttgag

SEQ ID NO: 40056 - DNA, 603 bp, Arabidopsis thaliana columbia
cgacggaaaagatgagtacgtcggactcaagatgctcaagtcacgtgatttcaccggacgtcacgtgttctgataactgggaggttgagagtgagcccaaatggattaatctggaagacgcgttagaggcatttaatgatgacacgtccatgtttagttccattggtttgttgcaaaatgacgcctttgttcctcagtttcagtaccagtcctccgatttcgtcgattcgtttcaggacccgttcgagcagaaaccgttcttgaattggaattttgctcctcaagggtaaaaataatcggcaaaaagttgaagcttttcagagtcttcgatcaccggcattgtgtcggatcctgacccggagaccaagtcgggtcatacgattacataatcgggttattgagatttcacatttggatttcgagactaccaacttaacggattctggggtaattggggggttttgccaggtgaatccactgagtcacaagtttcgattttttggttttgttttgtaatgattgattaaatgtctaaagatatcacgaagtagatacagaagaactgtaaaagcaattgtgaccaccattatgaacatatatata

SEQ ID NO: 40057 - DNA, 636 bp, Arabidopsis thaliana columbia
cttcctgaaaaagaatcttagaaatattcaccattcgaattccaattactatcatatactatacaaagtagtatgtatataataatgcaagagggggtaaaatttcttggggctcgcacatggattacagggaatgtgaaccggacatatgcaatgaaccgaagatcaaattgcacaaaaataatataaattattacttgcaactaacactatagtaataaagcttattatatataatgacaagtaggcgtatccaaaaatcaaaatagtgaccatgatcaagccatgtcagcaggggtaggccatcatggctgctttgtcagaagaaaaagagcaagtgggatggatatattatttccaagtggactatacttttatttctttttgtaacgattcgttttttaacatatacttttggcaagtgtgtgttttatattgcattattaaaataaacaacttgccactattggaaatacgtatttgattatcatgcatgtatatatacgtgtgtaccatgtatacatatgactaagatcaacgatggttaatccttcagacataagctgaaagagaaaggtgtgtataagactagagatagattaagtattgactaaagcaaatagatatattttgaga

SEQ ID NO: 40058 - DNA, 129 bp, Arabidopsis thaliana columbia
cctgtgaaggggtccacagggcaaggacccgggggcagcctctagggaggaactgagtgtggtccccggccaacagtcagcaagaaaacagagacctcagtcttgtgctttcttgctgactgttggcgg

SEQ ID NO: 40059 - DNA, 588 bp, Arabidopsis thaliana columbia
cctctatgaacgacatgtttgatagaccaatacgattgttccaaatgcatttcaccagcaagattccattgagattgtgtgtcaagaagattctcgaaccttaggactgtcgtcttgtttcacagagccagaggagactgcttcaccgtacttaagaagcttgttacaccattgatccaattcacgaactccatccttgataatatacagcatctgccattatcaccatcttgagtaagcttacacacaacagatctctacttcgaaagacacaaatcaattttatctctgtatgatcaatgacatcaacaagaaacttaaacttcgttctcaaatcgcagaatttctcaaacgaatcagataattaacatagcaaaagatgaacagagccaaaaggcaatagaagctttcgaaccttattggcatcagagctttctggattcgcgagatcaccttcaggaattgcattggagcgagaagatccaagaagagacttggaggacggtgccggcgaaagatcagagacggacctccggaacatccgtggacgtggcgggagagaagggacattacccgaaggaggtgatg

SEQ ID NO: 40060 - DNA, 515 bp, Arabidopsis thaliana columbia
cacacctccaccgacgccaccaaaggtccttcaaaacagtcgcgttgtgtttctaggaagagattttcttacctttttcatggcggtcgtatcttgtgactctcctaaccaaaagaaggctagaaacaaaaagaacaaagaggattgattcatcatgttttgaacccaaacgatgaatagagatgagaatattattaaacatatcacatgacacttacattttgtagaagaagagtgagcaagtagtgaggacgacagaagatggatgactaatatgataaaaacgcttcctttgtattgcatcgccgccatttcaagaacctctttgtggtaagagtctcgacaagagtgacgagaggtgtgtcgtcgtctaataaggtgaaagttccgggttttaacctcgttttacagctttgttggggccaaatccgtcattctggttgttctgtttgggatgagatttaagctgtacggacacagaattccgtttacaggctggctcgaaccaagacaaa

SEQ ID NO: 40061 - DNA, 532 bp, Arabidopsis thaliana columbia
caatacaagtaaaactactacttgtccgagataattctttgataggttagtctagatttgacaattgataatttctcgttcttgaagtactttttgtaaactctttcgtaaagttaaatttaactatctattacagtgtttaaattcttaacaaatgaaaatatatgctttatcaatgcaattcatgtgaattctaaatatatgccggacgtggaacaaaagtaaacaaaaacatgccgatcttgtttctgatctcttatatgaatataattaaaaacacaaagtatataacaaacaaatctccaatatttcttacttgtagaaattgaaaaatttacaacatacaaatgactttaacgagattaataaaatctaaaactctccctctcgcttcgagaagggatacaaatgacacgagagactactactactactagcgggtggtacttcaactcaataccacctctgcatcagtataacataaaaccttaccaataaaaatgaagaaagataagaaaaggttccaaaagat

SEQ ID NO: 40062 - DNA, 554 bp, Arabidopsis thaliana columbia
tcccaaattttatctctattatcgatttatttataatttcaaaacaacatcatttattgtgtacacaacacaactaaaccaactaaaactacatcgttttgcttagccacgtttatgtcatacgtctaagccagtactgttaaccagttaactaatatcgtgtaggtcaaagtaagaaacaactaaaagacttacaatttagatagataatttaaaacttagaaatttgctcaaatgactctaatttgaagtaaaaaggttaattaaccttaatcaaccttaaaaccatatttttagcaaaaaaaaatacaattatgaatacaataaataaaaatataaaataaaaatcacaaaacaaataaaacatgtcacattagttttttttttcctaattcagtcttatttccccttcttttccttgcatgtatcttcttcttctgcgaattctaatcaaaatcctaaacaaaattagattgaatccgtcattttcaaactcagcttctccggccacaacaacgacgacgatattagtcaattaggcgattttttttgtc

SEQ ID NO: 40063 - DNA, 623 bp, Arabidopsis thaliana columbia
gtcatcaagacccttttgtctatatacgtcaagatgcagattatttcggaccattgctataaaacttaaaccacaaattcagaaaattattaataattaatttaacgattaaatcaagaaaacaagaaggattagcatttcatctttagaattaaggagagacacacgaaaccataataaaataaacaaaatgtggtgttatataataatcaaagaaatatatcattggcacttttgaaatggcgtcacgaaatgtgaacttcaaggtgtaggatccttcattttttcataagggatttgaggttaattgatgtcaatcaatttttttataaacatcgttttttttaatatgtaattcattggtctagcaaatatatacagagattaaatattgtggcaaaatcttgtctcccataaagcaaaatacaaagaaacactaaaccaatttggtcatgcacaaaccaaaccagagcaaaaactgagatcgtctactcctcccgtgggtgctacggcgaaccatcgctgagtaggtgtcggagatggggcgagatataaacatctttttgaatttatatacgatgagaaaataatattaattttacgaaaagaaaaataatattacc

SEQ ID NO: 40064 - DNA, 490 bp, Arabidopsis thaliana columbia
cattacagtttcttatatatattattattttatttttgtggttgagattaaattttgttagaaggatcaagagaattcggtgggttcaatataaaaccacatgtgaaaaaaaaaacgtgtatattgtgattagccaatcaattagttgtttaggtgcccaaacttactgtgccaccgcaagttttatcaaaattaggtgcttagcaagatgattcaactactccaggatattttattttcctctgttaatattttttttttctgattgttttattttagtagtagttgaatcaagtgacgttctttaaattgtgatcccactcacttcttacgcaagcaatgaattaaagtactgcaatagacaaacttatttgttatatattggtcatcaaagttatcaattagctttccaaaaatttcactttattcacatctataaatcattgacactaatactgatgccatatattactaaagaaaaaagaaagaa

SEQ ID NO: 40065 - DNA, 135 bp, Arabidopsis thaliana columbia
acaaaggaaagggctaaaacaattgttattgggcctttttttttgggttaatcagactagccttcgcaaattcgcgctttacgcgtttcgcgtctgaagacactaccggagtttttgttcggcgattgtagttag

SEQ ID NO: 40066 - DNA, 446 bp, Arabidopsis thaliana columbia
gtgttttcccaaattagcttttgatgattatcactatgactataatcgatgatactgtgtttcttttagctgagtttgatatctcacagagtttatgtgtattggttagaatcgattgattgatgtgcaaatcctgaaacacaatggtaccatttcgatattaatgttgctatttatagtcatctgagtttgagtgtttttgttgaaagtttttcagaaaatactcatagatggacaaacaattgtttgctttgtctctgctgaatcatattctggaactcaagtatagattttttttttgcttcatagtcgtttatgtatgttcactaatactagcaatgctttggtgattggctattttgcttcatagtagtttatttatgaaatggtctttgttgacactgtttaatgattggctatgtgcaggaggattaaaagatggacca

SEQ ID NO: 40067 - DNA, 565 bp, Arabidopsis thaliana columbia
tccaacaacttccattcatactactgtaaagaagcttacaagaaacgatgactcctttaaggctgatactatcaaagcatgatctcgagtaagcttcttcattttgtggaacgtagcaatggtagaaataggaactgcacaatgaaaagaaagctattgaaattgttcttaacagttccataatcaagtggctatagatagtcatggagtaatcaatacagaactactttatttcctcaaaatgtaatatattttcagcaattagagtttagccaccttaaatactactttccatggttctgcaagaatacgtttggtacaggaaagaacccactttcgtatatcagttgcaatttctctattcaatagacaacggtcacaaagtttcatactttcaaagatacatgtttcaagtatcagaaagacgttcataactccaatagcgattcctcaaagttggtcacagaaaatagcataaactaatgcctatttccaagtaaaaaaagtatactcaccaaagccttttttgtttctcttcattgcattcagaagaaatttgtcagta

SEQ ID NO: 40068 - DNA, 533 bp, Arabidopsis thaliana columbia
cagctcttacatggatcagtaatctatcatgaaacctcgagcgtaccgattcctgagagttcttctgtctttcgcccgggagatatatcaggctgacgacctggtaatgcatgaacattgccaacacttcccataggactggcaccaagcggatgagaaccagaatatggtaggttaggggagattccacgaactggaaatggatatgaaccaggaaaggtagtaggatgtgaaagaaaaggtgccctgggaataccacccatagaaggaggctgcaaccacattccttgaggcgttccaggcagtgaatgatatggaggatacatgtgcggatgaataccaggattcatttgagcaggacctgcagacatcccaggtcttggcgttgtagaaaaagggttggaaccaggaaaagcaggcggagatgtcattagtccaggaggggcgagtgtcctggtcgccaaaaggtgcatttgctagcatgggcgaacgttgaggtatgggattaacatttgaggaggctgctgcattag

SEQ ID NO: 40069 - DNA, 559 bp, Arabidopsis thaliana columbia
attgtctacttagggaaccgaccaacttgactagtgtctgaattaaccccacttgctattttcatttttgcattatttttcaagtttttagattgcatcatttttgttgtccctttgggattatgggtggtggaaatgtctgtcttaatgttaattaagacatgcatgatcatgatgcaaactacattttgatacatcaaatgtaatttactatacaaaagccaataggtttttttggtcgtaatgatgtcattatgatggaaatgtggaggttaaggacgattgggacccttacctagaaagatgattcctttttctatggatccataataataattacaagtccttttaaatcgcattaattgtatccttttgactttgtttagctagaatgaataatatcgtataacttctaatgagatggtttttggtggggttagggatgatcaaggtcagagtggcaattcttactctccttatggaggcgacggcggtggcggtgggagcagcggtgggagcagcggtggagggatggacgttatgggaggtcgacgagagg

SEQ ID NO: 40070 - DNA, 597 bp, Arabidopsis thaliana columbia
cgtgacaccattgcttgtctgtattctgacaccattgcaaggcatattatcaaatatttgatgtgcgtcctttgcatgattgacattttcaacaccaacatgtggaacctttaataaactttgcctccctttgaatttgaatctccaagtcttgggaaatatagtcttatgtccctttgataacccttgtcttctcagtaaaattgtatcgaacactaggcaggcatttgcattgacgcctccaaaattagaatgtgactgagcttgatatctcctcccaatcccataatcctcaataacatccaaagttggtttacaaaaattaaggccatgttacaaggatgagattggaacctgatgttgtgaaatcaagctcgtatgttgaacacaatgcgattcaagaactgaatccatcttctctgtctccatcttctctgcacattctctccactccagttgctggatagattctacatgattcgacgaatcagttttcccaacttccgatgtttgatcatcatcattctcgtgtctgttgatcacgctcattctgatgttgtgtcaactcagttttaatcacaatttctaccacttttt

SEQ ID NO: 40071 - DNA, 553 bp, Arabidopsis thaliana columbia
cttccatgtatgtgctcctttagcaaaaggaaagatgggagagttaaaagacaaaacgtcatgactcttgatccattaatccttttacgtgcgtatgagtacttggaatcattggtcattaccaacattaatcttatatttttaatataaatctcatacgtataaaatatgtatgctgagaatttttaaaagcatgttgccaccgaagattctgtgaacggaataaggtccagattaaaaccagctcatctttggtcataccaaacaaaaacgcgtcctaaacactttcatagtagggaacaacaaaatcaatattatcattcttcaaccatgtcaaactatcctaaccagaccggtttccattaaccgaatcaggtcaaggaactttcagaccaccggaaatttcaaaaactctgattaatcggtgtcatccttggctctcaaatacgccctaccaccagttctaaactaaaccagaggccagttttcactttgcaacattaacactaaagattccgcattttctgactacaagagctacaaacatgaaaga

SEQ ID NO: 40072 - DNA, 477 bp, Arabidopsis thaliana columbia
tctcgttactaaaaatatatgtatatatgtatgtacatatatgtatatttaaaaagttattattaaaaatctactactttctcaactatactctctttacaagaaaatctgattttaaagaaatttcacagttttctagatagcaaccaactttcaccaatcatacttaatttgaggaattacttacaaataaaatctttaaatcataaactagaagccacagtatctgttaaaataataataattgaatttaggatctgccattagtcgacgaattttcttgaatattcgtttctatgttaaaatggaagtcgtgttaagaatacaaataaataagtatttgttttgaaaaagctgaaaacatttttgaaaaagtaaaaatgactaaataaaataacaagaataagaattatcgttttaactccactgcttcctctgcagcactataaatatatgctttggtactctgcaaggttg

SEQ ID NO: 40073 - DNA, 602 bp, Arabidopsis thaliana columbia
ctgtataatagtaactccttaatatttcatctcctcactcctcagtcaattcttttagatgttgtgacgtcttgcacactcggttatgttcaaaccgggcttatagaacatgatttctatgattttggctcaatccaacaactagaaagttttagaatggcgtatgttttccacattgacccaactttttatctaaaccggaatcgaattttagagatatggtcttatgctgtgttacgtatttgttttatagattgttgcaacagaaacaaaatagttctgtctatatgtacttcaatattctttgagcattgaggccgtgtgctggctaacacttacctcagagctctaaattccaagtcagttttagttattgcctcgttaccttggattgtgtaaccaaataaatattgtcctttattaccaaaatgtattcattgaatccttacaaaactaaagtctttggtagagagacaaaacataagaattgccaaaaatcatacatactcgacaatcaatgattcgactataaatacatacacatgcatagtttagttcttgcatgcgttacgaaaaatatggaagaacttgtactaagatgt

SEQ ID NO: 40074 - DNA, 590 bp, Arabidopsis thaliana columbia
ctcgaccattcactctaccacgttactcgaccccctggtcgagtatcatcactcaccaccatcaccatcactcgaccggacactcgatcacgtcttcacagtctactcaaatccgcactcaaccagacaagctgagcagaaggaagaaaagaggagaagacaaagtgtttggaagcagcctggacctccatcggatcacgaagcccatctcggcccattatcactctatgggccaggcgattaggttattggcccgtctactatcattttatttcgtttggtataaatagatgtttgagggttctgtcctgagacatctagtcgacattgcgtttttgcttcagttttattttcagttttactctgctacgccgcttttgcttctgcaacctgtagttcgcgatttttccaagttattgagattccgcgtttgatttcattagtcatcttgtttctctactctttatctctttacttatgcaatattatcgtttacctgcgtttatgtctttgagcatgctgtctgagtagtgacttagaattcttagggatgggatagagtagttgtggaatccgtagtctatagaatg

SEQ ID NO: 40075 - DNA, 1325 bp, Arabidopsis thaliana columbia
tttgtcttagcattacataccactatagtgaaccgtcaatggcaaagccttggaacatgaatcttcggaagagtctctttgttttcatttagttccttaataattagctactcttttcatgtttggcatttttatgcttcaaatcagttatgaaaagtttagtcatagtcgactaaattatgtctcactaattttgtcacaaaacgattcaaaaatgccataaatcatttactctgcctccctttagtttggctgaaaagttaagtactcgatacgtccttcagatccacagttttgttaaattaaaacgatataataatcttcagtggaagcagagcaacaaagtcgttgtagtatagtggtaagtattcccgcctgtcacgcgggtgacccgggttcgatccccggcaacggcgtttttttattcaccttctgttttttttttttaattttcaggcccagaatatggactattgggccgtctcttagtttaataaaaactaaaaacgttttgccgctattatcttttgcaccactttgcgctctcgctaatctctttccccaaactaaaattatgttccttcgtctttagatattataaatcaaacagttctaatcaatcattcatcaatgttgtcaattgtcgagaattttttttttgtgataatgcaggaaaaaaatgtaaaaaaaaaaacactgtttgcttacatatactaacaaacgaaatgttttattagtgattactatcatataacttaattacatccgacatgatattggattacatatcaaattttaaataaaaagacttttggacagaccacagacgtagatttcattataaagagacttgtctagtctaactttgttgcctttgtcgaaacataaagaaccaacacgtcaagcccttttatatagacgtacatttcatatcttatacagtaagatatactatacagtctctttttttgttattcttaagtcgttttttaggacatgtgtaaatattctatcacactttttttttttttttacatatgtaggtatattcaatacgccaacttccatattcacttagttaaggttcctgcaaaatgatcacagaaactgtatcaaagatatatgactaattgaaaaacttgtgaggcaaggtattcagtttccattttttctaagttattaactattctggttaatataaataaaatataaccttaactaaaaatatgcaaattatacaactatgtaataatcctgaagtattcatgactttcagttttatgaatctacggtgtaccttagcagtttagcagttattgtgctca

SEQ ID NO: 40076 - DNA, 456 bp, Arabidopsis thaliana columbia
cagtggtgcattcaaatcagcaactatggccagcctggaaataggttcggtagacaaaacagtgtatgcagcaagttgcaatgacgggattggattggaagagaacattattgcatacaaagagcttatagatcctctgcttagtccccagaattccactgctctgacagctctatctcttgcgcgtggagaagagtctactacaaggtgagctaccagctcccagaactgcagatgatcaactcgaaatgaagcaacaatagatgctgcctctggggaatatgaagcagcaatagcctcagtaagacccgtgcagaagaaaagacgcagaacaccttcaagtattcgatctttaacaggatcccatgtgtcatctgccaaggatttcagattgtcttcaccttctacagatttatggtttagtacgcattaagcaacgaaaatgctgagagagca

SEQ ID NO: 40077 - DNA, 678 bp, Arabidopsis thaliana columbia
gggggagttgatatgtctataatttgcatgttttcagtgttcattcatcatcattttgagtctactttcatatcattcatcactgttttatatcatttcttatcattcttgcatactttgcatgattaggatagctttgcatacatattgcatttctgagttttttttaggtgattttaagctgtttgcgagcaaattggaagaagcgagccagaaccagaggacatactcgacccccaggccgagtacgtccagcacaatactcgaccccctggtcgagtgactttggagccattctacctatctactcgacccccaggtcgagtaaccgcaactcaggccactcgatgacattactcgacccccaggtcgagtatcatcactccccatgaacaccatcactcgaccaagtactcgatcacatctttggagtctactcaaatccgcactcaaccagacaagatgagcacaaggaagagaagaggagaagacgaagtgtttggaagcggcctggagcccatcggatcacgaagcccatcttggcccattatgactctatgggtcgggtgattaggttattggcccgtctactatcattttatttcgttttgtataaatagatgtcttagggttctgtcatgagacatctagttgactttgagtttttgcttcagtttt

SEQ ID NO: 40078 - DNA, 1292 bp, Arabidopsis thaliana columbia
gtgatgttatgtatgatattataagtatgtgtatgttaactatgattatgagtatgtatgtatgatgaatgtatgactggggagaatcgagctatgggtcgtggtctccctagtaatgtggacagtgatgggccgacgggttacatgctggtcaagaaaggctgacgagcctgggatgcatgggagtgtctttgccacgagggccagcctctacttatgaggttctagttgtcacgaggatgactggacctaacgatgtgtatgtttatattaatatatataagatgatggttatgaatgtgttgttagaagttaaagcatgttaggttgattgcgtgtgtctaagtttatatgttatgatgatggttgtatagctttagaaagtgttttatgtttcagtgggcagagatgattcctctcactgagtattctttactcactccttttttccctttttcctcaggttagtaagcgtgaggaattgcgtgcaatattttgttcgtgtgtgaagttcaaagaaaacgtttttggcaagatcagatgaaaacatgccgtcttagtctatatggcggggcaggtgttacatctattgtcttccttcttttgtcccctggttgctctgatcagattgtatcctatttaaatttggtttcatcagttgctcaggtttagttgtctccctcgtttgggttgtcgtctccctcgtttgggcttaagcttctcttcctcgactatattacttcgttagtttggggttgagctttttggttatgtcttggatctatctcatttagtattaagcgatgtttggcttaattactcgtttgttatgtgggtcttgattattttacggtttatccgggagacccttgacaaagactctcatggagaaaggtgcatcttatgcggagaaggccaaggtccactctcttgtttgcgccatttgtgttgaagcccgttctcatatattagcgggaagtccttatggtgtgcttcgagagcttccacagtcttgagacaagttgggtttggtttttgcaatgtatcgaaaactccttccctagttgtaggttatggaagatcattgtgtttctctgtaatttaactctcgtcttgtttcttgtggtttgtaactttcccaaaaactctgattatcaatattacttttagtgaaagaaaaaaaaaacatagataataatgtcaacaaaaccaaagtcttaaaacatacataatagtgtcaacaaacccaaaaacagagaaattctaggttttcttttaattatatttttatt

SEQ ID NO: 40079 - DNA, 725 bp, Arabidopsis thaliana columbia
  unsure (1)..(725): unsure at all n locations
catagtttatacatattttatatttaaaccctaccctatacgatacactatatacatatatcgtatagtagtaattgattatataaaattttacatagatgtacaagagcattgatatcgatagaagttagaaccttttgaagatattcgtaactcttgaaaaaattcgattcttagtgacatagtgagcaataactacagattatggagattaatttgaattttagtctattttccctcttataaaagaacaattaccaaggaaatcctaattctgaattaatcatttacaaagttgtagtatatatataaaaaaaaagttgtagtatatagtattaacaaactaacacaatttttttcaactttgatagtaacctttttcaaaccaatatatattagtgttttaaagtacgccattatcttgtataatatgcatggtgtattgatagtattttatatgtatgtaaaatgaaaactaaaaggcgactactagcataaaaaataaatgatgaaatttaacaaattttgtaattttaaaggcaatatactattgtaccgtgaaaaaatatataggtaaaattttcaaaatatttgtgttngccaaataaatggcaagatcataatattttgcataattttctatattttaaagccgattttcattgctaaaatatattgtataagtatatgctaatacacatatttgcgtgtgtgtatataaataa

SEQ ID NO: 40080 - DNA, 484 bp, Arabidopsis thaliana columbia
catggacactttttaatgttgtattttcaccgctcttcgttttcctgcatagattcatataaagtttggttacttgaaaacgagacatgtgtgcctcttgtcgtcagctgtctttctactgttgtagaatggtatttggtttatatgtaatgtgtgattcaagtaaatcttattcgtatttgtgctaatctaagtaggaatacagttctgatgttggagaaaacttgtcactcatggtttattcttctaatagctaagctggttgattgctttctgtatcactagattattataattgtacataatgttgcttgttgttttctgtttcagtcagtgcgttacagaaaatgaaaaaagctttaggacttccttctaggtttggatggaatggtgatccatgtgtcccccacaacatccatggagcggggctaattgtcagttggacaagaacaccagcagatggttcattgatggactgtatagc

SEQ ID NO: 40081 - DNA, 519 bp, Arabidopsis thaliana columbia
tgcaagtggagatcaccctttttgttctgtggcttcttcttctttggattaattgggtcatgggaacaagcttatttggacccattttgaggcctccttagtcatctcctaaaccagctcgaacctgggatggattccttggatcattcctcataaaataggtgattttttgatgaatattcatgcccatctcaaatcaacgagtagtttggccattgggtagtttcacaggttcgtggtacggtttgggtagactcattcgaccatctcttgatttagcccgacagtggacaattgtctttcgatcaaaagtcttaaaatatgttgtgtgctgatgtattctcaagcccacatcatttgtacatgaaaaattggtgttgcgtggtgttggtgagctttctcggttatgatcacgtctggattggagttgatggtctagtacggttgggaatgtaactacatgggtaggtagtcttctggtagatagattgaattcaagaagtaacaaatcatggaaat

SEQ ID NO: 40082 - DNA, 1121 bp, Arabidopsis thaliana columbia
tctgacaccttggtcctcctttccacagatcgctaatctcagaattagaaacatcagcatgtggtttcgatgctgataacactagattttaaccattttaaaccctttttcatgcatttagcgtagtttcatgtctcttttaatgcattcatagtccattttccttctttttcatgttttgcaatgcattagcaagtttgcatatggagtgatttacaggtaaaacatgtggttttggacctattttgggagtttttggaactaagaagttgagctcggggtcaatgctcgggatgtggtcgagtggtcaagccaaagagatgccacacaaagaaatgaagctatgctcgagatctacgcacgggataaggtcgagtggtgcatcagaagtttcagcagtgcaacagttacaacataatgtgcagcaggagccattttgaagatttatgttgtgctcggcctttatacttgacttgtatgtcgagcaagtgaagaaaattgagtcttgaagatttgcacctgctcgaccaaaccgcctctctattttgtcttctagcgaattagggcaacctagtatttgctataaatagaccccatccctttacctaatgaatattcctcttttattcctttgttctagcctcttttgtgaaaaccctaaatatgttcctgaattaatgaccgtcaacacacatccaccaaactctgaccatgtggtcatttcaatcatttggaattatcgaccatccatgcacatccacctaactctgaccacgttgtttgcataatagtaatttgcatacaaatgagaagggaaaaatagtaatttgcttatagatcatccttttcttgaaaccctagtcgcctatcactctgcttatgatttttcgtatttcttccattttatcattatttgctaatgtgttttaatgaaaatcgcacaaaaactacctttaagttacaaatttatagtaagaatatatgtttgggttctttaattcaactctctctctctctctctgaggaatttcaacaaacactttgtggacgaatctaaaatttgtaaagagacggaatttgactaagactatgatggatacaataagagaagaagaaaccca

SEQ ID NO: 40083 - DNA, 489 bp, Arabidopsis thaliana columbia
cataaatccggatgaattgatgactaccttatctgtttttgaacttttatactagtggagtatttaaatttatatagtatttaaatatcaaaatgctaaaaaagaaaataaataaatgctgaacaaatccattgttgaatttgaggaatcccattaatgtagggaagaagtacttgtagtacccaatacgtttacttttactttttgtagtgggcaaattttatattgttaatttattaataacacaccctaataagtaacaactaattttggcatctttcttctagatgtaaccaaattttgtattattaataacttacactaacaaatttatatcccccttttcttataccccaaattttgtattattggtatattcctaaattgactaattaaacataaacagaagaaaatcttggaaaaaatcaaacgatttggtacttactacataaataatggtgtagtgcagattaacagggctaaaatggt

SEQ ID NO: 40084 - DNA, 455 bp, Arabidopsis thaliana columbia
tgaataaaaaccattccattgctaagtttcagaaaaggaaaagctgatttcgaaactcagagaaaataaaagagtatatagaatgatcttctttgttattgaacatgtttcaaagctgaagcattcactatagtcccaaatctatatgccatgtcagcttctacattttgcttcagtgaatcacctgaaataacaaacaagttgaaacctttagagtttggctaagagtttaaacatagtcaataccaatgtagccatcaacactattagtccttgatatcacacaacagcgctagaacaacaagagagcatctaatggagcttcatctacttggcaatgaacctattttagcggtaagacttgaatttctcactatgaatcaatcaaaaagtgaggactcacgaataacttcgaatttgatttgggatttatgacatgataccaccttaagaca

SEQ ID NO: 40085 - DNA, 417 bp, Arabidopsis thaliana columbia
ttttggccaaaattcttcctttttctacaaaatgtctcacatgttatttacataattatcaactgatgtttgaaaccagtaaatgaagtttgcattatttaaattaacatatcaaaattatgtatgtattctctgacctatatacaatcagaatttttaaaagtgaagtccgagaaaggcccatcaaatgtccatgttccatatacgaaagttagttaggtgagaaaaataaaaatgaatcgaccgatcaactaacaacaacaataaaactagaactaatcaaagttggtcaatcgtcgagactggttcaaaatcttggtgcttcatgaataatattcttatcagaaaataatttatatgtatatgtatggttacctaaaaaaaactcgtgcattactacttaatagatagatatat

SEQ ID NO: 40086 - DNA, 567 bp, Arabidopsis thaliana columbia
caaccaccttagaaacacatcaagtgttctggtctaacaacatataaaaaatgacatgactggtgaatgaagccaagacaaaaaaaagcggtaccagcattactccaaggaaggatctgaggaaagctgctaaagctttcttgtagagagaactcagcatattcgccattcccgttaccactctcaatactgctcttataacacctttggttaactcaactagagtccctagaaagttgctagtgggagcttctttgtcacggttctctccagcatcagttgtggccacaggacggggagcgaatatagctggagcgacgagaatgagagcagcaacacgctccggggcttcaaagtaagcatctaaagctacagggcaaccagcagaatgcctacaacatatgaattaacaatctcagcttatggtggcactttaataagaaatgcaaagtatatggaacctactagcttacttaccccacaagaatcgccttatcggcagcaagaacatcgatgaaatacaacgtagtgagcacggaatcaccatggagtagggatcaatggttt

SEQ ID NO: 40087 - DNA, 346 bp, Arabidopsis thaliana columbia
caaaatgattaaacttttagcgaccaaaaccactggccacatgaagtcatgcattttagttcaatgtcatcttttcaatcttataattacgttatatatacacatataatggtgtagtcaatgataattttataggatgagactgtgaactaaactatcctcaaaatttagttcacagtttctataaaacaaaagagagttgtctactaattatatagatatataaagtatttaaatacatcgaacaatgaactaaactgaagtcgcagattctggttagtgtttacaaggccatgaagaaataggaaacaagaagaatgtaaagatattctacgcatttgggcat

SEQ ID NO: 40088 - DNA, 589 bp, Arabidopsis thaliana columbia
tttgcaaaactaaaaaaaaaaaaaaaaagagagagttggaaaatgtttggagctggtgggcattagttggctatgcaacgcacggacgcggatacttttcaactcgttgcttacgcggccacgttttcgtcacaaaccgtgtttcttttgcggccttttaagttttaatcaaacatttttgttttcatttgaatcttttttttaaggcggttatacgaataaaatcattaaaaggagaaacgggccttcatgtttaggtttttgttcttcctcatttgggttatttagcttattggttcagcccacaagagtttccttcaatggatagggccttcagttgcatgccatcatcctttcttgtttctctataagccatttttgcaatgagaatttctcaatttcttatttttgcaataaaatcattttgccttagatgatggtggaatcatccgtttttctttattttgacccggtgagtaattgaacgcaaaaaatagtccaattattcaaaaccttacaatttcatatcgccataataaacctaaacatgattcgagtgagcactacataaaaaggggacgaaatgttg

SEQ ID NO: 40089 - DNA, 560 bp, Arabidopsis thaliana columbia
cctatttatgattatcataatttatgatatatgtcttgatatattaatagacacacaaaatataaagtattccattttgtatagattttatctcttaattgcatattttcttttattttttgttttaattaattgagtaaaataaaagcataaattaattggaaaaaatactcataagtaatattaatgacaaaatctataaatattttataaatgttaggtgtttaaataaatggattgaggaactttgtgacattttcgttaatcatacatggagataaggttattttttaaaagtggttatcaattaatatataggggatactatgttcaaaaaaatagttaaattaaaacttttaaagtttttagtatttaaaaacatatagaagtttgcaatttttaaaagtaaagcactttcataatattattttaaaattttagtgttttttaattcaattttagttaatttctgtattaaagcctctgttgattcataattgtgtgatacagtatagggattttatgtttctcgggttacacttacaaagcagctatggaag

SEQ ID NO: 40090 - DNA, 516 bp, Arabidopsis thaliana columbia
gatagatccatctccatgatctcgctgggactgatagtaagaacaacaatggcgattttctatctgaattttctcgagaaaataaaagaaacagagagagagaaaatgaggaagcgtggaagagaaggatttatagggttaggagttagttggtttgttcacgtgagggtcacgtcatctgttaagaattgagcgcgaaaattattccacagagaaatcctaaatcgtgtattatagtattgtgaacttttgtcgaacatttggtgggcacaatccattttttcctgattatatcgattcgtgatatcacttcatgccttctcatacaaaaaaatatatacataaatgtctttagtgtaagaaataaaaacaccaaagacaatcctgaatttttaacctgaagaatgctcacaaggtgttcgacacaattccccaatgagtcttggttgttatttttcttaaaaactcttgtcacatggctctcacgtgataaagtgtgcgtcactgatacatgac

SEQ ID NO: 40091 - DNA, 527 bp, Arabidopsis thaliana columbia
caaccaaacaaaacaaaaattcagctacccgaatcaaaagacgaacttgaaaacagataattgaaactaacctgcggtggctccggcgccggcgtttgcagcgacttctctaatactccggtaatcaaaggtagagttcccatgttcaatcatcttaaaaccctagaatctctcaattggggggaatctgactcaaaattgaaaacgagatccagcagtaaatgataaacccggccacgtgaatcgacgattatatacaattctcgtcgttcttgacattgacccgacccggagaaaaaattcgaacgtgtagacgggtaaaggaagagactttgtttgcgtatgatttaggcggtccctagtcgaaaggatcgattttttttcttacagattccgaagaagcacagttggtttgagatgacgtcacacatttaacaacaacaacacacaacccaagaagatagaaagttgaacactttttgcctctatctgattatcaaattataatctgactgaatccggtataa

SEQ ID NO: 40092 - DNA, 482 bp, Arabidopsis thaliana columbia
cgaagtgtaaagtgtaaacatgattttaatctcaatgctttaaggccgatcttagcagtagagtaaagtgtaaacgaacgtattgtttttacacctagaattttaagttctgaaatccattctatctatttttgaaatgcaaaaacgattttccaaaatctccatatattttgtttggtcgattccaaatctctctatttaattgacgattttactgcaaagaaaacgacaacctcggatattcagaaccgcaaagaaaggacacaaaggaaaatcactatttttagatacataatgtttacattaacttctcttttataactctacaaatctttttttctttcaccagtttcacaattccgactattttttagagttttctctattcgtaaaaaggtagagaaagaacacagaagaaggggaaggaaaaagataaaacacaaatggaagggaaagaggaagaagcacagaggaggatgatg

SEQ ID NO: 40093 - DNA, 531 bp, Arabidopsis thaliana columbia
ttctgagagtgacttcacaggtacctgaaagcagaaacattgaaatattaatgatcctaatctgaaaaatacgtatgatgttacaaaacttaatgatcaagaacactaaataacttgcctgagaaagtccctttagttgaattttcccttgtgcaccttctaatacactaaccactctcttctcttggtctaacaggtcatacacagtttcttgagacacctcgtaaactgatacaaaaatcgcgtctcctctttcctcagccatggataacatctcagacattgtaaggacagctaaaccaagttccctctcatttcccttcaaaacatgtcatacataactcaattagcattttcatataaagtaataacaacacaactcagtacctttcagagataactgctttcaatacctgtatcagatgtgtttaccactatttcttgctccgtgggcgatgacattcgcatctttaccctcaaagacagtagatataagaggctttatctccttagtgagaattgaaccagtag

SEQ ID NO: 40094 - DNA, 432 bp, Arabidopsis thaliana columbia
taccattttcatatgcttcaaatcctaataaccaactgtgactgtaaattaatgtttagcatttttgggaacaagacaacgtctcaaaactcgagctccaaccataatatgaatgctaaatcaccaaaaacttcaaaattatctaaattttaaagtgagtttttgtttttgtccggctcacccacataaccatatatatatatatatatataacacccattaaccaatatatatggttatgtgggtaagattaagaataaccattaaccaatatatcagaaacaggattggaagccaaattggatcatggtttactatcattaactcgattggttcgaccgaattctacaattattattaaaataaaatagataaacaaataaataaataattcatctggacaagtggaagttcggttagtgggcccacttt

SEQ ID NO: 40095 - DNA, 485 bp, Arabidopsis thaliana columbia
cttttctatgtatctatttgctttctctttctctttgcttccttctcataactaatgtttatttggggcatatatatatgaacttatatataaaaaaagatgacaaacattacttcaagtaaacatatactattccacgagagccaatgcacaattttggcatcaacttgtaaataaagaataatggggacaagcaaaaaaaagtcattagtattgttattgtcctcctcccttgtgagaatgagatgatcccacaacttgcttaagtagtttgaccttgttgaaatctgcagggcaatagcttttctctacttcccaagcgagctgtgacattccattgaaggatgattttgctcccttttcatctgttacttccattggaaatggaatcctcacatcatatacacctcgtggagaccatacccgaaggtcgaatccaagcctatccatccatatcatctttgtttctgaaacctggcattagt

SEQ ID NO: 40096 - DNA, 469 bp, Arabidopsis thaliana columbia
tagaggcctaaagatctaggaataccaatgccaaatcgcaaatccggcttcgttttcacacccttgtacccacttgtcatctacataccctcctttcatgtcatggcagactaaaacccttgggcgattcggtaaacagtcggagtttcggcggaaaggtactgtggagcgattaaactggacatgctaggaatcaaagtaagagcgagatttcaggtcctgaagagctttgatcgggatagatataggtaacgatggcttgacaagatcaagcaacggatcggcttcagattgtgcaacgtcgtcatcgctggatttgggcatgatgagagagaggcgaaatgaagtgaggagcttacgggagagggtgaagaagagattgtagatacatacgagagttcttcgagagatataggcgcgaagaagttctcgcattatgcagtggtcgacgaaggaagatgatgacgat

SEQ ID NO: 40097 - DNA, 526 bp, Arabidopsis thaliana columbia
cgccttgtacaatgtctttttgctgtatgttcgctgatccatctaaatatgcttgagctgtgttctaaattttgaagtgacgaagtaatccatgatttgagtcgagtaatattgacaaatgattccttccagtggaacagaaaaactcgactactgcatgcgaaggggttaagtcaagtgctgaaatggttagaggagttgaaagagcatcatggtggctcccaaaaggaggcaggtctctgactgatgccgcctttccttgttcatttccgttttctgtttctgtttttgattcttgcttttcaaattcattgtttaatagctggatttcaggcacagaggtagctatgggtggagctctactgctctcttcttgttggaagcattacagtgtcttgctccacatggaagatcaaaagttctcaaagattagtaaggaagtgttggagcaaatattgtctggtattaaggttagaaattgtcgccaatcttttttgggttcaaaatttttgtgatagagataggg

SEQ ID NO: 40098 - DNA, 510 bp, Arabidopsis thaliana columbia
acatgtaaactgaatttggttttccgaagcccaaaacctaattcttagtactttagaaggcccaatttataatagttttttactttgcgtgtgtagtttgtagtagctcttcttttagcatgctccatagagcttcttaaaggagcttccggagttacaaagcggtatattaacaatctcctacatccaacaaaagagcacatgagattgcgaaatgtgtaattgatgatcttcgacttccttagtatgtcgcaagacattaccgatgtgtaattgttgctctgttccttacctttttggctctctctctgttaatgagttgttttgacaatggggcatcgttggttataataaaagacgataaaaagctctccttttagcatgctcaaagtatttccgagtccaagacacattatgaagataagagtatttactaaatgcatataaaaatagtttggaaagataaaagtaaatagtagttctagaactagtagcttattatatatagta

SEQ ID NO: 40099 - DNA, 866 bp, Arabidopsis thaliana
tcctccttctgactcgcttttgaaccacctgactctgatacgttacctactccggatctagctgaggttctgtctcttcgctttccctattttttttattagtctgttttttcaaagaacctcactttcattgattctgtttttagaattgtgaaacttttatgttttagatccaaataatcgattttgaatagatagaaatagtgattgcactgattaggtgaataacatgttacaattagtaagctactggtaaaacaatctgatgataataaaagatgtttctaaaacaggaacgattagtgaaagaagaagaggaagaagaagaagttgaaccaataactaaagaactaactaaagctccggttaaatctgaaatcaatggtgaaacacctaaaccaattcttgcttcgactctaataaggtgtagtagatcaaatggttgtggccgatcaagacagaatttaagtgaggtatatgattattacaaggccaaaagttttgtctaccatatttctttttttgtgacacttgaacttacttttgctaatactaatctctaggctgaaagagaagaacgtagaatcagaaggatattagctaatagagaatctgcgaggcagacaattcggcgaagacaggtattgtttactgatgccttgtttctatcaacaaggtccatattgggaaaattagctgaatagtagactagtgttgttaagtattaattataccgtatatatccaggcaatgtgtgaggagttgagtaaaaaagcagctgatctgacatatgagaatgagaatttgaggagggtgagtaaactattcgatttacgtttccatcgagtgaaccttagagaccgttg

SEQ ID NO: 40100 - DNA, 514 bp, Arabidopsis thaliana columbia
ttctcttgacctctaagtatggggaaatcggattttggttttagcttttgttggttgaggcaatatcactttgggtcatatatataccaaaatggcaagtctaatttaagaatgtaaaaaatttagtgtgttctcagtttgaacggtctctataaatagatcattgtcatggttcctataactttggtcaggggacaaaaatattcaatcttatcgcctttctttatttagaaagaaaaacagtaaaataaaactgtggttctgtctattttaaggcaaaaaccagagtaacctaaatcatcattagaaatcatcatcacggcaaaacattcaaaaagttgattacttataacttaattcgacctctacccaagcttacactaaacttattcacaaatagtgttcacaactcccaaatcaaaccaaacccacaaaataatgaaaaattgaaaacaataaaaacttagtaagaaagaaaaagcttcaaaataattaccctactaccatcgttcac

SEQ ID NO: 40101 - DNA, 547 bp, Arabidopsis thaliana columbia
taaggtgttgatttgagacattttttcgaggctagtagagtttcatagacgagaatgggtaaaaaaaacgaagtaaggatacacttgtgtgaccagctctaagggttttataaaggcatttctgaccaaggtcgatgatctgtgtacaagcaaactaatcaaaccgagaaccgtcccaccaaaattcatgtttatgtaatctttaagagttttaagtattaagaacaactattgagtgtaccttaacatcgccggaatcatctgcagaagcaagaaaagacgaccttccgttacatactacctttaacaaatcaaaagatgtcaacatcaatgtcataggtaaatatgataactttttcgaaaagtcgagtttttagtatctctacctggttaacttcatctttgttgtaattgtaactctctaatggcttccaagaagtagcacttagctatgaaattgcataaagagagaagctttaaaactaagtgaaggatatggttatagttagttaatcaaagtttgaacattttaaattaccgtatgaac

SEQ ID NO: 40102 - DNA, 556 bp, Arabidopsis thaliana
acagtgacgtttttggtggctggagatccgatcgtgacggatcctgaagccgggtcacgggttacgttaacggatccagatccaaagaatgtacgaccggaagcttcgtagagagtagtgacggcggactgcacggtggaatacgtcggagatcggaatctgaaaggaactggaggaggacatggaagcggaggagatctgctagggcggaaggaggtaggcggcgcgtgaggtccaaggaggcggaggagaattgagaattgggaacggcgaggagggttaatgagtttctaccggagagttcggcagcgatgccggaagagacgaggaggtttgagaaagatgagagattagggaaagaggagaggacggcggtgacgttaattgcggcggcggtggaagataggaggagaagtaaataaggtaatgcgagaagggtaaaatgggaaattgagattacgttcgccattattttttgaggtaggtcatgagattggtaaagagaagaacacagagaaggaagtgagtggatagagagatgggagtgatgtgtgag

SEQ ID NO: 40103 - DNA, 575 bp, Arabidopsis thaliana columbia
tatttatatctatttttatcctattcattctaaatttggatacttttactgttgactgaaacttgtagcctagttgttgtttcttttcacatgtactcatgtatacccaagcttaatgaaattttaaagaaaataaacaagcggtttagttttaatttaatgggccgtttctttatttcaacgaagcccaatagagcctgttgaaaaagggtttagttattgttgtttacacataagggcttgagttttatttatttcacgaaacgagtagaaacttttgttttatcaaaatcagaaccctcctcttttacagattcaggccaattctaaattcccatcgttcgttcaatttcagacgttaacctcggcttgaaggcttcaaatttctgtgaatccacgacggagattgtaagttccgatcatactcacgacgtactcattctatatgcactagaatcttttcctcctccattgattagatgatatgtttatccagaacatgatggattcaattaaggcttttatattgttgatctgaatggtactgagttatgaattgttcgagcagattggtg

SEQ ID NO: 40104 - DNA, 501 bp, Arabidopsis thaliana columbia
catgtgaatgtaattgtaaggttgaattgtgcaggtgatgggaagagttggattcaatttcccaatctttctaacattgattcattataccgtggcttggattcttttagctttcttcaagtctctctctttgcttccaatgtctcctccatcaaagacaacacctttctcatctcttttctctcttggagctgtcatggcctttgcttctggactcgctaataccagtctcaaacacaataggttcatagctcaatcgctaaagtttgaatcaagattcatagcttaagcttgaaagcttttgttcttctttgtttccagcgttggattctatcaaatggctaagatcgcagttacaccaacgattgttcttgccgagtttgttctcttcaagaaaaccatttcttccacaaaggtttcgcttatatcttttatgacatgtcaacaaaacaatcaagaattcattacatgtttttggtgcttactctgtttttgcaattt

SEQ ID NO: 40105 - DNA, 589 bp, Arabidopsis thaliana columbia
aaaaagtaaaaaataataatttaaataaactctatcaaattaaaatatatagttcaatgtttttgtgaacttcaaaaacaaaaatcactgaatttttttttccaatgaaaatattagtgttataaaatattgtattaaaattataaattgaaaggttcctatttttatgtcgtatgtggtccaaatattcccaggaaccggccttgaccactatctattcactatgaaaagaaaggaataacagtgttcacaacaacataagtatctcggctgaaactttatttcgagaaattgatcgatgtgtcatcaacacactccaaggaaaaagaagttggggacctattagaatgagatacataaaaccatttaacaaaaaaaaaagaaaaagagatacattaaacccaaaacccgattgcataaaaagtgctttttgttaacttaaatagttgggaacattgatcttctttaaattataaaactaaagaataagaataaacaaaattataagaacctagagatatattgtagaaaataacacaataatatataacattttcatatcataattagattaagtgcgatatattta

SEQ ID NO: 40106 - DNA, 810 bp, Arabidopsis thaliana columbia
gattttgcaggggtcgagtgctttctggtggtcgagtgagttgttgaagtcggctagggcgacgtcggtcgaatgccgctatgagaccgggaaacgaggtcgagtagcttcttttgaaagagacggcggttgatgtggatgaattggtcgagtatatcaaaggaatcgaaggaagtggtctggtcgggtgacggagggaatgagctagtgacggcggcgcggaggtcgagtgggtttcagaggtcgagtgaaattctcaggatcgagtagctctttggacggcgattcgtggtgtagagagattagagtgtcggcggtgaaatgaaaagaggaaggtcgagtgaatttcgtgaagtcgagtgatgcttcaaaatgagtggtctaggttgagttttagattctctctccagcttatcctcagcgcgttggtccacacactgttgactgagaaaatttctttgcagaaaacctactgtaaactgtaggaaatttctgcaagtctctgtagcttctgttggtcgagtaaaatgatgatttaaaaatttttgggttttaaacatcacatatactcgaccactgtactcgagtgcagggtctcaggtgcaacagaagattttcaaaattttgtactccaacgggctgtacactcgatctccaggtcttctgtagagtaaaagttttaaatttttactctatctccgggttgttctcttgtctctgaaaaccacaaacacaactaaaacaaatcaaaaatatcaagaaggtaaaaattatttacaaggatagtcatgggacttcctcccagcttgg

SEQ ID NO: 40107 - DNA, 409 bp, Arabidopsis thaliana columbia
atggtaggtgtcactcctacgatagcagttttggaaacgctattatatttaatgatataatagcaaaattagaacgctgttttaaatagtaatatagcactttaattttttgctaaaaactaacgacgattttaatttcgtgtcataataggttattctatgttagcaattagttcacgttgcgaacagttttttttttgcattacgtttgatgctatgatatatgattcttctaccataacattaaataattgctgagttttgtttatttatgcggtttagtgatgctgtaatacaattgttcacaacctgtttgtttttgttattatctgaatttccagaacccaatatagaggaaaaaaagtctgaatagaaattttaacttaaagtctgaaatcaaatccaacat

SEQ ID NO: 40108 - DNA, 528 bp, Arabidopsis thaliana columbia
gtatcagagtctggtcaaaaagtattttcagtggtaagaaattgttataacccatttttcccacttgccagcatataagctttcacgttttatggaatccctaagttttaggttcgatggttttcatgtaggaagataaagaaaaactcgagaagcagttgcatgatatggctgttgcacttgaaagattagagagtagtaggcaaaaacttctcatggaaattgacaaccaatcatctgaaatagagaagctatttgaggaaaactcgaacctctcagcttcgtatcaagaatcaatcaacatatcaaatcagtgggagaatcaagtaagcttgtcacatttacatttgcttaaaaacattttcttggactttacgttgacttgtagccaactgcataggtgaaagaatgtctgaagcaaaacgtagaactccgtgaagttctggacaagttgagaacagaacaagctggttctttttcacgagggccttcagaatttgaggcaaatgggtcgcatggaactgatac

SEQ ID NO: 40109 - DNA, 719 bp, Arabidopsis thaliana columbia
gtcatcctagactccatctccatcaaacactaagtctaagaaccctaaagaagattttgttatgaaggtatgattgttggaccctatatgttttatgacttcttctgttaacatataacttcgaaatttaccatttatttctctacaccctcaatgccaggaaaatgcgggtggagatattattcttgctcctttgtcgcctgtaagtatattagttggtgatggtgtaggtgacaactagcaacagtaccaggatgtatatggagttccacacccattgcccattcataatttaggttatgatgaggaccacgttgataggaggtgtaatgaccctcaccttgagagtatgattttgccggtggtgcgcccgcagtttgtcccagtattcccgtagtatgccctagtacgcccgcaatgtgcccgtagtgagcccgcagtatgcccgtggtatgctcgcagtgtgcccgtagtaggcagtgtgagcgacctgcggtggcatcagtttggccgagatgggcgtgtgctcgagccaagaccgacacgaacatcgagggtgcggccagaagttggcacgtcatcgacctgcttaaggcggcgaacaggtgggtaagctgcttggtgttctattgctgagaatcggtcatgtcgggctgccgaaattctgtggctgcagacggccaccgagcaggttccggttggctgacaggtgggtgatg

SEQ ID NO: 40110 - DNA, 557 bp, Arabidopsis thaliana columbia
tgaattatataaatacatgttcaaaaatatgttaaattaatattgtaaatctaataataattttttattatatattatacttaataagcaattaatatttttcacaataaattatttcatctacaccgtctgatccgtttttaccattcaatacatattttgacgcattctaaccgcttgatccgctttacttctgcttgaaacacctaatccgcttgatccgctttaattctgtttgaaacacctgatccgctccaccaaatatgttttctacattcagagccttcgctttgttattaattacatactttcaagctttagccatagatatgacctctgtcttgtcacataaatctctctaagtacacgatttccaattaatgtaccgaaccgcttcgtgtcacatacgtaaactatttttctcaagattggctcttttgagttctaattaaaagctgatgacaaaaaaaaaacaaatgccctaccagttacattcatttcgttctccctataaaaacgatatctcacacacttatttattagcatcacttattctt

SEQ ID NO: 40111 - DNA, 827 bp, Arabidopsis thaliana columbia
gatagtaccggtcgaagagtgcggtaaatcgatctgtaggacatgagtaacaacagttggggtgtgatgtatcaacgagttttggtggtgagaatagaaatactaaaattatgagagatggtttaaggttatgattgatcttcagattgggttatgttcatatgtggcagataaattatgaagagatgaatttatatacacgagtgattattactaatctcggtcaagttcaaagtttcttggaggatgaataagaatggaggaaatgtttgacacgttttgttacattttatgtttgtggaaaagtaaaagaacatgtgaaattacttaaggattgtgtttgtcaccatcatattatattattatcttattgttcaataattcatatattcaaaaaagtactacagtttatcacgagatagacacaccaactatattattacacatcatgaaattacaaactcagatcatgttactatcataatatacaaagacgcttaaatttttcctatatttcgtatataccttgttatattttcttaaacaaatgttaatttagaatctatactatatttgataaatagaaaaattaagaagagtttataatatagaaaaaaatgtggttctctcgaatcagaatgaattgctacttttaccactcaaacacacacacacacacacaagaaaaaggtacaaagagagatagaaagaaagaatgaattgctactgtgttaaaaaatgataagttgttttaagtttgttttggttttgaccaaaaaagatgttgagatagaaaaggactattgtatatttttctgaaattatgt

SEQ ID NO: 40112 - DNA, 543 bp, Arabidopsis thaliana columbia
caaattccacaaaatattctaaatttcttgttccaactggaaaaattaagaagaattttaactattttttgttttgggatttatctttatacaataaaaaataattacatttatttcaacgtaaatttacttttgttgactctttttagttttacctacctatttgaaaaaaaaaaaaagaagaagaaatattaactcttttttccagtgagtgtattgaaatatgaagtttatctaaattaaacctttccggattccatcattcaactaattaataaagaaatctacattttaataataatttgaaatttcctaaaatatcatcaatatgttcaatacaaaaagcacatccaccccgttaacatggtttacatcatgtaaattacatgtctgagtcctctatcttttctcttccgttatagtcttatagatcaaaaatggatgtaagagaagctatgaagaaccaaacccacgttgccatgatcctttccgggcacgtcttatctccgcgcccaaagactctaacgtcatcttctcaccggc

SEQ ID NO: 40113 - DNA, 523 bp, Arabidopsis thaliana columbia
gaatttttattttcttttcttggttgttgaggagttttgggtggtggtcgcagatcctacaccttggcaccagtatatgaggctgccacaaggagcattgatgagaatgcacctttaagtacaacaaaatcagattctgatgaagcagatagccgagaagtgattcttccaggactaaatcttctctatgatggttcagagttgcacccttttgatattggcgcttgccttcaggctcgtcaaccagttgctctcatagcagaagctgctgccgcgtctgcatccctcgccccaaagtagactagtactcaaaaagattctaatccagatttcattgcacatcaagtaaaaggtaaattaatcaactgaaatcttgagtcttagcatgttcaatgtagctctgagaatttggtttgcatctgcatatatagaagtggacattcggttatttcggtttcactaattcatgactaattgttttcaggttggattaaaccgcttggtttgttgaatttatagtatt

SEQ ID NO: 40114 - DNA, 506 bp, Arabidopsis thaliana columbia
  unsure (1)..(506): unsure at all n locations
nnnnnnnnnnnctacattattcgcatgatgcggatttctggttatcaaattcgctaaactctgctgcgtcagcttcgatctcgacttcagtttcatcttcatcttcttcctttgatacgacattcttttgcttattcttctgtccagataccattttcttgagtagagtcatctcgtcatcctcatcctcactttcactagatccttgcatatcttcctctgccacaaaatactcatcatcagtttcatcagcttcacctacaacttccttcttaacatctctttcttcattgtcgatatttaactcctcctgaagcttctcatgcagctcctctacactttcaggtgagtccaagggcccatcaatctcttcctcttcattttcctcttcataatcagtgaatgactctctcagctccgccactttctctttatgcttcttcgactgttcgtggtttttcactgcttctcacttttgaacttcttgctacaaacaatacaataga

SEQ ID NO: 40115 - DNA, 392 bp, Arabidopsis thaliana columbia
tttacaattgtgcagaccaaccgaagcaataaaggaactctctcatcttcattataccgcgtgtggcacacggaacaacaagggaccttgactctcccaaccatgagagctccgaaaagagaaagccctaaattaatttaggtcgcgagatcaaagagtaagaagggagtgaaagaccaatcaattcagtagagagagttcctcagaacatatctggcggggggcagcgggggaaggaaactcagtaaagtcgatccagatcaaggagagaagatcagatccatggagacgattgaaaaaggtggaatttttgaaaggtagatcaaaattggcttgggaaaatcaggcacgagcaagctagaataaaaattgtaggaaaaatgtgaaaaagg

SEQ ID NO: 40116 - DNA, 487 bp, Arabidopsis thaliana columbia
gtgttataaacttctttttcttggtttagtttataatcatggatatatcatttaaattgtatatacagaggaaacaagtatacaattacacaggagaacaaaaaaaagtttaacctaattacacagaagatgagggccatcaaatgtagtatcataactttgttcgttacaaaaaatctgctatgctcaatttattattgtcaatggagcaactaactagtgaacaaaaaatgcagtttagttttaaagttatggagtcatatagttgttatttaagttgggttctttttgaaatacatatgtggaatgttctgaaaagaaattacatctacatctacggtgagaattatttaagtagatatttcaagtaaaagaatttgttgtcttcaattgaagtactgcaactttttgcttaattgtttatgttgctgatttgctatttcatattgaatagaattagaatatataacatagcctcattacatag

SEQ ID NO: 40117 - DNA, 591 bp, Arabidopsis thaliana columbia
tcccctactcaatgaattattggtttgaagtccgcatatgttaaaagaaccctaacatgcgatggatatgaaagatcgagtcatgctttacatagttccaattccttatcctaattgaaacttcttcaaggcattcctaacccaaagaaatttttcaattgagaagtactacaagatatccaacagtacctgtgtaactctatctatcatcttcaatacttagtcttagatgcatgaagcaaaaataaaaggatgatatatttacctggataacaacatcaaactctatcaaattcctgacagagtctgaaaataaggcatgatcaagatgatcaacaaaaacatgcgtcaacttctcaacaaaaggtttaaaaagcttgcgcacgcgtacaccagacaagacatctgcaactacaggccacatcagctctttcgccaacagaagcgacgccaaatttcatcctctgtatggattgcaccaataagaagaagacccttcttagcctctttgattacttgtaagatctcagtaatttggccagttgttacccatcgcttttatggctttgtacttgaaaatattttgtgaat

SEQ ID NO: 40118 - DNA, 542 bp, Arabidopsis thaliana columbia
taaatggagatgaatatgtaattaacacggtttcgtctgaccgattcaccagagtctccggttagttcattaagggtttgctcaaacgctttctcctctgcttccctaatttcggaaacattcgcctgattttctgagattttggaatttcttcgaattgattgccatgctgagctcaagatttcgactgctgaaatcgaggcgacttgcggagcacctccggctgatgtcgcggttatgtgtatttgcaggaaatgaaagtgatctccttattgcggcaaatcagccacttcctgtcgactaaaactgtggtgcagcatgtaagaacaaatgcaagttcggacaaacgtgttgtcttggtcagtggttttacttggcttagtcttcgattctctacgcgtttcagcgtcaagttttctagatctctaaagctttcgtgctcgccgatataaatctctaatatcggtcccgtaagatcgaattagattcgcgtcgttttttaaggaccaaaataatggtcaacaatcgttgttctacagttt

SEQ ID NO: 40119 - DNA, 552 bp, Arabidopsis thaliana columbia
tatattagttgaatactttatcgaataacttttctttttggtgaagatcaaacagagcttttttcatcttcacacgcatcaatgagatcataagaaaccgagcagtacttttttcaatcatagaatacaattataacaagctatatcatgcaactcaaagtttctccagactggtctcttgttcgactcctaaaattcatcttccacaatccgagtgggtttacaccgtcggcttcaagattttaactaggatggacttccttagaaactacatttgcttcttttagtgtgttaaccagaaaaaaaaaagattttcaactaaaactgagacaattaggattccgaatacaatttacattgtttggggatatttcttatagctccacacaaacttttattttgaacttatactccatcatcgttagacgatttcgtcaaatctcgtcttaaacctgaatcatttgtctatggaagtaattttatttattgttttaatatattcgtaacgagcagctaaatcactaatacagacatatataaggattttataat

SEQ ID NO: 40120 - DNA, 198 bp, Arabidopsis thaliana columbia
cataccttgagctactacccttcaattaatgcacactcgcacctacctgaccaaaatctacagttcccgtcgacttatccctgagttatatacacaagcaatgatgattctagccagactttgtgattgagacacaatcacagttttaagaagttttaagacaacacaaagcaatgatgattacttatcattatgagt

SEQ ID NO: 40121 - DNA, 609 bp, Arabidopsis thaliana columbia
tagtaacgaccgccagtgtgctctaaaggggaggttgtacagtggccatcctgcaatccgtcgagagtccctgcagctgctgcgctagtaccgtcgcacgatgtctccgtacatccactggcagagaaagagagccagcgcaatatagttcctcgtaaattctccctgccaagcgagcaagttccaccaagtacccaaagtactccataagctgagagtccggcgacgagcttgttcgagacgatggcgctgggacggtgatatcgctgtccaggatggtggaagactggccattgcgtaaagatagagtcttctcaagaaagtacaccagccagaacaatagtcccttgctgttgggctggttcgttgatgaatcggtcccgacggatcgagtatggtatcctagaagtcgcgcgctttgagaggcagcattcactagaatggacgccagagagccctttgcattaccaatcgcatatgtggccttcgtgcggtacgtgtcagccggaaatgatctgtacgcggaggccggagagggcaagacttactgcaagaacaagagcgaatacatctcgtggcttggctgaatataaagaggcagcctggaca

SEQ ID NO: 40122 - DNA, 580 bp, Arabidopsis thaliana columbia
taaatttccttaaaatcttcctctatagtgaaggtgatataaagttaaggaccaaatagagaaaaagaaaactgaatgaactatatacaagatcccacacaaaaagagaattgccttttggcctaggatcaaatagaacaactcaaaagcaaagggcaaaaagctaccacttttgtttcaagtatgaagctttattcttatgaaaaattactatcacgcatgtgttggtgcaattagattgctataagaagtcaaatgagtagaagaaacctattgaattaataatacatctcatcaaatagagcaagaaactacgaatattagcttctttaatagtggaatttgatatcaatttttattaatttattccttttattgtttgtattgcagattgtactctacttggagctatacgtaagtacttcttggattcgtccatcacttgactttaattcatattttataaaaattggaatcccatgactctttttgtcaagaaaagtacataactacagagattccaagttgtgttttaaaaaacaaacaagataagagactcaagtatgtgagccatgttgtg

SEQ ID NO: 40123 - DNA, 1322 bp, Arabidopsis thaliana columbia
gagaaacaatttttcaggttctgttttttttgtggttactgattgtcttataattcttcaaaaatccataagcataaaaaaattaaagctacaacaaaacaaattcttctatgggtcttttacatggtaattagttcttacttaaagaacaacattccttgactcacacgtcaacgagagaggtatctttctcaaagcctctatctctctgttcaatcttgtttgcacaacctgaaagaaaaaaagatcaggtcttgatcccagcgatagatatcgatcatccagtctcagatcatttgtttccgttcgatactcttaatggagtcctatcgcagtcctcatcgacactactctcatcatcatcgctctttgaattcgatctaccattttcttgatcttcttcttcttcgattcgcatatgatcctgaatcagattattagaactactctcgttgtgatcttcctcttttccaccttcttcatccccaagaaccaccacattcccgaattgcacgtgcttctcaccttccctcggtgaattcctcggcgccggatccgaagttgtcgtgacggtttccggagccttgttaggatcgcctttctccggatcgaaactggtaacgctcttgctattaaagatggtgctctggctaacaaagatgacgcaaggtttgaggacgcaggagtaaacgtaagccaagaaccaaaagagccaagggacaccaacaaagaccatacccgcttgtagaaacagagggttcggatcagaacggaccaggtaaagtgctaaaaggactcctcctatgaggatacatgaaaggaagagaacagtgataatgtatattcttggatcaccttttctctgatccattcgatttccgaccactggttttgtaacagaaatgaaaattcagagaatgtgtctttgaatcagaatttttgctttctctttttcttttttctcgggaaatttgtgacaaggaaaagtttggtgtaacagaaaactgaaaaagagcgctaaacgcgggctccgtttttaatatataatttttggtcgctaaattactgcgaagagttttattagtgagtcgttgtgaagtttgttcgagtttttttacgctctaagagtgaatataggaattaggaaatgtaaaacttttatggtgagatactacaaatttattcgggaaaattgattcaaaattggaatttttagtatgatatttgcggtttaattaattacctccagagtcagtcattttgttgtttttcatgtcgaccaactttctgtggtggcaatttatcatgagaccgcgtaaaaa

SEQ ID NO: 40124 - DNA, 417 bp, Arabidopsis thaliana columbia
cgtcgaccaggccgagtactctaaaggtcacatactatatgtccatttcttggaccagaagagtgagtaatatccttcaagattgtttcgtacaagactaattcatcatccttcagggttaaaagtattcgtgttcagacaatccaaaacctctagatctctattctagttctaccaataacctacatatgtcatgtagtaaatagttgtgttgctgtttcttggttattgtcccaaacggatttcacattagaagaaaacgggttggatccgggtcaacttaagattacaaaagtctaaatgggtttcagacactcatacacaaaatctattctctacttccaaaagtcaagcatcaagattcactaatgaatctaaacctaacagaaaacaaaattaaaatccatccttgacttt

SEQ ID NO: 40125 - DNA, 531 bp, Arabidopsis thaliana columbia
gatcagccttaatccacaaaagataaaagagcaagtagaaaaaaaattgagtgtctcaggctgctcatttgttggaagttttctccagtagtttcggatccgaaccaaacccaaaaacctgaattcgaaaggtaaacccgatccgaatcgaacctaggaaccaaactgaactccacccaaacattataaatatccgaatgggctctaagagcctaaatccgaaaaccccgaacggatacccgtataccgagccctgactaatcagcattcagtagcaactctcaaaacgctgtcgttgtgggtttagtatatgattaggggtttaagctatacaagacgaagaagataggtcgacgcaaacacgatgtcgttttgaaatctattcacactgttctctcttatcaacagattcagaaattagcacccgactcgggctccgtttcaatgttggccgcgacgcctgctcatggactcaggtacgtggtggttcccacacgctcatggcttcataggtttcgatgctgctcgtct

SEQ ID NO: 40126 - DNA, 514 bp, Arabidopsis thaliana columbia
cctatcttcttcagcttctcgtcgcagagtatatccctcttgttttgtgggtcctgggagaagaaacattattcagttagcccacaaattccacacagatagataaaagatatacattactattgtcataaaaaatgtttcttttgttgaaattttagcacaatgaacacttaagaatctatacagaacaagtaagagtagattacaacatgagaaaaaagtacaaactaacgtcttaaggtcaaaccccagtatggacatgtctacatttgtttccattacacagcacaaagagtcattacacagggactagtataatgccaaatgcataggtaatacattggtcaagtacaatgatcaaagaacatcaaaagtcattaccaaaacatatccactaaagtttatcatcacaacaatgataaaataatttgaagcaattaaccagtcatatcaaaagaagttcaaaaccccaaattcaatctcacaatccgttgaatccttcaaaagtttatta

SEQ ID NO: 40127 - DNA, 545 bp, Arabidopsis thaliana columbia
tccaccatcagaaaaagtgaagccatcccgcctaggagctccaagcaaactaggttctagattgtgattgaagacaagagatagagaacgtcagagacaaacatatacgtgcaaaataactgtacagttcaaaatttaaagttatattaagtcaaaagtttgtactatgagaaggtaacagtgctgctgcagttgccgtgcttgcattatttggtataactgctatctgcggcttaggggtttcaggtttctgctcagcgttacttgttgcaggaagagtagaatgatcagctgcagccttctcatcccagaaattgaaaagtcaacagaaatcaaattacaactgacacaaaagctatgcaccaaaacatattttagttaattaatcccaaattttgtatatattttactaaccgcttggtttagtcttcgttccacttcacccccacacattccttcgttaattggaggagcatttatgtttccatttgaagcaaagccaggatcctacagacagatatagctagattacatattgtagttgg

SEQ ID NO: 40128 - DNA, 586 bp, Arabidopsis thaliana columbia
accagaggaaaacagtatgggcttccatcagttattaccgtctaagtaccttaaatctacaaatagccttaaaattgtagatcagttaaagccaagagaagaaatcgacaaatgaaagacaaacaagttataagagacggaagattagctggaaagttgtcgccaagaaccttcgcttgtggattaaaatggcataaacttgttatgatcatgagtttgattcaatcgtttgcaaagaggtatttggtcacttagagaaagttgcatgtatttttgacttgtgaattaatttgtaaggagtaggaaataaaacagaggtttatgcgacctcgcccataatgggttatagttaatcattaaatcaacctccacatagacatatttaattactctcaatacaaagtagttcctcttcacatatgctttaattaaacgtacataaagtgaagagactttcaaaggtcacagtaaagatcaaacgagtgctaaagccacaaagcaccagcctccttgagcaatatttcaatgatccattgagatgaagagtcatgacagtattggccgttcctcgaatttcctccaacaa

SEQ ID NO: 40129 - DNA, 578 bp, Arabidopsis thaliana columbia
ctttgaatcagtggaaactgtttttttctgaagctcaagaagtggattcttgatgatgctttatcacacaggttatgacacaggttgatttaggacttgctgatgcttatatcaatggagatttttcatttgtcaataaggaaacaggacttttgaatctgatcatggtattgttacatacacatattaaagcatgtggatctatgtttaaaaacttttgatcgacatttgatcatgaaaacttgcagattctcattgctagcaaagaattgaactcaaatcttgctgagaaaaggtaaagtttcaaacatgcaactaagttacttcatttgtcccattgcacttgtttttatttatttttcaggggtcggtggacaccaatttttttgactactggtttatcatctgcaaagcatttcttaaagcatctctataggcagaacaatttaactcaagctcgaaggaacatttcgcgacactatgaccttgtaagttgtcttttggcccatctttctgtctcaagatgaacatgtttttatgttttgaatatcatgagtaacatgcagagtaatgacttt

SEQ ID NO: 40130 - DNA, 425 bp, Arabidopsis thaliana columbia
taaatattctttgccatttacatttcttgtttgtttcgtctgataaatatttattttaaaagtgaaattttgaatttgctaacattggtatttggcattagcattttgcgctatgtctagatttttctgccaaaattttgtttctataaacagtagttattaattatgtcgagtgtaattttgtcttctcttaaggatgttgtatatatgtcgaagccatgtttttaaccgcaaacaggctgttaatatcggagcgtttggtaagtacgtaggttactgattactttgatgaatactatcagtcgaaatgtatttgtataattaaagaaaaaatgtatttgtataattgcatttataataatattcaagaaaatttaggagagttcaaaaaaatatatacgcaatatatagatgagtttcaaaaa

SEQ ID NO: 40131 - DNA, 586 bp, Arabidopsis thaliana columbia
cgttatttggaaagatgcatgcatgagtcagtataagtctcatcatctttgaattttaaagcaaagttatgggcaatgattaattatgtctataagacaagttggtaatctttattctcttatatgctactacctattggtggaagtatgcagttctcgtgtaattttgaaaaaacatcgcgaattagggcaacttttatagtaagtacgaatcttaattttcgaccactacaacattttacttttttttttggtcgagaagactgaagaaaactggatgagatgcgtttgtgatatttaagatttatatttgtacaacagtcactaaattctttttttcttttttgatcataaaacaatatagtttccttttggtttgaaagtttaacacacaactgtctctaaattcacatgttcctaactcaacgtgtgacatatatgttgagttgattagtttgatgtttcaacctctaaaataataaagaaaatgtaagattatgtagtatctaattaaccacagtatataagtgtatcattagagtattatgtctagatatgaattaattaccatttgatgaaaaaatga

SEQ ID NO: 40132 - DNA, 683 bp, Arabidopsis thaliana columbia
accctccgggcagttgcttcgcaacgttcaaatccgctcccggcggatttgtcctactcaggagagcgttcaccgacaaacaacagataaaacaaaaggcccagtctttcgactgagcctttcgttttatttgatgcctggcagttccctactctcgcatggggagaccccacactaccatcggcgctacggcgtttcacttctgagttcggcatggggtcaggtgggaccaccgcgctacggccgccacaatattctgttttatcagaccgcttctgcgttctgatttaatctgtatcaggctgaaaatcttctctcatccgccaaaacagcttcggcgttgtaaggttaagcctcacggttcattagtaccggttagctcaacgcatcgctgcgcttacacacccggcctatcaacgtcgtcgtcttcaacgttccttcaggacccttaaagggtcagggagaactcatctcggggcaagtttcgtgcttagatgctttcagcacttatctcttccgcatttagctaccgggcagtgccattggcatgacaacccgaacaccagtgatgcgtccactccggtcctctcgtactaggagcagcccccctcagttctcagcgcccacggcagctagggaccgaactgtctcacgacgttctaaacccagctcgcgtacacttt

SEQ ID NO: 40133 - DNA, 985 bp, Arabidopsis thaliana columbia
caacaaatctaatataccatgatattgtatataagtttaaatacagaatttgtttatttaaacaaaaaacgtttagtaagaataatatttatttaaacaaaaaatattgttttaaaatattattaacaaatacgtttatgctaattttaagggattaatatgaagtttgtttggattaaatttgattgataatgtgattagcaatttatattaagaatttaaaggaaaattcattattttggaaaaagatttaatattaatggcactgggttgtgtataagtccaactctatgatctatttgttaaaatggctgcaaaaatgtatatgtagatatttaaaaatatgatgactttaagatatttttctattgaaatttgatgacttacaaacaaaaagtacaaaacacagattcatatttggaagtagtatctcagactttaaactcccaaaagaaaaatctcaaaatagtcataagattaagagtacatcgtaaaataataacaagaacttcaaaaggcatatcaagtagtagtccattcctcaccaagaccataagcatccgagtaaccagcatgggcatgcccgtggccatgatgatggtcatggtcatcaccagcctttgcttcttctaacactttctgtacttcctcagggataggttcttcagcaacccgtctgatggatttagggaggagagagacaaattctgatatgtaatctgcaagctcgccggatttgctttcctgcattatcaaaacgaccacaagttttaaggaattaaacccgaaaaaccacgataagtaaaacaacgaaaaccaatcttgaacatactcaaatatatacccttcaatgatacaagttccagtaagaactctacacctacttgaaaacgtcacagtttcagattaatgtgcctttgctattttacaactagaagaccacacaagtttgtgttctcaaacaagtcaagcagccaaaaataaa

SEQ ID NO: 40134 - DNA, 571 bp, Arabidopsis thaliana columbia
agaggtatatcaactcctccagacttagcttttatttgccctcaagcaaaacacaaaaactgaacccgtggaagaggtttgaaaacgtacaaactctcaatattttctagcctattgccttgataattataaccaaatccatatgcctaacatgtctaatcaaatcctaaccaccatgtaattctccacaagcttacacaacaattccatacctaaatttcacaactatattcaacaagctttcatcgctggggtctcatcaatcaaacttatattcaagaactttctagacttattcatgtactataccatgataaatcaaccattctacattctcttgatattctttctctccccaagacttattatttcagagattaaacaaaggagtagtcacatcaccagaaatatcctccgtaaatttccaacctttgcaattggtcattccctagagtgtaaaataatgggatcatgataaatattcctagccctttaccctacaggaaatcctttcaatttctctcttttaccttttttatataataagggagataaatactattttatatgg

SEQ ID NO: 40135 - DNA, 1086 bp, Arabidopsis thaliana columbia
cttggattttgtatggagaattcaagattgagaaatacgaaggatcttgtgatgtgtgtatgattcttgagtcgtcctcgttgattcggtgagagagacacttgaggaagttttcatggttagtcctgtgagctgaaatcgaaggaaaatgtgaaagagaaagattcaacaaaagaaaatatataaagagagaaagcaaaaatctcaaaatctccattttcttaatgcagagacggtgagaagacaataaagcatgggtctatagaacttttattttatttttgtttatatcaagtgggtatgtgttagatactttttatgttgtgtctgtttcttatgttgtgttgtgtctgtttcttatgttttgatgtatgatcgatcctatctgattcagttatgtggctcatattcagctgaaatgttatcataaggttatgtcactttatatgattacatgttttataatatgagtatatgattagtagcctatagttttgttcttaaaaagagagttattggtagattgattctaaagattataaaaatcttagactccactcttatcgtttaatggatatgattatagtatattttagtagtaaatgtctgtgtcatttgatgattttataatttcattcaaaaagcttatatgaaaatctgtagtgcttttttattttattttggaccaaaatctgtagtgctattaggatatatatatacgattgaaaatatgtttttagtaaagtggcaaagtaaaattagtttcgtcttacgccttaataattcatcttgaaagaaaatagtaatgcatattcacaacactacataatcaaccataaatctattcatgacaacatctttggtagtgttgacttggttatgggcgttatggttatgggccgatcttgactggaagctcacctcttatgccactattggagaataaataatcactcgtgccattcttatgtttggaatattattattgatttttatttaaatcgaaaaatgaggaaaggacgaaaaacccttgcgaaaccacaaaaactacaagaaaacttaatttgttgggctcgggccaaaaaa

SEQ ID NO: 40136 - DNA, 525 bp, Arabidopsis thaliana columbia
ttgaattaaaaatatgaatccgcacatacgtaaaagttaggatctagtaatttgtataaaaaagaaagaagaagatagttatccatttcataggtcggctgctaatttttggcggatttctaataattatatacaatccaattaaataaatgaaatatgtcgtggaaagtggaaactatataaaggatagagataagtacgacttcgacaaatggagatatattatcattattattattataatcattatctttcgctattcctgaccaatacccaaatgatctccgctactctttccacgtgtcaaaagcactgaattgaacggatgagatcttaagtcactaaccaaaacaacacttgaatttttttataacaaatcacagttccacccaatgaaatccattttgtttcaaaataaacccgtatctttataatgaaactgaaagattcaaggatgtttttgataaattaaaaactatgtagggcttcattcataagatttaagacaacagggtttatgaattt

SEQ ID NO: 40137 - DNA, 490 bp, Arabidopsis thaliana columbia
gatccccgtaaacaagtccaagtccacgcttcttagagattcgaatctagcttgctttctccatccaaaaacttaagtttgatttgttatttgccaacatttttgatgactgataagttctggtttgaatctgattaaaatgttaatacttcactttttagtttttgattgttagatatcaatgatgtctcagactttagagaaataattggatgtaaccatctaatcagaaacagagatctaaagataatattattggtatgatgcaacaacatctaatgatcttgaaccagctaagttctagatcaaccagattctaaacaatccaactcatagtttcacgaatcagaaccacagaccaaagaaaagaaagcaaaaccaagcagccgaattgatgcaatgcattcgcctggcttaactaagattcacagtccatttcatgttgtcttcaatcagacccatctgcaagcttgtcagaacggtgtagagt

SEQ ID NO: 40138 - DNA, 532 bp, Arabidopsis thaliana columbia
gatctttatataatttcaacggttgagattaatgggttgactttacatagggtagatcagaaagtggagagcaccccaaagctaataaacatgagccccgctcaggcgctgcttcctcctctctctctatcatcatcatcatcactttctctatctatctctcttcttaaagcggccattggtgctctccaagttccatctcaagcttttcttcttgtgggtgattcaatctctctctttctattttttttttcatttctgttgatttagtgatctttgatttgtgaaactttgtttttatcgtgtttgtttttgatttagggttttattttgttgtcggcgagttttgatttgatgattttgatgatttttttttgtttgaccgtttggtttttggatcttaagagttatgtgtgaagatttttttttgtttgtttgggtgaagaatttgtgttgatttcgataattttgagtttgattttgaatcttagtaatgaaatttgattctgtgaagtgtgtatgatgaactttg

SEQ ID NO: 40139 - DNA, 508 bp, Arabidopsis thaliana columbia
tagctttgtctctcttgatgatgacgcaaccaaccaacggatttcatcatcattaccactttggtttactgatcatcaaacagatatgatcataatgcaatcaaccaatggacttctcctctgcaaatgttcttgtgcttcttctaaccatttcaacagaaattactatgtgtataatccgacgacaaaacagtacactcttctccatcagatcgccggtcacatcgcactctcattagcctttgatccttcaagatctcctcactataaagtcttttgcctcagaggaagaagcaacaactctttttcttctgcctctgactctgaactttaccacatagaggtttattcctctaatgaaggactttggagaagagttgttccagttccaacctctccttcaacctttatagagttcagctactcagtcttctggaatggcgcggttaactggtacggtttcagctctagagattgcctctctttcgatatcaatgcacaggaaatc

SEQ ID NO: 40140 - DNA, 605 bp, Arabidopsis thaliana columbia
tttgtcgcaaatatgtttcctttgaatcctgtgcacaagaaacctgtgaaaagctgtagtcttgattaagtattccatggtctgatgctatagttgataagtcttcttgaggtgcaatgtgtaggtttagttctcttcttatgctatgtcattagattttcgcaatgcttagcttaacaagctgcataagttagcacctcaggttattcattaagctttttgaggttctttattagtttctgatgcaatttatgatctttgatcaaacacagaggtgcagaagttgatgttaagaaactaaataagcgtccggctcctccacggtttggaaggaagttaactgagactcagaaggctagtagcaatctgttgtttcaaagattgaattattgcatttaaaacccctttttagaaacttgactgattgatttgtcttgacaccattacattctcgtttgcaggcaagagctactcacatttgtcttgattgtggattcatatcactttaccaaatcttttgacgaacaggtgagtctcaatcctttaattttagtttatatcaagtttgatttggctgatatatgttctgattttatactaagttt

SEQ ID NO: 40141 - DNA, 550 bp, Arabidopsis thaliana columbia
taatctcggatcactctctagttcacataacgattgttcttctctgatcagcatattttttttttcttcttatagctcactattgaaggaggcccgaccatgaatgtttctgttgactacaccactgtggataacgaagttgcaaagatcgaaaaatcaggacgcctatatgcaacatctcccggcaacacggtaggggcaaaatgcttcgaatctaccttgtcttttcaatacttaaatccaataaagcagaacaaaatttagctatgaaatcatttccagctaggctttatggaaagatgtagactcaaaagatatgacattttgaccttgtttctttggtgatcagacaatctatgcaacaatttacgggagtgaaggtgctgtaatttgtcaggcaattggaaatgccgaagtaggacttcctgctactgcaatgctggtagctcaaagtgacactgtggccgttgcgatgaaatgcctgtaccccatcatttcctgaggtgagaacataagccagaataaacactttttaattaatcatttggaa

SEQ ID NO: 40142 - DNA, 538 bp, Arabidopsis thaliana columbia
ctcaagcttaaaattccggataacatagtcttagactcttagatgttgtagtatagagagaaacaagttatttgatcgacttaacctttaagatttatgacttatgaaacaaagaaccggattattctacgaacggataggttggtttagtccggttattgatttttgttaacaattatcgaatattttggtatgtgtcagcgttgataatgaagctcaaaggaaggaacatgtggcactgtgtttagtgggcgcgtggattaagtgaatagttttattctgatttgaccaaatcaaccttcctttttgtgcatatggtataatatcattaactctttaaccttcatggccaaagttttagagtgctaatcacagccgttgtttttttcttctgagtattgagatttgagattgttgatcggatggttcagatcacgagttgttggttcactaattgaccgcacgtggggtgtttgcaggttgtacagcggtgactcaaggagtcagcacccgttaggatggtcccgatgagtgtgac

SEQ ID NO: 40143 - DNA, 538 bp, Arabidopsis thaliana columbia
ccttgtcgaattatacaagaagtggaaaaattttgtatctaaaagaggacaacctaacctaaaacatacatgtctgaaactcacaaagtgtcttgatcccatcttaagtcacttcgcaaaaagcactcccaaaatctcttgtcggatatataatctaacgaaaaatttgccaataaattaagacgaaagtcccacactgtcgtaccaagtagatgtggtcgatgtagtgaccatgtcgtagcatgatagctatagatgttgaagttttcagaactaatatgttaggcttattatgttttagttcgtgacaattttgcataaaagtttgtttaatgatttgatatttgcgcaaaactttaatttcaggctcttattatggttattggtcctctaatcacttcttctcttccaagacaatcttcctttgacgattttcctttacctagaactagaagacaatcttcttttgacctttcctttaatgattttttactgtgactcatcaagttctgccctgttttggaattgtcaggtcaaa

SEQ ID NO: 40144 - DNA, 640 bp, Arabidopsis thaliana columbia
gagtctagaggaaacccgaatccatgatatgcaattattgtcatgctttgctgttaagttaaaacttttaaccccacgtcatgttataaagacattagagcagcagcaatggtgatctcagcaatggtgatctctcttatgagtctcttataataaaaataaagaaaaataattaaaatgaaagggacagaggagagaggagctctaaaaacccttatttaagggacaatctcaaccccaaatatacacgtgtaattcttttagtagtcaaattctattaaaaaactaaaatataataacaacattaaaatattattattattttggtttttacggactctcataagagagaccaccattattgctacttttagtatctttgtccagagctactgacagttaaccccacgttgaactttatgctttgaattaggttttaagttgaactttgtgctttgaattagacgattcgatcctctgtttctctcttgctatgcgctcaattgattaactttaattattttcactttagttttacttacagaaagtaaataataaataaatttaattattgcatgctcagacctaaaaaaaaataagtaaaatggacaaacgtatttttaaaaatttaagcgggaaa

SEQ ID NO: 40145 - DNA, 482 bp, Arabidopsis thaliana columbia
ttggtttctttgtcaataaatctatcatatgctagactaagtatattttatgattttatctctaacaaaatcttataactttattttttaaacaagtaactaaaacttttgaagtaattaactacaaaaattaatgtgaagatatattatcttatcatatcatatcaatgaaggcgttcaaagtaagatgaaacatggtaaaattacatgtcatgagaatcttacaaatatctctgatattaattggacaaaatcataaaaacataactatgtagatttcatcaaaattttaattttcatgttttaaaagcaataaagtttgcaaattgatgatgtggtctagtatacaatttacacctatatattatttaaatttattcttgcttatcacgtttagttgacctatttcattaaaaataaggaaattcccaaaccaaataggaaactctggcccgcacgagaattctatatatatatatata

SEQ ID NO: 40146 - DNA, 480 bp, Arabidopsis thaliana columbia
ttccagaaaagaaatagtgttccttcactttctttcaatctacttgaatatttttaaagaagcaccagcatttatatatatatagaaacgtgttttagtttgtatgcaattatactacgtacgacttgtgggagactgagacgaaaattcaaaataaacggaaatgtcttggtctttgtgtggccaagaatgttttgttttctttgtggggtctaatgtattctagatgaacaagatataataatttcaaagtatctgcagcactttccttactatgttccatgccaatcccttggcggaagattatactatttatacataataaagctagctagcttgtgagtagtacgagcatgcactatatatcatcatgctgcttctcggccaatccatatacactgtatatgaacctaaacctacttgagattacacaacacaagcaaagcgacgtattatcggacatagcacacaagaattgat

SEQ ID NO: 40147 - DNA, 566 bp, Arabidopsis thaliana columbia
gcttttatttttgaatttctgaaaccttgattttagacttcaaaagctatccaacttggaaatgtaacttttaatgtaatgttgaatcttttatgatatattaccaagattggtagcttagaaacggcaatgcagccaattagtagacatgtgaatccaaactatgtgtttgctgactttagttttctaaataatttttcttctcactttttgctgaccttgttcgtcttgactcttgaatttttactgaccttgttcaggagctgcattgcacacaaggtttcttgactgtctctatacgtcttgagtttggatcatgtattgtcttatttctgtatcatggttttttgaactgcagatatggattgaaatttggaatgatgcaatgcagctcctgagctcttggattggtcatgtaagccttttttgtttctttattagtgtttggtatttggtcttactgggaggctttaatttcactacaattcatagttttgggaatagagccaacttctcttatgatactttaaaatcttgctacggtgagattcttttgcaagtgattt

SEQ ID NO: 40148 - DNA, 645 bp, Arabidopsis thaliana columbia
  unsure (1)..(645): unsure at all n locations
gatgagaataacggtgatgctggagaaacacttcttgagttgtttaggaggacttgatcttgtttctgcttttagaagcttggttcagttgtaattacttgacatccatacaagaataacaattaacaaagtaaatcttttgttggtccagtaaaaaaaagtattcaatgatcaaagtacatcttttgttggttcagaggtaaatttaaaatataatagcatggattggaacgagatattatggcattaggaaactttttgattatggcagtataaacaaagaccacaaattatggcagctatacatatattgatttcaaaacagagataaagacttgtcacctgtcatttgattatttatgaatttacctctgcagcattttccttcttctgtgcagtcacgcctaccgatggatttgattaatttcctgtcgattattactaagttgtatttctagtaaatacaacttaaaagtagttttgtactcggtcttaaaactagttttgtacatagtttttgagtaagatactttgttttttttgggacaaagagtaagttagtaatatcaaattttatcatagtgattggtaatttatgtcactacganattaagaagttatcaaatctgatttgagttatgatac

SEQ ID NO: 40149 - DNA, 621 bp, Arabidopsis thaliana columbia
ccttgtaaagacttgagtttgtgctgttggcatctgtaatctatcttacttgtattccaagtatgtttttacagatacattacatacactgtctatatgtgtatacttttttcctaatctattttgagatctttctttttccttttgggagatataaacgacagattgttatcgaattatgttgattagtttattttagcagactttcgcgcacgtttaattgcatttctgtgatagctgtctctgttttaaattgtgaaggagtacagtttttgcttggactaaaagtttatttaggatttttacaatatatcttgagatttgattcttataaaatactacgaattatcggaaatcttcgacgacgtgattgaattatgcagattataaataaatttagcgaagatcattataaaagataactatattatctgtaaatctgtcatcatcagataacaaaatttaacgataaaatagacaaaaacttgttcttggctggactgtagattactaaaatttacgtcagtttcttgggaaatggtaaatgaaaaatctggccctatcactaccaagtctactcccataaaaaagaacgacacaaccattagctaacgtagaaat

SEQ ID NO: 40150 - DNA, 564 bp, Arabidopsis thaliana columbia
ttgtgacatgggaatcagaagatgatgtctttgtttgtgcagagattaaactatagtgaagagtacatgaaaatttggaaaatagtataaatccccaattttattacagctgaagaaaacaaacataaactacataataaccatagaataatctctaagcccagaaactcaatctggcaacaacaagaagctttatgtggacctagtacaatcagatctttactaaaaaaaatcaatagttcttgaaatgagaaagactacaatacttgatctttcgattctgatcgccaaacaaatgactttgctcttacttggccttgggactcttgcggaatggtaatcttttatggacttttcaatctagcctttgtgacaaacagagttcttattgctagaatgagaatccatgtggttgcagtgattttctccttgatcattagtagtaatgctgagctcagaactgtctttaagatctgagcctgcaagcctttaaagaagcctaagatcccttctttttccatatagcatagactccccgggaatcgtttcctgattcttttcggg

SEQ ID NO: 40151 - DNA, 354 bp, Arabidopsis thaliana columbia
aaaaccgatctagtttggtctagaaattgtgacaccgtctaacgattttgtctttcttcctgcagtggaatcgttgtacagacattctatctgaaaacttgtctgatatcaattgtgtaaccacagtcttgtgatcttaatcatcctcactataatacacaaaaatctcaatctgcataaccaataatgaactctaaagctatggtaccacactgccattcattaaatatttcaactcgacacaaatgtagacaatactatattgttttagaaataatcatacaaccccaagatccatcacaaggtaggtaatacacagtcggattatcgaatagttttctctcacgacacaac

SEQ ID NO: 40152 - DNA, 494 bp, Arabidopsis thaliana columbia
cccatgtataattttgatttttgtggttacatataatttccttatatatgtatagtttctttataataatctttttatatttttaaaattatgtttataattttgttataagtatcttttcactaatttttatttttcatccatacattaattaaaaactcactccttgattaatggtagccccaattaggaggatcttttcacaaattttaagttgttaaaaacacaaagtttgtttgccaaaaggcaagatctcttatggaaatataggtataatttcttataattatcttgacgacctagtaaacaaaatgtccacatctattacacaaaaagagttcttttgaaattcttacaatagttcttttctaggtgggttttccatatgcaactatatttaaccaatatggtcatcaccttacaatcgtgcgattgaaagagtttgaactcagtcatacctttgaacttttactttttctttcgccctcttttgt

SEQ ID NO: 40153 - DNA, 542 bp, Arabidopsis thaliana columbia
  unsure (1)..(542): unsure at all n locations
ctgagatttaatttcagctcttattgacttctttttatcacgactgaaaaagaaaaaacatatcacgaatatgaagtaggttatggtatggctaaaaacaagagagtaggttatgggtatatcacctaaatatttctatcttttctttttaaaataaactcgtgaactttttacctaacttatcggtttattatgaaaagtgatattgatattcacacaaaatcaaataaattataatcaaacatactgaaattatattaccaaaaataagcattgatcattcgaaaatggtagatttgaccggtgctaatagatacagtcaaatattttcatgccgtttctttgtttgtaaataaataaataagtacatcctcttaattaaaaataaattaatagttgactaaaatattcctttttccataggataaatactaatataaaaatcttttcatctgctcctttgaagagcttttaatctcttctctgaaaccctcccccnagtgactcaccaccacgacaaaaaaataaaaaaacggcgtagt

SEQ ID NO: 40154 - DNA, 308 bp, Arabidopsis thaliana columbia
gcatctagagtctccccggataataaataaataacagcataacagcccgatgatgatcatcatctacctaattagagtttcattgtctctgtaatttcaaattctctcgcttaggatatgtattccgttggaatgccttgtccaaagtgagattcagtatctttatttgagggctgttgctagtgttagtgttattagccctagtccaacttgaagttccaggttactgtgttgagagagagaatgattcaataaaattttcagattctctggattcgagattcatctgctggcttttaaggaactca

SEQ ID NO: 40155 - DNA, 1342 bp, Arabidopsis thaliana columbia
tattgacaaagtttctattaacttgcttcatcatcaacacatgtacaccaaatgattcactaagttaatagcaaagttttatctaccggttttgttggtctgaagaaatttcatgagatccttattctccataacagcatcccatacttttgggtcactcgcaatggaagcaacaacagtctgtaaagataaacaactagactctcaaacatgtgaaagagaatagcactaaagcaaatatgagacatataccaaacaagagcagagaccattttaaccaagcaaagagagagcaaaccgacatacctgcgcacgagtgttctcacttagaaaagcaaatgcttgaagagcaacttgtggaacagctgattcaacagctctgttctcagaagattgaaaaccagagagcattttggaaacagagccaccatcatttgatccttccatagcagcagacgactttggagatgacatatacaccctaatccatcaacacacacataatcacaaacttataagtgtttcaaagtaagatcatttctctcataccgaaccctaattcatcaaattcaaacacaaatcctcaaattctctcaagaacacaaattaggataaaatcttacaaattaattgcttctttaagatcttcagtagcttctttagcttcttcaagactaggaggtttgctaaaaacaaccctaggaatcggttcttcttcagcaaattcccaatcatcccaaaccggtctctgcataatcatcccatcttcttcaacagaaggatgaaccgccgatgtaatcgaagccgaaaccggtttagacgacgccgcagccgccgcggttttaacacgaaactgctcagtcgccggaggaaatccaaatcccttgaatcctccaataccaactccgattccagcaaccttcgccgccgtcgccatagctcttcctcctcccatgatgattcttttgatcgagaagcttgaaatcggagaagattgattgatcacacaattgtagaactcggagattttggagaaatgtatagttgcgattctttgatttgagttttgaagaaagagaataataccttatccactaaggtaaaatgatgacgtcagcagtaaatgaccgacgtttaatattaattaattatcgtaattaggcaaatcatcttcatataatcaaggtttactatgtcaaagtatatcttatcttatcaacccctacaaaaaaaaaagtactatatcttatcaacgaatctgtttgttcgactagattcggtttatcaatttatgtcaaggatttaatagaaatattgagagatcctatggcaggaaagtctc

SEQ ID NO: 40156 - DNA, 756 bp, Arabidopsis thaliana columbia
attactgcgacgcttaaaacggcacatgccataaagtttcgaagagacattgtcactagaaaatgtatcgtaattgagaattttaccatgtctaaagcaataaaaaaattcagagcaacaaagcatccttattggatatcccttaaaaactgtgtttgaaataaacaaaacttttctaaaggtatgaatggaaaatatagtcgaacaaaaagtattgaactcggggacgaattctctttaagtgggagagaattgtgagacccaactctctaatgaggcccaataacagcccaacttctctaatagaaaaaccctaagcgtgtgtatgataatatgtatatatctccctctccacacagcttcttctcacgtcttcttcatcaccatcacttccttatctcacatctcaatcccagccatcatcatcatcgttgtaacgccggagttgacgtcacgttgtggtcgtaagtgttctacgtggttggtttcgtcaccgttcatcgccggattgttaggtaaggaaaacctatcatagttatgaactatactactgaaattgtttcacttagcaattgaattcatggatcataacttcaactattgggtttttgtgtgaatatgtgaaagaaggaaacagttcaagtggtggaattggtgatccgtttcccgtcacgtccgaaggagtttggcgagttcttaacggttctgagtagatctcgttcccaagttttcataacagttttcagatccaaaatc

SEQ ID NO: 40157 - DNA, 808 bp, Arabidopsis thaliana columbia
tcccctacagcttagttatatgcttaaaagagaacgaaacgttcagtcaatttacatgtcacgactgagttatatgttccagggaatacgaaaggttcggtaaaattacattacggctgagttatttgtttaagggaagacatctataaatttacatgtcacgggtgagttatatgttcaaggggaaacgaaagatgagtgtaaattatatgttacgactgagttatatgctttagagaagacgaaaggttcggtaaattacatgtcacggctgagttatcattcagggaagacgaaaggttgtgtaaattatatgttacgtctgagttacatcacgttacggctgagttacatcactttacggctgatttataatacagatccgaaatcaacatttttctggggaagacaatatgaaatttattggccaaataacaacaatcaaattaagaaatgtaagaatatgtttgagggatacatagaaggaagacgaaaccgtatgaatcaaaacattgatagaagtaaaaatatctctaaatatatagatcgattgagaggaaaactaaacgagaaacatataaaatcaaagtaaaagagtagttattcctgattcaactcaaacctgtaacgaatcatataaaataccatagatctctttgatttgagttttgatttttgatgatttgaaattcgacaccaccgaaggagtttcggccgaaagagacgagataagtagagaacggcgacaaaattagggttccgcgactgaacgatagaagagtgcgacgtttttttttttttttttttt

SEQ ID NO: 40158 - DNA, 470 bp, Arabidopsis thaliana columbia
cactgtgcttgtatctcggattctgtgagatccagtgagaaaaattaagagctgttttcggatctagatcgagtgagaatagtgaagagacgtgagaagggcttatcgcagaaaccatagatttcaaggacggagatttatgccaattaggtttagaaagaattgatagcagacggtgtggaacactcattgaatcagattcttcctccggaagattgcgaagtagcggagacacggagcaaaactgccggcgagtgaccggagaaggaaccgtaacatccgtcgagaatttcttcttcaggacttcgaaggcggatactgaaccagtcaaacccgaattgcaccgtggttgtattcgacggatcatcgatgatccgtggcgttttggatctctccgatgatgaacacagaagagaaaaaggaggaaactttgcagaacgaatcttcagaatcgggggtttatctaatgg

SEQ ID NO: 40159 - DNA, 526 bp, Arabidopsis thaliana columbia
tgtatacccaatgaaagccacaccaaaaaaagaaatgtgaaactaaaaaacagatataaaacttgaaattaaactattgagttctctgaccccatgagaaacccaaattaatccaaatataccctcctaatcccaatgaaaagaaacaccaacccatgtggtggaccttagaattacacagatgggaaagagaaaaggaaaaagatcaaagtcaggaccatattatgtacatacacatatcatttacctcgagtaaacttaacaagagaccatagtaaaccttgaaccaatcttgaaccctttttgttttttgttgaactacgcgaaggaagatgattgagatggtgagatgaagaggatccgagggagctttatagtgccaagatcaacatttcccctgattagatctctctgatccaagcttcttctctcatctcataacaaaaaggaaaaaaagaaagataaaccctacctagttatagatcatataaccaaagttttggtttatatcacagaggtgagggag

SEQ ID NO: 40160 - DNA, 474 bp, Arabidopsis thaliana columbia
tagaggatcgaggataacgatgcagagagtttcacaggaaatcattcaaattctacctggtcttcaaaacatagagtagatgaacaagagaatgatgatattgacacagatgaggtgatgggggataaactccaagctaatcaaacagagaggactggatacgtttcacaggctgcagttgctctgcggtgtcgggctatgcacccccttgcctcaagaatccgtatgtgttgaatcagtctgagactgctactgacccttttggacatcagagatcaaaatgtgcaagtaagtttgttgtccctaaaattcttgcgcaagaatttcctgaaggctgtaaaaatcaataaggcttggtttcttcagtaaaactgtactagatatactgttatgtaggtgtctccctgtaagtacaagtggggatggcatgtcaagatatctcacggactttcatgaaatccgggtaagcgaaag

SEQ ID NO: 40161 - DNA, 562 bp, Arabidopsis thaliana columbia
cttcttatgtatcatttcctaagggtttgccccaaaaaagtatcattttgtgtttgggttttgagttttgacaatcaaacatttatacatcacatgatcagttacagactgtatttagatttatgtacgacagggatcggacacttagtttttctgtcctactatatatctaagtttggattttacaaaattcttagcgtgaacatacttaagtttgatcttattagaagataagattgtattcgattctttgtgtgaacataagctctgatgtgtgatccaaatatgaccaaataaatctcgataaatagtttgtgtatatatttgagcttaagctaacgaaaaataatcaaacattcaattcgattcaccttattttaggatatttaagcaatctgtttttttttttctctctaagtcgtctcggtttgggattcgttctattgaaatctttcttaacaaagtacaatgacgtacacaatgcaaattcttggagatgtgtattaatttagtacaccgacagttaactttatatttcgaagtcaaaagaatgatatgaata

SEQ ID NO: 40162 - DNA, 414 bp, Arabidopsis thaliana columbia
gttgatcggtttgtcaatagagtaaagtatgaacacatggttttaaacgaaagtttcgttaatacttattgccatattggtggtggtgcttgaacaatgcatgagtcttctggtcaacggtcaaacggtttggttcaattagttcttcggttttctaatgaaattatccgaataatattcggtttggattcggttctcgtatatatcggatcaaattctaatccgtactaatgtttgaatcggttgggtttgcttaccaattttagaggagtttctagatagactccgcaattgtggaattagctggtttattatggttaggacagataataaaaataaattgggtaaccaattggatcgagtaaatttgctcaccgaggacatttacaacatatgcctatcggttcacctaga

SEQ ID NO: 40163 - DNA, 362 bp, Arabidopsis thaliana columbia
tgattcaagtaaattcaaagtatttgtgagagaatctttggaccgttggattcaataaaaaagtgtgaacttgtagtcgttttctcaattgtcttctaatctagaaatagaaatgtgattagaaatataactttatttggagaaaagtgaaagagtattttggaccgttggagtatagagggagttgtgccggagttagctgcgtcaatgatggagtttgtggtggggatcactaacggtcataaagaagggccacatagtgaaagtctcaggttttaaaatgacactatttcaactaaccgttggacgtgccttggtctgctttgcgaattgcgactagtgcgtacaattctacactggta

SEQ ID NO: 40164 - DNA, 541 bp, Arabidopsis thaliana columbia
caacttctctctcgagtttcagaactttgtattcaactccaggatcggttacaaggtcttgaaggagaaaattagtaagcagtgctgatatgattctacggcttttggatcttgtaaattggtatgttaattgttagatttggaaaaacgacgtttgcttataatgtcttgtttgatttcttgtattggaatgtatcattttgggtgctcgtcttaaatagttcctccattctgtaaaattagtaaattactctcttcagcaataatataaatcacgataaacgatgtcgtttcttcgatgctccactgataaaaacgcaatcgtttaatcaatgtgctttgaaacgacgtcgttgccaagttcacatatcaattcaaagtcacaatttcacaccaaacaaatttttaagcctacaaagccaattcattctcaccatgagccaattttcttccattttctaatcgtgttttttttttctaaaaacagagcacctcaagcagtcttgcgtctcacgtaaccctcgcactttacaaatattga

SEQ ID NO: 40165 - DNA, 567 bp, Arabidopsis thaliana columbia
gggagacctccaaccagattagggttaagtcgtgcgccgtcgacgtaccggagcgcaactgacggtccaagaggagaacctcctgccatcaacgaagttcggtgagaataatcttctggggaagccaatgcatgtccagatttagaggagttaagcggacgggtgaagctaagttcagatctaagtgaagtgccgctagatttatatagttttttaaaattcttcttcttcgacgtagataatgagcccagagggtagaagatggtcgccggagtccactttcgtcctctgttgctagcttatgagagaaggttgaagcttgtcgaacaaagagattgggataaaagagtttgtgatgattgagaaagtaaccgaaacaaacgtaaaacagagagatttaaggatcgaaaattaaaggaagaggaggagatgtctcgactatgtatcactttttcatataataattttttacttgtaattttaggcaaaaatataaattcaggatttttgcattttctaatgtgaatatacatattttattaattgtctaattttttgtataattat

SEQ ID NO: 40166 - DNA, 604 bp, Arabidopsis thaliana columbia
tgtcacacgaaatggtcagcatagcaacgacaatgcatgtaaccatcaatttggaggaacccattttttacaaaccaatattgtatgttttctaagatataatttgatgtccattaatcgagtatgaaatgatctatatatataattttaaatttttcatagccataaatactttcataaatatttgactgaaaagttaaatctttgactcaaaaaatataaattttaaaaggaaatcatttgtttggtcaaaaacttcaatccttttaagaaaatctatagttaagaatacccggcagtcattaaaagagttttctacaaagaaaaaaaaaatcaaaataatatttttttgtaagtttaccttaacttgtagaaaaatatagatcaaacatatgaagtcgaattttatatgctatataactcttatgtgtatctttgaattttgtccaaaaaaagaatatgcatcttcgaatagtttgtatgatcacattcatgaatgtttttaaattctaagaatagatctaggcttttcatgtgacgggttaaagcttccttccattagatctatagaaattaaaggtttgtgctgcaagtaagatgtttt

SEQ ID NO: 40167 - DNA, 421 bp, Arabidopsis thaliana columbia
agtgtagatttattgaatcccttcatggatctagattgcgtttactgcttattcctttctgatcaactggaatccaatcccagacgttccagcgcccagaaggcgcttaatggaaagtcggatctactaattccagtgataatcgtctctatcccaagggattggccgtttagagcggttattggctttaacagtcggttctcattgctcgcttagttagagatcgctaatgggaattaggtctgtgtctagctatgcttgaggatttctatcacgggagtgaattaatctgttgttgaacctgttgtttagggataacttaattcagatttgcccatagagagctctccgatgaatgtggaatcacaatagaattcttccatttgtttgttttttctactccaaattctggccttaatgt

SEQ ID NO: 40168 - DNA, 519 bp, Arabidopsis thaliana columbia
aaaaaatggtgtctttaagatgagagatggtaatttgcggtacgtgaacttaagcattaagtccttgcacaagaagacttgtgaaaagacttgaaaaaaacaagaaaaataataaaaagagtaatcgtggaccaagacacaagtcaaccactagtctttgtcatagagaaagaacaaataaggctttgaagcatccatcttcctatgtaagtttccttaaagaaactgttacacacaagtactcattttcttacaaacactaaacatcgaagcttcctttctaaagtaaagtcttcagaccaagaaaagggaagatcacgcattcttataggcgtaattcgtaaatagtggtgagtatgaatgatgcagacacaaacttggggagtagtttcagcgatgatactcactctgtgttcgagtttccggagctagacttgtcagatgaatggatggatgatgatcttgtgtctgcggtttccgggatgaatcagtcttatggttatcagactagtgatgttg

SEQ ID NO: 40169 - DNA, 743 bp, Arabidopsis thaliana columbia
cacatgtgaagtttattaacgttgatgctcttttatttctgatgaacacgatgtgaaaaaagataattgttttgagccgttctatcttttctgactctagaagtaaagactatgccattgttgtcgaaacccgatcattccaatgaaaggcttcaccaaaaaatctaccataacaatagtcgaaatttgtattgtcaaaaacaatttccaacaccaaggttgttgtacttgtattatttaaaatataaataaacccatggtacatcacttccctctctctattccatgtggtcactttggtggcttcggtacatgcggtggcctcttgtggtggggtagacaaactctaagtatagtgcattcacaaactttaacttttcccttcaaattacaatttgctccaccataaccttcgttgttacaactcgttcggcacctcctagcaccgtctaccttattacacgtctctggcggtgctttgcttggataatcatcacacaattcccaattcattgcatttcctaatacaataattcgatcaattacaagtatttatatcgtattgattatatatgcatatttgtgttttttttcaatgaaaatatatttggtagaagatttaatattatttacgattttatctcctcgtagtgatttattctacagctaaatctacaattttgacaaatttccttaattgttgttttaaatgagtatgagaagttccattttgtcaatatttg

SEQ ID NO: 40170 - DNA, 146 bp, Arabidopsis thaliana columbia
tccctggaccctcaaagttgggctcttcctacactgacacagccacagtaggcccttggagatcatcacaaagagaccaggaccctaacttcccagcctttcctgggagaaggctctgatggtggtggggagagcagagaaggagg

SEQ ID NO: 40171 - DNA, 573 bp, Arabidopsis thaliana columbia
tgagtagatcaatagttggtttgacaaaatcctaatctctctagagatgatccttaatgagcttaacccacgttctcatgtgtagaactatgtccctttcatacgagaaagcgttctcttttgtttgtcccccgtcactctatctagttactttgcacatctttactctttgccaccggactttgttgatggcaggaatctttactcttggactgtcatttgcaccatgtctgatggagtcattaacggtgcatgaagccgtcttattatggatacttattttcatctccttcgcccctctttctgagggtttaaaaccccaaaactgccttcctttccagcgtggatgaacccatctattacctttgatttgctacagtgcaatcaccaaaaaacgacaccattcaaacttgcaaaaagaagctagggttttagtgagtgggcatgttctccagttgtggcccattattaatgttttggccagttttgtaatgagtagatcctagttggctggcaaaacctaactctctagagatgaccttaatgccttgaccacgtctcactgtagactat

SEQ ID NO: 40172 - DNA, 492 bp, Arabidopsis thaliana columbia
ttgcatatggtgtgctttccttttaggaaatattcaggatcatcaattttattgtgactgctagctagctttgttgtttttttcttcttcttacttaaatacttcaagtatggtcatcgtatactgcaaatcatcgatagctaaaacattctagtgcgtggtaatgatgagccaatatcttgattgttgagtgtaatcgtttagtgcagtgaaccaaattaaggatgatagtgaattgaaagtggtggaaactagtatcgatttcattgaaaatgtaattaagagtgaaatgacgacgacaattagaggaaggaagggaaagtaaaactaggacgacgacataagaaagaaggagagcaaaatatcgcgaaaaattaacttctcagaagtgttggttccggcgagaagaagtgaatctctttctctctcggtaaagcagcttatcccaattactcttctttacccaaattctctttgatttcttgctacttg

SEQ ID NO: 40173 - DNA, 634 bp, Arabidopsis thaliana columbia
gttactagtaaatatgattagaacttgcattagacaatggtcaagtttgttgatgtttccagttatggagaagccataatttgagtagcattagacattgattaatcaagaaaagaaaaataatatcatctactagtgtcaacactacagacgcagcgagcgagcaattatagacgcagtatctaaacgctgatcggtgtacgaatttgcggttcatttcaacgcttggcaaaattcacaacgtggaagacattgcgagtttacgacaaactagtggggttgttttaagtaaactaaaacttgtaggggttttctcaaaaataaaataaaataacttgtaggggtcacaaatgaaaaataaaaagtattgaatatcctacgtggcatttgtttttttcatctcctacgtggcattacgaaatgaagaaaaaactgatctgacggatctgcttaaccagttgaagataacgttagtaaggaagatatccagaccaaagccacacaacattagccacgtgtcataccacaatcacttaccggatcttctctcctcgtatttgaagcacacaacatgaacattagggtgagaagagatcgagagaagaatagtttgatcatcttgtgagaaaaataa

SEQ ID NO: 40174 - DNA, 567 bp, Arabidopsis thaliana columbia
  unsure (1)..(567): unsure at all n locations
gaagaaagtcttcagatacagaaaactcaagctcccagactgacctcgacatggaaaaatcaaaacctagattcgcgagtagcagtacgaactagaagatctaaatgatcctgagctatggagacattacgaagatccttaaaactacaattttcggtaacatcgctgaaaccctaagccgaatccacgaaaacaactaaaacaattctaaattcgtagaacaaggcaacaacattcacaattcgaaatcaaatccaaaacctcagccagtagctaccggaacacatacaaattcaaaaacaaaagtacaaaaaaatccgcgagaacatagaaagtctatatttatcgtacctgattcctgaagatatcggaaaaccagaaaattcaattcgacggaggtaagtgaagacatctccacagccaaatcctaactttaaatcaccgaaaatggagacaaatcggagaaagagctccgagcaaacaacgtcgcccaaaaagatttctcgagattataactctcncacatgatatttgaatctccgcaaaaagtaacctttctgggtacca

SEQ ID NO: 40175 - DNA, 561 bp, Arabidopsis thaliana columbia
ctatctcattctttctctctctctctataaaatcttcaacttctgggtttattcttccacaatccctcgagttataataactctctgcaaagagttttactttgattcttctgtggaggatcttacacaattttcatggcttcttgaatcatgtaatcttttccttctcgccatttttcatctctacccggatccgtaaccagctctcagaccagacccgggttataccatttctcctccttaaaagtcacaccgcgttgaccttcttcctctggtctcctctcccattttcttttaaagaacttcacaaagtttcaatcttttactttggttcctctctctctctctgtttattagggttctgggttctgttgatgatgattctctaactaatgaggtagagttataacccaaaaataacaaaagtagagttaagtctttgaaatttggtaccaacaatggcgagccagacgggtcagaaaattcggttggtgaggtgtccaagtgcttgaagattctacaggaagacgaagatgttcctgtttatcagtgcggtggttg

SEQ ID NO: 40176 - DNA, 649 bp, Arabidopsis thaliana columbia
  unsure (1)..(649): unsure at all n locations
aatttaatcaaaaacaaaactctttaatgacgtcattaaggttaccaaaactttgataaatataacgtggtcttacctagatattcctctgggtattcttgtgattcaattatgttcacgtctgatcggcgaagacgtttaataaggggtttgttctcggtgagaaaccttttccgaacataagcatctacagatcggatgtagaacccacgttgagccatagtttgtttcatattgtcaagaaccgttttcaagctcaatttcttagggatgtgaacatattctacatcccacaattccttaagaaaaaagaaaaaaaagtatactgatccgaaaacaattaacaaaaagcgaacaatatactactacattaccttcataggctgcaatccacctctattagtgaccacgttggtgcttagatcttgcattggaggaaatccttttggatgaggagtttttgattttgataaaaactcatctctaccacgttcaacttctttctcttcctgtttctcacactgcgtctccctttccccaggtttcctctcctccaccattgttgacagaacggngcaaatgagggtcagcgaatgaggaggttgtacgatctacacctcgggattatatataatacaattagagatac

SEQ ID NO: 40177 - DNA, 600 bp, Arabidopsis thaliana columbia
tggatccctacaaaacctcactctctcgtctatgctcagctaaccctactctcttccctgtgctgccacgtgatcaccatccgattaatcgggaccgttcgattaagtagagatagcagcgcgtgaggtagagaaagaagagagagagagagttggcgaataatagtaatttgttgtttgggggtgagtgggtgtactctgtttttttacagtgttgggaccaacttgtgtgtctaaacgactaaactgatcattctgttattatagtttaccagaaaaagttgtcttcagagggaaccatatgtttggacatttaaaggattagagatttgagatttgaaacaaggattgagatggagacaccgactaagttaccctttagcttatttagattaatttgctagtgtgccaagggatgagacagttgggtttgtgattgatggcaaattgtaaacaaatgatgaattgttagggccagttgcataatcttgatcatgtgtcctgtgtcctgggaagtaatcgaacagctcagattgattctggttgggtcaaattgacgatgaagaatgatgttgaggtatggatggatgtattaatgga

SEQ ID NO: 40178 - DNA, 616 bp, Arabidopsis thaliana columbia
tgaaatatcaatcttaaatcattttgttaccggtgacaaggtaaagcgttttcctttctttgttattttcatttgattaaagctccatatgagctatctcattttcaatcttatatttctctttcaataaactcaatgaacacaattctcatttctttagaaatgtcaacatcatgctctagattctcatacaaaattaaaaaagtcttagtaaaacatattgaaaattgtggaaacggctgcatatagacgttgtctatgactatgatatcaatcaattgtattcattttactagaatttgtgcaaaaaaaccaaaaccattaaatgttttaatatgttatttactgataacatattttaaagtgtaattataagaataaatggcctaaaaaggaagcaaacaatcgtataacttaattatttgagactgaactttagaaatacaccaataatatattcaattttggagaatttaatactaacaaaaaaaaaaaattgatattccttttttccgtaaaaattccaatttttgtttatgaattggtacgaatatctaacaaattaacgtggaaataagctccgcacatttgtgttaagggtttttttcccccgggg

SEQ ID NO: 40179 - DNA, 636 bp, Arabidopsis thaliana columbia
ggataaatacttcaagaaatttctaaaaaattaatactaattaaaactgccggcccttaagattacaacttcaaccttattttgacttaaccaaagtaaattaaactatagattaatattttgtgaatttttaataagataagtatcaccaaaccgtaaacatccaactagatacatttatatatacataccctaataattattatttctgaaatgcatttaaaacgaagtctatcatacacggcatcttcctgttctagtcgcatctcctctctctctcactctctctgtaatctcttatatcaacttttttttattccactttaaatcatgaaagctaaagaaatgaagaaagaaagcaatttagcaaggttggtgaaatctccggttcgtttcttgatcatggcacgtgacgcttacatacgtagcatgacgtcatgctccgccggtttcatccgcggtggtggtggctccgcgcttttggcttacacccggtaattccaaatctgcgacgccaaccaccgttctcctcgtagcttcacctaaattcggccacgcaacacgtgaacgttgccggtttgtccacgtggcgcccagcggagaaacacggtggagcgacgctatgaacgacagatg

SEQ ID NO: 40180 - DNA, 545 bp, Arabidopsis thaliana columbia
ttaatatatagattagtcatgctaaaacgtccagcttcatgtgctttaccatgggtcgggcctgtttcaacaataattcagcatatcaacgtgttcaccaatgcacttggtagaaaacaatttcaaacggttttaccctaatcaggcggcattcaagacctcattgctctaactttagagggggaaggtattgagatatatattgttattgggcttcatgggctttttaaaggatattttatgtacattactagaattagggtaaacattagcttttgtataaatagggtagagccatccatgtaaaacacatttcagatatacataaagaattctctataccttacaaaaagttgtcaccagaaacaagagtgcacaaattcaataaacatggtcaatcctagtaattggccatctcttctaatgttggtcttagccttctatgtcgttgtagtgcctacaagtgctcagtgcaaatactctccacaatcaccaccaccacaaccatatgtctacagtccccactaccatctccatatgtttca

SEQ ID NO: 40181 - DNA, 289 bp, Arabidopsis thaliana columbia
ggtcgttgctgtttgttttgggggggcaatatattgacttcttatatctggttattgacacttatatcctcaatatttgagaactatgacaagtggatcatcagatttgtttctcatttggcatagggttttatcgtcattagctatttatggtcattatttcacacgagtcgctacttttgctggatgttatattctatatgttgatgattggatttgcctgttactctgtcttcttaccatttggatatcctttattccgttttcttggtcagattggatttcgtct

SEQ ID NO: 40182 - DNA, 624 bp, Arabidopsis thaliana columbia
  unsure (1)..(624): unsure at all n locations
aatgctctctgtaagatgacaaattacaaataagtcctcagagtcatactagtctaattttcgttatatttataatactctttcacgactatggacccatggaatttaaatcttaaattggtcctacttccgtatatttgtattaaactcttagtctttactctttttaaacctttgaaactctcttagacggtacttggatcttcataaaagtcgtctatctttcgtcgaaattgagacctatgttattagatctatatgcccactttttctctagctttctttattaggtttttcatgtgtctggttagtaagtgagactagtaaattggatttgtgaatggttctttttgactttgccaatgtctaagacttaagtgttgtcagattttgtttctctagattaagagaaacacaagggtatgtgtcacatttattatcaccaacaaagcattgatttttttttttttagatttgaaaacttcaaaaataatagcaatgtattacaattctgacatgaactagtcataggtttactcttctactatctgtcattttttgatgtgtaccccanaaattctcataagaaaaaaagagatcacattagactatcaaagaaaaaga

SEQ ID NO: 40183 - DNA, 1235 bp, Arabidopsis thaliana columbia
caactagaagcaattccaacatcgagaaaacagaatgcaaagtaccaaagagggaaagagcataagagctaagagtttaaagtaaaaaagaaaatcagtccagaatcatttcacttccatacgagcttaatgagtctccatcaaaaagccaccaagcccaagtattgaaggatctgtagaaataaagaagcatgtaaaaaagaatgagataacaaatcaatataaaacaagaacataacacatggccaagtcaccaatcataagctgagaaaataagtgtgagagttgaaactcacacaatcgaaagtgtatttagggtttcttcaaagaatagatctttgcgagactctcaaagaacaacagaattatttgagtaccgtagacggtgttcttgatattattattgaaaagatgatgctttgattgtacaagtgtttagaaaagtaaaaaataagtgtttcagccttcaaagttagagcgttttgatagcctgaagttgagagcgtttctttctgtcccccttttttagttccttgaggcgctttatataggaccttggtaaaccgcctctctcgatattcttggaaaattgccctttatctctaagtcggcgatggaggacctttcttaaatggagattttctttattcttcgggagcttcggaaaaacttccagatttgataatatcctcggaggttctttaatatcattcccggaaacccggaaatgatatcttgatccttcatcgggttttgtacaagtattctcctcgggtggatttaacaatcttgggctcggaccgaagctgcgccttccaagccgagcccaagcggtcccgaggtgtactcaagcttggctcgagtgtgtttttggaacaacacccgagccgagtatcgtttatccgaggtgtttccctaggtctcgaggtgttatcgcacccggcttgggatgtgtttcctggagtaacatcctaagtcagaataacgacgaacttagcttccgaagtgctgatggtatctgtctgactggttcggttacttgggtgaaatccaccccaacaataagttatactaaccttaacttgggtcacaattatgagttaggagtccctgagttgagtttacgctcaaactctatagaaatttgaaagaagagaagctaaccaatgaaactcaataactcaataccatatgtgacattagcagagagttttagaacaaagattcctctttga

SEQ ID NO: 40184 - DNA, 303 bp, Arabidopsis thaliana columbia
caatatattgacttcttatatctggttattgacacttatatcctcaatatttgagaactatgtcaagtggatctaagatttgtttctcatttggcaaagggttttatcgtcattagctattcatggtcatttttacacacgagtcgagacagtttctggatgatctattctatacgttgatgcttggatttgcctgtgactctgtcttcttagcatttcgatattattattccgatatcttggtcaaattggatttcgtctaagtctcatgattcaaaccgattattccttgcaacaggggaa

SEQ ID NO: 40185 - DNA, 1218 bp, Arabidopsis thaliana columbia
tcggaactgacgaggagatattcgcggactgacctgatatctcggaactgacctgccgaatatccaggaggatctccgcagatcccggacggagctaccacgtgcgtagacctatataagggagctaggacgacttggaagagacattcaatccagcttacattgatacacacacttttacacttgtaatcccttttcacattataaaagctttgtcataattaatacaaaagtccattcgttcttaccaatacaactctcaaggtttcagtgaagatctaggcctcctttctcataatcttaaatacaaatctctagtgtggatttcagaacccaaaatagctttgcatacatattgcatttctgagttgttttcaggtgatttggagctgttggcaagcaaagtggaagaagcgagccagaatcagaggacatactcgaccaccaggtcatgtgcatccagcaccatactcgaccaccaagtcgagtgactttggagccattcttcccatctacttgaccccctggccgagtatcctcagctcaggttactcgatgatgccactcgaccccctggtcgagtatcactttgccataccacctgaccacactcggccattcactctaccaagttactcgaccccctggtcgagtatcatcactcaccaccatcaccatcactcgaccggacactcgatcacgtcttcacagtttactcaaatccgcactcaaccagataagctgagcacaaggaagagaagaggagaagacaaagtgtttggaagcggcctggacctccatcggatcacgaagcccatctcggcccattatcactctatgggccgggcgattaggttattggcccgtctactatcattttatttcgttttgtataaatagatgtcttagggttctgtcctgagacatctagtcgacattgagtttttgcttcagttttattttctgttttactctactgcgctgcttttgcttctgcaaccggtaattcgagatttttccaagttattccgattccgcatttgatttcatctgtcatcttgtttctctactccttatctctttacttatgcaatattatcatttatctgcgtttacgtccttgagcatgttgtttgggtagtgacttagaattcttagggatgggatagagtagttgtggaatccgtagtctgtagaatggttaagttttagaattga

SEQ ID NO: 40186 - DNA, 774 bp, Arabidopsis thaliana columbia
cttgtggaattcttttaaggtacatgtttcttctctcttattggcatagtgttttttatttttgtccgcagttggcatagtgttcttaagattcattaaactgaggtagaactatgtcttaagttgatattttgggcctttggttatgaccatatgggggtaaacaaacatgtattgagtgaagaggtgattgatgtactgacgtaacactcccattagtttttgtctttattttggtggatgtgtgtggtaataagaactctttcttatactccatatttgcaagtgcactatctcctatgtcattgtcaatagttcaagccaaaagcaaaaacaaaagtatcgtttttactatatttccttgttattaaagccatataaattaaagtactaatttagggttttaacaattagaaagtattctaaggcggccctaaaccattcttgaatttgagctagagctagatctcaagtttataagcttcataagaatcttaaacaaaaaaacaataataagcttcataaaaatgaagggagatggttcgtattgtggatgtcggattcacacactcaagtatttatttatttagtgagaaggattatacttgaggacaaatgtataagaaaatgaactaacgattatagagaaaactatgagttttgtaagaaaatgtgtatagtaagtttgcacaaaaatgcgtgtgtctttccatggcctttggccataatttatactcaataaataatttaatttttatttcacacaattattct

SEQ ID NO: 40187 - DNA, 593 bp, Arabidopsis thaliana columbia
aaagcttcaaactttgccgaggaaccaggttcttatgattctgtgataggcattagaatgtagtggtgcataacaacaagatgagattaggggtatttgaccagtggcttgtttgtgagccttttggctttcagggagttaggagatctctttaaccaattttcaatatacatttggctctttctttgagtttgatcgttgcttcaaggataacaaagaaaactaggctttcgatctgatcagttttactgttatattttgtctcgtttgaaattaacttttttttggcttttcttgtgtgtgtgtgtgtttgttccataattctgtcatcgatctcgacctccatctccaagaaatatgcattagcttgcaacaacatgtcatgtaaaccccgcatcttcttgagatggggttcttgatctaattcgattggctttttcttatcgactcaattccattggctttttttctaaagaatagcgtttcttgtaactttttcagcctgcagtatatgttgcagagagcgcgattactcaggtactgcaggatcatcggctgatggggctgagacacagcagcaatcgtagcaggca

SEQ ID NO: 40188 - DNA, 611 bp, Arabidopsis thaliana columbia
cactttatgatcaagagttccaagcttgccactcggaaggtgggatgatgaaggtgggtgatctgacacaatggcgatcatttctctcgcgtgggctcgatttaaggggaattgatggatagatgggtgattgaattgctcaatcagtggggtagtcgactcactcgatcaatgaacaaatgaaggatgttgaatccctcaacaaacttaatccgcatattactgaagtacttagtgattcactcacaaagaactacaaaccaactgagaaagacacaactttgactagaaaacgtttctacaccttttaaatgatcaaggatcctttacaatgaacgaaataattagcttatatagactaaatacaatagtctactactttaaatcaagaaacaaatcgcaatatttaatgaaatatggtcttggacattattgtagaatctgtccaaataaggcaagtgaggtgtgccttgtatcttctcaacttggggaggaaattgtgacgccttgggagattccttatgctctggaatgtcttaagcagacgcttaaacaaaagggggaagagcgatgacacaatgatgataaacgggaccacatatggtaagtat

SEQ ID NO: 40189 - DNA, 476 bp, Arabidopsis thaliana columbia
gatgtaagttggacggttaatcacaacaaacatctaacccacaagatatatcgatgctaacaagaagaactcatttgcaacattgatgccgagatgaagctcttgatcagagccagcgcggatccaacctcaaacctaaatttacactaaaacatagcctctaacaattttgtaatgtccagatcgcttatacctacgaacacccacatatttttttaggtatataggcttcattcctttctaaaggtcggttcgttacgtttaggaagttgaagacttgtttaccgatctaacaaatcaccggtcgtagcgaaccgaccgtcagataggagaggactcacggaccaaaagagaacgtaaataatcactattatggatggtcgaggtgttacaagttactccagaaaatttgaatttgagacttttgagacctcatccctcaaggtcccaatcccctacctagtaagaagagagag

SEQ ID NO: 40190 - DNA, 535 bp, Arabidopsis thaliana columbia
gatattaaaagtgtcaattaaaaaaagatattttgcaaaatcaaagttgggagatttccttgcaagctgtgccaccgccctctctctctctctctctcttagttttttttacagacatagaaataagaaaccctgaaacagagataaaacaaaacacaagttttgagtgtgttttttcaagtctctctcttctctctctgtccttgttaaacacagcaaccgcctttattacacaaaactctcttataataatctctctcaccatttcttctcttctcttcagaagaaagaaagaaactcataaaggagaagaaataagagtttctctgtcttaaactcattcattctttctctctctataaccagagttctgtctgtgaaaacacacaaatctaagagaagttatgaataaacaagatgttatgaaacttcaggtatacgtctccttctcttcttcctctgtttcttcaagcttgtgtttgatgtatatatattattcatgagctaattttttggtcggatttgtttttttttt

SEQ ID NO: 40191 - DNA, 495 bp, Arabidopsis thaliana columbia
taataacaaaaaataaacagttaagactagagtatacactaagttgaacatattggaatcataatgcaaatatatagataacaaaataatttaaaaactgatgaggaatcattttttttgtctgatttcacaaacgcaaataagtgtcacggacgataaattactatgaattgtgttatctatgcgtttagcttcttgttagaaaaaaaataaaaaacccaaattgaattgaaaggtgaatctaaggtttactcaatcatcgagatggctcctaaatcaagcgacggtgagaccaagtatggatcttcaagcgacggcgagatcaagtgtggatcttcaagcgaaaaccaatcaacggagtcaatggaaattaccacgggagatgaatcttctatgctggggaagcgcaaggttgaaaccacgtactggaggatccgatgaaaatgacgaggaggatccgatgaaacgacgaggaggatagtgaaagtgatagtg

SEQ ID NO: 40192 - DNA, 620 bp, Arabidopsis thaliana columbia
ccagtgtgctctaaagtggtgacttgcttgtaccgacaatacctgtaatggctgtcatacacgtgatagccagtcatgtcatgtgactataactatactgaattcagtatggcgctaacctcggcacctgggcgcgctgggcactgtccgttctactacgtatcagcacaatactcgaatttacgttgtcaagtgcttgcgacaactgagtggatctacgaccacaggtttcaactcttgttgagctacccgttgcactaaatcgttgattcaggtctaagatcgactacgtaagttcgcatccaccaccaccgcccgatgatctgagttgaataccccgtcatcaaaccgatttggtaaaaccgcatacccttcgatattccagggaagtccacgaccaggaccgtcacctcggacagccggccccagcaagatataatcaatgcgtttggggtcctctcctcgtatccgaagcccgtccaagtcgtctggttaccgtagtagtcggccgtgtcaccaaggtcgccgaatcaaccattggggactctagtgccgttacacggcgtacgcttcttgagtacttcgctattcaggtcacctgcgagaagatgctggatatg

SEQ ID NO: 40193 - DNA, 433 bp, Arabidopsis thaliana columbia
ctagaaacatggtaagcttgcgtaaacgagcatgaggaaattcgtgaaacagagtcggatacctgcaaaaatgtcatgactttcattaccattcttacaaaattgatttctttctaaaccgtctgttccagtagcaattgaaattttctctgattgtgatacctgcgcatgaagcggagaacagggacggtgagaccaaggagtttttgcctcatcggcgtcggattttgcggtgaggataccagtgggagatcgctttatggcgtctttgaggatacaagctgctttgagatcggtctcagtatcgatgacgtgatccagggtcttgtgctgcagccacttcagtctcagctttgtcattgcacccgttcctcgccattgttgatgctggtgaaacagttactcccgcaaagagaaagctctgtgatttgac

SEQ ID NO: 40194 - DNA, 546 bp, Arabidopsis thaliana columbia
tctttctcttgtgtgcacaatcacttgtaggaattgagatctttaaatttggttttttaatcttgtgtgcacagttagttgtagcaattgagatgtaaagtttaaatgttttctcttgtgtgctaaatgaattgtagcaattgagctgtaaagttgatttcattctcttttgagttccttacactgctgttttagcccatcttgtatctcgatgactataccaacttgttatcgtttgaaaaggaatgaatacgtttccgtatttgattgctatagctgattgtgctttgtgttggtttatactttggaatcggttcgagtggtttttaagtttgtggttgtttgtttggataggatcaactgggagatgtgttgcattggatcaggcaagtagttggtttactctgcggattgttgtggggtgcgatacctttggtaggaggcatatggcttcttctgtaagttctgtcatttatcttcttactgtgtccactatgactagaaagaactgaaactttgtgcttaaactcgagctatagttagtag

SEQ ID NO: 40195 - DNA, 454 bp, Arabidopsis thaliana columbia
gcattgatgaatgaactttcaagaccttatttcaggaaattcatttttgacatctaacgggtttcgggtttacttcaaatggaaaaatagcacatgagtaagggatcgctctaaatggaattcaaaacatgtaccttctttttttgcaatagaatccaaaccgaactattatgtcaaaaaatttcattgcaattttgttgttcgttactataaatttggtttcaatgttcgtaaaagaatgcacatcacaatacacatcgtaatattcatgacaacatattaactaaagataagggatcgctgatacagttttaatggttaagttaatcgtctaatacttttatctctctctattgttatcgtcaactagagtatcttcccgaggcatttatctcaactctctgtaactcacctccctagagtgttctccattaccggctcaatttcgagtggt

SEQ ID NO: 40196 - DNA, 468 bp, Arabidopsis thaliana columbia
gggtaccgtatattcaaaaacatattctatattcattagtttaaaataaaaaaaaaactaaactaaaaatagaataaaaatcattattaaattttaaaatttaaattaccataggacaatattatcagagttaattaagtaaggaaattgcttatttttatattgacaattaaaaacatttcaattatttctatacaattttttaaaaaaatatttttcaaccagaaaaattattagaatacaacataatacacctgaattttattttacaaacttttttgctgaaatcaacattgttagattttctatctttttatatattacccagacaaattggaagtttttggttgtttatgtgttattacgagaagttttcttaataatatttgttacaaaagggaactaaatagtatacaaaaataaatttagactaaagaatatgtataataaaattataattttatttaa

SEQ ID NO: 40197 - DNA, 521 bp, Arabidopsis thaliana columbia
accttccaacaaagatgttgatctctccggtcctggaccaccaagggtcgagattaacaatgttctaggtaaaacatgttgtgtaaatcctattggtgggagaaattggtcagggaatttgagtcctaggatctatgagaagattggacggccaggatcgtctttagcgcataagatgaagaaggtgaaaaagattcatcacgttaggctaagtggtcctgttggttctagccctagcaatgtaccaacccggccggaacaaccaaagctcgtaaggagcactggagtcgaagaattggagttttgagaatttgagagatcaaggattaatagaagaaaaaaggaagattaacatatgaatatatgatcaatgattgatcatgattctgagattttatataaatgtgagaggataaagctgattacatatagtttcaaatccagattcgtgattatataatcgtgatagaatatgtgagatgtataatagtattatttggacgacaaaacgtgtccattga

SEQ ID NO: 40198 - DNA, 559 bp, Arabidopsis thaliana columbia
tgtgataagtcaatagaaaaaaatggagaaaaaataacctttgttcagcatttccatgattgattgaagttgagccaacattttcgcttgctggtacaattctctgcattatttgatttaactcatgtttaaatttctttttcatgaaattttttctacgttaaaaaaatttgagactctaaaaactgtgtacccttcgttgagccgaagatgatgatgattgtccaaattcaaatcgacttgggtaacttcttcgtcgacatcctaaaatttcaccctgtaacattgatattaacaataatgcttttgtagtgcatgtgtattcatttgtgtaatattgatgaaaacttcatataaatacattattcattgcataaaagaaatagtacctgtgggggtatgattgcgtttgcgtttggacgtacaggggcctgacgattgttaatgttgggtacctaaacctcaatggagactgattcccgatgtttgcatccggcatgttgccttacaatgaggtataaaagagagaattgagtttcaaatcagcaatcaaacatat

SEQ ID NO: 40199 - DNA, 552 bp, Arabidopsis thaliana columbia
taatatttggtgcagtgaaccagtgggcgaaagttgtaatagaaaagcagcagcttcaaacagaacagactggcttaccatcattgtaaactctcttaacctctcaacattcctttgcttctgttttatgcaaaagtaatatgctgattttgaataacattgtgcagagctttgtggttgcgctacttgcgatggttatcgcgacattttcgacaggaatagactcccaatgtttccaatttaagaaagatgagaacgatcaagaagaagaagctgaagatgatgttccatatggctatggattctttcattttgtgtttgccacaggagcaatgtacttcgctatgctactcatcggttggaacactcatcatcccatgaaaaagtaatatttttttcaacaatcttttgtgagctagcttttgtgagacttttgtagtctgattttgaagcttgagatatttaactcgatcaatctatctttgttattttgcgttcaggtggacgattgacgtgggatggacaagtacttgggtaagggttgtgacgagt

SEQ ID NO: 40200 - DNA, 588 bp, Arabidopsis thaliana columbia
cgactctagaatccagtagttatcttgagtttcacaagagagaattacacaagtgtgtcaaagactagctatagtaattttcgactagctcactcttgaatctcttttattacaaactaggtaattacccgctatattacaagaaaacacgggttttcaaactacaacattagtagcaatatactcgttaaagtagaagtcgactatattacgagtaatagccttagtcgctaatccagagtcgctaaacaaaatagtcgtaactttagtcgctaaatgaccactacgatacgactaatacccgctgtcataacattagtcatattgtagtcgtaaaatataacgactgagttacgattgaatcacataaataacgagtatcgtagagactcctctgcgattatttagcgaccacctagatgaaaaaaaattaataaaataagtagaataaaatgaaagtagtgcttggtacattattatgatttttatttattgaatgtttttgagaaaattcatttaagagtgagattaatggagaatttacacaacaaaagacttttgatttttctcaattagttttgctagttg

SEQ ID NO: 40201 - DNA, 483 bp, Arabidopsis thaliana columbia
tcgaagatgatgaaagtaaagtcgaggatggaaacaagggcgatgaggatgaaggagaagacacaagttattgaaaacaagatcattcatttttttttcagagaactcttttaagaaaactttaacaaaaagtaaaacacaaagctctcttgttaattttttggaaatttaatcataaataaatggagagagtccttggagaggctctctccactggaggtgctctgatactcttagtatatgtaacattcgttttattccaataactctaacctacatgagctgtaatctgtagatataatccgaattctgaaaatgaagaaagctacgtgaatcaataaatggactccgattaatgtattctgcaagagtcaagacaagtgaaggatttcaccttgaaatcataacattcatcacccaattgaataaatgatgagacatcaatataaaatatttaggtaccaagagattgacattgctagg

SEQ ID NO: 40202 - DNA, 597 bp, Arabidopsis thaliana columbia
  unsure (1)..(597): unsure at all n locations
ctgtctttttcttttgaggcatacctgttgaaacaagagcaaaaattacatcaacaatgtaacatgaaacttaagatccagtatgcaactagtttagaaaaaaactggttttcaatgtcacgagcaggacgtagtggtggtcagatgaggggttactttagtacaatcctttctttatacaggcatatagataaagtaatcaagcaatcatatttgtgtctgccgaaatattgggttgttacgctcagacccaaatgtccagaactgtcatgtatgacaaaatggtataaatcactgatccagtggtttagagaacgctgcacttacataaaattaaaatccaatttcactcgcaaaagcttttctacagcagaagagtcatccagagatgactttgtaccgtcaaagaacgtgaactcaggagatacaacctgcacaaaaataagctatgaatttgacaaatccagcaaaacaagaatatttggatttccttaatcagataggcctggaatccagagtttgtggtaaatcactcgaagaaggttgaggaagagatctctatataaccaaaggttatgagtanaaagagaaaaagaa

SEQ ID NO: 40203 - DNA, 598 bp, Arabidopsis thaliana columbia
attctcaaaaaaatgaaacacacttctcttaatcatttctacatcaaatattaattttaatatatagttttcacacaaacacagtggcataaccgtaattactattagcttaagacttcaagactctggtttgttttttctgttaaaccgtaacaaccaccaaattttccttttaattttgtatttatttttaaatgattaattcctcataatttccctcgcgctgcgaatccaaagcctgtataaatactctctagcttcctctctcaagctactttctctctcaacttgaaatctctctctctctagccaaagaaaacttttctcggaagcttctctctcgaaattttctcggcggtttctcttcttctccaattttctcggtaaatttctatcgctttacatgtcaatttcttctccgattcttgatttcatcgttttgaatttgaaatccactgtgaaattgctgagattatctttctcggaaactagatctgacttattttccgttgtttgattcttcgcgattccgtttccgatgcataaattctgatttctctgtggcgattttgtgtacagaattgcaccgggaaaaatg

SEQ ID NO: 40204 - DNA, 578 bp, Arabidopsis thaliana columbia
tattagaacgatgtagaaatgattaagagaagtgtgtttcatttttttgagaataataagtagctggagatactaataaccaaaggcccagcttgtggttaagagaatcatttgtttcaactaattgcttggttttgaagattattttggagggataagattggtctttgttttacaaaacttgcaagatagtggaacttaagcaaaaaagaaaaaaaaggagttttgcttatttatcacaactataactaacctctttttaatgggtcttgtcaatatgatttaagccaaacaccaattatggttattggtaacactgttgctatctcatcattgtttttgtaagttaaaccttgtgatttgacttctaaaaaggttaattctggtgaatttggtgcaaacctgtctgtggttacaaaatggaaaataatcaacaagtgatgaatcttcagattcacagttacatgcaagaaactgagccatgtaaaatagatgaagaggtagattagtgtcttatgtacaaaggcattgcaagaaattgtgttccctgccattttcttgggaccatattaagcttt

SEQ ID NO: 40205 - DNA, 921 bp, Arabidopsis thaliana
caagtctccaccaccaccatacgtttacagctccacaccaccaccatactacagtccatcaccaaaggttgactacaagtccccaccacccccatacgtctacagttccccacccccaccatactactctccttctccaaaggttgactacaagtccccaccaccaccatacatctacagctccacaccactaccatactacagtccatctccaaaggttgactacaagtccccaccacccccatacgtctacagctccccacccccaccatactactctccttctccaaaggttgactacaagcctccaccaccaccatacgtctacagctccccaccaccaccatactacagtccatctccaaaggttgactacaagtccccaccacccccatacgtctacagcttcccacccccaccatactacagtccatctccaaaggttgactacaagtcgccaccacccccatacgtctacagctctccacccccaccatactactctccttcaccaaaggttaactataagtctccaccaccaccatacgtctacagttctccaccaccaccgtactactctccttctccaaaagttgaatacaagtccccaccacccccatacatctatagttccccacctccaccatactacgctccttcaccaaaggttgactacaagtctccaccaccaccatacgtctatagctccccacccccaccatattactctccttctccaaaagttgactataagtctccacctccaccatacgtctatagctcaccaccaccaccatactactctccttctccaaaggttaactacaagtccccaccaccaccaatatgtctacagctccccacctccaccgtactactcccttctcctaaggtcgactacaaatcttcccagcacaatat

SEQ ID NO: 40206 - DNA, 504 bp, Arabidopsis thaliana columbia
agtttatgatcaaacttaaaatatctgttgttagattgatacctctaattcctttgaattgcttcttagatttccactttacccttccacgatttttaagcaatggaaaattaagtttcatttgtttcagattttaatattaatccccttctatgcaaattgagggaccacgtagaaagttgtgagaatctcaatacacaaaagatatagaaacaatgattacatgcacaagcacgaggccataaatttccttatcctatacacattttcaataaagatgtaacattccaaacagaaaaccctcttgtagctcactctacaaaaaaaagagtatagaattccaatattaaagtttataggtcgactatttcaaaaccaattgctataaagtaaattgattaatatttttatactttcttcgatttataatataagttgttttggaccaatttttttgtttacaattaaattgtttttaagtttttatgcaaactatatatttat

SEQ ID NO: 40207 - DNA, 575 bp, Arabidopsis thaliana columbia
gtcacgatctcagcaaaaaaataatatttcaacactatcttttagaatatataagaccgttcaaagaagattgtttcaaatgttttggactagactgtacaatcttaaaaagtaggacaaatcggtgaatatttctgaagttaaagggtgatctaactgtcacttttttaaaaaacttttaaacacctcaaactttttaatttattgtgtaagtgtcttatactttgtcaaatcttcttcaacgcccctctctttctcatctctctgcgcctaacgtcgcttacggaagaagacgaaaattttgaacagaagctctctctctctatctctctatctctctatctctaacgctattcgatgtgcgtaaattagggttcttcactcgtcggatctgattgtatattgtgaaaatctcagatctcagatctcttatctaacaccgttgcgtgtcttcgtttccttctggtaatcattactttggataacatcgatcttcttctccgattattggatgcaatttattgattgaatttcagattttgaaggaggtgaacaaagtcgggagctgtacattt

SEQ ID NO: 40208 - DNA, 570 bp, Arabidopsis thaliana columbia
tataaactacatttattttttataatcaaatattaccaatacatttataaatgattatttctaaaccatatcatatcaattaaaattaatataaatcagtatgtggataacaattaatttaatacaaaaagttactggttcaaataatattaaaaagtttattacattacataatacacaagcaaatttcagatttcaaataataatacaataaattttgtaatttactacaataaattttgtttaataacagtatatcaatcaaaagatcatatgactacttattataagcatgtttatatgtgtatgtatatattggaacatatacgacaatgattttctctattatatgtaacgcccgtaattaaaagaaaatgaagaatcagattttggggttaaattgatcatgattgaactggctaaatttcaggggatttctgagggattttaaaagtctagggtagaatctgtaactagataaaagaccggggaccgaaatgcaaaaaacgtgaaaagaggtagaaatcgagttgatccttccgaaaacgaaggagagtttttggcaagttg

SEQ ID NO: 40209 - DNA, 375 bp, Arabidopsis thaliana columbia
cgagctttattatatccttaattattttctaaataaatactattaaaggttataatccctctttaattttattgaaagctaagttagtgaaagtgtgctcaagcttttattcatccttaattatatttaaatagtacatttgttcaggtgcggtgttgtgtgtgtttcaaacacccattgtgacggaaaagaataaaagctaaccactctttttaattgtttaatttaaattgacaatttagcatctatctagcttatacaacgccaaaattagctcaatacttttgtcttatttttaaaaatattatgtagactttcatttatgttaacagttattattcataacaggacttatgtgattggggaatgtgggtg

SEQ ID NO: 40210 - DNA, 464 bp, Arabidopsis thaliana columbia
tagcaacggccgccagtgtgctctaaaggttaataacatatccccatgatatcgcatctttatgaccaggatttttcgaaatggcttttccactagcgactcttttgtgtgattgtctggttaagttaagcagaaaaaagcacgctaccgccccaggcccaacagctacctgaatactgataacgcacttactttgacgtgctagtgtatcatttctttcgcagcaatccgacccgaatgatttttatacacaaaatatactttaatcataaaaatcaaatagataaaaaatagcatttcgataatgtccgtacggcctatgtagatttgaaaatggggccgagtttcaatgaatcgcataaaaatacaaaaaaaatgaagatgtagcggcagatcagaccaaactgaagctatttaagtcaaaaacgggaaaagtaatggtaaagcacagctaaatacataga

SEQ ID NO: 40211 - DNA, 509 bp, Arabidopsis thaliana columbia
taattgacacacttcacatctttcgtttataactcaacaaagacttcactggagaaacaatttgcttcaatagtataatcattataatctcagtatcaaccagagacaagaggatgaaatgagagaagctcgcctgtgtagttctccgaaaagagaagcagcgacaggtctgttagccgtagcaagagagactcgtcgaagactcgattctagacgaagtagctcgtcagcagtagatacatcgagatcgattcagcttcatcggcgacaggaagatattcggattcatcgaaggtttagcttttacattatcacaccgaccaatacagtgctgacacgtaaggtgtctcacactgtcttcagacacggctctcacaataagagcaataaaatgacatgtaaagcgttttatagcctggttgattattagagcctgagtccagggccggcccaatagattttattatctaaagtaaaaaaaagttcatttatgctaaatatcaattttg

SEQ ID NO: 40212 - DNA, 470 bp, Arabidopsis thaliana columbia
catgttgcagaaaacccatcagtagatagcaaccaacttcgacttattgaatgcagatctaaaagctcatcatcaccacgatcatcatcatcatcaaaagccctcttctttttcttctttcttttcttcttctccctcttgtgcctcttcttagacacacggcttctactatctgagtcagattcactttcttcagagaatccattatagcttagcaacgaatggtcactagacctgcggaactcaatcccattttctctaaatagaagctcccaagaatctggcgtctgacattcctctgatagtctgaagtgaatagtccaagaaagtagcccgagtaattttatcacctgtatgtgtttcatcttcgagagctctctcagaattacagaaaagctactttcgttttccaaacctctgcatatctctgccatggtttctttcaacagttctccctcatcattcccgtt

SEQ ID NO: 40213 - DNA, 642 bp, Arabidopsis thaliana columbia
tgtttggtttatttgtacatgttacgttacagctaactctaattttggaatagtatatttttggccaactatgattgagcgttttggccaacttgtaatcttgtgtatttatttttcatacaattaaaatttgtcggagacattaaaatattattttttatgcaccgttttttctaacaaaaaattgcatatactttgtttactagtaaagcaatgggctaatgtcgggtggatggaaaaagacatctccgctaataaactgtcggtgggatgataattttattttatcctttatgattatggtgttttacacgtcatcatttctggtgggctctaagtaatgacataatttttaaaaaaaaattataacaaggaaggttacttaaattctacttctacttgaaaatgatagtctaccacaaaatttcacttacatttgttaaaatttaaaacttataagataagtgtgtccgacaaattgatggtagatcaatgacctaaaaaaaaattacatcttgtggtcatttttacgactctaaccctcacagagtaagtaaggagaattatgagaatctaacttttaatttgagattaaatccattcgtaattatagaatctaatccatcatatatatatgaatat

SEQ ID NO: 40214 - DNA, 152 bp, Arabidopsis thaliana columbia
taggtctatgctctgatgtttcataatgatggtcagtgaatacctctgcccgaatcatgtgccccaatttctttctttctttttttttttttaaagattgatttatttattcatgagagacccagagagagaagggcagggacacattgtgg

SEQ ID NO: 40215 - DNA, 891 bp, Arabidopsis thaliana columbia
tgatactaatcaaactcattctaattgtttggttaataaaaaaataatttttacactgatgatattctaaaaatatcactcatgtacatggtcttaaccgttgaaatgttggtcgcggcctatatatagaagaacataactctaaaaatagctaaacccaaccacttcccttggattggaatctctcataaacagtttgttggtctggtccgctccagtccatactcataaggtggtagatgtttacttagggtacatcatacatgcacaacgttagtagttgcaggcatagacgtgtttgccctttattacgcgaaaaccactactcccttcgctagtctactttcgtcaattgaaccactaaacccaatgaaacctaatattttagtgtgctcaataatttatcatcatcccaattcccaagcgtaccaagattataatctaacttaacgcgcaatgtcatgacaaaacctatatacaatgaaaaagatttttcatgacaaacaaagaaaaaataaacacgagaaatgagttctcgtaataaagttggtgtgaactggtttttgaacgtgaagatgaccccttcatatttttatttcttggtttttgcttgagagggttaaagactcttaaggaagaaatacattacacgtcaaacctttttgggaaaacaatgaacgcttcatttataatgtttctattttttactcttaggtaaaacattgcaattgatagatgaacaagaacaaaagcagaggattaaaagaaagattaaactatgaaaaaaggacacgtgtgaagagaattagagattctgtattaagacagattaactaacaaaccaaaccctacttgttccactttctattcatacttaatctcattctcctc

SEQ ID NO: 40216 - DNA, 570 bp, Arabidopsis thaliana columbia
tttgagaattttacagttctattattcactgctgctgcttctcttttgtttctatgcaataaaaaaaaaatttgttttctctcttttgttaggtggtttatttacaatgcaatttgccactaagtactaacaatgaatacgtctttgtttttataacgttgaaagtctttttttttgtttaataacgttgaaaaaaccaagtcttagttcatgcacgcttaatatgtctctctatacgctatatcataattttatggatttgttagcaaacaaaaaaataaaattacccgaaacagtaatgcacgctttttagtgcataagaggaaaaaaaagaagagagaattaaaagactgacgactgacagagaggattgtttatggtcagtagcacattataaggctaaaactgggagaattatatatcagtagtcactagatttgctaatcacgagaaagcgtttatggtcaattattcagaataataaattatgatttcactaatgactaaataacgctcgataaatcatgtacattattgcataaaattgccttttcttgtcatagacattct

SEQ ID NO: 40217 - DNA, 496 bp, Arabidopsis thaliana columbia
atataagcaagttccgtcaaaagattaaaactttgggttcagtctctgtgtgtttattagcagctagactttgtattgcctgaaaattcatgattgagggatatgctttatgtactattataagttctgagtttgtagaaacaatattttgtgttttggggaaaacaccacaataactttctattaatgtattagaaaaagaaagttggaacctatgttttagaaaattttttctctatatattgaagtatgacctataattgaatcttctgatgtgcactaaactgaggcaagcgggatttcctggagtctttggtttgcttacttggaaaaaactgtagataactgatctactaacttatacccacttttgcaggtttttaactgagacctgtcaaataagctaaagcttcttctaagagcttcaaggaaagcattgcattgttgtggtcttgtatgtgccacagaaggaaagaagagtgagaagctcaggatg

SEQ ID NO: 40218 - DNA, 474 bp, Arabidopsis thaliana columbia
gattcaaaaacaagtctaatgtcattcagccatggacatacaacactctagaacatttcttatagccgtcagcaaccacaatgaacagtcttaagatcatgtctcattacaaaggtcagattttcagaatccataatcaagatcaagaatgattcaatacctgaatatttcaaaaatcaaaagatctttcagtgaggaatacagaatttcaggaaaaccattactttcacatggtgtgaactcagaaaaaaaatgtaatccattggagattgaaactaaaaacataactcaacaatggattttttttttcattcagaatctatccttccaaactacagatcacaaagaaactcttaaggatgaaaaaatagtttaaatcaaaccctcttggattaaaatcaagcagctcattgcaattctaagcagctactacaagcatcatcattatcacataacaacaaaacaaatccacac

SEQ ID NO: 40219 - DNA, 434 bp, Arabidopsis thaliana columbia
ccaatcaatatttctcgtgaaggctggctatttgtgccaaaatacaactcaaattgtttcaccccaaaaaaaaaaaagcagatacaataaaataaaatttatataattatatgttaattctcatttgtgtaaaatattgaagcagcttaaaataaaataaacctcacagtaaaaatgaaataaaataccttgcaattaaatgagaatgcttatttttaacaaaataaaaaataaataaaaatcaatgcatcaccggattgggattttatttgctttcaaaaaaataaaataacaatccccaacccaaaggacaaaataatgggtatttaattagtaggtggggtggccttataatagattacaggttgaaataaaaacatggaattagctgattggaaaagctccccctccccattggactttaaatacgacac

SEQ ID NO: 40220 - DNA, 560 bp, Arabidopsis thaliana columbia
  unsure (1)..(560): unsure at all n locations
tagtnnnnnnnnnnnnnnnnnnnnnnnctaaagatagactcgaatataactcagtacactgtcaagatattccagagcagccctagatttgagctcagaataagactagagaatatagataagctcattagcttccaggaattacctagcctcagtagtagcaataaacttgttgcatggcgcgaaaaaccagcctagggtgctctgcttgctaacggcaagcactaaagtagctcgcgctgtcagtcacaagataattgtttggagtgaagagttgcgggtaactattcgcatttattacacaatgactaatgcctttggataagcgttgcggcactgggtttccccgaggtccggtcaactgaacagagctactgtctggactagtgtgacgtacttccaaactgattcagtaggcttctaccatatcgtcaacggctaggaacgcgcttcagcagcaaaacgtctaaccggacgcaaaggtctttatttcttactaaaacattaccagtgttctcccggcctacgggatttctctaacagaagcggacgtggagacg

SEQ ID NO: 40221 - DNA, 917 bp, Arabidopsis thaliana columbia
tttgtttgataatacatacacaaactatttcaaattcctatgaaataattcataaaccgtaaattactatcgcatgcttgccgaaaaaaaatattttcaaaagttaattaactagccgtttcggttcagtgtttgtaccggaatcgaaattaaaaaaaccacctcttcaaaaaccgaaacgtcggtctaatcgtaaggatatatatcagcgactcccaccgttaacaaaataattaaaaatgaaaacattatgaccacacgatcaatagaaaatccgctacgatgataacacgtggcatcatcttttagccattttttgcttccacagatactgtagtaattgaatataaatttataaatatcgcatttgctctcttctctgctttcacattctctccttcctcatcatcgttactctcgtgtttatctctccgacgtaaccatggatagcgatactctctcaggattattggaaaacgtcgccaaaaaattccccgatcgccgagctctctccgtttctggaaaattcaatctcactcacgcgcgtcttcacgatctaatcgaacgcgccgcttcacgccttgtctccgacgctggaatcaaacccggcgatgtcgttgctctcaccttccctaacaccgtcgaggtattttaagaggttttcatatatttcgatttaaaagcttcgtttctggttttgttttgcgtgctgaagaatcacatgggaagcagaatttatgaatatctgtaaatcgcttcttaattgagaaattttgatttccggattcagatgatttttttggatgaatttggttttgatttccttgttatgttttcagtttgttataatgtttttagcggtgataagagctagagccacggcggcgcgtatgaacgcagcgtacacggcggaggaa

SEQ ID NO: 40222 - DNA, 319 bp, Arabidopsis thaliana columbia
gaaacctcctttttttacacggtcatttccgcaggaccagttgaggagggatggctaacagtgcgattgtcaagggccagttccgtgtcctaatatttaaggaatccatttaaagaaaaaatttggaaaaaataaaaataagattgaaaatgtctcacactaaaaaatatatgattattttctggttacaaatttgcattaaaaattacaaaaaaaaagttttaaacatttttctatagaaaatagtcaaaaatatatatatatatacctatatctctctatatatatatatatagatgtagaaaccgtgtattcattg

SEQ ID NO: 40223 - DNA, 803 bp, Arabidopsis thaliana columbia
ttccatttcctgccatcatcagactatacaccaaaatccgaaaaaacacctaaaacaataagcaattgaacacaagcttaaaggttgaacatttttgaagatggaagcgtatctaagcagaagaactcatgtgactcttctgcaaagtctgattgtccaatagacaaattggtaatctctgagggagcgatgtagcatcaacaaggagattcactcaggaaggaaatcttgtaacgcctaactcatatcaatcattttcacagcaaacagagaaattgaagaatttgcatcagacttgcagacaccagaatcagaaccctctttgctgcaagatacccggaaaaaaagacagaaactttcgagcacgagacgataagtaagacagaaaccctagaggcgaatcagcaagaaatgaaagaggaatcaaaattgaccgtcgcctaatagaccaaagaaaggtgtctcctttcggacaagtatgcttcaccagatttaagcgcaggagaatgacaaaagtaaaagcaaaagattaaccaatctctctctgtgggatttgatttgtcaggagagtttaaaaaaaaaaaaatcaaagctttcatgaatctgcgactctgttcttcaatttcaaaaactatatgaagccagtcaagcattatcttatttcttacataacaatttttatctcaactttgataacttgtacatttttggacatcaatgatacaatgatgctgagatatgggattggacaagcaggataaacgagaatggtaccgcatccaactgaggctagatttggctat

SEQ ID NO: 40224 - DNA, 596 bp, Arabidopsis thaliana columbia
ttgcaaattaatttatgagttgttattccttttgaacaaaataccaacaaatattgtatccaatggtaataaattattctcttttacgggtttacgttatagtctataacagacatggtatttttctcttttctttttcattatataaattttgtaattttaattttgaatatttttacaaaactattataagtttataactatcacggaacatattatccataaaatgtagtacaattcttaagcaaataaatctaaatttaaatacaagattggtagatagttacgtttttactttttttttgtttgttaatgtaatgacaaaaatatatagtcactgaatataaattaaattaaataacaaataaaaaaatatgacagaaagttgctgaaacccaaattattacccggattacattgcaactaacaccacaattgaatctttttttggtcaaaaccaaaatgtcatgtccactgagtattcctcatcgatgctgaaacatattgggcttattttaaggagctaattcatatgtgtatatatgggcctatctaagcatggatcacaaaactataaatcgtttatcattaagaat

SEQ ID NO: 40225 - DNA, 588 bp, Arabidopsis thaliana columbia
acaatacaattggcggtatgcgagtgctcacatggttaaaatcggtcggttcctctatatccgcctttaatttgtactgtttaccaagcatatctcatttttatagaaaaaatgtctggaaataacactatttgattagtccgatttctgacgaaaaataaataaatatatattagtcccgattgctttctccaaactactgttgcctttaatttttgttccaacttaattacagatggtcctttgaacatagttctcaatttgattaatacatatacaagtagactgaatggaatttagagagagtaatgtgcatcacacttgacaaaaattaaataaagacaagagagtactgtgtttgacgcaatttaggtaacaccgttattctagggagactagagctgaacatggattgttgattaagctctcacatatgagataaagtttaattgctgtcctgtatacaaaatttgatttaggagtccatgtagcaaatatttaatggttgcaaagggcaaaactcttgtagacaaatatggataatttgcaatcataatcattcataaatgttttgctccagtagtcaga

SEQ ID NO: 40226 - DNA, 526 bp, Arabidopsis thaliana columbia
cggtgatgtcgattttctcactcgcgagctcttctggtaaattctcgtttatctattagcttcttatactgtctcttccaagtgtagtgatctcgatttttaaggaattttgaaattggaggaaaaaaagttgtgatgtttcggatttctaattttgtctatgggacctatgtgatatctagttactttgtttctttatctgttaggtcactctgattttggttagtgaatatcaagtcacaatatagatttggaatgtagtttggatttgaacttatcgtgctcaagatttttaggtttatagtttctaaatatatggtacatgatctttagctctggacctatatgttagattatccaggctcaaaaaggcaaagtatgttggaagtgatttgggttttggaccatgtctttgtatattttcatgaatatagaatagtaggttgaattgattaggttgcttaaagacattctttcaaaattactcccgaatggttgcaatacctaatcacatggctagctttag

SEQ ID NO: 40227 - DNA, 106 bp, Arabidopsis thaliana columbia
cccgggcctggcagggactcgacgagtccgagctgggtagcgacctacagcgcttgtgggccgtcacgcctggccttgtcagctaccgatccggactcggctggac

SEQ ID NO: 40228 - DNA, 629 bp, Arabidopsis thaliana columbia
cgatacccatttttcacacatatataatatatacacactcataattatataaatacacataatcaatcacacatgagagatagtcacatcaaaactaacaatctctctctctctttcctataagtttgaatggcgatttaagagacccgtagttctctgatcatcctccggtttacactctcatcaaaacacaaacacaacgcttatctctctcactctctttactcattcttctcatttggataagatctctctctttctctccctccttttcagcagattcaatccaaaccctaacctctttgattccgatctttagagaatatttctcttcaaaaaatccattataaatacttttacttaactaaaacttttttttttacatctctctttttttttttacttactccatatgccatcaatgtcaaattgttctttctgtcctttgttcttaattagtgtcacaccaccaccactacttctatactacaaacccttctcgtattctcttaaccaatacgtacttattacccaaaagtctctttctctctatatatatatagataacagcaagagagagaccacagagaagctatatcttgatggattctgttggaagaagagatgga

SEQ ID NO: 40229 - DNA, 640 bp, Arabidopsis thaliana
acatgtttaatgctaactttttaaactctagaacaattacacttgacaaatcacaagaactaaagtaacacatcacaaataacactctagcacaatcacaatcataaatcacaaatcaatctctagctgctctaaacacatcactaataagatgaaaaggagagagatagattgacagagagcttctaattaccagagagtttcaatgcatgggataggaaccttggacaaaacaggtaaatgttgtcggcctgcaagattaagcaaaccatctaacagctcttcgtagtctaggtctggattttcttcttcatcatcatcttcttcgattggtatgttgttgtcgtcgtcatctgtttcttcgtcatcttcctcttcgtcattttgaggagcaagaggcggttattgaataacaggagaccgtggttgacgagcaggaagaggttgtgtcctcggcgggtactgggatggaagagttctatgagattgtctctgatggattagaggagtgagaagacactccgacaccactcctgtcctcctctcctcccacctccgccactattattcatagtccgactcacacttggattcgatggaggttgaatcaaaacaccgcttggatctgttggatttggac

SEQ ID NO: 40230 - DNA, 718 bp, Arabidopsis thaliana columbia
tcaaccagatccaccgtcacagacacagatccacaaacaaacactcgaaagatcctacaataattgatccagatagagttaaaaacaattttgatcaagaaatatcgattaaaaattgcttagttcttgaacaagccatttgccgacgctactacaaagctttttgccttaaaaatcagcataatccacccaccctcacaaaccagaagccaaaacctgaatgctagacttgtaaaccaaataaataagcactctcccttgaaactcctcaaaaactagcttaaccatcaatacatgagagagatcaaaagtcagtcaagtttctggtaatcatttgatctctcttttacagtctacacaaaagacgctatacaaaacccaccaaacatacactcagtatatacatactagactgatgaaacctccacatggttgcatttcatgggcttgatgaacttgcctccttccttggctcccgaagataccccagaagtctttctgcctgcatgatacaaaacgataaatcttgttcaaattcaagtttttcaactttttaccaaatatttaagaatagtctaatccgtaacagagagacaccaatacataagaataatctaatccgtaacagaagaatctgagtgttttgtagctaagctaacgcatttggtcaagctaaatgaacgaagatgcaatgagaaaatagaaaaatagtaaagtt

SEQ ID NO: 40231 - DNA, 935 bp, Arabidopsis thaliana columbia
tacaacttaaattttgtcatacaaaaattaactcgcggtgtacaacggatcatatccatatctacatatacattttaggtagttataatacttttacttttaaccaaaaaagtattatataacaaacacataattatgtaccataaaatacacactccatataaatgatgtgtataataaacagatttttcttaaccaaacaacatcaaaccaaacaaatactaatataacatcaaaagtaaatagatataaaatgtaaaatgataaattcaaaatattacttgatattaaatatagataatattaaattaaaaataaaatttaatatctaacgcaaataatcaacccgcagtgtcaatatctagtgttttatattttactaatatcatgtatgtatattattttcaaattatctgtactataggtaaattatatatatctataaattaattcttattcaataaatataaaaactaaaatacatgattaaaccgtattatttgctccaattttaccattcatacatattttggaccaccaattctgcttgatacgcttttgttccgctacaaccgctagatccgctctgctcgatacgctctctccatttgaagcctaaaagacaaaaaataaatatacatgtaattagtccacttttaattttattttgttgattggttagtcaaagacagttcatctgtcacacactttgtactgccaaagtgtggactaactatacaagtaaacatttacacacaaagaaagattaactatatttgtaatatatacaacagcaaaatttataaattaattaaagcatgaatccagtgcgaatcttgggtacagacctagtctaaaggtaaaggatagcactctaataaaaatattcgtttttctaataagtttagccggtgaatttagggacaactttttat

SEQ ID NO: 40232 - DNA, 673 bp, Arabidopsis thaliana columbia
tgatcaaacctacgagtcgagattacaaaaaagaccctcaaactaaaagggttgaatatatcctcgaccaaacccaaaggattactacagtttagagcttcctcaaccgaaagaccaagaagtcaccactagagtttagaatatttccaatcaaaaccaagtgtaactatagttttgaacttcctcaacggctcaacctaaaccattttaccacaagtgcactcagatctgcaagaagaatacaccaacatatatcaaattttcaacttttcaacttgagaaaactttttttcagactacatatttacttaccttaagttcaacaaactctgtcacaaggttgacctgacggcggacacgaacgaatccctcatcaccccaagtgtcgcccttcgtgtcctgaaactccatgaaagggatgttgctctcctcatcaatcccatgcccggtgagtaacatgaagtgaccatctactcttctattcgcttctctgatctttagggtaggtttataaagctgtccctatcacaaaacataaccacatcaagggaatgcaatgttcaaggtaatttgattgtgattctcgcaaatcaataaacacaagaaagtacatataaatcaaaatacttacattctctgtatgcttatgagaactccaacttattgttatttt

SEQ ID NO: 40233 - DNA, 777 bp, Arabidopsis thaliana columbia
  unsure (1)..(777): unsure at all n locations
ggacgaaaaacagtgaggtaaactattcttaccagtgaacatgacaatctttgttcctttgacagagtaaggcggcagatccttgtccaacacttttcatagcgaatatgggaccaaattgcaccgaagctgagctaattcaagttttctcgaggtaagaatactctattctccacgcaaaactgtaaccactagagatagttttcactctctttcctctcagatgccgtggattcttgaagctgaagattcagggtacatatgggactcctgttgcatttgttgatttccaggtacagctcttgcaatatctttttctttaaatcgagagagatcctagtttgtttaaagagtgaattgactctcgcatgtttactttgatatgtggctttgcaggacgtcagttgctcaagtgaagcactacatactcttcaaggcacagtgctttactcatccctcactggggaagttttgaggctgcagtatccttcacttcttcccattttatttctttgttttttactcgtgggacttcaccgctttccgaaaaactgacttaacaagcaatattagatatgctagatcacggatgggaatgcgtaagaagattaattagggttagaattgattaagctctgataagtaaagatcaagtcagaatgtcatgccaaaacagcataggtactgaactttgctatatgtatgtatagttagagtccgcagattataatttatcatggttcgttcatacccanaggaggagaatagtgttgttgg

SEQ ID NO: 40234 - DNA, 759 bp, Arabidopsis thaliana columbia
tagaggatcccctaatgcaacgagcttcatgaatggtgtaaccgagccagctgcttccgcatctaaactgactgatctgtatcttttgagagtaaggcttgtttttcttgttcccgaacaatgtaaagacatgcttcgatggctatatccacattttgaatgaatatattggaatgttttcgataagaaactttgtctttcatacccagggtgtttggctcgggtataagttagataaatataatggaagtttgattaagcttctcgtatacccgaggtggttggctcgggtacagattgcctgagccaaagttgggtttaatatattttgttccaagctgatcgacttggtactaggttattcgggataactgaatttctaagcattgaggcaaaactagataagaaattgtatttagccaaatcaaaagctcggcaccagtgtttatgataactgggttttagtttgtgaggcaattgactcggtaccaatgtaaagtcacaactaggttttggcttccgaggtgatcggctcggaccagttaggactgggtttttgtaggagtgaatgtattggagcgttttcgggcgaagctttgtctttcatgcccgaggtggttagctcggtaccagtgtgttgatagtaactggattttagtggacttgaatacccacggttgcgacccgatctgattcagtcatttaccaacgtttagaaacgagctggggcaccgcgaaattcgatttgcgaccacgttt

SEQ ID NO: 40235 - DNA, 543 bp, Arabidopsis thaliana columbia
caaaaaaaaagtgcaacctgagatttgaggcagatgagtatatatattcttacctaatacccaactactcgctcccgatgttatcgtaactgaaaccttcagatatggtatccaatctcttgttgtctcctgcaaaaacacacacttaccattatcacttctgtctgttgcctcaatacttctactttctctaaaccagcgagctagtctattgtgtcttgaagaatttgaaacccgattacttgcgatatattacagaaagtaagaaagattcctagagctctctcaccttgatattctcctctgtcacgggagtccaggaagttttcagcattcggcacaaggaagggtgatctatcgtagctctccagaatctctgaaatcaaccaggaaacttatggttacgacaaataatttatcctattagctgtttactggctcttgtactagaaaaccactaataactacttggtgttatacgcatgctaagacgtcagaacaacgagagagacaggagtatatgagatattgagatggagaaag

SEQ ID NO: 40236 - DNA, 567 bp, Arabidopsis thaliana columbia
tggattctgggggaaaaaatgagttttttggtttcggtcggtttatcattgtcttattcggtgcctcttctcccgtagaatgggaaggtcgccatcgccacgtcgtgttgcatttcttttcgggagaaatttatgccattgattttagctcttttaggctttttcttagtttttgggaaaattcttgtggtgggtcctttgcaaatctggggattcaatctctttttttttcattgttccataggtttttgaggatacaaaatttcattgttcataggtttttctcatgatttctgggggaagagaataaataattccatctataaaaatcatctttttttcattgttggaggtgggatcctcatatgattttagagatcaaataatagaagagaagagaaaagcttgtttcttttcccctttgtgtcaacatcatacgaaatcgtttcttttagtatcaagcttcaaagagatgttttgacttgaaacgattgttgtcttgcagagaagcgttttttcggtggagagaaagagagatttgactctgtcaagttattagtacattga

SEQ ID NO: 40237 - DNA, 535 bp, Arabidopsis thaliana columbia
tgtgcttgcaaaataaataagaaaatatctgaaatctgactgtggcggtggagtcagatcatgtcgtgagttcgaacactattttagtaactgatctaaaaaatactattcatgaattttggccgaaatttctaaggtataaaagaaaaataactaataaatgcgaagtcaaaaatcagaaaatcaaaaaccctaagtaggaagagaagaaaggaaatggccattcatgcatgtccctcgaagaaacagccagttggatcagagggtctggcccatctcacatgcgctcactcgtttcttttttattctttttttgtttgtgagatatttagttttgtgtattaattttaattctcggagattttaatttattcttttgaatgtgttggatcattttagaaaacgagataccttttctatcagcatcagaaatttccaagtgtttctgtctcatgcaaatttggcgtatgacttatccatatgtgttcattaatatgggatatttataatcgtggagcatccattacccatatat

SEQ ID NO: 40238 - DNA, 751 bp, Arabidopsis thaliana columbia
tgacaaaataaagctttcactttaatctgaactatttttttccatttgtctacaatgtctgtcgtcactttttgacttttctttttgcttctatattcccatttgctctttactcacattcatatactttctcaatttccttaatttcaaggagtgcaaaaatattgttcttactctcattcatatactcttttttaaatcagaaaaaataattgtttttaggtcgagtatcactcactgcctagggagagtcgaaaaccaatttttttttaaaaaatcagtaacaaagagttattatagaataaaatcgaaactcttcagtttcaagttcctaaaccttcacgtgcctcttcttcttcatcttcctcacaacactgtccacatcgaaaaagttcagtcaacagatttagaatcagatctcttcctttctcttttacatgtctcaaccaccgtggagatgtttctctctactcatctttgttctcaccatttttagtactaaaccttcctctgcatctacttcatgttcttcttcatttcattgcccaccgttcaactcctcaccaccgtaccctttctcagcttctccgggatgtggccacccaaacttccagatccaatgctcatcttcacgcgccaccatcacaatcaaaaacctcactttctctatcctccattactcatcaatctcctcttctctaaccctctctcccattacaaacactaaccggaacacaaacaactgttcttc

SEQ ID NO: 40239 - DNA, 510 bp, Arabidopsis thaliana columbia
tttccataacattttctgttaaaattcattaaccggtgatggctataacttacaaccaaagaattggttattcaaagaaaaataataagcaaatctgtttacaatacaatcaaacgtcaattgaccaatcaattcacgaaaaactacacactatacaccaaacgaataattggggaggagaagcactaagattagtcgaactcccacgaccatatgtctaggttttgtataccaagttaatttttttatttgatttacaaatttatgtactcaattatatacccaaccatcacaaatacgattttaaattaatggcggacctcgccaatataaaatgaagacttattacagccaaaaaaaattggatgagtcaaaaggtcagagaatcttaatgaacagtgaggacatgagtgtttaagattgggtccagcttggtccaagtgttaaacaattacaaaagaggttggccattattaatatacacattttcttttattatgtaattgattt

SEQ ID NO: 40240 - DNA, 605 bp, Arabidopsis thaliana columbia
ctgataatcattattgataaacttttgctccgttcaattctcttttctaaatatgttatattatatattagtatttatttattaggaggttttgtcggcaacaaaaaaatagacaactctcgtaaataacaaaaataagttttcttatcaaatttagcacacaatcttcaaacttccaaaaataacatgaaattaatattaaaaagactaatataagcatttgattgataattcacacgatttgtgatttaaaatcataattaattttatatatttagataaaaataaattagttattatgtaaaattactaatgctaattttggaaatttgtgaagtttgtgttataattgtccataataaattttttcatgttattttaaagtatttctctataaaaagtaaaggttgggccaggtaaatgtacttattggactcaataaacaactcaaagatgattaaattcatatattttactatgaaatatgttttactataaaaaacagctcaaaatgctacatttcattattccttctccatttcatttttaaaattcatcgtcgcataaaacgtcatagtatgactataagtttatgactagtttac

SEQ ID NO: 40241 - DNA, 523 bp, Arabidopsis thaliana columbia
taacgttacttttgctagaaaatctaagcctgtttgatttgattgtgctatatgaatatcggatgtcgaagcaaagaactaaggaacaaatacaaaacccaagaagagactatatcgcgtcttttggatataaatatctcaaacctcgcgattatcacttccttccaaatgctaaaccaaatgagttaagaaaggcaaaagttacaatttgttattttctcaatggttggtgcctgccttggagttggtggtgtcaggtgtgcgtaatggaatctctttatagtcgtttcttttaaaagattctctctcttagaaacaataatgacatgttttggtaaagcattttccgtttttctttgctttgtttcctttcttatagttttcagtctttttcttctatcatttttcctaaaattctgtatgaaaacggtataaacgtaactttcatacaaaaaaaaaaaagtttccgaatcagatatcatatatcgctccatatttgattttctttagacaaaataatatt

SEQ ID NO: 40242 - DNA, 532 bp, Arabidopsis thaliana columbia
taaaagacgagagtacaagtgagaaatggcgttaaaggtgatcaagatctcccgagtcagccctgcaaccgcctccgtcgacccgctcattgtcccactctcgttctttgatttacagtggcttaaactcaaccctaccgagcaagtcttcttttacaaactcaccgaatcatcatcatctcgcgacgttttctactcctccatcctccccaagctcgagcgatctctttcactcatcctcactcactttcgcctattcacgggtcaccttaagtgggattcacaagatccaaagccgcatttagttgttctctcaggagacacactctctctcacagtggctgagactgatgcggatttctcacgtatctctggcagagggcttcgtccagagctagagttacgccctctaatacccgagctaccgatttattctgactcgggggctgttgtatctctgcaagtcactttgttcccgaaacaaggcttctgcattggaaccacagcccaccatgtcgtcttggacggcaaa

SEQ ID NO: 40243 - DNA, 432 bp, Arabidopsis thaliana columbia
cttctctttcgatctcaccaatcttcgatttcgtgtttaaattcctcaatcttggtacctcggagctcactacaccctagagaaaccccaaatttaggttgtcaggggaatgtcttctgaacatatatcaggtggtggagcttcaaagacgaagaaacataagtggagctcaagccagaagcgacccaaaccaatgggagtttctagacaggaacgatctgttcctcttgtatctccttcgaactcgtttgcgtcggaggacgatcatcacatgttgaagataagtctgagctcgatttcgaagcttgaggttaggaacttgcagcggaaactagaatctgagcttgatgaggttaggagcttgatcaaacggttcgatcgcgaagctaatcctggtgggtcaatagctaaaagtggtgttgtacggagaag

SEQ ID NO: 40244 - DNA, 316 bp, Arabidopsis thaliana columbia
tcatccccgtttcccctggtacggacttggaatggtccagcaaccatggctccttggcataaacgtccttcatcactacaaagcctccacattcttcacctcttagcttctttttaagatactcgttgatgacttatgggtacgatggatcaaagtgaatcccttcgtcttcttcgaagtactctatcgacacatttttggttttcaaggattaggtttatggtgagcagctgagagcttattgattgtgtatatatagtggttgggattctctttttttttttttttgcaaaacattttgtgtatatccatgaaa

SEQ ID NO: 40245 - DNA, 644 bp, Arabidopsis thaliana columbia
ggatgggggtggggtacatgggggggggggtaggagggagggggaggggggggggcgaggaactgataaaggaaggagtttggtgcgaggtgtaactttgatgtagaagatgcagtccagaagctagagaagttggggatagttgctcgggacactattggaaggtactactgcatggggctgaagcgagccaacgagattatagggactaccacggaggagcttgtcctcaaggccaaacagggcgtcacaccttcttgaattcaccttctcttattttcagcatttgttttcttcgttaatttgatttcaatacaactttaagttactgtgtgggttgttactaaatacaagtgcaacaaattcattcaccaacagaattgtccgatatgatgatatgaaccaatacaacatccaatatcgaactactactgcttaaggcaggcaagtccatgcccaatttttaaggatgaccataaaaaagtttctattcccatctacagagctcaacgtccatgtattttcacctcggtcctgtagtcctctctcataagctcaggatactgttaagagccaaaaaaatggatagacaaatgaggtcaaatatcccaaataaccaaaaaactgcaaccaagctcacggtc

SEQ ID NO: 40246 - DNA, 555 bp, Arabidopsis thaliana columbia
ggtatacacacttgtacaccaatgaataatagttagtatacaaaacgatgtttgaaatgtttgtgtattaaattgatgacataaaaatactctaaaaatcaatataattttttaagaaaactaaaataaagaaaaatagaaaataaagacaaacaaaataaaataaaaatggtctctcatattatttttattctctctcaagataaagggtattttagtatttgataggtattttgttttttagtctattagacatattctctatctcacaaaaagtaaaaaaaagtgtctatatctctaattttttaaaaaactacctattttgcaaattatttttgaaaaagtgtctactttacaaataaacccttgtatttactactttaaatagtagccaaattccaaacttcgtggtgtttttgtatatatatatatatcactctatcttgtagatgttgaaatttatgagtgaaattattagcatacgatcaaacaagcaacataacaaacaaagatcaaaggaaagattacaaaccacaaagttgcaacaaggttttt

SEQ ID NO: 40247 - DNA, 478 bp, Arabidopsis thaliana columbia
tacgcatcaccaaaagaaaaggtaaagtattcattagaatcgtatggtactttttcattagggaaaataaaaactagtgacattgatccatatagaatataaactttgaaatagattaaggttggtgttacatttgttccggtgatcgttgggttcggcttaacgacagcaatctcagccttggtatttgacgaccatcgtcaccgaaaatcattcgtcggaagtgttggcctcgtggcttccatctctatgtatggttctcctctcgtcgttatggtaagccatataatcaaaccaactattacatactaggaatattttgtttactaaaaaaatatgaatgcgtgtgtgctaattaatgtgaatatttgagtgtgcgcagaagaaagtgatagagacaagaagtgtggaatacatgccgttctacttgtccgttcttctcatttctggctagttccatttggttggcatatggctt

SEQ ID NO: 40248 - DNA, 530 bp, Arabidopsis thaliana columbia
caatatcacgtacaccgtcggctgagattaaataaaaattgctacatatttttaaaatatagcaaaattagattttttagattcacataaaaattttaagaactaatatgattatgtggtaaatttttatgaagaaatatcatcaaataaagtaaaaatatttaagtaaaaataaaaagtaggatttgacttgagttttgtctttatcttactaaataacaaaataacaaaaggttatataagtcatttactaaaatctctattagacaaaaagttatattagagaggaaagagaaaagtgtttatatctcatatttctaaaaaaactacctactttgcaaattatttataaaaaaagtgtctactttccaacttatctcttacttaattatattcctctgcatcataacataagaataggttcaggtcaatttatgggaccttgtatttattcgatgtcaatacgaatagtgtgtgttgataatataaattactcacggttaatggtatatctatggataagtgatagt

SEQ ID NO: 40249 - DNA, 521 bp, Arabidopsis thaliana columbia
taaaccatatatgtggataaacgggaagtactgttgttaactagtggtcgatatcttattcaaacttcgtaagactttaactcacggatgattgaatatgttcatattgtagcttactagcttagtatctcactcatgcaccattccataatttttgttttctttgtaaccatctcattacaactctaagctgatcaaaactcgtttttaattaaaaatatacatgaatacaaattcagtctagtgatttatgttagtgtcgtccatgtgttaccaattgtatataaatctcatataatacattcttttaaaagaaaaattgtactatcatatatatataaacgacatgatattttgtagttaaaataccatttcatttcaaatttagcacaagacgcgtaataataccatttcagaggaaaacgtcccaagatcataaatatttagcacctacacacagaccacaaacgacttatggttgtccaccgtgttgtgatttaccaccaaaaagtttaaaccat

SEQ ID NO: 40250 - DNA, 547 bp, Arabidopsis thaliana columbia
tcgtatgctctacaaaataaatatagaattgattaataaacaactttagttcccttatatgtatctgaattatcattaagaaagagtttatgtattggcatcaaaagcatctaggaagagtagaaggtatgagttttgacttgtgtgcatgcagtctctggtgctgttggatcggtccaccgtaaaccgagattgttctactagaaagcccgcgatgcttggtctccaatcctagaaaattgaagataattgatcgacaaaccaaagatcctcacatatgaatggaggagtctccccttgaagaaccccattcttacacatcagaaaaggagacttaagaattcgaatcagttcgtccattatctatttaatttcctttctcttgtaattgccgagccaaaagttaaataaaagaaggttagatccatttctctcgtcacttggattttccaaaatgggtttagggttagattgaacggactgtacaacaattaaacaggttaagtgtttagcgcctaacaatttttttgaaactgcatttagtata

SEQ ID NO: 40251 - DNA, 506 bp, Arabidopsis thaliana columbia
caaactcatcgcatagcaagcagcaccttttgaatttcgccaagctccttctctagaatctcttgctgtgcaactaataccctcgtagcctcagaattcttttgagctaaagctgcagtcttttggacaaaacaaaccaaactcttcagatacatacagccacaaagacagctatattgaccagtcataaactcaaaaactgatattttctgcaagattatcctaaatctccaaaatattgattcaaacactagaacatttgttacttcctcagacattcaacaactctagatcaattcccaaatcatcacttgttccactttcatgcaatttcactcacatagtgacatagagaatgggacgttttcaatggaatcatttgatgaagcaaagctcgagaaagagaacaatacctcagaaatgggttcctttagagcttttcgtgtgacccgaaccgaattccagcttcccagatgctagaaagactctacaatagaagcgacttt

SEQ ID NO: 40252 - DNA, 516 bp, Arabidopsis thaliana columbia
aaatcactacacaatcttatgaacaaacggtgatcaagaactgatcaataagttttggcggaagatggaaacgaaagtagagatggtggtaaagcttgattgactctctcaatcagtgggattgatccgtggagaactagacttgtttgaatcacccaaacaatcctaattctttaatctcaagaatcaaatgaatctttcaaatgaaacttaaaagacaaactttaaacaaagacactctttgaataataacaaacttgtatatttcttagatgattgaaaggtgaattgtacaaaggacaaatgagcgttatataagctcttatgagtaaaaataacattctagatctttaaacaagaaaacaaatgaataaaacttaatacatatggccgttggacaagattgtggtgtattacccaaataaggaaacttggagtgatgacttgacagcttggaaatctctaaaacggactcaaacagatggggaaagagctgttggagtttaaaggcaaaca

SEQ ID NO: 40253 - DNA, 483 bp, Arabidopsis thaliana columbia
gaattaacacgctatgaaacgaatcatcaaaactcaacatttcaatactaaatataggaagctaagaaaaaaacgaggtagctcataataacaacagttccactatttcttttttacttttagatgtttgcttcaagttgttacaacttacaacttgttaagtttgtcaagaactcatactaaatagaaaacataaaactaacattttgttggttaaacaaaaacctaactcgatcactgcgatatataaactccatctataatacacaaatcatcaaacacaacaaagcttgtaatcataatctcaaccttttctcaaaaaccttcttcttgactatcttgattcacttctcgaatcaagaaacatggttaggttcttgaacatcgcgttgattttactcttgatcgatttgtttgtcgcaaatgtcttggaggccacgaaactgaatgtgatggacaaatgttggagacccaaccccattg

SEQ ID NO: 40254 - DNA, 1066 bp, Arabidopsis thaliana columbia
tgcgttatcaaaactgtccttgagagtccgcaaaatagaagcgaattcagcatcttcggatgtggaaggttcccgaagctgcccaaaacaaagagagaattcaagtcaccagaagcaggcgaagtagaggcaacatggacacaaaacgatactaagattcacctgaacaggccagcgagatggtgacagaaggaacagtatctcctccatctgctccctatttttccacatattctcatcaattttgtgagggggctgacggtttgcttcgtcaatcagggaagtttccctataaaacgacgaaccataaacacatttttattagtgaatgaattcaaaagcagaagctataaataaataggtggatcggaaaccttgtgaagggggagattggacggtcaatagcttaatcagagatgccatgtcagaggaaagccgagaaacgtcgtcggaaagaggagagaaaggatatttgtcgtagtaagaagcgagaaaagcccgggtgataggcataaggccttccgttgacgccattttcagattctttgcgcgatctactcactcacacacaaatccagagctccatgccaccgccaagccaagcaaattctctctctgccggcgaagaagaagacttattgattatgatcgacgaaaaatgttggacgacgactaggccgcatattcgctcttcccaaaaggcttatacaatacccactgggcctttattcaagcccactggtcctttattcaagcccactgagcctttatttactatcgtcgtctttgtttaatgttttgtgaaattatgatgatgaatcgaagagtgcacagaaaatctgtgaatctagttttttattttttttttttttggtacaaggttaaattttataccattttctgaatctagtttatagcatcatgttggtagaagcaaaaatacagtcaaatggagcaagaattacaatggcatgacttgggaacaaaggcacaaacgccaaatggcttgttgggaagctggcaattgatgccgaaacagcaaggcatggtggccaagtggtggagg

SEQ ID NO: 40255 - DNA, 553 bp, Arabidopsis thaliana columbia
aaaaaaatcctgattaacgaaaagcataggaacccaattaatttagtttttaaagaatagatccgttgaaactccctcaactaacaaaaaaattactaagagaaatgattcaaattaattttcaattaagaaaacatgcattagtttaagtggttaaagcccttgttggcatatcatagtactagtttgaatttaattagatatagaaatagagaaatgtgtctgatgacagaaattaataattctttttgggagcatcaaagagaacaaatataaattaaatgtcttgggtttctataattgctgtcaaaacataacacaacggtccagagtccaaaccaacctggatatagtagggaccaagttttaacactcttttctcacaacaaccaaaaatcaaatagtactacaactggattatttagttatacaagagaggttaattagcattaattaatttactaatcagaaactaatactagtaccaattttttttgaaaaagagagagtaataataataaaaacaaaggagtgatgaaattcaaaatattgg

SEQ ID NO: 40256 - DNA, 577 bp, Arabidopsis thaliana columbia
ctatctcagcatttttgagtttagatatttcacttatcgagatatttttgaatgtttatgatctaatcatattttggatggttttatgtatcaccacagtgtctatagattctagttgtgacttgtgatagaataatatttacaatttacatagagcacacacttgtgtgagttgtgtcattaaaaaaatgtagttgaaattaaatagttccattaaaaacacattactaaaatcaaagatccaagatccaaagatcatgcaaaagagtcatctcaagaattccaaatatcaaaacgacataacaaagatccaacaatttataatcaagaaagctcaaattgttaagaaaactagaaacagagctagttcctttggtttctttggtttttgttgttgttgtcttacatcaaaagtacattgttttgataatatgatcccaaagattccaaaaccaataaacggttttctctaataaagaataattatcttgaagacaaaccaaatcatcaagattctttgattttttttgatgttctctagactctgaaacctttatatggctgaaacgacggtgac

SEQ ID NO: 40257 - DNA, 543 bp, Arabidopsis thaliana columbia
gactattggacacgatgtttgtgatctctgtggtgctaagtttgctgctctttcgtcgcccggttgtatcatatgcggtatgggaagcatcaaacgctctgatgcactcgctggacctgcacctgtatccacaccgtttggctaaaggttatagacactatcaccgttggtgttaatcaacatctaagcaaatttcaaactggttacatgtacgaactcattcgatcgattttgtgggtttgattttgatttattcgtctgtatatgatttgattatttgtatctgtttattttccgtacgtagctaatacaatttgttgagatatttacgtgcttttgaattttaatttacctcattgaaggtaacaaatattaagaagctcattattagtccatatcaacactacggacgatataatgagtatttaaaatcataattaacaaataatatcaataaacaagctcgtacaatacaaagagtttcaaatgttacacaacaatttgtatcctaattttatcatgatctagaattatgaaccagta

SEQ ID NO: 40258 - DNA, 420 bp, Arabidopsis thaliana columbia
ttatcttttggtacttctgtttttgtaacaaaggataaagtgttttagtttgatgaatgtttccatatgtggaacaaaaatcattcatttgatttataatctccaccatgatctgatcagagaatctgtattgtcttatctaatttattttcaacttttcctttgaatttcggagatagattcaaagctcatctttagtgttaatcatcgatactaagtatatagtagatgtgtccctcctacgacttggagttgattgaaaatcactctagtcattatgtatcaatgcagataacacgttctgacgtttatcacatatgtgtcacagtgttatgaatattctgatgtcacccaaacttcacatttgcttctaagattgttctttggtaacaatccttttgtttttttggtcaaatcggt

SEQ ID NO: 40259 - DNA, 827 bp, Arabidopsis thaliana columbia
taaaaagtcgttgccagatgacatggacacgaggaccccactttatatggcctaccttttattgccaggctgttattattttccctctactattgtaatttttactttccattttccaaaaatttgtcagatcgttacgattaaagtggctcatttagaaccgttggatctaaaagaaaaatctgcaaataactcccggttttctctcaactcattttctgtaatgggtgccatgtcactaatttcgttcacctgttaccggtttctccggtattctcttgactaccttcacctgtgattttttttattttttttataactaaaatatattttcctcacttaattaaaatcttcatcgcattttgtataaaaggcagctctctgcctcgtgctccatccactgattatcccgagagagttttatttttctttccgagaaaattcgagaaaaataatctgggacaaaaaccatcgttcatttcttatagagtgagtctcttcagcttctcttctctttcactgaagtttttgtatttatgatatcggtgtttcattgtttctcgtgcttattcagtttttctccgatccgttttttatgggattgttaatgattcattcccgtgagtgagtgtgtgtgtgcatggatttaataactttctccgattcatttttgactcacttgattcatcttttgatttgcaggaaagcttgagtgagggaaaagctttctacacgaaactagtctccagctttttgctctgtatttgtccagatttgtttgttgttgagccaacatttgaagatagttcaagaaaatgggagtgaaa

SEQ ID NO: 40260 - DNA, 598 bp, Arabidopsis thaliana columbia
tccctgtgtccattaactaaaatttaattgaactaatataattagtatttagttattgtaatttattattaaatgtcaattaaagatttaattcgtctaaagttctaaaaagtaatcatttgggcttttgggcgctaacaacatttcctttttcggcttttggttatctatgtaatggggctggtgaatttaattggcccatgaattctcagatagaccaacccagatgatatgaacattacacttgagcattttctcctcacctatcaggcgattagatttattgcgtttaagagattaaaatggttgacctaaagtttttgtgttttttcttttttttggttgaaaacactaacattttagtttatctcaagccatattgccgaattgataaacagacgtctaagtcaattaaaacttaaacagggatgaatcatgtatctccttttgtttaattatttcttgaactggtgagttgcacaagttcaatcttttaaatcaatatctcatgccaaatataactatatgttactagactctgatttaaaaatatacaatgcagattagaatataaattgttaaaatagtgtatatgttg

SEQ ID NO: 40261 - DNA, 561 bp, Arabidopsis thaliana columbia
ctactcgttattaactaatccgatgtaaacttaaattaaaaactgaaactcattttgtaatattgatgatgagccatatgcaatatatatgcactcttattgtagtgttatggaagaaattggcggttcggaattagaccaaataccggttaatgaacaatgaagccaaatttggtttccttcggtttaaaaattgtcaatctaatttctggggtaaatcttatattttcttgatatatcttaaaaggccacaaaaattataaaccctttgtgttcataaaagcccatcaggataggaacattcaaggaatctgacgatagtaatcgtatacgtcaaggtccaccatacggatgcttttttgctcaatacaaaacatgacacgtaagcgtacaatcagattagaggcagattcacgatacacacgatgtacccttttcactgctctcgtgtatttaagctccaccaattataaaacgccgcgtagatcctaagagaagaagaattcgtcgttacgataactagtgtggacactaagcagacacagaagacttttgtaagaa

SEQ ID NO: 40262 - DNA, 597 bp, Arabidopsis thaliana columbia
taatccgataactttttagacacatctgagtgagtgatcactgtaaaaaaaaatacaaaaaaatcaaaaccatgtgtatatatgctaaactacaaatataaaattaccacacttgtacaatatataataaaaataaacatcataatactaataattacgacactattggtcttggtttggtttatatgcacgactccggctttaaacaataaatccaggagcatgacacttccacgtccttggctagatctaagtttaagtcaacgatgactcatagtggacacgtgtcactcgttcattcgagttatccacgtgacttcttattacagtcttcttgactctttttttttttttttttttttgctgaaaattataaaaacccaaaatccaacaaactttgattacacacacttacatacaacaatggcttcgtcatctacaagtatctctctccttctcttcgtctctttcattcttcttctcgttaactcgcgtgcagagaatgcgtccagtggatcggatctcgacgaagaattggctttcctcgccgcggaggaaccaaggaacaaagccacggcggcggttcgtacacgagga

SEQ ID NO: 40263 - DNA, 707 bp, Arabidopsis thaliana columbia
ctgcaacatagcccttccgtgtatcgaaacgtgacagtcaaaggaaacaaaaaaaagacccacctctttcgccggcaattcagtcctatttcacatcagcgattcagtccattcctcccgccggcgattaactcgagtcctctcacccttggtttagcctctggcgatttaactcgagttatctcactctaatcatcaattgctctcgaacccttctcgccggcgattaactcgagtcctcgcacccttggtttagcctctggcgatttaactcgagtcatctcactctaatcatcaattgctctcgaacccttctgccggcgattaactcgagtcctctcacccttggtttagcctctggcgatttaactcgagtcctctcactctaatcatcaattgctctcggaaccttctcgccggcgattcactagtttccttccgccggcaatttcagtcgactcctcccacctggtgattgcatggttccttgtttgtctcctctattttttttttcttttcggtccatgcatctaccttttcaattttcaattcatgagagatacaattttcaattgaagtttggtttgattttgcttaaatgtgggaaattgataattgaattgtatgtatattcaagagaagtttagaatttgtttcgggtttgtgtcttgttatgattgtggtgttgaaagttgtttgtttaggtg

SEQ ID NO: 40264 - DNA, 589 bp, Arabidopsis thaliana columbia
cccgatagttggaaaatatgttagttaaaacgtgtgaaccccacatgctcccgaacttagtagcttgtctggctccgcgtcgcaaggtcacacgtcctcacccgttatggtgagccaaacccgaccgtctttaccgggtcgtactcggacccgccgcatcccatctgctgcttggtggttggaaaggccgcgactttttttatttgggtttttatatataaatttgaagaccccaaaatattgtatgaacctcaccacatttttattttgtcctcgtccaataatacagatcaaaacgaatacgactagttacttattatattgtgtcatattcaacagttttcattattatttttatattcaaaataagataatcgaccaatttgatttttttttttctgatatgtgatactaatttatgtgaaatatctttttgtgttccaactgaaaataacttgattgtattgacctttatgaatatcatttacacaaaatctttcaacgaattgatcattttaaaattattataaaattaaaatcaacgtgcgctgttggcctagtagtaaatttttcaggtagaagtgttggg

SEQ ID NO: 40265 - DNA, 319 bp, Arabidopsis thaliana columbia
gccttgttcgtagtttctcaaaattacgtatctttttgtgtttattttggtattttccatgtattttagtacattacaaaaatgaacagcataaaagtgagcttatgatttttttttatgtttcatcaaatgaggaaatttgtaggagtcaaaactcaaaatcattcgtgttactttgaaaaattgttattatttactaaaatagcacgttgctaataaaatgttccaagggatatattactgaccagacatacattatacgaacctgcatgcgccacaagagatcgctgcttgctttaacatgatgacgattgtcgta

SEQ ID NO: 40266 - DNA, 482 bp, Arabidopsis thaliana columbia
ttcgtaatcaatgtgatgaaatatcaaagacaaaataaactaatttggaccgattcaaaatgggatgcgaagtgagagctgaggtctcattacgctatattgtcctctcacgtgatcgattttgtattaagtttgcctaatgagcaggcaaattgtcctttttgatgtgtgacactacagtttttagtcaagctaccctatttattttataattgacatctacctattggttctaattttcttttgtagtgcttagtgcatgaatattagctacaccgtttcgtttggctcaattctgaatcaattgtgttgattttgttaacttatttaatgaactcgcaaaaactaaagtctgaaatttcctctgacaataaaaaaaacactacaatagaaaataggtaagtagttgaaaagaaaacaagtaaaaaataaaaaaagttatgttgatgatttttagaatatatattcaatttgggttttat

SEQ ID NO: 40267 - DNA, 115 bp, Arabidopsis thaliana columbia
atttcagaaccccgacatcgggcagcgtctcgccggccgaaagatcgacggtttcggggaagtcttcgtaagcctttggttcctcgccccgaacgaacgtcgagcccaggtagac

SEQ ID NO: 40268 - DNA, 640 bp, Arabidopsis thaliana columbia
agcagaggctatgagagaaagccagtcgtccagagaaacacggaccgcaatatctcgaacaagaaaccttagatattgttcctataccgctacgttcgtgtataacagattgttgacagtgatgatgacttgatacaatgctcatcatatcctgtaaaccagtgaaattccaaaccatgaagcaatttgcagaatctaatagaggatgaatctaatcctcaaaccaacagtgaacacagtgatacagaatctaagtagagaaccaaagcaaaagttcctgataaagtgatttcacagacaattgcgtagtaattgttaagaatatgaatctcgtagcatcataatcaatctcactccttttatattctaagagattcatccagaaatcgctgttctgctaactaagcagcaattatctgaggattcatcgagaagcgactaaacatgaacaagtgagggagataccagtgaagcagagactcaatttaagaatttagcaagaagtagagggagagcgtaatcttaccgccggaagaggtggggaagtgcacggcgacgatgcggaggaggagattaatagatgggggacaaagagatatcacacatatcagtgaatgaccggtgaaggaggaaccaaaat

SEQ ID NO: 40269 - DNA, 512 bp, Arabidopsis thaliana columbia
ttttaaattatctctcctattttcttaatttccacttcttctgagtatataaatttaattcaccctagaaattattgattaaaataaagtttgtatataagaaaagaaacgtatacttttagtggtgatgtatgatgtatgaaacattaaatgtcatctaatttattccttcattagttgaagaatctagttgcagttattgcaacaaaaactagaatagtttgaccacaaaaacacacactagaataatgataatggacgtagacgagcaaaccatgttgagagttgagacttggaaaaaagaaagcgagaaaataaaaagttgcaagaagattaattaaaaaacataaaggagagaaaacagaatgaagtttcaaaatgagtagtttgagattgattttagatttttgttggttttgcagagacttgacaatatgttaagatggcactgatataactttttgtgaaattttatgagacttcccttttaataaatagaatggcggttgatg

SEQ ID NO: 40270 - DNA, 645 bp, Arabidopsis thaliana columbia
gacacgttgaaccaaaggacgaaacattgaatggagaaaagtggagaaaaacggttcgatgatgatgaatgagccatcttcctagaaaaagaaaagaaaaagatatacctaacacacaaaggtcttatgacatcatcacaccaactttgaaaatgaaattaggaacgagagaattggatgttcgtttccaaagatgattaataaatgataacttctttcccctgtttgattattagaacttaagagttatttttggtttttgtcaagtttccctacctctgaatgcttttaagtttcttcttgtagtttcttttgaattttaattgatcctaaagtgttcttttctttttatttaaccataaaagcaaccactctttcaactattaaaaggaaaaggaaaaaagcttacttgataacaattggatatatggaacagtagtgtctttattgctttgttttgtctatataatttgttgtctcattgtctaagctgcatcacaaagtgaaacaagaatgagttagcttgaaccacacgttcatctccgagaaagaacctacttctctcaaatcccaaaagagagaaaaaaagaagtaactgatttggtaagaaaatggaatagtgaagcgaggtctagagggttgtgt

SEQ ID NO: 40271 - DNA, 624 bp, Arabidopsis thaliana columbia
gctacttccgatgaaaaggtactcgagctgtgagtaacttcgtgtctggttgcaaactctctgtgaaatttagtttcttgcagtctcttatgtataaggttttcaatgtggttggagggtggcttccagggaaagattctagagaatgacaagcaatgatgagtagttcatggaggtttggatagctttctgttaagttctccggtaaggaagtgagtccgtcgcagctgtcgatgtggagtgactgcagattctgaggaagctccatgaggtgagatatgtctgtcacttttaaatattccatgtctgtttcatcatcatcatattgtgacggctttattgcttcacttgaccgtggactcggaacagatgacttaatcccatattgatggtactggtagctactacttccaggaagaatagaaccttcatttttgggatctggaacaagtgatgttcttgacatatacggacttaacgtgctaggtatatccgagatatatcctgagtatcttgccgagatcacagcaggttcttcaaattgttgtggtaagctccaagttgagtccatattggcgaaatctctgtttgacggtctttggtaagatgcaacttgatgtgaag

SEQ ID NO: 40272 - DNA, 491 bp, Arabidopsis thaliana columbia
ggagaaggaatgaaaatcaacgccgccgtcttcgagaacagacgaaccgtaatgctcccataacgacctcaaatgggattcaaatcattgaaaatcttccccggaggaggacaaagactatggaattgagcaacaatatgtccttcccacatctcagcagtcttccacaggacagaagccggagctacaaccatgggggttccatcttctaagaaggttgaaggtgtcatctgtttgagcttcctgagagaggctttgaattttgaggcccaaggaagttcaacgaggctcggagtatgaattgacccataatggacccttagaggaagtgggacttggattagtgatcctatcaaacgaagaatttatcagtgtatctacaggcacggaggacgaactctctaactacggagctggtagagaggtaattatcacactctctttaaacacttagaggacacatcgcctggcaaattggaggattgagtaat

SEQ ID NO: 40273 - DNA, 764 bp, Arabidopsis thaliana columbia
tctagaggtagaggatccccggtcagagactgatataatcaacgtggtcgagcaaaggatatggcattcaatggaagaaggccactttgagaacttacccggtaaaggcaaacccttgaacctccatacaaatcctcacgcagacccagcggaggatacattgtatcggattcttaacaagaacgggtttgctcccgaatgggtggagctcaacaaagagataagaaacaaagcaaaagaatggagagtttcactgaagaaagcatggacaatgaaactcgaggaagaccaatcgggatgggaagagagatcagatttgctgaaaaacgaattgaaacaaatcaataacatggcaagtattcaactacaaatcaagattctgtttgcgatatataatggtttgcttatgtggtctcttgtttgttgacaggtattcaggtacaatctgatcgttcctttcggccgtcaaatgtttggactgaagtgggagaaagagattgatcgcttgaaagaataacatcttcagaagccaaaaggttggtcacactactatgttcttgtgtttgtagtatatctattgatagtatacgagtcaatgtggctattggtgcttaggctagatataaaaagaataagaaacaagtgtttgagttgtttcatgtatgttgtaccatcaaatactctcttgaaagataattatagctaagaaagaagtctttagggatcaatcacgttctttaatttgaataattctctaaatgagt

SEQ ID NO: 40274 - DNA, 538 bp, Arabidopsis thaliana columbia
tcaaaactatcgattaaatgcttaataattaatttttaaaaaatgtttttatttgtagaaaatattttttattaatttatagtataatatataataacaactgagtttttattttataaatatctagaatttataataaataaattattaggaatgaccttccaatgctactcatttttaattctaccctttcatgtaattcattttcattactctcttttaatttttaataaccatacatccttatttttttaatgttcaaagttaacaaaataaaattgtgtttttcctaccaacaatatttcgacgataatattatcgccaaaaatagttttgtttgtgtgtacagacggtaatgtttttacatatgatggaggccagatgcacacacttgtgtgcatgcaagaagattttattaataacatgatggagtcggtgggattgactttgtttgggcaaaggatacgggataagcttccctttgagaagtctatagagctgaaccgtcgtatactagagatgatatttcgcgagaatg

SEQ ID NO: 40275 - DNA, 534 bp, Arabidopsis thaliana columbia
gtgtggcaagcttggatcggaagaaaaagaaggtatcgatggggaaggacgcgtttacaagatattcttgcgatccagactatagatatctccacgaacgcgtctctgatctattcgcaaatcagctaaagaaagatcttgagtttttgacatcggacaaaccaaacgaaatctctcttgctgctaaatggtgtccatcgcttgactcttcgtttgacaaagcaactcttctctgcgagacattgctaggaagatctttactcgagaatcattccctgaatacgaaggcgttgtagaagctcactatgcatacagagttcgtgatcggctaaggaaagatgttcttgttcctctgcgtaaaactctgcaactgcctgaagtatatatgggagcgagaaactgggatattcttccgtacaaccgtgtagcatcagtggcgatgaagtcgtacaaggagatattcttgaagcacgacgcagagaggtttcagcaatatcttgacgatgcaaaggcggggaaaacaaggtagctgct

SEQ ID NO: 40276 - DNA, 577 bp, Arabidopsis thaliana columbia
gaataatcactctcctttctttttcctttcaggtaagcagggattcttctgtccattcttcttactggacttgattaaaaggttcttcacacaaaggtgagatggttcttgctataaaagcagatttttctttcttgtgttctcaaagaggtgaaaattctgtcacaagatgaagtttcttcacacaaagtgagaggattcgagatagttaaaaaggaatgaacttaaatgcagagtgagaaagatgtaccatacacagcatgtactaatgtacttagtagggagtgagaacttgtaggtctgatgctcgtcatctcttgtgtgtgagattggtagcagtaaatgaactgagtatctttgtctttaatgctttgtaggtctttaagtcttcaagttccttctttccatctagttgggatcaaaagtacacggagaagtaaggtgagaggcgtctcctacgccgggctcacttactaaggagcccggagaaacaaaccagggaaagttcacggcgtttctattttaggtaaaaagtaggggaactgctaaaacttctgtttttgggttagaaagtggg

SEQ ID NO: 40277 - DNA, 546 bp, Arabidopsis thaliana columbia
aatccttacattattatcaaatcaattgataatctgatccatgtaacttgcattattgtgcactgagagattttctaagatgacccaacgttcattattttatgaaagggtaacatgatttagttatgagggtaggttttagtaatatctgtctttattttaacaaattataaatcatcttgtatttagaaagctattaagaaaaaacttgtttgcatcgattgtgtttttattgatttatcgatttatcgtgttagatataaataatgttgagtaggtagcagttatctgtcagatttaatatttactattgttttgttgcaataatgtaacaactatttattgacccattaaaactctactattaaatagaaagtcttttgcaatgtaaatcgtgcttcgttgatgttggcacgttatcagaatcaaatgatgaatagtttagtgattaccatgtcagatctaaactttcttttactaatataatagaaaaacatataattagccattaaatgagtactacataaaataactagtattgttttt

SEQ ID NO: 40278 - DNA, 870 bp, Arabidopsis thaliana columbia
gtgtgtttaaatacttacaatgttctatttattaatcatatatttaatgtgtgtttaaatacataattggtctgtatgcatttaccaaaaaaaataaaacttataagttttaacacaaaaatcataaatttaatttaaagtaattacatgtaaaaataatatgtgttaaatatgtttttaaaagggaacgtatatttttatgtttaatatgtatttaaatcataacttacatgttttttttaacataataaccatagcttttaatgtttacttgtatccataatttttatatatgcattgatatatttcaaatgcatcatcatcaaaactctatcttagtctttttataataaataacaattgaccattcatgatattgtcaaatccaataaaatttatggtgaaatgatcaaatgaaaagaaataaaattatagggttattttcaaaatgggcacattttttaaaaaaatctttgatattgggcacttcccgatcaaaatgggcacattttaaaaaaaatctttgatattgggcacttcccgagtgtacttcgaaaaatggaactttgatcccttgcaattgacgcttttgcccctagcaaagtgatgagacattgacgttttccttagccgtctttgtaactctgacgactttttttctccgaatttcttcatctccatcttccttcatgattccttttttatttttcgatttttctacaagattaaatcgtttttaatcagagaaaagtaaaccctaagatagtatagaaggacccaagtaaaatgttttacaaattttgtgactgatttgttctatttttgtgatattgaaaagaagaagaagatgaagctttgaaggagaaagag

SEQ ID NO: 40279 - DNA, 354 bp, Arabidopsis thaliana columbia
tctacattcaaggaaaatcatacgctccatggactagcaatgaggcagcctcagattccagagagagtagaagatcctgtttttgttcatgaggatacttacatgagaagacagttcacttaaaaacagacaaagcttgcttgtaaagcacgttaagtttagtagaagatttagacaaaatgactaacggatatgtgtttgattaagagtattgaaactttgtaatgattgttattcttgattgaagtagaaatctttgagaaccccaaaaacgtcacttagttttgcagtgtacttctctgaatctttcttattgattatgcaagtctgaagtggttgtaggtaagagaagtg

SEQ ID NO: 40280 - DNA, 431 bp, Arabidopsis thaliana columbia
cctaaaaaaataggatatccatgaaaaatgcctataaattagttagaaactaaaaaaaaaaattgtttttgatggatcacatatttttcctattatttcctatttttagttaattttgattagtatatttcaaaatatgaaaatattagataatattaacatatatatattttaaaaaaagttatcactgatggtggccagatagaaaaacaaccaaaacaaccaaacaattcacataatatgcttttatacccaaacttataacttataaggttggttaagttggcaacaaataaattcatcaagttggcttaaagcgtttgaaaattcactgaaaaaataaaggcatgggcaatcaaagacaaatataaaagttttgttaaacaatcaagaccgatcgaaaaccccggataaattaagtgcaattacaa

SEQ ID NO: 40281 - DNA, 598 bp, Arabidopsis thaliana columbia
taaaacaagcacattaactagacattatttataaccaggttaggaaaatagcagatcgtttgtgtcctaagaaaacatggtaagatatgataagaaaacaagtattctaagaaattaatttaatatgataagaaaataagtattctaaaaaaataatatgataagaaaacatgtattctaagaaacaaatttaattagtctaattgtctaaaatatcatttctagatttttgtaactcttaagttcacttaactacttgactcattttctcaggtgactcactgcaatgaatcactaacacgtggagactgcaagaaactcatacatgtgccatagacctataggtatgttttgcgtaaggtatatatgttcttcaagtgaatacattgctacagaaagttatgatactttttctccataggcttaatcatttggtctttttgaaacatactcatattcaggattcatctaataagaaaccaatcagcaaaaagtacatcaaccaaaaagttgtaatactacaagaaaacattgaagaaacagagtgtctgaagtctacaggcgtgtatgaacaacgcagagcagacagaggacagag

SEQ ID NO: 40282 - DNA, 570 bp, Arabidopsis thaliana columbia
ggtaccgagctcgatatacgttactaaaaaagatgaatactataatcatcaattataaatttgaatttaaattgtttgtgtaagtgaattcgactataatcttcattacttactgccaaaagatgtttctccaaaatattaaattttcaagtctaataagagtacaaaatttacaacatccaaaaaattaatcttattgaaacagagagataggaatcttagattccttaccagaggatctattggcgataatactcgccaaattaccaataaagattttcacaactttcaaacttgtttgcaaagcaattggaatcgatcgtggattttccatatgcaccaaaacttacatacttcattatggtcgctcatgtttggggaggaataggagaagaagtcatagctcactacagatttaacaattgaacataatctatgtgaccaatgttgatagaagtctagggcataagctatgtgtttggaggctagagagcgaaatttaaatctaaaacctaagggcgcttgctaaatggtcctaggcaacaatgtcaaaaacttgttatggataaa

SEQ ID NO: 40283 - DNA, 529 bp, Arabidopsis thaliana columbia
tttttctttttttttatcttgactgactaatagttgttatatagtccctttggctttttttttttttttaagttaattttacaaagaacttttttaacattgctttagtgattaaaatagtattctttgggattatttattttgttttgtttcattcattgatccgtttggttttgtgtggactgtggagtgtatgggtttgtcggcaatactttgattggagctagataaatgaaataagaaaatagacaagcaatatattgtttttagtatatcgcagatcgtgaggttgaattaagatgatcgaatgacgacaagaaaagaaaaagggcaaatcatatctatatttgtttattttttccttttataagtgatagataaaaatgtcattgttgatgaagctgaattaatatgatgtatactgatagttgacttttgccagaagaaatagacgaataataagctataactataagtgtcattcaattaccgaagatggagaggaggaagtacgctcactgtgaaatgg

SEQ ID NO: 40284 - DNA, 431 bp, Arabidopsis thaliana columbia
caaactcttccggaaaactcctcttcataaagacagaaatcataacagttgacaacaacaaacgatactgacattagaagaaggaaacatgagactaaaagctaaaatacaatcagcagaacacgagcttgtcaagcagaacaagaagcaggaatcattgtgccattaaaatctcctcaaatgtttcttgaaagatcaaaagctttttcgaacaagaacaacaaacgaacaatagatctttagagcaaacaaagaagttcaatggaaataacagtgagtacaaaatcaaaggagctacattttcgaaagattagaaaagaagagagactaattttgttttaccatggatttagatttccagttttgtcctggagacagagacttccaaaagcaaggcttgctcacatttccttgtatcttatcagtagcat

SEQ ID NO: 40285 - DNA, 1041 bp, Arabidopsis thaliana columbia
tttttccctcacgtacatagacttttctcctatgctgaatatattcaataatttgtaaaaccgatctccttatactaccactaggccaccatccctttggtagatatctaataatttgttagagttagttctaaacttgtaggcaatgttacgaggaattggttgattcggttcacaatttggatacaaattcgataaaaatatatattctcacacatacacagaatcatttgccactaatttttgtggactggcgaacattaaagccacttaaattttttatattagcagcattgtcgtcttgatggtttattgtaggagttcaaaattttgtaagtataaactctaaagtgaatgtggtagccagcttaaaagtttttatgagactttcccaaagaaaaatcaagattattatcattaatacattaccattattggtcctctttccacatctctacccaattctcctttgcctctttgagtccaaaaagagagttagtcttggccgggtccaggtttgtggacaagcttccgtacgcaatcccaagagccgacgaaccaaaggtcacgagtgtggtcaagtatggaacccacaaaggcacgtcccagacgtttctatccttcaaaacttcgagtactttcaagatcgccactcccaagcccagtggtgttcccacagacaccacaatcctccccatcatcctctcgaacacttcttgaggtatcgggggatcgtcttccgggtccgggtctggccggccgggtttttcagaggttctagaagattgaaaccctttaggtccagcgtggagcttggattcccatcttggtttgttgttaggatatagggtttttggattgtgagatttggttttgacggttgttcttgagagagatgataatggtagtaaacggtgtgagcacaagacagctctcatttctatctctccttctaatgtctttctttatttatcttatctacatgtattacatggttttcgctttagggataatgcatatttcgccttcactttgggatat

SEQ ID NO: 40286 - DNA, 551 bp, Arabidopsis thaliana columbia
  unsure (1)..(551): unsure at all n locations
ggataatacatgtcatcaaacatacaaaatacaacattttttgtgatagatggtgtaagattaattcaagcattaattatagataaaaccattttagtatatttagaaatttagacaatgcaaaaagtctttacgtcgtttgggtgttctagagtttgacgtagagtacttcatttctgtaagaagaaagaagtatacttatgatatgtggtggttttttgttcctaactagtatccgctgattaatggtaattctcgctactcgatgctatttacttatctgttgagtgatcctaattctgccaaactagtatggagtgataaaaattctatatattaaacgatcttttttgttctatttggaggttatatatatgctgtgttagacaaacgttataggcctgttacatatggtaatattgtagcacctcaatacctcattgaccggtattacgcaaaccanattatggtttggactttggatcgactactattgttggtcatatataattgtatcaatagtttaaagtaatatttggtcattaatactg

SEQ ID NO: 40287 - DNA, 506 bp, Arabidopsis thaliana columbia
gttcccacacataatgccacgcaatatttatacagagtggactgatcaagagattagttaccaaaataaataagaaattctgacttaatcaatcatcaaatttttgtatcaacccctaacaatataccaatattcaatccaaatcagaacaattaaaaatttgtaactaaaaaaatgaaaatgaaactatggttgtaacgaaaaaaatcacacaagaattaatagtcgagtattagatttttaaagataaatcttctttcttgatgacttggtcgtgatcggtcaacaaaagcggttttttaccggtcaacggactcaagatctcttcgtcgacgattggattgtgatgaaggctgagttcaggtaacgccggtaggtttagatcgatgaatccacggtggctcctttcttccgataccgtgctcgacacgcttccactgtgactgattgatttgcttcctctcctcatccgcgccgaggttgcttcgtagtgacacgtttgtgac

SEQ ID NO: 40288 - DNA, 426 bp, Arabidopsis thaliana columbia
accttcagttttacattttttctagttataaaacttcctcaaagaattgttaagatggcacatagaccgtcattagaaaaactttctaagatgagcttgaagctcattttaatgcgaacccaataatgcatttctggtcttcaaatattttgttgaagcccacacgttgtcgctgagatttatggaataatttatgtaaaaagaacaggtaaacccttaactttcatgtttaaaacaaccgaatacagatattaagtgacattgtttttagtttgtaaagttaagtgacatttacaccaactaatcacagtgaaacaacttatgaacgaacgaatgaacaaaccaattgtatacatataaaatagaaatcataaaagcatattttatgggaagtcttattggaacttttttttttttttgctaaga

SEQ ID NO: 40289 - DNA, 496 bp, Arabidopsis thaliana columbia
ctctagtggattccgagttcattttgcttggaatctatgagtgtatgtctgctttgatatggaaaggacttaaaaaccggcgttggctatctcatgaccagaacatatacattccttactacgcggctcacattatcgggtcttacactatgaacatggaagagtttgctgagagagctgtagaagctggtgtgattcctccacttgttgagcttttaagaggtaggcttacttgggttgaacagagagtggcggttcgtgctttagggcatttagctacttacccgagtacttttcccgctgttgcgagtcacggagagatcctcgagcttgctatacagttggcaatgagttcgttggagatagtttattctcatttttaccagtatccggatcgaaggttgagttaccattgtgatctgcttacacgaggcatgggaggtgtagagatggagtcgagaaaagcagaggaatgggcgagccagttgcagtgttg

SEQ ID NO: 40290 - DNA, 511 bp, Arabidopsis thaliana columbia
tggtgttaatgaaagaatattttttcaataaaaatatctaactaatctttttcttagtttgttgatttgttctattatgtggttcgatggttgagcaatatgactaatcttagggtagaacaagctatttaataagaagtttctcgcaaattcaccatcagataaatcattaaactactaaattgagtagctcgaatgatttatttgcacctagttgaaattcaatctccaatcttgtagttgtaacatgctttccaactgcgccgcctcaggctaggagcttgatcttcaaaattatattcaatggaagtggaataaacctaactaactgttgaaatttgatgatagaaagcacaattggttgacccaaaacaaaaagaacacaagtgatagatacatttgatgttgtgttttttccttgtggaacacatcattcctagttttttttttatgaccgagagatctcgaaccgaaccccaaaccaattttggagcaagtggaacatcgaata

SEQ ID NO: 40291 - DNA, 472 bp, Arabidopsis thaliana columbia
acacggctcaatatgaaagtttctcagcgtaaaaagctgaatgtctttctccaagtccatatttgaatagtcttttctgcccttttagacttaatttgttaatttttgagtgatcttaacgaataccatgtactattatacacaaaaaatgtgaaatgtattttactacatagttttttttaatactctttatcttcaatttaactgatattaaggattttcccaaaatttatccaattttaagaaagtatataaaatattttaatatatcttagaacaccatttattaacatcaaagtctctataatagaaatgctcattaaaaccaaaataaaaatgaaatgtttgtaaatcacaaatgcacttaaacaatatctagcaatagcatacattataaaataattctaacattacatagcccaaatgcaaatatctgtttggcaacaaaaaccttaaaaagtctcttgttggc

SEQ ID NO: 40292 - DNA, 378 bp, Arabidopsis thaliana columbia
ttcatatggaaacacatatgggaaaaagaaaaaaaaattatcacacatctgatttaacgatattttaaattttattttagtacacaaatactgaaatacaaccactttttgtctgtcaaatatcctttgttatacagcatataaaattttctatacgtagatattcctttttttcttagtcaaatatatatatgagggggaaaaaatcacattattccatacttgcgaggttttattttgcaaacaacttaatttgttttcaacattcgttgactaattaacttatattaggaatatataatccaaaatttattattttcccgtgggttttactatgtcggagagtggatctgagaaaaagataacccaaaatatatt

SEQ ID NO: 40293 - DNA, 1304 bp, Arabidopsis thaliana columbia
ctcttcctgccacgtaggactcctctaatctcctccatcttcccaatccgaacctaaacccgaaccaactcttcacagcaaaacctgtacattcatttatatagaagaatcagagagagaaatgagctacgagtgacacttttacatagcgtgaaattcaagctccctatttttctttttaaaatctcggaaacaaaaattggaataacgaatcatctcttttttttttcccttaagaaagcgaaaggagacaaaagtttatcttaccaaatgacgtagaaacagcttcgacacaagactaatggtttgattcgaatcttcaatttattcttcagctaaacttttttttgtcacgttcgtctttttcaatattctccatcgcctcctggatttgactggctttatgaaaaatcccagtccgccattgacgaggttctggagcttttctttgactctctctcttcctctttcggatttagctggcgcattaataaacatggaccactggatcaaaattgcctttttgaagtaaacggttgtgatttgtccacgttggtctgtcgtggtatcgacggttaagtggtggggacgggctgaaccagtgactgtcgtgcgggcagtgcactctttgtgtgtcccttttacctgttacagccggttccgtaaggattacgggttatgctgatgtggcggaagtatttattcccagtattaattagcatcagagtatacgtgtatgtcatctaatgcgtccattagatccaacggtttagagttcagcttttaaaagcccaaaagaatgatgagaagttgagacaattatagtcaattttttaaaagcccatgacttaatgggcctactaattgatgggccaagtattagaaatccgcggaggtagaaccagcttcgcatatattaagagtcactgccttcactaggtttagggttttctcagccgcttaagagcttatcatctttgtgcttcctgcaaatagctctttgctgttgatctttctcctccatcaacaaacatggggtacgtttctcctctattagatctatccttcgtgttcctatctcatttctctgtttagcgttttatttatctgattcacttgctgtttccatgaattatgaaggattctatagagtctgctgtgttttttttttgtttgaaattgttacatgttttcgacttttgattgtggtttttgattggaactgattctatagcaaatgcgtcttcatttctggatatgtttgctaaatgttttttatgtatagatccacaatagattgtgta

SEQ ID NO: 40294 - DNA, 554 bp, Arabidopsis thaliana columbia
tttcctttgattgaaattgaattatttccgtgttttgaaattttcatttcgtcaagttttcatagacatggaagtatggaaccaactttatggttcactcaagcaaaaatgaatagctcaaaattatagagttagcctataaacaccataaatatcgaattcttcagaacttccaaagataagtctagattttaatatctctctggttatttttctttataagaaaaaaaattctcaaccttatcctaaacaatccaatttgtcgctgtggaaacctacaccagatagagatggtcatggttgagtgtaatgattgtcatacattttaggaaaggaaaaaagataaattgtgtgatgggcaaaatttctttgtaaagaagtcgaataaaactttagaaagctaaaatgtactaataacaagaaaagaaaaagatcatcattatcactcttaatcaaactacaaattaagcaagcatttcttgagttttgaaacaaaacactgttttacgtgttcacagcaacatcaagaacaacaacaacaacaacaacaacat

SEQ ID NO: 40295 - DNA, 917 bp, Arabidopsis thaliana
  unsure (1)..(917): unsure at all n locations
gtgttgcctaagctcaacatagcgttacggcaacaaccgccagtgaatcctggaatctcagatcttactctagtcgttcagttgttatcaacatttccttgggagcaaccaggtgcaataatattgttaaaattttatgtagttttgtaacatttctcgctaagttagtgacactattaatttcgtgaaattgttgtgcatgtatgtttcgcaccattaacatgactgtgagggaaacctcaagattatggttgttcattggcagattcctcctggatcctgttgtttggagagatgggaatattattcttggaattttgaaccgcactatccacagaccaaggtcacagcatccaatggctgtacattataagttgcatcgttacacattggtcaacactccagaaagagcactctatatcctatcttatgaaaggcctgcaggcgttgttgaaactgaggctgtatttggggctggccgacgccgacgccgagagggtgctagccgtggccgaggccgaggacgagctgctccaggccgtggccgaggcgagaacaacctagtcatgaaggccttgtggatgaagttgaaggtgaaggctttggtgctgatgctggcagaggacgagttgaagatgatgatgctgtgggatttgaactacttgatctgagtcaaccaaatttcaataacctcagccaagaactgcttcaactgcatctaatggctgactctaaagatatctctctaaaggtaaaagtttctaactgtcacctagtatacttgtttctacgtgcacatttattgcattgtactcattgtttatggtcatctttgtgaattggtagggttggctaagtgtagctatttcaagtggaatggaactttgcaatacgaagaattanagctcagtatgaga

SEQ ID NO: 40296 - DNA, 968 bp, Arabidopsis thaliana columbia
gattagttgggaacaaagcacggctaaatcgtagaccattgggaaaataaaaatctcaaagcgtagacaagaactagaaaaaaataacattcatttaattcatatcaaacaacatatgaacgtttataataacattaatgtatatggagtttaaacttataaatttaaacctatatgtacttagaaattgaaaaatacactttgagaaaataaaattgataacgtcgggatttcaaaaaaaaaagatcggaatatttacgggccgggctcagatacatacgggttttgtgggcttcagaccggaccaggctcgattgacaatacccttacttcgaacatttgatgttgcaatcatactttaaccatataacacacaatcgcattgttggttgcagtaacctccccctggaaactgcactttacaatcactatccttcttacaacattggaggtggtgaaccacggaaccacactaccttcgcagccatcttggttcattatgcatacaatagttcgtatataatcaaagtttagcacatatcgacatctcatcaatgttgtcgcgatcacgtgagttagcaactttgtaaaccctactttatataataagataataatctatgctatttctatggtgtaacacttataagaatcttcttctcttagatacttcttgttacgtgtggatgaccatggttaaattaacatctattttcatcagctttttctgttttggtaaatcaagaaagacgattttaaggtttgttttctttctctaaatttgttgtatgattgattatgaaacagaaaaccgtaacgtttcttcgtatgttttctacgactacagtcttcggacagagttaaattaaaggaatagagtcttgcttaggaaaaaaagaatttcttttcaagattcccagttgggaatattagcagtagcttcgtttatcattgtcaccaatgtcacc

SEQ ID NO: 40297 - DNA, 667 bp, Arabidopsis thaliana columbia
taattttacatatataactcaccaatattaaaatcaatatatatggtaatttattttctaaacaatttttgttttatttcataagagtctgttttcgtttaatttaataagaggcttagacttttgtatttatatattaattattacatgcattgaaattttgcagaatcttacactctaaaagtatgatatatatttttatttttcaataagtgttaaaatgctaaacaacaccacagatgttcgtgttatcgatttgtctccaaaacttcctgttatctataaagttggctcacaaaatcatacacctatgcatcaagaacgtaccacaggtacgaaatgccataaattataaacttttgacgcttacattggaaacaagacagaaaacaatactattattcaactcacaaaaccttaactagatgtctgaaagctaaaacatgttgcattgatcagtgacaagagactatttcatttagtaatgataaattgataaactatgcttattctttagtctttacaaccaagttgtctgacttttaaattgttaattaaccatcccaaacattatcgaaacccggaaagataaaaacatttaaaaaaaatgctctcatagtttcatgatactaaattcaactccctcgataatatttttccccgtcat

SEQ ID NO: 40298 - DNA, 776 bp, Arabidopsis thaliana columbia
agtgtgctctaaagagcactgctaaatcaatgaaaaaactaagttaaaactttaaattgcttcaacgttagttggttttttgtaagttcttcttatttttttcttgtttatgttagatatgatttttcatcaataaaagtagacgttaaaaaaaaaaaattacaaatcatttatataaaattgttgcattttcgaaagaatttttttatagtttccatttgatttttgtttctagaagtgtaataagaaaataaatccacttttaagttttgatgaattggataaccggtttgaacgaaacctggttttgatgaaatttttcccgacactgtaacacgataattagatttgttgagttataacattacgtgtcgaattttaattggatgtcctgcgtggccgtcttattagtcacatcaccgcagctaataacactcgacgagcgacctcatcgtctacatcgccgtcgcctgttaccgtccggtgctattctccttcacaatctcacatttttcgtaccggttagaagatgagaatcacgcagatcttgttatgtctggtaatagtggcattgtcttcaagctcccatgtctggtccgatcagatcttcccagctcatctaggtctatatcatttcctctcttctcataattttccgatcaatttcgagttttgtcttgattcaatgttttatgtatagttggaacattcagcagaaacaatcgtgaaccaaagtacaagattgagttccttcctgaaggcgtgcgtcgacctgc

SEQ ID NO: 40299 - DNA, 721 bp, Arabidopsis thaliana columbia
cacatgcgagctttcaaaggtaagtgattaatgataagattatagttaacaaaatctttaatcattttcacttaatctgcgtaccatttaaaaacaaaaatatacaactgtttatgttgtatctgttctgaatcatattatctgtgatattttaatacagtttataaagagatttgtttctcttctaagagaaaatttatatacacatattaatcaaatcacatgagtaaattaaaatcccccctgattcgtggtttgtccaggttattttttcgaccaagtttagttttattttggaagaaaattttacaaattcaattattcaaaagcacatggtttggtatcaaagactataatatatataactagcccaacaatgttggagaactaattatgggattcaaaatcctcaaacctcttgacaagaatccacaaaggaaactgttactccaagtctaatcttcttggagctggcagtggcaacaaatgaagttctagccatgcttggctaagttttctcaaaggtaattaacaaagtgctcactcaaggttcgaaatttgggtaatggtaaacaagttcacgtatggagagataacttgttacatacaaataccatttacgcatggtagaaacggtttactaattttgattattctaaccaacaatcaaagatcagtatatctttactatatacagtgttagtattattagaaatatatg

SEQ ID NO: 40300 - DNA, 948 bp, Arabidopsis thaliana columbia
gtgttgttggactgacttaggtgaattgtgttactaagtatccacttcattccttttttgttcattagttgggatttgttggcacagaccaactccaaataatttgatgctaattgtgcatgtctgtcatagttgatattctttttgttccattttatgccattagtcatgcatcttgcggtaatgaatcagaagctgggaaatctatttgacgctgtgttgttgtgatgtcttacctgttatttatttgctttcacatgcccttccttagtcatggtatttttatgttcaatccttaatatgtcaattcttttactgtcattctttcttcagtaatttgtaaatgattttttttgttgagatttatataacgactatgatttgtttgttggtgattcgcagaaggatgatcccaagggaaagggagttttgttggatggggatgacctagataatcttgtacaggattcctcagtacaggggaaggattatcaggaaaagttggatgagatgtaagaagagtaattgagatattgattgaggatgtttatttgattgaagagtaatttcgtgttttcctgtcttggtgtaatataggttggcggcatcccttgcagctgaagaagaacgaaactttactagcaaagcatcgacttcagctgcagcaatcccgtcagaggaggatgaggaagaagacagcgacggagatgaggaaattttattggtaatatgtggtcttcgtactacatctttctcttgttttatttattgttgcttaagttacagatattcaggggatataaattggttatgttgaagatactttagttaagcaatcaacaccacttgtcaacttgtctgctcctctttctgcaaagggaaaaattgcttattctggatgaaatctcatttgcttagtaaagaacatgataatgctttggaatatgt

SEQ ID NO: 40301 - DNA, 1067 bp, Arabidopsis thaliana columbia
tgcttctagatattaattacataagagttcaacaggagataagtcccctaaacttgaaagacttgcaatagaaatgctaaggaataccacctgtgtgattgcaccaaagcttcctagtgtaatgcttcctagtgccctaattcctgcaaataaacaagtcatagatataactctctaaacgaagcactgagagcaaaataagaaaatcagatatcaccaatacatgaaagttaatcattccaccaagtaagcatccctgcttggtatgaatttgaaagcaaacatgtatccactctataaacgaagataaataaaatagacgaagacaaacctaaaaaaaaactagaaattacagctcatttgccattataagccaaacaaaggaggatacaattttccctcaaattcattgtcaaagaatgtggaagttaaaatttgggaaggggcttgaaatcaaagggtccagctactgccactcacggcattgaccacagctccagctacttccgggtaaggctgaccatggagaacagtgagaatgtataagcaatccacaaaccgtgcacaaaagatcaggcgctggatccatttgcaaacatctctgacatggacccatatcatcttcacactcttctttttctgttggttcgaactgagggtttcctgaaacaaccatatcaccattttcctggtactgaccaccaccactatcatcggctgtcagtagctcggtcaacgagaaataagtttgcggttcaaattccatgtcctcgtagtcgaaaagtagctcaccagacaaatcccattctgttagaacaggtaaagcttgctcctctgcctcgggtttcacaataggatgcagttcaggataggctgcatcagaatcttctcgtttcacttgccttctaactggtagcttttggggtccaggcgcaaaagcagtggtgctccattcaagatcgaaactactgggtgtgatttgtttgactttggaaactgataccaggagaggatcatcttctggaataaatacatcgtcaggaggatataaaggagtggcaggtaac

SEQ ID NO: 40302 - DNA, 553 bp, Arabidopsis thaliana columbia
tcaaatgagttatactactatcaagtgattcatcgatctttgaactagatttggagcacatatgacgcaaaggagggtttggattcttacatatgttatacactatacagtatagaataacgcgtccactgcaaccgtttgtggtcttcacttcccatctcgacgcatggtatttagttctgtctgacggttttgttatataattttaggaagctggaaatacttgtttacttatatcatcatgcaaagcatcacgagatctttctctataagtagtcttcactcatacatatctgaaagttactttttagtaggtaatgcataatgaaactattacatcacgttactcacgtaagcttaacgatgaaatttgtcaggagagttatagaaaatatattaatgtttggttacgttacataagtagccaaaaaaagtagttactttaattaaaaaactcttcaaataccactatttaacaatcaccttcagtatctcactcacaaaatgtaatgttcttttgcaaaccatgaaccatcacacttgacgttgtgag

SEQ ID NO: 40303 - DNA, 616 bp, Arabidopsis thaliana columbia
actattctttcagcctcagccattcttttcgttttgcgaacatccttactacttcagcctttatctgatcgctgccaacgttgtcttcgggtatttttttctacgtgcagccagacgtgataagaacgaaaccgacgacgacaatccctacgccatgcttcctgatttcccgaggaacccaccaccgccggcgctccatcaccattcgatgtccgcatggtttctatggggggttcgttccgttgcagtttatcttctgaagacgcactccggtgaatcggacctgttcgctacgggagcgcttctctttttccacgcgtactgcatcactctgcttaaactgaatgttagtgacttcggcgtttccggcgctttcatgtcgctcgcctcagcgttctccgagactttaatgaaaagtccacactttaaactcttgaactcattaatatgtttttatggtaattatttaagaaaatttttatagcaaaacaaactaaatatgtataaatgaaaataagaaaaaggaaaatgtaagttttgtctttatttgattacataacaaaacaagagaaagttataaaagttatttacaaatgggaatttaatgaaaaaaacc

SEQ ID NO: 40304 - DNA, 681 bp, Arabidopsis thaliana columbia
gattcacatagtcaactcttctaaccattaaatcaattatatccattcttacacccaatttcccgggcaagaatctctctctttccatgtataaaatatatatacacatacacatatttgcactatacatcgtctccataactcacgaatcttctctctttctcctctctcaaacgaacatcaccatgaatcaagaatacgataacataactccaataccaaaagcttcattattgttaatggagaatgatctatgcaagagagaatcagagatctcaagaagctcatcggtgggagtttcttctagattgttctattactatcatcatcgtagtctcaatgaaggagttccttttaagtgggagatgcagccgggaacaccgatcaaccctccgccggaagaaaacgttcgtccgattactcctcctccggcgtttctcagccttggtttccctgaaccctcagtctcagtcgtcggaaattctaataaacattctctatttccggcgaatattaagctttggagatggaagaatcttcgaaagagatatttctctagatggtcgagccaaagcatgcttaataaagggactaatttaaaacgttacgttatctattggagattcacagatagatagagaggcaagcttacctataatagtgggatgataattagatttg

SEQ ID NO: 40305 - DNA, 807 bp, Arabidopsis thaliana columbia
ccttaagctttgatgtcacccagcaaagttcagcaaattgaggatactgtagtatttgataaccaaatgtggagacagctaactgcaggcttgattttggtttcacattgatgttgataggtaatggtggaacttttaaagaaccatcatcaagacgttttgatttaacaactgcttcttcccctgctctgtgatcagtattattctgaggagctgcatctctgcaaccctggtcaagatcctctcctttgtatttcttctttaagccacagtgagtatgggatccctgatgcaccaaatgaagaaatacttggattgcccgccttaacaactcagtagcagacaggtcaatggctatatcctggtcagaactttcaacaacttgtacattgaattgtggaacagcctcagacatagttggctgacactcctttgataggtcagtcttaaagaactgttgtatcttaggaggcaggagtttgtagggcatgccagaagtagcctatcaccaaaaaataatcaattttagtctcaagtgttgagtcttctcagagactgctaatcaacaaaaagggaacacaaagatttcaagatgtatagtacagaaaactaagccttacattacccttcagaaattacaaaaaaaaataaaatcaaagaacataagactaaccaaaaaataactacaataacaagaagtccagacacttacagcccattattaactgccgaaacaaggaaaatatattggagagaacaatattaaggaaataacaagttaagcataccagaatcatcatctttgtg

SEQ ID NO: 40306 - DNA, 605 bp, Arabidopsis thaliana columbia
atgtcttctcactgtaccccatatttccagctatgtgatctctttcgtaagttataaaacatttcataaatcaaatcagagattcagtttcgttatctttttaaacgtgggcataattgggagaagaatagaatcttaattcctaatttggtagattcagaaggtaaagtagggagaatatttaaacaaaaagaaaaggatattacttgattccaagttcaatcggatggggcaatcaaatagctaaaagttaccccacacacagatatgaaattatatatacaagattttaaaagttaccatcaaagtggctgtagtttagtggttagaattccacgttgtggccgtggagacctgggctcgaatcccagcagccacactttttacccctttattctttttcactcattttctcataattgggcttccgattatttcacatcctttttatgtaaaacggacatttccttgttttctccccaattgtcaaatgggcttttggaatcatctaagtataaaatactctcctcctcacatagagtaagtgaatctacaaaatattccagcaaacggctattgtaaaaccaaaaggcctaaaaaaggga

SEQ ID NO: 40307 - DNA, 661 bp, Arabidopsis thaliana columbia
atccccccagagagaaaatacttaggcccatcagtgtcatttatcttaaggggctttagcagaaagctaatcacatgcccatgtaaaataaaaatgaaaaaataaccaaaacaagtgtggctgctgggattcgagcccaggtctccacggccacaacgtggaattcttaccactaaactacagccacttttgttggcagtattcgaagaatcaaatacataaacagtttaaattattttaatagagcaacaattgtttaggtcttttttgacgtcagacgttgtaaaatagcggaaatgaatatggcttttggggaaaggaaatggcgaagaagagacactcccaagcatgtcaaaataaaatgacaaaaaaatatggaacgcaccatgcgttacgcatgtattaaagtcaaagaagacgacaagctgtgtttttttttctttagctggttgagtattaggacatagatgagttagatcacgcctgttaagaatgttggaagtgggtgactcaagtatggtagttgactagttgtgttagattatttaattaagaacttgtaaccaaaagaaccttttcctgatagaaaccaaatccaaaactgaatcaaaaatacaaaccttatactcatgtgtacagctactgttttaaagaaaatata

SEQ ID NO: 40308 - DNA, 546 bp, Arabidopsis thaliana columbia
aggatcccctgttattccgagaattagcaaaccgtaacgaagatgttctaactaatctcgtctagcaaagtccttaattaatgaacagttgcaaatagatttctcctttatgctacacaaaattggttttcttctgaaaaaaagtgtataccagataaaattactatgtttaaaaccgattcaggggatgaaaaatacaaaataagcattcggtgaaagaacattaaaaagattcgtttatgagttttagctcaaacatggccacgagcctactaagccaaactttccaaatatagaaagtatccatggatttgatataatctatcaaaaaaaaatatcggaaggtggagttcacgcgcttaaatccagcttatagggacgggacacattacgcttacgagaacggcccaatacaaaggctcattatttaggcccattattaaaatgtaaacacaatgaacaacagcccaataagatccatgacaaagaccccacaaagatttagatttcaattagtacagttagcgatcgtagcgccgggctgag

SEQ ID NO: 40309 - DNA, 550 bp, Arabidopsis thaliana columbia
tctttcaatagcattaaaagttatgtgtatcctcagattagatcttgctgactcgcaagtttttggattatttagcggtttaataagaattatatcttccttgaaattgtgcctaggtagtggaatcgttgttagcctactgtagctcagataggtgatggatcatttccgttcaattgaataatttgactatttaaggtttgcacttagttttgtctacagaatcaattcatcctttttcacagtcaagatattattctcattatcactattgtagacttcttggacttccatacattcatcagtcaacttttcgatggtgcgtttttatcacagtggcacaattatttaagaggctccatctccactgcaccactgagaagtttcgtgtggacatgtctaagcttagaattggtttggttgaaaactgaggagatggaagtgactcgtggtttctcttttttggacaagtttcttcgaaaggtctgttgatttcatttgtctcttgtgaactttaatttcgtttttttttccttaggatgcaatgata

SEQ ID NO: 40310 - DNA, 547 bp, Arabidopsis thaliana
tttttttgttctcatatgttgaaattttgttattgtcatcttcactttttgattgatcgatagaaaaataagtattcaattgatcaattctttttatatatatacatgttttataaaccatggatctccatctaaagttttgttttactgtgtttcttattctgattcttgtagaataatatatcaacacacatagtatactcttcttggaaggcaaggaacatgaatcaagaagctgcgagtaaccttggacttgatctgaaactaaatatttcaccgtcgttggattcatctttgctcactgagagttcatcgtcatcgttatgctcggaggaagctgagggtggaggaggagaggctaaatcaatggtggtcgttggctgccctaattgcatcatgtacatcatcacttctttagagaatgaccctagatgccctagatgcaacagccatgttttgcttgattttctcacaggaaaccatagcaagaagagcactagttaaaaaaaaaaataaaaaaaaaatacataatattaaattaaggatg

SEQ ID NO: 40311 - DNA, 529 bp, Arabidopsis thaliana columbia
taattcttcctttgaaactaacaaaaaaaggggtcccaaattaattaatttcaatgcttgtaaagtcaaatgcaattttttcaatggacatatatgtaacattcgctttttacaaaatttgaatccaatcttaagtgcaaattactaagcaaagataaattttaattcttatagtaatcgttgtcgttttacatacttttactcataaattaaaccttttttattttaactaagaacgaagaaattaagggaagtggcggtgtaacatatacacagaaatccaagctggttacttttcaatccacctgtcagcgtcatgtttatccaacggatgcaaattcagataacaaaagacacgtgtcagaatctgagcttctcagatgcctacaaggcaatgaaaacgttaaaacaaaagctgaacgaatattaccaaaaaagggtcaaagtcaacaaaaacagacgaacattgcattaaattgggttatagtttcgttaaccagaaatataccccacaaagaagaaacaaatt

SEQ ID NO: 40312 - DNA, 577 bp, Arabidopsis thaliana columbia
tatcgttttttccgatatggctgaagaagaaacaaacgagcgatggagacaacaacaaacacgcaaaagctttttctctattagttagtcgcgcgactagtgtgaatacgagccattgatgggttaaccggaatgctaaccgaccgactatagctaatttaccggttatctctaacttcccattatattatcaaatctaaactacttaactacttagatcttttaacgttgtgtcattatcactatctcccattatttttatttatggttaataattaaccgagtaataaagtaagatactaactgaatgattgaacaaattatttgagattcgcattcacacaacgtataattcagacggatatgtctgacttaaccggtggagcatctagaaatattcggtttacccgtttcagatattgacccgattatttgataaccgacccggtttatttagtggcggttacagctgtccactgctcctcttccttgatccttgtcacaaaatgtcgcgtaattcttctactgatttcagctcaatcgctcaaattcgagtttgcgtttagaaattgaagtt

SEQ ID NO: 40313 - DNA, 589 bp, Arabidopsis thaliana columbia
gccacaggcaaatctctcatgaccgattgtacagaaggatcgttaacttcgggctcaacagattgggaagcagtcgttgcatcagtaccagcgagtgtaaactgcttttcatttactgtatttgtctgcttgtctgtccgtaaatttggatgccctcctggcaatccttggaatcccacaggccaatctcttatgaccggcacctttgaggacaaacattttaaagccttattacaaccagaatccacattagacactggaggcaaatcagattgctccaaccctctgtttttgctaaagctgggtttttttcgcagtgcagcatcaaccgctgctcgcaacctattgcccttattattatcctcgccaatatttcgcttttggtgattaccaacagcatctttggttttctccccgcctctctgaattccctcgaccggggtacaccatctacttgtgccagttcatctttacatttcgcttcacttgatatttgctcacttgaactacacttttcattcttagatgaatccccactgcataggtaaaaacaaaccctgggtgtcaacatgatatctttacgcagaga

SEQ ID NO: 40314 - DNA, 860 bp, Arabidopsis thaliana columbia
ccccaactttttcaagtcaactatagtttataaacaaaacaaataaagagagttaactaaaatttgtgtgaagcatgaaggagcccacgaaattatctcaaagtgtgtggctcgtaggatttgacaaccaccatcatcatcgccatcccttactgattacggtacatgatttcatttaatgttaatttcttaattttcttttatttcatgaagtttcattttcgacataaatgtatatttaggaaataaaaaatcgtgattttcgtgattgttttttttttgaatccgtgataaaggcaatttggcttcgtcaactcgatggccatttcattattatccattatcaaagctaagatagttaccaaattttgtttaaagccttgtttcgatgtatatataaaacatgttctctctcgttagtaaccaatcagtttcaaagcataacatgtaaaattaatacttttcttttctttgtcggccacaaacacattcctttgttttggaattatggttcgagtatacacaatcgctaattcaacagttctactcctaagaaacaattcaagttttaacatcaatacacaaagccaaagggaaattccattttttatatacatgttggatgaatgattgacgaaaatatcgaatcgagtcaaacgatcgacaatgaaatgataaacatgtaggaaaggaaccgattgagatatgaaattcgagagattactaaaaataggaggaggaagccggtcctaacatttatgtggcctaaagcatattttaaaaaattatatataacaaacacattatgaaaaacaactaaaaatcatctattgttactcgaacatgggggagattgaaga

SEQ ID NO: 40315 - DNA, 545 bp, Arabidopsis thaliana columbia
tgcagtttgtctatatgaaatgaatggtgataaatagttgttgaaaactttaacaacaagtacgagaaaacaagacatcatcaccataaatatgcgaaaaaatcgggaaaacgtcttcgatcggaaccagaaaagatttcagctgaaaacaagagtcgagatgaacattagatgacttaaaaaagagagggagatttacataaaaacgacaaaatcaatctcaactatttttacacggttttttccaacccaaattctaatctcttgcatttatcaatccgaactctcatgtaattttcaaataacaaacctaaacgatataacagttaaccaatgtaaaatatagccattattaaataatgtaataaacttgaattatgtaaccgttagttaagtgaataaaaagaagaagaagacgtgtttggtctttgagatggtatgtttaatttgtggcctcgaggaggaggaacggttggatggtagccccaaaccgaggtctcccagtgtacctaagcatgaaagtaagtcagataaaaaaagaagat

SEQ ID NO: 40316 - DNA, 506 bp, Arabidopsis thaliana columbia
tacattaaattttgccatagactctgattcaatctaaaatactaaacgcattgaaactcaataagtttaaaattattccttacattttgtgtgaaaactattactaatctagagactaactacctctgtatagacatcactattttcacattatttttgaatgtgtataacagttctaaattgatatttatatttttcacattttctagtgtttatgatataatttgaaaagcagaaagcattcttagttagcccctataatgattttttacattttttatgaaggctaccatacaaacagaattttcaaacaaaaaaaatgaaaaaaataaagagaaagcagaatccatcaaaagggcagagatgagaaaacattccagtcgtgttttgtaacttttgaggaatgtcccgaatattttaattaatgtgaccaagacgactcctaaaccaacacacatactactatattctattttaattaaacagttaagaataaattagttgtt

SEQ ID NO: 40317 - DNA, 1344 bp, Arabidopsis thaliana columbia
ttcaatttttgaagcttccctgcactcttctaaagtagcatcctcggatgcaggtactgccaacaaatcttcaagcaagccagtcaaaccagatccacttgaatatatattgagtagctctttcaagctaagtaaggccagatgtagacactgttttcttccgtcaacatctttccttcctttcttctccttattcgtctgtccagtagctagaggtggctctggctttagcaggtaaactacttttagcagtggaggacccagaaccttcatgtcaccacagaccaacggtttaagtggattttcctccttcatgcaaagagatgaatttatgtgcccaacacaaacatgcaaagtgaaggagaaaattgatttttctgtcttcgctggtgatgaatggctgtgatcctgcgagcctgactgagtaccaacggatttgctgctatagagtttgaaactgagtagaaatagctggtagatacttgaagtagccaaaaagggaactttctctcgctcttcattgatactcgtgtttcccagatcagtatcattacaggcgctaaatcgtactctcttgccaacattgctctgcttcgattttcccacatccttttccagtgattcataaagatcaattaagtcgacaatctcctttctgacagaaccctttttcccttctggctgtttctctagatccactataatataatttagcagcacttgaacgattcccaatataatcaaacaataggattttcttttatcttcttcgagagatgcagaaactgtgtcctgagactgccctacaatatctgtaaaatgcaaacgaaaagatcagaagctatgtgctaaataaacagattttttttgagacaggtgctcctttcggttagaagactcactatttatagcttgtacttcaaatgacactagactaagcctaacacacaacctatacgaaccagacttgaaagcaaacaaatgtaacagcagatcaaacgtgttcaggtatataaaactagtcaaggcttttattaagaacgatcatttgtcacgtacctcctaacttcttgcctagtaagaagcttcggatctttaccaaagcactggagtacgcttcatgagataggtttcttccaacctgctgctgccatacgaaatttgaatgtacccacacgttattattgacagctatgctctattaggtaacacaaaaccagttctttctgtagcaatacctcattatcttgtgaaagggagaaccaaagcatggcacgcagcatcggaaggccgatcagagctgttttgctgctggagaagtaaaatccaagagacacaaaagag

SEQ ID NO: 40318 - DNA, 549 bp, Arabidopsis thaliana columbia
tagtaacggccgccagtgtgctctaaagctttagagcctgctgccagtgattgtgcatagtattaaggttggtcgcaatgtatgggcagtccagatcacgtcgacactgcatgccgttggtcgagactgggagaattggcaggggatgatccaatgcccgaggaatctcaacagcaccagggtcccggatcaggttggtccattgttggacagtctcgaggacaggctggatctgcaagctggtcatgaaatgcttccggtaaaggtgggtttccacctcaattaggtgaaccccgtgcttgcattggcggcagaccatgatctgcagctcagggattgtttcaaagagtaggtgagacatgctgagagttgcacctatagaggctcatacctaggagtacatatcaacatggagagattcaaaaccagggattgattctcctgactgaaatctgctgctgacagagtatttgcttttgtttttgatacacaaccatctatacagccatatcgccgatctcccgtcaaccttgtatcaaccccaaccaa

SEQ ID NO: 40319 - DNA, 1920 bp, Arabidopsis thaliana columbia
  unsure (1)..(1920): unsure at all n locations
catgccacctcatatgcagacacctgagcaggcaaggatggaggagatttacgcttccaaaggcagaagatgatgacagccacagcaagaacgaacaagatgcagatcaagatcaggtcacccaaggaaatgctcttactaagagtcattctggcagctgagaataaaatgcacgcccagggatccaaataagagcgtacggagatgttccctaatcggcgacaagagacctcagcaggtttcttcttctctctttgaaaaactcttggtctgtgaggattttcttcctagagctttctcaagaagaagatcgaccaataacctgtatttagaaacaacaaatatatttcaaaattttaattgaaactaaattagagatgaaatatttgaaatgatcgaaaacgtttaaaaattaatttaaatattcagttcgtaacatgttttgggctgataaaatgggccaaaattgcacggcaatattacgcgtggttgaaacgcggtgataaatcgcgtgtattgacaatttttatcttactcagtgaaaaacaaaaacataaggccatcttcatcggtagaattggtaggagtatctcaatatattgttttttaatcattatcatataatattattatttatttaaatcattatgctgngnatagttatttaacctgttaaaatatgacatgtggtaagaagagtatctcatggtttctctgcagagaaacttttcttattctctctcctactttattattattttatattttttagtggaagagaaaccatgtgagagactattgatggaaatgctctaagtctcctagaaaaatgtaaaaaggttaattatgggccagagcggaagaccaaattttatttgcatggtttggcaaagtgccactaaatcaatttgtgaaaatcacaatccaatttgtgtatttaattacgaatatacataatttcaccaacgtgttttggccatttacatattatatactcaaacttggagagtcctataaagtacgtgtttgtttaagtatactcttaagatcacaacgaagggtatttactataagatactataaagatgagaacaaagcatgcatactaaatttttactttataaacaaatatgagagtgaacatttacgttaaatgtaacttacttcaagcattatggcgtcaatctccaattgtgtgatagtgtttgactgcaacatcctcatctccttcagtttgccgctgcgacgggtaagctcctcgtaaactctcaactcctaacgaggcttggatgagtgaaaattgaaaatcgtaaaccgttagaccgactttaaattcaacaatctaaaatcttaattgggtgatcttcaagaaaattagttactgagattttgcaaaaaattagtacttgagatctaagctaatatttttgcaaaaaaattttttttgttttttttcccaaatataagagcatcttcgtgagggaggattttagaagtttcttaagttaataaaacaataaaatttaatatttaatgatgaatgaaacttagaggccctcttagcttagaggtgctcttaagttgctcttagttaattgtggtggtgacgtggcaaggttttattggttggagtggtaaatattaaacttctttctctattatttgttctcaaaatttcttctaaatccctcaaaatttcttctaaatccttacggtgacacgtatacgtctcttcatatattattttggctcttacataagagcacctcttatgatttaggccaattaatgatttaattttattaaggataaatgttaagaatcccttaataacccaccggtaatgattggttaatgagtcaatgtccgttaactgtcaccaaaccttgcttgatcagcctttagagcatatctttcatt

SEQ ID NO: 40320 - DNA, 736 bp, Arabidopsis thaliana columbia
ccaaacatcacgatccacaaacaaagaagaggaccttcacacaaagccgattacggccttaataggagttgaggatttatcctttcatgcaagggattgagcagttgatgatctctggaacttctgtttcccacactcggcgtttgtttcatgaaagagatttagttactgcaaaagaaaaggatcaaacaaaacaaaagataatagccaaattggctaaagagaactcgcacttaggcgatccagactaggctggaaaacatttacaacaaaaaaccagattaaaatcgaagaaaatcgaagaaaatccgattttaatcggaagaaaaaactttttctctctgaaagatgcgagagagaaagttttttttttcggccgttcttttagtcaactgtgaaaataatagagttagcgggaaacattagtttggtttgaaaataatagagttagcgggaaaaaaaaaaaaagttagtaacgaaaagaagtaaactagtagagagtgaggcggcccatatcataccaaataaaaaggcccaataactaatgacataaatactcttcccatgactcgtaaagaatctcttccaagaatcaaaccgttttcacgtcaccgagacctctctctctctcatcgcctcctcgcttcaccgccgtcgtcgtcgtcgtcgtcgtccctatttgcccccaccgccggttagttctcaatcttggtaatttcgtaccttcatgaaaatg

SEQ ID NO: 40321 - DNA, 605 bp, Arabidopsis thaliana columbia
tagtaacgtccgccagtgtgctctaaagtattgcagcttcaaattcaattcagtggctgctcaccacgaactgcaacacttaaagatcgtccatcaacgtccttaattcagctccctcgtcaccgccttgatcccgaacgtcaaacgagagctccccaaccaaggacttcacattgctatgcatcgttagcattgccacagagtcaaaacagtctaatattggggtcatattggatgccatacccaagcaacttccccagtcccgctcccacaacagaccttagcacctccaacgaggcaaacgctgagaacgcgggatcatgaatgtgccgaatactcatcaagtccttgtctgtctgacgcacggcacgcgcaaggggagatgaggcccctgtagacagatacgggggtaacggctgggcgttcaaaaccgctgatccgaggtggcagaggagagaggttgtggcgtgggatttgaagtctgtagattgtagcgcaatagaggctaggcgagaggaccatttttttgtgaatttatcttccatcctggtattcctcgcgttgagagcaaagatggatcttgaaaagattgggctgtctgggcc

SEQ ID NO: 40322 - DNA, 511 bp, Arabidopsis thaliana columbia
gtattcttggttatttaatttctcgagatttctttaattgttcaaaatgaaaaccttcactttataacataacagtcccaaatcgttcgaaatcactgatttacaatcatatagattcacttaccatgaatccatgatacaagcttgaagaggtgacccaattgtttgggccatcaataaggaaagtgataggcccaaaattcttttattgggctttagcgtatctgtttttgtatagatatcacacaagtttctatagatgtgttcagtgttcatgcagttttttataaatttctcaccgacatttctagatatgactaaaatgaatttatgaacatgcggcttaaaccttattttatcagatcacttagttaacatctagagcaggtgaaaacaagaagaaaaacaaatgttgtttttgaggtgcataatgaaaattgatgagaagaagattgaggagaagtagaagaaaccgacttttgttatgttgttagttggatgaaggagtgaa

SEQ ID NO: 40323 - DNA, 641 bp, Arabidopsis thaliana columbia
tggagctgaacatactcggtgtacataaaccaagccaaggcggtagaaataccaatgcttcacgaactcgtttagttgtgaaaactctgttattttcattcatcatgaaatatatacatacaagtactgttgccctaagagaatattaagagaatattacgagaatattacgaacttgctataaaagatataaatcttggcaataaggaaatataggatatgggcttatacggcccatgcagaaattatttttcataaactaagaaaacttggaacctagaggatctatctattagattattttctcagatttcagattctaataagatccaaagtaagtagctattacggtcagataaccaaggataaaaactgcagaatcacgatttagccatggtaacaaaacccttagaaggacacacatcgagtaccagattttagctgacacatggaattatggaaaagaaagaaagagaacataatcacaagcattcaagtcttggagcaaatgattgtagaaactatactcgaagcagaggtgtttaagtaacacaagcattagcaacctccaacaataaaaagaagaataatgatacaactaacatctactttcacggtttcgactctcacatacacagcat

SEQ ID NO: 40324 - DNA, 1191 bp, Arabidopsis thaliana columbia
cttctaaaagaaggcaacagaagtcgttacctccatctccatcacaattcgtaaccaacattcttcaaaagaccaaactaaaaatatttatatacatcaattggaaaatatatttaaccgtggataaaaggaaaattagtctatatataacgagtatgcgtgtgtatatacactacgtcttacgcaataacaatgagtcggctacctccccactatacatataagtcatcataaccctaaagtatttgctttagagagaaataccataatgcggagtttcctacgtctccttaaaaacatggttggtccaataccataagaagttaattccaaattgataatcttctaacaaaatgtccaacagtatacaaaaggtttataatttgttgatcataaggtttcatatacgatataagtgatttgcttgttatcaataaattaatgcgataccaagtgtcgttagcttaattggtaaagaccttaggcgaaacttagaagtcaccggttcgagtgacgtttgggacaaaactaatattacatactgtggtttcgggcatggggggattacgggcttcggccagaacctcctgaatttaaaaaaaaaaaaaaaaaaaaaaatttaatgcgatatagtcacgtaaacattcattggtattagattacaatatttgaaccttcacatcatatgtacgcactaatttgattgaacgttgaaattattggagatgaatggtttttaagtattgcgtgaccgaacattacactaacgtattaattactttggtacgacagatgaaaacaccatccccacaatcgcaaaataaagaaggtaggcgaatctccatggaatctcccaagttttgtggctcccattagaatattaaggtttttggtgtcatcttattacaagtttatatccaccatctagtttaaacatctattacgcaattataaaatttcgaagttaattatattcacattcattgtcttgtataatatatactattgaccatgtgatgcaatatcaactttgatttttaattggttgtagttaatttgttcgcaagattgttcgacaatagtagctggtttagtcttaatgaggcagtatctccaacgtcagatacatctactggatacgaatggtgatatacaggcgcacccaaaatcgtatcgaacagtgctgtaacg

SEQ ID NO: 40325 - DNA, 509 bp, Arabidopsis thaliana columbia
ccaaagtttctccaaacaatcccaagaaatccgattgaccgcaaagtcagctgattccaagaagatgcacacctaaatggtttgtgagcaaacacatcaggaaacaaaaaagaagctaaaagattgaaacttttctgcccatcaacagctaactctataagggtctctactgaattcatatttgaaactaaagaagaacaaaattttcgaagacgattagtatttgcaatttcctggaaaagcttatagaagtttaaaccatatagcattatctattggttcccaacctaaacactaatggcaaggttccaaggattcgtaaagattaaaccatataatacaaagtagagagagataagagagtctcgagacagaagagagctaagagcagatacgaaacagagagctttgtacctcgagcaggcaaggaacagaacagagacagagaggttacgtcgccggtagagaaacgagcagaggagcaaggaattaaaaatcgaagagaggga

SEQ ID NO: 40326 - DNA, 595 bp, Arabidopsis thaliana columbia
  unsure (1)..(595): unsure at all n locations
tacgctttctcaccttcaggttctgcctcctcaacaatatttggcatagcactgggttttgcctttgtgtcttttgaaagagtggacaacatggaaagcttggattccgagctactatcagaagatacaatagcgagtatttcgggtttaggatcgatatcaacccagctatctcccacccagtctctggaaatccgaatatcctttctgagcactgttaagcataagttctcccctaacaccgtgaaaacaatacacatgttagtcgtaaggcagagatggagaaagtggaggcaactagagagtaaaagatgaatataggaacacactaaatcataccagggatatatattttcaagtcctcagtatccggtttgccagtggcaattacaacaccttcccaccaaccatcattccaccatgcatcaacagcttcaccaattgtaagatcaaagtatgctgttttaacatctcgaggagcaggtcggattgttgggcggttggacaaccttataccaagcttgtcaggcatagcagatttaaaagccggcacccattcctacacaaaacaatgagganaaaaacacaattaggt

SEQ ID NO: 40327 - DNA, 816 bp, Arabidopsis thaliana columbia
gaggtcgactctaatgggctgcggagacgaccgcggtctacatagttagattccgttaatgggaattagtctgggctagctttgcttgaggatttctatcacgggagtgaattgatctgttgttgaacctgttgtctagggatagcttgattgcgcttgttaaccattcgaataggctaggataccactctactcgattaccccatccttaggaatttctcgtctatcttatttctctgttttatcgttatcgcttaatcgttctcattgcctgcttcttagtatttacaatcactcgaccaacttactcgaccacacccagtgtctggcaacagactgtgcagtcgagtaagattgtcttgtttcctgtctgttactcgtccagtatactcgaccacacccagtgtctggcaacagactgtgtagtcgagtatagctgtttcatatcctgtctgttactcgacctgttactcgaccacatcctacttctggcatcagcctgttgtggtcgagtgaatttagtaattctgttattgcttctgttttctgcatgttcgcttaggactgttagaaaccccaaaactgttattgcttggcttgacttaatgacttctgatcacatctcatctgtttgcatcacacccatttggattgacacctaaaatactacaatgacatgaattgtgttttaggataattgattaaaaatttattatcaatatggcgccgttgccaattgggtgtttgtttgctatatttgagatttcaaaattgttaagatcaaggttccggtatgtttttttttggggggttttt

SEQ ID NO: 40328 - DNA, 867 bp, Arabidopsis thaliana columbia
ccaaggactttcttttgtggacatcattgtgcattgtaatttattacgagcaacactctgactatgtgaattgtctaattccagagggagcaatttccattcttagaagagtatagatgctctcgcagcagaacaacgttttactacactattggctggttgattttcatggaggatagcttaataaagttcaagacttctatggaaccccttctgcaggttatactttgttttctttcagcattttatcttttgcagctttccttttagaataatgattctgtctgaatctgcactgcacactcaccctatttacagttctaggcaaaatttgatatcctataaacagggattgttccacatccattttacaatatatcttataggcagattcacatagtggtcttagccagtaaaccacatttttattcaatcattctaggttttccgcaccctggaatcaacaccagattcgatgtttcgcactgatgctgtgaagtttgctctgatcggattgatgagggatttaagaggaattgcaatggctactagcaggttttgagttcatctagttactttgacatccatagacatgttacaatcttatgatttattgaagctttctctttggatttcagccggagaagctatggttttctatttgactggctctatcctgcacacatgccactccttttgagaggggtctccattggttcgacacaccagaggtattaagttatgcattctgctccattggattgacagaacactggcctagtaataacgtgagtccgtgcatagaaacaatgattctaatccactgcttgtgattttagccttctgccattttagtgtggttagtgg

SEQ ID NO: 40329 - DNA, 1178 bp, Arabidopsis thaliana columbia
tccattaggaatgttctctaattccaaaccctcagctgcaccacctacgccacagaccgaagattggggatttgaaagttttgacggtggggctggttccaccaccgagcttgatggtttgccaccgcctccaccgggtgtatcagctacatcagctaagaacaagggcattgataaccagagacaaggtcagtatgctgatgccataaagtggctctcttgggctgtgattcttatggatagagctggtgatgaagctggatcagccgaggttctttcaacaagggcttcgtgttacaaagaagttggagagtataagaaagctgtagccgactgcacaaaggtatgttaagaaaggcacatttttctttggatgcatcatggaccatggttcatatcattctcatctcagatccttagtttacgaagtctctagttgtattggaatcagtttaaggactcttgatgaaattgatactgataagagttttcaggtatatgaaacttgacaatatgagatttaggttcttatggaatcttaagatagattacgagttagaaatactgtgcacgtatagaaagttttagtgtcttgctttgtaggaaaatataccacaactaaacagttcttgggatcgcgtcatcgtagctagttgattggttgttatgctccatagatggtttcttgtagactcagaacaaaaccaacatcttcgaaacttgttctgattgtcagttatgcttcacagatgttttttgttcactttgaaaacgtgattgcaggtacttgatcacgacaagaagaatgtgaccattctggttcaacgagcactgttatacgagagcatggagaaatacaaactcggagctgaagacctaaggatggttctaaagattgatcccgggaatagaatcgctagaagtactgttcaccgcctaaccaaaatggctggttgatccttcatatatacggatactactcaaagaaaaaaaacaaaaaaccctcaaatatctataatccttcacattgctttgctcaataccgtttcctctctcatccatggaccatgcgtgtgtgtattttttttctgagatttattggttcgtctataatgcggcacgttcttgtagtaagtgggtcatgagtgtatttttttggatggtgcgattatatgttg

SEQ ID NO: 40330 - DNA, 853 bp, Arabidopsis thaliana columbia
gaaagaagtatgggcaaggctagagaatgcagcaagtatgaagccgataacaggaaagactgctgttctggtaactcctcgagcaacctccatcgcctgctaaatagcgtttaaaccaattcacagacagtttatccaaagcaacaacatcgagaagatgatggagtggctgttgcttaagctatagtcttgggaacttttcatcgaggttgatctctgtaatattatataactttgatgttgttagctgtgtgggttttaatgctaattctattgctttcttttaaagcaatgaaaccatgctgcagatttttatcaaactctttgtatcaatcaattaagtttatatatcctttttctttcaactatggctctaaacaacaacaaacatcaaaaggtttatgggaacacatcaaagtttacaggtagttgcttgtacctcacaaaacttcagagactaaggtcatgcacgaagaacgtcttcccacgatatgtgatggatctttcttcagctccaaggcaccacaaatggccttgtaggttaagagtctctttcattcctgctgtttcccacacaaactcaaagagacccaatgccctatctaactgcttcatccctctctccaacattttctcatccgttgaagtcaagatcctccccatacttaagcacaagaactcgctcttctccttgtaaaaccctccacagagatcaacttcgatgtcacgcacacggccatagaggaaatacatgacgagagcaaacaaacacggtgatggactgcccaacagctttgagagctttctgtacacaaggtgctcttgatgtctacctctctgaatccaatagtgt

SEQ ID NO: 40331 - DNA, 602 bp, Arabidopsis thaliana columbia
tagtaacgtccgccagtgtgctctaaagaaaacagcctcgtcgacaacctcagctctgcttcccctccatcttcaggtattgccattgagtctttggcaccgccaaatctgcttgagctcttgtccttctctctccatggcttgagctgctcttaagcaaaaatgcgtccgaaaagccgcaacgactttgccatcgcgattatctgtgcccttccactcgaagctgacgccgttgaggccctttttgatgagcactatgaccggctgggaaaatactatggcaaacaacggcgcgacgcgaatgcatacatcaatggacggatcggcaaacatgatgtggttctttgctatatgccgggaatgggaaaaggaagcgcggcaagtgttgctgcaagtctgcgagccagctacacgggcattgagcttgctctggttgttggtatctgtggaggcgctccaccaccaccgaagtatcaggatatattcctaggcgatgtgatcatcagtgattcggtaatcgaatatgactttggcagacaataccctggtggttccaaaggaagactggcgtcaaggacacgttgggcaggcctggcccgaga

SEQ ID NO: 40332 - DNA, 564 bp, Arabidopsis thaliana columbia
tccccaataaaaaacattatagaaaatctccaaacttagagagaaactaaaacacaaaccaatttgatatttttttcccgagtgattcgttcttaatttctctttgatgatctctgattttgtagtgaatcacctccatgggtagtgaatcacgtccatgtgttattatgtgtatcaattaactgctgtgtgagggtattatgggtctgattacctttaaaattctctttccgattgatttgggccggtaggtaaatttttctcttcgtttatcaaaaggaagaaaaaagtatttaaatttttgtttttctcagtttttctttttttgttatgctctggattattttttacaatgcatgtgccattgttatgtgagggacatgatgaaacagagacatcaaaataatggggattttctgatatttcctgaaagaatgatgcttgtgaaggatgttgagtggttactagatatgctatagagagacacacaaaggtagtagaaaagaacctgttgaaaccaaaagcagactcatgatgtaactaagcaaatagagatttaggatg

SEQ ID NO: 40333 - DNA, 738 bp, Arabidopsis thaliana columbia
ccaaactttcatcactttactctcaacgactccacttctccatctatcttcctcaagcactcgaccgcttctctatcgcctcttcaccaccgtctcgagctaccactcgacctcttcaccacttgatcaagcagccgtttctcctctccaaggaaaacactcgaccgccgcttctctcatctctccagtcacaacatcgtccaccactcgaccttgtctcccgcttcaccatctccacatcagctcttgttcttcgtttactcgaccactacacatcattcccttcctcacaactccactagacttcaccgaatccactcattcaaactccactcttcacgcgacgagcacctccgcttctccccctctgatccaatcactcgaatcaccgccacctctcacgaactcgaccttgcctaatcactcgacctcctacaatccgcctcttaccacgccgcttctcaccatccactcactcgaagaatcgtctctcacctcttccttcgtagtcgtttcactcgacttcgccgcaagaacagctccgcctctcaagctcatcaaacactcgacctctgccatccattcgccttcaacaatactcgatcaaaagtcactcgaccatcacagatatcactcgaccaccgcctaactctaaccacgaaactagcttcgctcgaccgaacaaaaccactcgaccaaaccgaaaaaaaaaaataagaaattttttttttttggtac

SEQ ID NO: 40334 - DNA, 470 bp, Arabidopsis thaliana columbia
tatgtacactctaataataatatatgaagatattctccgataaaatatgcaggactaatataaaatatactcagattaaacatgaaggagtgttgaactcagcacattcacactggtaaaaaggtaaaacctttcaaagaaaaaatactgacttaagagtaattttttgttatgcaagtaacaaacaaactcgagtaataaacctaactaaagtataacacttaaataagataagatctgtcttctccgcggtatgtaataaaatgaaatcaccagatggaagtcttgttgtagagaaatatcgatctgataatcttatcacggaataagactttggtctcgattgcatatctctcacgcacgactctcgtgtgtatgaatcgaaagaacagatattagagtgtatatacttgggttagttgtggcgatgttagctttgtggggcaatcgcatgtcgatgattctggtcg

SEQ ID NO: 40335 - DNA, 615 bp, Arabidopsis thaliana columbia
  unsure (1)..(615): unsure at all n locations
atctgccgactaaactaaagaccaaaatgtaccgagttattctgttattgaatacacttttatcctacaaactaacaaaaaagcaccagtggtctagtggtagaatagtaccctgccacggtacagacccgggttcgattcccggctggtgcaatttgttttgttttccaaaatctttgagatttaaggcccgttctatttattttgcagacgagcccaaaactgtttaaacgtaggcccaaatttgatctctttatttaagtcaaaggcatatatcacagtacttatagttttcttcttttccaagaccaaaatttgttggagaacgaacactctcgagacggaatcgatggcgaattctcagacggtgatggctatgatcaggttggctagacctcctttccgcaacaatcacgataaggttgctttcgctattcactcttctttcgtcgcttccggttatatcctcactgcacctggcggcctgctttcgccgacgaggtctctcttcgtcttctcagagttagtattgattccgtttagttgtttttctgattttttctaggggtttaggttntctgatttgtacgattttggaattttagatgatgttgg

SEQ ID NO: 40336 - DNA, 562 bp, Arabidopsis thaliana columbia
ttccattttcatactcaaatgaataaataatggagatgtagggaaactgtatatacatggttaaagtatgaagtgatatcaaatgctttttctaggacaactgttaatattgcataaaatagcaaacaaacaaatgctcttctcttcaactttatctcaaaatatctgttgaacaatcatgtagtaaagatcataataacattttcacatttaataaaatcatccatgatattttcatgtctataaagagcatccttaatccatatcatctactccctattcttcagtaatgactaatattagaactctctatactactagctaaaactaaaaattgaagaaaaaacatgagtctcaccaccgacgaaatcgaagtgagagatttcgtggtgaaccaaaagaatggagtgaaaggactcgtcgactttctaaccctaaccacacttccttctccatacattcaacctcctcaagaacgcttcacttccgacaagatcctcctcggatcacctgtcccggtcattgacgtgtccaattggaatgaacgcacgtggctagagag

SEQ ID NO: 40337 - DNA, 599 bp, Arabidopsis thaliana columbia
ggtgcaacaacctgaagagttgatacaaactcatacaccattggggaccaatgaatctcttgattccacattggtcaaccaaatcgaagagagtgaagaaaatgtaatggccgaggaaaaggaggatgtaaaagaagagaggactcccaaacaaaaccataaggagaattcagctgggaaggagaatcagaaatccgggaaaaaggcttcttcggttactgctactcaaaccgccgagtttcaagagagtggtaatggtaatcagactagtagcccgggaataccgagctatatgcaggcgactaaatccgctaaagcaaagctgaggctacaaggctcttcttcacctaggcaattagggacaactgagaaagccagtagacgttactctctaccatcttcaggtaatagtgcaaaaatcacttctcattctcctaaaacaagagtctcaaactcgagtggcaaaagcgggaacaagacagagaaaactcttctttcgtcccgagaaggaaacggttagtctcctaagcaaaacaatctttccacaatgatcattttatggaattttctcgctaactttgcttggattggttttgggt

SEQ ID NO: 40338 - DNA, 943 bp, Arabidopsis thaliana columbia
gtacttcaatgattttaccttgtactcatttaaaggcacataccgtatattgatatatatctagggaaaactcacaaaaactacaaaatttacatgatgcttataaatttgagaaataacatctatattcaatacgaacattcacattcactcttgtattaaaattacattttttagatcattttataagatggtttacaatataaaacaaaagaatgaaacatgcggactttatatacatcatggttacgttacgtgtgtgtatatgtggacgttattacaagacttaaaattatacttttgcccttctcctacccaatggtccctcgattttaaatttgatcagctttatttcaaatcttcaaaaataaaataaaaccatttctttctctctctctctctagtctaggcttcttggattgagagagtgtcttcaaataaagctgtctgtttcgaaaaggtacatgcgttacactacaactctctatctctctctcttcttttctgctcatttttgggtaattcttctggttttatgttcttgttcctattactgactcacaatcagccaacgcaaatctttctttgaccatttttaatagtttctcttagtcacttgttggatttcaaatgcaaagttgacctcatcttcttcttcttcgagggtaagttttaactctttttagttggatccttttgcttattaaatgtagcaaacgaacattaaaataaagtttataagttcccagctttgacaactctcttctctgtttctggtttttctcatttgaagattactgtctcttgttctctcacacatatcatacactgatacacacgcgcttttgacggcgcgtgattataatcatatctcagttccccggaattttccgacatgagtcatggctttggttgttgctgtaataaatgacaactgattttg

SEQ ID NO: 40339 - DNA, 1637 bp, Arabidopsis thaliana columbia
aaacattggggaatctgtatcacttagactaaataatttgattttttatatttttgctgactgtatagtttatgaatccaaaatgacatgacaaaaaaaaactaatacgaaggagaaatattatttcaattgcttctttatattttaaccttctttcattaaattttgcattatttctcatatagtttttatataattcactgtctccggcgctgatgtagcagttgctcgccggcgtcgaacacagtcttctctttgttgttccgctcttctcccaaaaaatcaaaacaagtctagtctcaatcttttcaagcctctagtctgtcatcttcgtctccttccatctttaatctcgctgtcgcgtcttgccaattgtagatctgttagaatcttttctctgaagatctttggctcagcgtaccgggccgacgtactttgcctcatttctgggagaaccaacagctacttcgttaccggctcatttttttccgtttcttccctagccacgcgtttcatcttttctggttaaagccggtggttgttgtttcaccgaccttcctttcggtgatctctgccatctattgatctcaatggttaatgatttgttcgcctctgtcacccgccgccgttgcatgttctcgacctcgtttgtattaggtcagatccctactatacaactttggaagaagactttagtttgggcatggcccatcttgggaccttttgggtggtgtagaggcccgttaagttttttgggctgctttcttttggcctgccctaatgttttgcaatgctcattatttgcacccatcactatcttgggagaccttcgtctctccctttgctacatgttatctgccgcctgtttcggcactcaacggttcatcggatacttctccgggttccatctgcttataccggatacttcttcggcaagcccattttgcttccgatcgagaaccacatatgttggtttggaacccgtcaatcttcggcgaagtttgctcaatatggaatgataaggtacactaagtgtatgtttttttttatttgtggtatatgtttttttttttggccaaaaaataataattgaaacttttaattaatgaaatctgaagatgacgtggcgtatggagagagtgttttagaaacgctgatgtagacacgtggagaagcttcaatgagctttttttattagcagtagattattgattgtaaattatgaaaactgttatatatccaattttaccacggacaattccttccaaccattattagatccacgagagatgacaccttattcttcttcttcatgctctccgttattaaattcacgagagacgacacctctttctccttctccttcttcatgttcttgatgatcaccttcaatgatcctctctgcatagaatcctggcgatcgtctataattggagatcgtctataattgcctccattgatctgtaaatctgctaataatttgcctccattgatctgtaaatctgctaataatttgcaatatcttggatacgtaccccagatatcttgatgtagaaacattaatgaagcattaatgaagcattaatgaagcattaatgaagcattggtcaacaaataactttagagcacagttacta

SEQ ID NO: 40340 - DNA, 1833 bp, Arabidopsis thaliana columbia
aactcagttcaaagtatcgcattgtcttcctctatacctccatcgacattgtcttcatatgcacctccatcgccattatcatccacattagttcctcttcaccaataggtggtcggaatatcattgtagaacagcttcaatggtcaatttttcgtccccaagcacattagctgcctctacatcgttcctgattcattcgtcagcatacccaacctcctcacagtcttcatcgccgactacctcataatcatccccactaacaacttcacaatctacttctatatcttcacgagttttcttttttctctttttttgtttccgtggaggaaccgcctcactgtcttctattgggttcttctccggtcgtatcgaaaacgcctcaatctctgaaggtaaagacaccgcctcaatctcatcttcgattacaactgtctttgtttctttgggcataggatcgtttgctcttgaaccgccgtctaccatagatttcagcctccgcgactgacgaggattcctatttcctactcgcattttcatcggaatcaatcgacaagagctcgagagagaatttggaaaaaaaatctagggttttcgatttgggattctaatcgatttggggttattgagttttctctctgaccaaaacgacgtcatattgtcattacagagacggtgtcgttttgcaaagacggaagccgttaacagcgactaaaccacgtaatcgtcattctaacggagatttaacgtcttgccttttttggcttggtcaacaaaactttattattttcttaaaacgtcaactaaaactttgtgattaaaatgacaatttgtaagttgatgcttttttgtcttatttttgaaagttggcgttttttccacatattttccatttttatttagtaaaaacaaaaattaaaatttgcttttgaattttttaatttaaatattgatgagtgttttgtagttgtaaggtaagacactaaccaattaggggaaggaatatatatatataaagtggtttacgacgctagagacgccaaaaaaaacaataacaagcaacataataatataagagaatattgcatactcagacactttttcataactttagacgtgtttcgacactttaaaatcatcaggcactttgccttggcaaagttactctattaccctaaccggttgtcttcaaaccaaacccgcattaactaaagagatcccttaaccaaaccactcgtcgaatttgcagttaccttaccctatttgagttttgaagactttttcagtcgcgtaaaaacctaatccagtaaaaaactgcaaattactatttattgtagaagacgaatccggcgacatcatcctcttcagtttttccggtgactctgttcgctcagacgacgacgcagacgattttccggtgaccctgttcgctcagacgaagacgcagacgacgacgacttctaatttcgctcacaaaccctaaattctctccaacttctccgtcactgtccaccaccattgttgcacacgactttctctcttctgaagactccaccggtatttcccccaaatttctctttgttcttatatcgaattggatttatgtttcatgtaaaatttgaattgtcgaaactctaaaacagttatacttggctgtttgattattattttctagtttctatcttcggttttcgcttctcgtttttcgtatttaagttacaaactcatttgattgacaaaaccatatactctgtttatgaattttgctcactcttgttgcgattactcgtaaagccttaacatttttgggtttcttcacttactagtatttgttag

SEQ ID NO: 40341 - DNA, 567 bp, Arabidopsis thaliana columbia
tgatagtgatttaaatcaaagtcaaaccacttcgagttcaaaatttgcaatttttgtctccaaaatttaacgtataacataggctaatagctagcttattaagaaagacgaattaattacaattcgaataaagcttttaccaaagaaatagatttttttccgtgcgtgtctcggtctcactttctgcctttgggtccatcagcgagcgagagggctataccctcccagtcactcgttttttcctttctcgagaaaatagcagaagaaaaatgacggaaaacgaaggaaacgacaagaaaatcgaaggatctaatcctaagaagaagctcaacgttgtaaccttcaccggagcggcgggtttactcggactcgccgtcagtttcgcaatcttcactttcaagtctcacaagcaaaaatccaagaagaaaggcactctctctctctctctcgctctcgtcttcctttcacttcctcttgcttgattccgcaatttacgaattcaaaattcacaatggtcggtattcattggaaatttaggtcttcctggttgtgatagtgtttgtgtga

SEQ ID NO: 40342 - DNA, 534 bp, Arabidopsis thaliana columbia
  unsure (1)..(534): unsure at all n locations
aatttaggcacattttagggccaaaaattagaaaaagggtacatttcaattgggcttacaagcctaagcatttttggcctgtttaaaagtctattttaccctaaagtgaaatcttcattgttttcttctcttcctcttcatcccttccttttttcttcatattcccaaaaaaatttaattttgttcctgagaaaatttgtttttgattacaaacactaaaccctaagaaatgatactaaaaagggaatccaaacaaaataattaaatgaaccgtttgagatataaaaaaaggatgaactaattacgagataaaaatttgagatctaatcattttcttcttcgagcttgttcatcatgagatgtgagtcatgaccatcacttctcaccaccgcccatcattgttgttgccagagcttatgtattgtcgttgtttcgttgttgtaagcggagatcttgtccgatgtcttccattttgttaaaaaatcgaattaatcgatttaatcaaagaaacaatttcagatcgataanaaaaaa

SEQ ID NO: 40343 - DNA, 582 bp, Arabidopsis thaliana columbia
taagataagaaattaacttttgatggatgcacacaagtgggtgaagataatcccttgaattagttaattatgctagtaaatttggggattgagagtaggctaatagagtcattatgaggttaaatgggtgttaataaacgattaaaatataaatcattcgtatcagaaaataaccatgcttgaagattcctggtcctttcatgctatagtctacaactccaaggctttattatgactaatactgacaccatttcctttttttcaaccatagattaggtgagaatgagatcatatcattacttgttatttctcttgcacatgttaatctttgagaattttagttgtttgtaatgagaaagcacataagagagaggttacggagatgagtgtaaatggcgttgggacgtgaacgggaccacaagagatgaatatttggcggctcagagacaacctaacgtgacgatgagaaagaagaaaacgaagagtgagttatggcatgaaaaggatcactatgtccgcacaaaccacacaatcattctctttctttctccataacaaatttgaaagatacaaattttaaat

SEQ ID NO: 40344 - DNA, 1749 bp, Arabidopsis thaliana columbia
ggaaaaaaaataaagtctcgtgggagagagagagatgaaaaaaggttggtgtcgttttagaggtaagtaaagcttaaaacgctggctttgactttttttttctctctctttttggtcctctggcgcgtgggaccgtgtttagatgtattggtgtctgtgtacagtactgtttattattattgaattctttgtccgtacgatattttgccttttctgtagttatatttatcaaaactgtttatctgctgatgatgataagtgataacagatcaagcgccgtgtagttctaaaacatgtggagtcattaacggaaccaaaaagttacacaaaaaaacaaacatcatatattaacttaccgatgcttgaataatagtactattattgaatgacaaacccattctataatctatatcactatatgccatgttatgattattgatgatttaaggtttaatttttttttcttttttgaaatatgttgattgtctatataataaacatctctcactcaataaaaatcaaataaatcaagtgacctttttctgaatcatatcataaacaaaaaaatatcagtaattttttaaaaagtaccggttttcaaataataaatttgcagtaatgaattcattgatgttttgggtcggttcaccctaatacattttttctctctcgcctccctgctttaactccaagtggtcgttgtgctcgtgacggcgcgtggcggctcctacaacgccggcgtcggtcacctttcttgtttcctgtttagtttttcttttcatagatgtcttctttggttttagaagcatagaggctctttacaatttggagtggtgagtgttgtgaagcagatctagtgagattgggttttggtacttggatctgtgggatctgatggtcgagggtgttcttaggtcactgttcttgttcgctggtcatggagtgcagtcacgcttcatctttgccggtggactttcaagacttttgcttcttctcttgacggcttgtttctcttctcccatggctgaatctgtgcaacatcggatcgacttctcgataactcggtatctccattgtctctcatgtcttctgcttttgtgaaacttgttgctctgatcagtttgtattcatgagatctggtaacatcagcggcttaggttaatttgtctccctcttttgggctattgtctcccttttttgggcttagcttctcttccccgactaagttagactttgttagtttggggttgagctcttggattacatatcagttcttcttttgttgtattaagcaacgattagcttaattaattgatcgttgtggtgttgaaaggtttaagtggttctcgattatcctacggttcatccgggttaggtactctttgaaaaagaagcatcatttacggagaagaccaagttccactatcttgttattgccataagtgttgaagcccgtcttctcagtttgttgtgcgggaagtccttgtggtgaacttcgagagctttgtttagtctcgagataagattagtttggttattgcaatgttctcgaaaaaaacccttcttcatgggtcgagctttgtgtatctttaaagtctaaactctttattttcatatgtattatatcgtttccaattctaatatcaaatataattcaatgagaaaaaaataaaaaaatttgcagtaatgaattgcatgtgcgtggaacatatatagagacaagctgcgcgtggaacatgcatgcgatat

SEQ ID NO: 40345 - DNA, 1260 bp, Arabidopsis thaliana columbia
tcccgacttgttgtacaactcctcccctttgacttatcataccactttcccgcctttgacttgtcttacttctcagcttgaatatggtgtaactgttcctttaggctaacatgattctccttttcaacttatagtcttcgtctttatttcatcttcgtctttgtttcatcttcgcctccatttcatcttcatcttcttcttcatagacataaaccgattgtctcccatctccttgctttgtgagaacgctacttcctcagattctttgattattgtgtaggctaacaacacgttccatttgtgtgtatcctgacgtttgaaacttcatcttctcaaccttctttaactctgatttcttctcctcattgacttattggccgttcatttcgtcttgtgacttatgaatttggctcttctccttagacttcactttaccatacgtaaagtttgtctttttactctacaatgcaaaacttcttcggcactactccaaactccttccttctcttgctttagctatcttcttctttagttatagtcttctcagcctcatgatttccatctcatgaccttttacgctacttctcttctttgctccttagataattgcttcttctgcttccatctctttacttgacttgataaaggtttttcgtcaattatcctaaaacaccaatcatatcgttgtagtaatttaggttgtcaataaaaataggtgtgatgctaacaatcaagatgtgatcagaagtcactaagtcaagccaagcaataacaggttttggtgtgttctaacagttctaagtgaacatgcataaaacagaaattcaagcagaaacaataaaacactcgaccaacacagctctttgcagagcactgggtgaggtcgagtgacagacagaaagtataacagggatactcgactgcacagtctgttgccagacaactgggtggtcgagtatctggtcgagtaacagtcagaaagtacaacagggatactcgactgcacagtctgttgccagacaactgggtggtcgagtatctggtccaggtaacagtaaagaattgccgaaactaagcaacaaatgacaagatgcagtaaacaacagtagagtaaacaaagaattcaatcagataaagaattcccgaggatggggtaattgagtagtttcgtttcctcagtttacaggtgattgacgtgctcaagttacctagtcccagactcaatcaccattgacgagagctacctaacaggcagtacga

SEQ ID NO: 40346 - DNA, 488 bp, Arabidopsis thaliana columbia
gggtacgagtctcttctgacaccatcttgtttctcttttacggtggtggttggcttgtgtctggcttccgttggcttctacagtagcggtgggctagctaagttctagaaattcaccatatagctctggtgtttcttttagcttttggccagattgtttttggttcaaaattatgctttctttgtctcgatttccttattttcggtctgattagactcttttgcaattctatttgagtactggaatcgtaattccttgaatcccaggcgtttaaagagctcgatttgtgttccaagtttatcaatttcaatttttaagaacaaattggagttaggggttaaggttttttttgtgtgactttggattgaatttatgcaattgtggctatttctttaaccgatctatggaatcgagtttgtttctcttcgtttataggtgttgctgaaactccatcgatttaaatgttcaccgatgttctcggagatttg

SEQ ID NO: 40347 - DNA, 513 bp, Arabidopsis thaliana columbia
  unsure (1)..(513): unsure at all n locations
gtnnnnnnnnnnnnnnnnnnnnnnnctaaagtttgtggctgtgatgggaggcgcgactgaaggtatgtttgaacggagacagaggctggtcgaattgggtcggttggccaatgctttataaggtaagttaagcgggatgtggtggtctgaacgagagtagttgttagattgaggaagattagagcttattgtagggtagcctaaagggagcgaacgatacggaagtcccggccatgatgattggggtaagttgattatcaagaacttgtgtttagtgtcgcaagcaacaaaatatggtccacgtcgaactctgagctgcagagcctgcttgtgaagatgagatcgaactggttctacacttgcaatcaccgtacgtccccagacatcattgatgcggcaaaaaagtataatcacgtgactcaaatgcaagagcggatgcgcccgcccagcagagccacagccaatcgatcagtgggccgacgcctcaggagccaggcatcctcgaattggatc

SEQ ID NO: 40348 - DNA, 396 bp, Arabidopsis thaliana columbia
gctgcaccactgccaccggctgcagctccccagctcatgtatccgtcgtacgggtaaaatcttatatatcgatttttagaaaatttctaaaaatctaaaatccttataaatggatttttctcataaggagatggtccattgcgatagatatggtaggagacaatttaatgcgtcaattgagccacctgctgtcaggctgtaaatatgataacattgatatgtagtcatgtagataaaaaatcatgcaatgcattatagtccgatacggcagttgagataccattaacgtgcaagaatgtaatactagatggaagttcttatttctatacctctctaataacatggtttaaattttaatgagtaggaccggaatttttagaattatacacttttttt

SEQ ID NO: 40349 - DNA, 449 bp, Arabidopsis thaliana columbia
acatcagtagtcaatatacaattatatcaccattactatgattcccatgtaaatttgtaatgtgtttcatgactgagaaacccattcagcaagtttttcgaattgttcgacgagcataggcgagagtttcttaaccggtttcctctccttttccggtcgaaaatcaaacccaagcgcgtccgagacttcttcggagctccacccggatttacggagcgactctgagatccgacccgcttttaatagaagcacatcaagaacagtttgattatcgataattaccatttcgccctcaaagaaacccgatgctgacacgtggataatctcatcaatatcggattcgctccaccgcctcttcttagaaccgaccgatccggtttacgtactggttcaccatttcggagcgtctgttttgggaaggcctgcgatgaagaagcgacgatgatgtt

SEQ ID NO: 40350 - DNA, 1237 bp, Arabidopsis thaliana columbia
atatccgttttgatttatagatataaattaaggtttaaattttataattaaacaaaattatatgttagtttgagtttactaaaagtggttagggtttacatttaacaattaaataaaattatatgttagtttggatttctaaaagagtggttagagttttgattttacaattaaaaaacatttatatgacggtttgggtttataaaatataattagggtttatattttttttacaattaaacgagtttatatatgacagtttgggtttataaaagagcggttagagtttagattttttttttacacttaaacaaaattaaatatcaatttggatttaaaaaaagagtaatgtttagatttgttattaaatgatttttttattttataaacaaattattagatctgattttataattaaaatatatatttttcattatatgacactttctaattggctaagaaaggaggtgaataaaaggaacccaagtatcgttcgtttcaaattactttttacatgtttttcatcaaaatttctactacatattatcattacttcatattttgaggaatcttgacacacaaaaattgtctctctatcgatccatagttgaggttagacctgggcattcgtgtatgcgggtcgggttcggataatatccggtcgcgtacgggtatgtcggatatacaattctaggacccaatagggtaaataaaaaacctcggttcagcttcggttcaggtctcttcgggttcgggtcggttcgggtatcagttttgagaaccgctaaaaacccgaaatccaatcggtttttgctggtttcggttcgggttcggatatttataccagaatacaccattgaaccaaagttttaccctgtttacactacattatacccaaaaatacaaacttgaaccaaagttacttagcatttcaaaaaacaacataacgtgaagcaattaactagagtaaaacatccaaatccaatcatccaaatttaaactgttaaagacataacatgcatacaacagttccaaatttcaagtcacaactcacttgaacaaaatacaagtccaacaaagaaaaaaactagatagcataaataatgtctttcactccctcctaccctctccgtgaaatcgtgaccccttgacaaacctatacaagtaaaccaacgtcacaaatcacaactcacaagtaaaccaacaccaacatcacaaatcacaactcacaagtagg

SEQ ID NO: 40351 - DNA, 417 bp, Arabidopsis thaliana columbia
gtctaatagtatatcaactttgcacaattatggtaaagatgacaatagcatttcgagtgaagaaaacaaaaagaaaaatggcacgaaataaggaaattttatatgtttctatcgaatcttctatacttaataatacttccggtatatgtagatgaagaatcaaataagtcttttcaataataatagcttactcttttacaaaagatatcaagcaagtggatgtgatcgaacactaacaacaaccatatgttaataagcattattagcaccaaccaaacagcttgtttcaattcatattctaaatgaccaataaattttatagtccgtgactaataatacgaccattcttcgatattaatgacagccaattcagttttcgatgatgacaactaatcctcgtgaagattgataattaga

SEQ ID NO: 40352 - DNA, 407 bp, Arabidopsis thaliana columbia
ggatctttagcgtgttagctgttcatatcttaatgaatctgatgagacttgggagaacttagttcatattctgtgactctctaataagtgaaaaatgtgatacatttcttaattcggactactatttgattgacatagctattttattggttggttagtgtgattctagaggctgaagaatctgatatgattgttgtttggattggggttttagtggattttgggtttatggatgataaagtctggatctttggcatactggactttggagaatttagttcatgttctgtggctctctcctaagtgaaatttttttctgaatcgtaactaaggacttcaattttattgacatagctatctaatggtaggctagtttgcttctatagactggagaacattgatgtagt

SEQ ID NO: 40353 - DNA, 448 bp, Arabidopsis thaliana columbia
taggactgatccgaagtatctcgcgcttgtacggctgtgtatcggagtttaaacgggaaccgtagtaatttaaataaaaaaataaagtatgagtaaaacaaatgaaaatacatttagagaagccaagcatctatagtctagtggtaaaaggaagttttggtaaagagtgaaacttccagagttcgaatttctctaaaaacaaaaacacatttgtttggaaagaagtcagttgggctttggccctggtttatctgatagtcagaaatgcagacgacctgattacttgtgtgagaagtccataccataatatgtcggtgcatttttattgagtctaaccgaatcagccgataggatagataagggctcacgtcaacgctagagataaactaacattgatacgtaaatgaaaagcttactttaaacaatgtcaaaaaaagatccacgattt

SEQ ID NO: 40354 - DNA, 588 bp, Arabidopsis thaliana columbia
gaattgtttgtatatattcttttattctttaaattgactttttttcatcacagattctctaattgactctcttcgttacttttacaaaggtaccagaagaaaaaaaacattttataatatgaggtcgaaatataacattttataatggtgaaacttcagaagatgaaaaattcaaaataaaaacctatggaacagtagtggataacgtttggtccaaaaaaaaatcaaattgttgaatgaatgaataaatctacaccacaaattcgcagaaaaataaaaataaaaaggtgtatatcataaattaattggagccagcgtagactatatagtatttgttagtatgcaaggtttgctttatcatttatgggtgtgtcattcattcatgtgtgtgaacgcagacatagtggattagaattttgtttgacttgagttaaattttcaaattctggtttaccaaaagtatgaataatcaactaacgtataccaaacacacatccatagattaattaaattatatgattttcaatcgacaacttacatcaacaattaataaataaaatcaagaagaacacaattacatatatgatt

SEQ ID NO: 40355 - DNA, 504 bp, Arabidopsis thaliana columbia
taggatcccccttccaacagaggttgatccgtcaaggtcttcttctctgcagacagcttcttctagcagtattaggaatgaactttacactcagaaagcaagtaactcagacaaaagaccaagctctatacctccagattcatcttctagtgatgatgaatcagatatggaacttccaaagagagtttctttcagatatcaagagaaaagaactgagtcaagaacccggcccacacatctacattcgggtgtcagccataaggacttggaggaagaaatcccgactcgagcttctaccagaagtcaagataggaggacccacaagaccacccctggcgtctgcttctgcttcataatttcacacaatgtccagtgacgatggagatgagaaagtagtccatagagatactgcacacattcataccaggccttatatttccatctcaagaagaacaaagggccgagagagaagccatccctcgttactgcaaaaattgacaaagt

SEQ ID NO: 40356 - DNA, 870 bp, Arabidopsis thaliana columbia
gaatgtacatactattacaaatgttatcgattaaaaacgtcattttcagatattagttctccagcgagttgacacaaaacccgattacgtttcatccggcgactcgctttgatattccatggattctcagttgaatccttccaagagacgcaagataaggttcgcgtctctcatctttaccacagggacgtattagtaaaacaatgaccgatcaccaccaccaccaccataaccaccacgcgcggctgagccgctccgtacaacaacacagctcctccgtcaaacaacatcttctttctcttcccaccctctcactttcatcttcctcactttcctcctcttctctttccattctctcgtcgatcattgctctctcctcttaacatctttcgtcgacagtgacccttctcttcgctctctcctctctcgactccctcttaactctcgctcccataccccgacgcgcttcaatcatcaccgacgtgctccgtttcttcagctcacgcgccttggtaccctcgacgacgacttcttctccacagacgaacacgatcctcatcgccgatcgcttcaaggctcttcctttcgttcacccatcaacgccaccactgtattcctctccggatttgagagcatttctggcttctctcgtcctatcatcgataacggacttctccttcctcagatcattcgctccggtgtcgttttgcggcagcttgagaaggaagaccatggcggcgatgaagacgagacggaattggatgaatctgagctcgatcgtgaaagtgagaagaaagataaagactttgagagttttgtggatctgaagatgatttttaaaggattggagctaggacgtagtgacgcagc

SEQ ID NO: 40357 - DNA, 1627 bp, Arabidopsis thaliana columbia
cctcataatcaccaaaaacagtctcatttagaggtactttcttgtgccggaatctctgataaataagtgttgctgtagtgttgtcgaacttttccccaagtggaacaaggttaatatccaccactgttttcccttgattttcactgtcggcactggcacccattattttcacttggctttgttccaagtatgttccagcagcaacctcaatttctaactcgttggtcacggggaaaatagaaaaaggtgcgacacttagtagaagctgaactttcatggggaagacacaaccacaaggtgaacccaaagggagttgaagtgagaggctccacacatgtctgctgacagtctatcaaaaggaaagccggaaatacacaggaaaaagtagttactacgcttgatttatcaactgaagtctgaagaaaaagtattcatataaaacattatcgttgccactataataggacgcaggataaccaacaagaagcaaaagaactaccatgtgacgaaggtgacactgcagtggcattgcgtcttaaatgccagcgacgatgacgtgatgacccttgtgccttagtgtggaatgcgacttgggttgggggaaaagctaaaaagggaaagacaatgaacaatgaatactcctagacagaaacataatgacactatgtttaggtgacaaataggattcccttactgacctggtgaaggtgtaggagcaactgatggattaagataaggatgaaagaaatgcatttgatgcgcctttgatcgggtaaatggcaaactcatcggaaataaccgagctgcaaatgataaagcaagctgataagtcatctatagattctttctacacatgtcgaatattcatagcagtgaaaagtttcgaaaaaatagaatgtttctaatagtatgcatactccatcctcctctcttgggtttaaaagtataatgccaactgtagaggataaaatttggccaagagaatgtcacacaaaatcgatatttcctcaagatactcagaaaagaaagagtaagacctatgtgcattctagctattaaaaggttgtgtgccaattaaggcacaaaacgtgaggacttgatcttcactctcacgcttcacaatcacagattccaaacttaaataatctaaactcttttgcttactttgtacataaccaaaattagcttctaaatatatctaactccaataaacaattctaaatatagatagaccaccaactaatcttgagctgtcaaagtaagagccacttacctcccggttaacctctcctatcaccctcgtttcctaaatcccacaaggggaaaagacatttgtcaactagttcataccaaagcatataggacacgaggcgagagagtgaagaagaagaattaacagcagaagcatcgcaaagttccgcatctcttatctcaaatcaaaaaccaccattagtcaataacggagacaccaagcctcgcggaacactctccgccgatcaaaacgaagactaaccagaacgaaaggtgtaacgatatagcttcctcaaagcttcacagatattgatttctccgttgtcctgaaaaaaattctcaaagcgtagggttagagagaagggagtaggtttta

SEQ ID NO: 40358 - DNA, 1663 bp, Arabidopsis thaliana columbia
tcatcttcaattaggctaaggtgagggtggtatttgcggatatgtagtaaactctttccttatatactttttgatagttgctgggtataggctcgagaattgtccttgttgatttatgtgaatttgtgtgaagctacgttgttagtaacataatatttgaaatgcattggtgacatgatttgatatatttaatatatattagattacaaaacttcttatgtatatgagattataaaactaaaaagtatgaaaaatatatttaaggatgttggactgtaattgggctgacaggcccattacagatcattaaccgctgacaagcaatgagaggaaggatcgagctacggccgtggtcttccaaaaaatatgcttgagtagccaaggttaataggcttgagtagcccgtattagtataggcttgtgaagccataaagttaaatactaaaactaaaaacgaaaataaaatataatgttgtgagcaagacgcatgtttgtttgtttaattgttagacattctgaatctttgctaagtaatggttgttgattatatttggaacgtttttactgtatgtccagtaggcagagttgatcccctaactaagtaaacttgttttactcacccctttttcccattttctccaggttagtaagtatcaaaagttgcggttgaaatttgttcgttggtgaattttaaataaagaaaagttttggcaagaccggatgaataacacgctatcttagcctgtatggcgggacatgtgttatactctttatatagtagagggagataggattttgtgagaatattctcaggatatgcatgacatattttgagactatcctgagaatatagcatattctgagaatataaaatattttgataatatggaatattttgagaatatttccataagatttaactcaacaagcccaagaactcacaagcatgacggtccacaagcctgacagccctcgagctgacgacgggacgacacgacaacccgcaggccggttcggttcggtctggtttggtccaagtgtcccactttacacccttatttctcattcaatacaactccgtttttgacgcatgagtatactattttgtagtactctttaacagctttccaatacactaatgacccgataattccgttcaaccctttggtcggagtttgaccagaaagtcaccggaaaagttttgtgtcaaaaaagttataacatatttcactagaatccaagtgagctttggcttcacccctaaatatctagttatttaggtaagtaacaccttgttaattatatccagtataattcttggttgtggatgacatctaatgtcttatccaaccctatatctttaacctcaaaaccgttttaatactttactcaaataaaccaattttatttcacatcgtaactgttaccacattcctcactctcaaccaatcccacaccacttctttcccacacccgctaaacaacaatttaaattttaacacttcataaaattcccaacacatcaaatacttcctattacctcatcaattaattttataactcagttttatattttttatttgtttcctttttgggtcgggtgtgtaatacatgtctgatatgtaattcagggaagggggggggtgttaattaatcttaatca

SEQ ID NO: 40359 - DNA, 2070 bp, Arabidopsis thaliana
tgtttttggttagattaccaacagagaatctttcccacttttgttaattgtctaataataagctcattttgataagtttgtataaataaagttagtgttgcttttgctttaacccaaagcgtatctttgggaaacttgtgtcccctgcgtaaaacatgtgagctacatatagcagagagatttaacgatttaaaatagttgtaagtgctaagataaactaaagattttaataaatatggatgataattaagaagattaattatcgtatttaaactttatattataagatcaatcttttattaatccgtgatccggtcgacagtcgacattaattagacaagatgattacgaactaaggctgggcaaaatattcgttcgatccgcttcgattcggtatttgatttgatttgattcgaaaaatccgaatatctgtaagatttttgagtaaagcaaataggaaaatgtagtattcgtaaaaaccgaatcaaataataaatattattttttaaaaagtcgaatatccgcttcgatccgtatttttttataaatattaaaaaatatagttatatctatatatagatatcataaatagtttatgtattgtagccattttatgtttttatgttaagatgtttgtttgatcatttttttttcatgttatgttttgatcaatggcataaaaaattatcgggttttagtttttggaattagtttgataacattttgttgaccggtgataccaacaacggttatgtttgttatttagaacttattttgaaagcatgttaaataaaaactttgaatatctgatatgattatatagtatacatatttttttaatatttaaatgtattaaagcggatatccgcaaatatcacaaaaaaattcggatattcgaaatttcggatatccagaaattttcgaagcaaagcaaatcacaaaatcaaatattcgtttagaacgaatcgaataacaaatatcacaaattttttgaatattggcttcgcgtccaggcctattacgaacaccatcaattcactttgccacgtgtagtcaaaacctgacctggcttgacttccacaccacttccgttcccaattcgccacgtgtcttcccctctatttaaacaagaatccgaccgcataaatcaaacacaccaaaagaaatggagaatcatcgagtaacaacaaactccgacgagccaccaccggagtttgagttcggatcgttgactccaacttctccgtcgcaagactctttctcagagaattctcccgccgatcatctctttttcaacggccgtctcttgccacacgcattcccggcggcgagcagtatttatacaaagcggtcaatctcgagtacgaccagcgaatacacctcccggtgcaatagtacgaacagcagcagtagttttggtagtaacaacagctcaacttctcaatctccgagaacgagctattcaaccagtaacaagacaacagccccattaatcaagagccactggatttgaagttgagcctccaattagcagatgtgcaaaaccgtaaatacgatgagcagtagctcctactcgtcgccacaacacaagagaaggaaggcgatggagatggcgacaacgtctctgtacaggtcgtattcatcgcagcggtggcaatatataactccggtaccggtgagaatgagtggagggataagggtcggtggccggaagaagaagcaggtgagggtgaggaagaagacggaagagagaagggtgagtagggtgatgaagttgtggagaaaacttttgatggcggctatttttgtttgtagagagtgtcatgcattggagggagcttgagtgagacttgtgattttgtgacgtggttatgattaagaaagtattgattgttcaatagtgaagacttgtgacactgtgacgtggttataattatgaacataagttacataacgaaagtattgaactattgattgttcaacagtaagcaaaaactctattgggcttgtgggttttcacttttcacaattgtgtatctatatatttttctttgattacttgtaaaggga

SEQ ID NO: 40360 - DNA, 1443 bp, Arabidopsis thaliana columbia
tgtctgaaccactaattccagagatttgtggctctataccaaggtattggttgcagggagcgttttggctttaacttgttgattcgtaatgcctgttaggttagctctcgtcaatggtgattgagtctaggactggtttaacttgagggtctctgttgcggtggcacttagatttggttatcgaacttgttgtctagagataatttattgagcatatcaattacttgtaaactgaggaaacgaaactactcaattaccccatcctcgggaattctttacctaattgattactttgtttgctttgctgttgtttactgcatcttgttacatgttgcttcgtttttacatttctctcctgttactcgacttgatactcgaccacccagttgtctggcaataaactgtgcagtcgagtatccttgttacattttctgtctgttactcgacctgtcactcgaccacacccagtgcttggcagcaagctgtgttggtcgagtgtttttactgttctgcttgaatttatgtttcttgcatgttcacttaggactgctagaacaccccaaaacctactattgcttagcttaactttgtgaactctgattgcatcttgattgctagcatcacacccatttggattgacaaccttcagtactacaacgacatgatagtgctttaggattaattgatcttaaaaacctattatcactaaacacagggacttctgatgacgatccaagttctaccctaggtggaagcatggggttatcttgattgtttaagaggtttagaaaacttgaatgatgagtagtatatggattacttgaatccatatcaacttgtttatgtgtgtttattatggtttcgtgttttaaaaagacaatgaaggaaagagcttcagtgttttaaagcattatgtttaaaacgattgagttatggtttggtgttaagttacatcattgataacagaggtaaagtgttcacagagtgcaatctatgacatacacaaaatatttatcttagctaaacctaccaatcattgataatagagagcataaagatgatgaagacaccaaaaaactttaacataatatcaatcagtcataatcgaccaaataaaacaaccatttatcacaataaatacacttatcattcattaaaatattgaattctttacctactaaaatataacctactacacaatatgattatatgaatttacctttcattaggctgttgaaagattgaatgactacaacaaatagtgatcattgttgcaagtgttccaattaacctcaaccaaaacagagagacgtataaatatcaaaattcaattcagagaaacaaaatggcaagacatatgtagatgatttccagatatatgaagatcatattggacaacatatcaaaatcatattctttttttttttttttgaataccaggag

SEQ ID NO: 40361 - DNA, 1689 bp, Arabidopsis thaliana columbia
tctccaattccatttctaattctgctgctctctttcccttctgcctctcatcttctcccgccttatcaatcatctttcctttcgacctcttttcatcaagtcttagacgattcatcaaagactcgtgattcagttactgttcaagtagcatcggatcccacctcccatttccttcatcatcactcggttcattacctttaaacatttcattctcccagcatgaatccacctcgctaggattcgttatcatcaagatagcttgcgaactgtccgaggagatgttgatcacactcggactcttaggttctggcgttaaggattcaaatgagtccgacgaggaatcacccccatcgttcccattttctccttcttcttacccattcgggacatagtcttgagcacacttggcaattaactgatcaatcgcgtgttctaactcattctctatctcattctctatggctccattctcattttcctcgtcaatacccgtaagcattagcatttcgtactcattgttggctccatactcattcatttctccgaacgcaccatccacctggatcactggcacatcgaacaagtctccatttgcttcttccaattctaacccatgttcgccaattgtccccagattcagaacacccaaacttccctcctcatccgtcgatggcacatagaacattgatagcatgttgttaagaatttcgttcgcttgttcttcggtcgcattctcagttggtaccgcgaataactcgccatcctcagtgatcatccactcaacatggttcgcttcttcactagataacaggtcatcatgatcatcagcattctctggacattcggacggatcggattcaattgacatagtggactcagtagattcactatcttcggccataatctgatcattcatgcccatggacaaactatcatcgtctgtactgctcggcggacggaagttttcgggttgggcacattaagactgtgcaacaaactgactgtgctgcttcttttgctagacgacatctgcaaaacaaggtaaaactatcccccacttagtcatctaaaagacgaacaacaggaatctaatgttgcattctgcgactcaaatttactcgataaaatcattgaaaacccaagtgtccacgagcatcgcataaccatgctctgataccaaaaattgtaacgcccccgaatcgccctatggccggacaagccacgggcgacccagttacgctacagtgaagatgatcgatcacaacttagtagaggttccagatgaatctggttccttaaccaaattgtgattgaccctcctcccactaggaacaccacttaggcttgccaacccttggatattctagtgttgagcgacccatactaggtcttatatcattaaacactcggctggctttaagaaaacattttatgcatagtatatagcttatacttggcaaagagttacccaaaaatatatctttatatcggatcctcgttaaaatttacataataacaagtaattttgcagaagcaacgtaaaacatcctagttccggcatttcctaatgttcgtctccccgctatggtcatcccactatgggaaaactagatcatggtcgaggaacggaccaaaatacttagtcggaagaacaagaaagttcaagtgagggatcctctacaacctgca

SEQ ID NO: 40362 - DNA, 344 bp, Arabidopsis thaliana columbia
acaatcaaacgaaaaaatgcataagaccgaaatagtttccttttaacttgtatgatatgataccatttgagtcataataattataatctagaggtactttcttgtacaaatatgtgaaatgttttgcatatattaatgtttgaaatattagacttagtaaatccgttttgttaatatcagaagttagtatgaggattaactggatgttactaagcaaccccgacaatttgattccttgttctgactcataaaccttatacgactttaaaattatattttaccacattgccaagtgtactgatctacgtgaatattggtgatcgagatgtaagtgttatgagaag

SEQ ID NO: 40363 - DNA, 367 bp, Arabidopsis thaliana columbia
tcaactagaactctctttacatcatatttataaatgaccaaggagattataataggattgttatgggggatgcgaactctctttaggtcatcattactaagggagattacatctctagtcctaggctttttagagctcgacttgtcagttggctcaaagaaggatacatcagagaatgctttggtaggttctccgttgatggtgttgatgattctggctatggatcagttatctgtggaggcttctggagctggtttggtggaggtttcttctccagagtccttcttcttcttaatatactggcccaggtggccttgacagataagggcaatggtggtgagccgttgcaggttggcaatagtggtgg

SEQ ID NO: 40364 - DNA, 577 bp, Arabidopsis thaliana columbia
tggaaccaaaatgtctttttccatgatttaacgacatgtgcttcacgtttcttcatatgtctttttaccgacttcaacaaatggtgatggtatttatcgaaattcatcaatttcttcctaaattaaattggtaaaaataccaattgtcgaactcactcaacgaagattggactgtaaacggtatagatgaccgtatttgcttcgtggtatggtcgtgcgttgtctcaaatcgcaaaagagccaaattatgtttaaaaaattcaatgccatattagaaaccttaatcttctctaatgaatttgtacgacgtaatatagaatgagaggttcaaattattaagaaggaagtttaacagacttagaaccgtttgcaaagttttgggagagatgatcggtgacctatacaatgagataatagagattgagggattgacaatctgagggacgcaaacattacactgatacgttgagttgatatggtgataattgtctctatgttcaaaaacttacataagtagataatgtggagtctctttgatttcttaacctgaacgaaaaaccaaaaggagaagagagtg

SEQ ID NO: 40365 - DNA, 512 bp, Arabidopsis thaliana columbia
ttttttttttgcaggtcttctttcatccttgcacggtgaagaacaaagactctgcttccctttccaggtttcactttgatttttatcagatatttgtctttgtgctaatatatggttatgaagttctactgtttcagatggatttcgttaataagtgttcatgggattaatacaacaatcttcagcattaatacaatttttcttttctttcactataaaggattcttattcgtttggttgttgaaagataccaagaactctcatcaaaactagagtacaattttccattgaagtagcaagagtagatctatggaggtgctttccaggcatgtgtttactataacttaatttcatttgtttgatccaacttcaaagcttcattgctataactaattttttcaaaacatttcaggattttgaagtaacgtgaagctgaatattgaaaatatgcaaagacaagaaggtaacatatagttttgacatgatatctctaacgattatgccacttacat

SEQ ID NO: 40366 - DNA, 304 bp, Arabidopsis thaliana columbia
tgtattacttacctaaaagagtcgatttgtggttgtattgaaattccaatggctcttcttaacagataaacacacaaataaagaaaatcttcatagaagacaagcaaaaacattacaataatcactaatcattaccatgacttacaatgatactaataaccatatcattacacaaatctcacctaaaccttaacattcattattaatgtaaccactatagtagtatattactaacccaaaaatctctattagatttggcaaacatgaacaatcctaaatgaattttgaagtataacaatttaaa

SEQ ID NO: 40367 - DNA, 518 bp, Arabidopsis thaliana columbia
tgatatgctgcattagaaattaaagtacatacattacaaagaaaaacaagaatcagaaacaaacaaacactactcactgaaatacaaatcttaattacacattttaaactttcactgaaatcatttaaaaatgtttcactaaatattcactaaaatacaaatattcgtaaaaagttaattgtccaatgaaacttttattgtttgtttaattcgattcgacagtccactttttacgaatatttgtattatagtgaatatttatagtaaataagtagtgaaagatatttagatagtttcagtgaacgtttaacatatgccttattaagatgctgatatttccataaggtaagtacaactatatgagagcttgcatcaatctaatccaaccatagaataatggcgaattctcaaagatcatcatctctgatcgatccaaggaacggtttctgcacatcaaactcgacattttacagtgaacgcaaaccattggcacttccgtcaaaatgatcactcgacat

SEQ ID NO: 40368 - DNA, 555 bp, Arabidopsis thaliana columbia
atgttttgttttctaaacgatattgttaaaaagtctaatcatcatgagtcatgattaagtgaaccaaaacaagtttaaaatcttctgaaaacgacaaaacaacacaaaggaaaaaaagaagagaaagttaatttcaagggacttttaatttcaacttctttatatagcaaatatgaaagagtgataactcaccaaacaaacaaatttaaatttatttcatctttacacgaaaaaaaaaaagagaaataaaaacatgaaagagtggtcactcaccaaacaaacaacctaaatttagataaaataccattaatgcttaaaaataataattaaattaggaacggttacacattcaaatatgtgttttgactgtagaatacaaaaacaaatacatacaaatatcattatctaatgttatgcatgagacactatatatgtatgctccacataagaatcatacaaagcttcactgtgattgctcaacggtctagattctgtcagagcctctctcttcttattctcatgttacattaatctttgaaccaaagtctttttgta

SEQ ID NO: 40369 - DNA, 484 bp, Arabidopsis thaliana columbia
  unsure (1)..(484): unsure at all n locations
gtatnnnnnnnnnnnnnnnnnnnnagacccgactcggacgcttggcaggccgatgaagcgcaggccgctgaaaagcatcgttcgtcctatcgtcagactagtagagctagcggcgggtttggccatcgagtcccagccctcaagagtaagtggggatgctcggcgcagggattttctttatgatgacctggcgataaccggcggtatcgcattctctactctgaacatatttcgtacattttctacggaccagaggcgacagaaatatcccacgtatgtggtaggttgtagtacgaccttgagaacctagcaagttccaggctctcgcaaggcattgtgactttcgcgaatttgatagattctacgaagtcattaccctggttaaagattgcactgccgaggtaagtttgccaagttcaaaaccagaactttactctgagtaccatagtgtggttcagcatgtaggatcatgctgtaatatgag

SEQ ID NO: 40370 - DNA, 677 bp, Arabidopsis thaliana columbia
tatttcgagttaaaaaaagcgttttgattagaaggtaattcatttctccattattattattgttaagcttttggagaagaaaaaacggttctatatattttttcttttcttcatctattccttctctttttctctatgtctatgagagaagtttatgtatttatgtaagatcatttgatgtttccaataaaagttttctccaattttgacacatatagatattacaatttgagtaaagttgaagaggatttctattgagagttatagagcaatgatacacattgtattttgtgaggttgtgatattcatcatttgtgtatagttgcagatttcaaagaaacaaaatgtattattggtattgttgttttcccgtgcaaggcacggcacgggctgcctactagttaagatatgaatttggaagatgtcaatgagagttattttccatttccaaaaagaaaagaaagaaaagcatatgaaactgacggataacgaatggtgataactatttaaaattatggcatacccataaactcgtgacgaagaagatgacaacatagaattggtgaagacaaagacatgcttaataatattataaaacgaaaagtgagtttggtcgttgtcttacgggttttgaaatcgaagaacacaagttgactgattgactctacgttgaagtg

SEQ ID NO: 40371 - DNA, 483 bp, Arabidopsis thaliana columbia
  unsure (1)..(483): unsure at all n locations
tnnnnnnnnnnnnnnnnnnnnnnnctaaagctcattgttcaacagaacgatgctgtcattcattgtagacagagaagcttctagcgcgctctgaataggagagtcagtacgtatgcatgccgctgcttggtgaaggacacatacatgttccttaagcgccgcttcgtactcgaatactgagtctttcgtcatcggaggacaaggcattcgaggcagtcgctttccaagactagaaagtacgcacggcaattagcacatatccacatagcttatgagcacagctaccgtacttcttcacaacagcctgaacagctgcctgtgcctcgtagcgtttccgctcattctgttgccgtgcgatgacaggacgttcgagggcttgtagcatatcacggatcttgtcctgcattggttctgggagcgtcgaccatttggacttgatcgttctctctgatatatgccgtacttggggctttagataggcgt

SEQ ID NO: 40372 - DNA, 929 bp, Arabidopsis thaliana columbia
tatgataagtttcaaggaaagacatgggccatctaaaggagagatgagccaattacagaagggagccccaaatgacactctctattgagacagctcacgccacttataattaatgtagagagttaactaacgagattctagagttctctagtaggtccgagacggatggaaaaggatagtgaaagttttgggtctatagtgagaatgttctaacgagatgtctttgcctttatacgtccacgggatatattttagaacatggtctctgatagtaggagagttcccgctttttcaaaacagctccactagtctagctttgttgtttgcttgaggacaagcaaagtctaagtctaggggagttgataacatcgtatttttgcccatttttactatgttttattaggttttccatggagaaatcaagagttaaaggacacttcaaggtatattttgagtatttgggcttcaaggaagaattatgagttttcatgcaaaaaggagtagaaacgaccaaattccgtttcataacagtttatgtgcctcagatgtttagcatccggccaaggtctacccgatatcgtcatggaggtaacttggtttcattggaaagctaaaagagtcaagattaatttcgaagtcgaatcgaagaaagccatgaagccgttaagaagttatggcccaaagagtgaagacatgtcatagaatcgcggttttggaaatgatcaatctaaaaccgccgaccgaagagacttgaacccgggtgtcccctcaagtcttccatcgatcattagggtgcacaaccactccttcccttcatcttgccaccgacttcaagcctccctaagtagcccaggaacttggcccatcacttactaatcaatggaaggacgtttctccatttgacctaatgaaacctataaatataagga

SEQ ID NO: 40373 - DNA, 1269 bp, Arabidopsis thaliana columbia
ccagttgtagtatgacaagtatgatattatggtctttacacaacaccacaataaaaactactcagatgaatagtaatactcaaacctttcaaaacaaatattaaaaaataaaggttcatcacaaaattccaccatcccttttcatagtaacaagttgcttacccccagtcatgcaaagaaactgttcgcaagagagagatcgagtgtgacagatcatataactccaccatcccttttcttgtacccacagcaagaatttgttgctctgaagccactgatgcacaaacagcatcaccacccaacttcttctcagctctaatactctcagtgtactttaaacctttcttattcacagagcatactactagctgcccatccgaatttaacacaaacaataacttggaacgagtgcaaagttccagctgaacaatagccggttttgtagagaatttatcatcagatgcaagtgttggtgaagctactccagagactagcccattaccaagagtgtaggacaagagtctatcatcgttgctagcagaagggtgggagccaatactgaaagctccaccaaactacaaagacaaacaaaacatgagaaatcaggaatcttgcacaaagaattcaaaaaccccaagaacaaacaatgcagatgaagcagatgtacattacctctcctttccaggaaatactatataaagatccatcggagagtcccaaaagcatagttttgctgtccctcacaaaattgctcctgcagagagagaaagaattggccttacatttataatcccagagttttaactgtgtagactcctacggaaaatgttgagcacggcagagacacgtacagaaaaagcacttacacagacaagtccttgccagcaaaagggacctgctcacttagcaaaagagatatggttgcaaaacacaactccgagggttgtctctctccgggttttactcttttatcggtaaacttaattttatatatatgaagaaagaacgatgatgtctgcgaatcaaaaaataattggtgagaagacatacaaaaaactggttttttcacaagttccgagttttcatgcatcttgatcaaacgattcaaataagatactactgaaattagaggctttagaatgtctgaaatcatcaaccaatcaaacctaaaaacatgtttttctcatccttacacataaagaacaatctggagaagaccaataacaagattttgtataacaaatcaataaattctcagctggagaaagt

SEQ ID NO: 40374 - DNA, 727 bp, Arabidopsis thaliana columbia
tgcatagttagatttcgttaatgggaattagtctgggttagctttgcttgaggatttctatcacgggagtgaattgatctgttgttgaacctattgtctagggatagcttgattgcgcttgttaaccattcgaataggctaggataccactctattcgattaccccatccttaggaatttctcgtctatttgatttctttgttatatcgttatcacttaatcgttctcattgcttgtttctttgtttttgcaatcactcgatcaacttactcgaccacacccagtgtctggcaacagactgtgcagtcgagtacggttgtctcatttcctgtctgtcactcgaccggtatactcgaccacacccagtgtctggcaacagtctgtgcagtcgagtatatctgtttcatatcctgcctgttactcgatcacatcctacatctggcatcagcctgttgtggtcgagtgattttagtaattctgttattgtttctgttttctgcatgttcacttaggactgttagaaaccccaatacttatattgcttggcttgacttagtgacttctgatcacatctcatctgtttgcatcacacccatttggattgacacctaaaatactacaacgacatgattagggttttaggataattgactaaaaatctattatcaatttggcgccgttgccaattgggcgtttgtttgctatatttgagatttcagaatattta

SEQ ID NO: 40375 - DNA, 552 bp, Arabidopsis thaliana columbia
caagcacccaagaaggacatagttagatacgcttggccatagctccttaggactaatcatggagtatgagagtgcattggatgactttatttcttcctgaatcagttccactcgcgtagttcctctgaacgtgcatccatcatcatctgatgctgcagggcaacgaaggggaggaataccggaggaagacaaccaatccaaaggccaaacaaaagaagcatcgtcatggttaccaaagagagtagcccatggaatgcctctgtctcttgtaggagagattgctttgtcccaaaacaagcttgcgttttggattgctatgttgttagccgtcacaacatctcccaaatagaccacaaaatctgttcatatctccaaaaaaaacggttatttcagttaaagctaatctcacaacatttttaagaaaattgaaggtcaatatttgtgtttggacgtggcgttttaatagaatcaaaatttctgtagctaaaccaaaccaacaaaccgatccaaagctaaaccacatcttattgtgtggttacactctttctacac

SEQ ID NO: 40376 - DNA, 539 bp, Arabidopsis thaliana columbia
  unsure (1)..(539): unsure at all n locations
tctnnnnnnnnnnnnnnnnnnnnnnnctaaagttaagactgcagtcattcggccggcgatatcgcatgttttgcgcagaatcccttgacgtgcccgcggacacgatacatgaagtccttcctaccactgctactcaatccgggatgttgactagttttctgcgtactctgcggaacagtcctatgagaaaccaacatacatttatcatactgtccttccacttgagccccgtaccaacattgagaagctcaagaaggcctggttcgatgttatctcaaactatgactctttccggacggtcttctgtatggtcgacgatgagctggccccgtttgcacagtgcatcttgacggctgagggcgtctcatccagggactggaacgtttacacaagccctaacgagtgctccgcagaaaacgacattatcgaccacgctcttcggagtgctgaagaatcaatcacattgaggagactccctggaagctgtctttggtgcagtcatcgacgaagctcatcatgatcctcagcatgttccacgg

SEQ ID NO: 40377 - DNA, 463 bp, Arabidopsis thaliana columbia
aacaacaaagattttttggataaatatgcactaatacttgtatatttggcacaacaacacggtattaaagtctaaacatttttatttaattatttatgacatctaaattttgaaaaaaaaaagttgttttacatataatattggctttatttccaatttagctcctaactttctattttctctcacaaaagagaaaccaaacaaggttttgattaatttgtttagctaaaaataaataaactgcattatacacttcaaatcgtgctaattaggaagcccaaatcatatggaggacgagccacttttaccacaaactgggctgttattagtggcccaagacgagacggatgtcggatcatgcgatttggctgttgcaatccatagacaccaccgagcgagcatcttcttcttcttcttcgctaaccggagtaatcgtaagcagcttcgactggtgaaaatgtgt

SEQ ID NO: 40378 - DNA, 555 bp, Arabidopsis thaliana columbia
ctttgtccaacagaagtgttgtttacaatttcaatctaatctttaccataaacacatattcgaaagatttgtacttggaattctcctcatgagtacatagacgataacatgttctttgttttgttttgggatattggaaacctaaaggcattagcagagcagccgccaatgtaccctcctcaattctttcgcactctgctccatcttgctacgcagagagttgtgtaagcttttctttgtctttcgtatttacattattcccaagtttagtgtgttttttgtaaattcgatgccttcgtcatatgattaaaataaagtggatcccatatgtatgagctatgatttgaatttcatttcggtatatattttatgaattgtaaatttgcaatatcatgctaatgctatattagctgtccaaaaaaagaaaagagtaatgctaaattagctattcttcttatgaggttgtgattcaaaagaggaactaagcaatgcgaaaaaatgagagaaaacaattttaacaatttaatttggattagtttgatacaaaagcatagg

SEQ ID NO: 40379 - DNA, 500 bp, Arabidopsis thaliana columbia
cttgagactttagcaaggtacgacctttgactttattagtttgtttgaaaacttgctcctaaaatttgaaatctcatagttttagtagttatgttcacatcatcaggtctcattatcactctttaacattcattttcttgttaagctctcttaggtttaattaagccatggagctctgttctagggtttgtagatgagaaatgtcttaagggtctgtttggttagctgcatagcgtttagaacgctgttgctagtgcgttctagagtctaaaaccacaatgagacattgtgggtcttgtgtctgattgtactaaatgtatttggtgggtttgtcaggctttgaagttgtcctgttctttcaaagggttaataatcaattttttacccatacatctggtttttaaggtttgtactgttttcacgttagggtttttacatactaatagagatttgtctgtttctttaatggtagttctagagaggtgaaaataaccaacata

SEQ ID NO: 40380 - DNA, 439 bp, Arabidopsis thaliana columbia
  unsure (1)..(439): unsure at all n locations
nnnnnnnnnnctaaatggaaattttcataaattagacaaatttattaccaaatctcatacaacactatttaaaacattgataaaatataaaaaaaactttgaatattgactattgaccaataaactttattatttgactattaaatttgtgcaataaattaaatttaactttttacccacatcaaaacataacagtaaaagagaatgtggatttagacctttataagtcccatgaaaaagggcccattttataggtatccaaaacaggcccaattttctggaaaaaaaaaagaagaaacgatgccacgcgtttcacacctgtccctgtctctttctctcgcttttaatttttacttaacgacaaaggatagaaagcatggagattgaaaacggaagccatttctagcaaaacaattctctcttttgtcttgaagataag

SEQ ID NO: 40381 - DNA, 538 bp, Arabidopsis thaliana columbia
ctgattaaagccatctttaaatcgattatttaagctgtgaagcagaagacactttgaactgtttcaattcggtcattttttggcaacaacatatagcttaaacatttatatacactgcttcttttggtagtcaattggcacttcgaactgtttcatttgttgtctttttttggcaataacatataattttctttttttttttttgtgcaacaacatacatttacatgcactgctttttttggtggtcaattggtctgtgagtatgaactgtttcatgttcaaatgtttttcttcatattgagttgtgtacctttttagaatatctgatgtgactatgttttcatagcctgagcattgcaaatgtaaccataaggaaaaattacatattgctttcagtcaaaaggcatctatagctgaactgaagacggggttggatgaagagagaaccaaagaagagaggaaagagaaactgccattgctgaactcaaagctgcgatacatagatgccaaattgaagctcaggaagaattgaaaagat

SEQ ID NO: 40382 - DNA, 555 bp, Arabidopsis thaliana columbia
tgatccactgtccacaccttgagttcctatcactcctacatatcacattttccgcatgtggcatgataataaccttatgatatactattcgcttatcatattatttaagtcgaatactcatatatatatatatacatatatgtttcatactgaaattatagtttgatatagatgattgaattgccctatttcaaatctaaatattgaataaatagtattaaaaaaaaaaattgaaataaacaaaggtgggtccaaatgcatgttatggatgcatcccccccatgcgacgttacgttctcacccgacttgttacgttttaaggatcttctcatttaattttatcttcctaagcaaatcttcattaatgcttctgcaaatttttattattattggttataatgaatcgaactcaattatttaatttttctccataaagatataattacaagagagtcgatcgtatgctatgaatcggcagtggattgtctctttctgcctccatgcccaaattgcattacatgacgcacaaattgaggaaatgagtatattatatgg

SEQ ID NO: 40383 - DNA, 529 bp, Arabidopsis thaliana columbia
tattttcttccgaaattttataatttccaatgattttctttataaaaaatcaactacataagtaattattggttcctaaaaacctatatagtagtatagattcaaaaaaaaaaaaaagggaacagatcataaaatttgcctaatctagtttttcaggacttaaaaagaatgttctcattagtaaatatgcattttcagattacttataaacatatgggtcttattttcccattagaatataagataaatatgtacattttattgactaatttagaataataatatttgaacggtgataaatctaaaagataagggaaaaacagtcagagacatatatgtaaacattttgaaaaattaatataaaaatcttaatttgagcacaaaaaatataattgaaacagaacataaaaacaaaaaaaaatatcaaacacatgccttgtctaaacaaaactacaataatattttcatattattattatgttggcaagcacacagcttaaaacagccatattaacttatctcttggttt

SEQ ID NO: 40384 - DNA, 570 bp, Arabidopsis thaliana columbia
gagttgctgaacgaagaaagaggaaatgtgacgatgctttaataaaagatgttccattggttagaactgaagaagacaagagggttgctgtggagattgatcacgtagagcgagtacatagagttacagaggttaatgatgtagatgagacttcttcaaggagcaaagaagtttttgtagggagaaggaagaagaatgaggggagtgaagcggttgtggataaggattacatgaggtacctcacatggcttgtagattctcttagcgattcgacaactgagccaatggaaaatcttcagaaagatgatatggatactctaaaagaatcgacaatggtacctgaattggatccactagtagaagtgaaggttgaaccacatgatgattggtctgattatataattgcgatgggtgatccccttttttggatggagaggagtgtacaccgtttgtggcgtcaagaaagtggttgatcttgatgaaggaagcaaagagaatgaaagtagtagcagttggtttagaaaggagctaatggatgttttgaaaaatcgatatgatgaaggagagatg

SEQ ID NO: 40385 - DNA, 705 bp, Arabidopsis thaliana columbia
attcaactagtttacctaagaactagaaaagtcaatattattaaacaaaataacaagacttttaacaacgccggtgagtcggttactggcagcattccggccatcaccgaccttgtctcaatttcaacttttgcggctatctccactcaatttcaaacttctgtcctaaaactataacttgtatcaaaagatatgttcctgatttgctcctattgttttattgcttgttcatgcgcttgttgttgtactcttctggtatgcagtctctaagcattccttagctctatggaccttagattggagatagaagcttccattctgcgcattgcgttcgaacaacgtgtcgtatttctacaaacataacatataatctcaatgagaataagggtctcttttttcaatcagcagtagaaactagaaactataaaccgctattcgcgtttgcacagccagcccggggtgaagtgtgaagacaaaccttaagaatctcgtcccaagatgatttctcagttacaccaagaatctgtctagcttctgcttcacctatagtcaaccctctcttaatagtctgtgtcgcttcatgcgcaaccccggtttttgatgcatctgtaaaccattccaaacaatgtttatcaacaatttcgcaaagtaacttacacttacacacacacaatacaacgaatctttgataaattcattattgcc

SEQ ID NO: 40386 - DNA, 605 bp, Arabidopsis thaliana columbia
tataaaattttaaaatattattaatatgttgttttaataggggttacaacttcagttttttaacaattgtctcatagattcgtggtatagccttacttaataacaattataaactgtaaaatataatttttttataaaaataaaatttgcaaattttaatatatattacttttaaaaaataaatcgtcccgcgatataccgcgggttaaaatctagtgtatatttattttgtacaaacacaaatatctgattgaataatgtacataaaactacaatatacgaaaagtaaaacgataaaactttcaaaggtcgtataagttaccaaagtgactaagcttatgaatgtgaaaggcacatcaactaagcgtttatggtttcctcaacctttttatcctaaacaaaaacttcaaatatacttttcaaaaaataacaaagaggcttatactatgacaaattggtaaaatttaattcagaattttctatatcttttcttgtcttacatgtctttcactttcagtaagacaatatattaatcagaaaggaaaacacacacactcacacattaattgagaagaatgagaagttgggcgatagattatcagtga

SEQ ID NO: 40387 - DNA, 786 bp, Arabidopsis thaliana columbia
gggtcgttacgcgtctatgagtggtacctatctgagcaggtaaacaagagaccagttactacgtgacctaaacaaagccaaaaaccagtagcacactggagttatagaaccgaatgcatgtaaaaactgcagaaaagcaggaaggagagcacttaggctccaagaagaatctgaagctgaggttagagggagaacacctccatccggatcagcacaaactcaagcagtcccagccgcataacctcgttaaagcagagggaaaacaacatttccatccaataagaactcaccaacagcagggggtgtccggggacgagccgacaagaacttcaggaaagagtaaccggaagaaagcttcaaaaccacggtcggagatgagggagccggagaaagtttccgttaatagttaaaaaaagtggttaagatctgttatttttgaaaacgttaacttctctgagcagcctcgagaaaagtgcccgagagagttttccggagtctatctttttgattttacaagactcattcaaatgaccagtttaggcttgaaccaagagaaacttttatagaccagtctcagccgccaaatattcttgaagctctccaaactccatcaagtctccattaatgcaagtttaagatccaagttcaaggccaattgaagactgtataaagtaattcactaaggccgatggaaataggattatgattcttaagtaattcacaagataaaaaaacgtttcttagtacttaaacagctaagtaactagatcacaaggtaacaagact

SEQ ID NO: 40388 - DNA, 1233 bp, Arabidopsis thaliana columbia
tgtgcacaatgcttaattggctgtgagtcttttcaacttctctattattggtcctgttattttgttggtgtgctatatgaggtggttggcataacgtgtgtttgtttctctgtgttattggtcctacttttttcgggatgaggaactaaagagaaattgattttatttgtgataatgtgcgttttaggcctggagtgaactattgcaatgttcctgaagatgaaacaacgaaagcactgtatgcaatgtatcagatccctgtccctgagaaccaggcttcgatgcagagtaatcccagtggccctaagcctcagtttacccagggagatgacaacacaaagaagaagaaaaagggtttcaaaaagatagacaatggaatggataaagaaggtgctcgaactgcagaaactaacaagaccatccaaacatcgtcaagaaatggtattcaaaattcgcagggacttggcgacttggccgaggatgagaggcaaatacataaacagaaagagaaaggaaaagcagtggatcacctctctgatgagtcgaagacgcttgaaggcgaataacaaaagaaaaacagatctagagagttctatgctggccaaaaaaatgaagatcgaaagttttctgtttcctgatgaatctgaatatggaaatggacgtcctacctcgagtagtggtgtccctatcacgtcagcagatataaagccaaagccccgagtctcctccaaaatgccaaaagaggaaggaggagcttcagacactggaaatagcaatagcactggggggattaaaaagaggaaactgagagaaagccatggttctaggatttacagtgagaacgaaaatcatgaacgaaagaaagctcgagttcgtaaagaagagaaggagcctagttattcacaaggcaatgggaagttggaaaagaaaaatagaagtcattcgaaaatagagtatgcaaatgttcagaactcaatcgcggcaacctcaagttcttctaagatttctgattctcataaacccagaaacagctcccgcgaagtagaatgttctcctgttgagtcggtgtcttcctcacctatgaggctttcaacccggagaaacgtatatctgtgagtaaaaagaaagaagaatcttatgatgctaacgtctttgcagcaggtagtttgaaaaaattctcagatggtgaaggtgaagatgatggtgggagtgatagatcgcagagtcagatga

SEQ ID NO: 40389 - DNA, 774 bp, Arabidopsis thaliana columbia
caactctcatcagcttgcgcatcagttttcttcttgagcccctcaagtgcttccaagacctgtttactcaaatgaattttactctcatcttgcatgtatgtaaaaaagttacttacaacatttataagtcttagttgtcgaggataatgagatgttctaaactatcaagacttttaaagttctcccaagttctaataacaacatgaaatcgtctcactagactacacgtgagttccatttttcgataaatcggttgcaaacaatgataactaatccacctacttggattccaatgttcagtgttgttcataggttgctacaagaattcacaaggagaaacattccctgatatatttccacctaacttatcactaagacttcagaggaacagcattacaagcttatcaacaatcttgtatcctatcttcaaacagaagctcaaattttcaaaagcactccaacatattttcacagaaagtatgaagtttacaacattaccttcttcatccgggtacgggcttcagatttcttagatttgttgtaaacacgcctcttctcagcttggcgagctctctttgcagctgaatcagctttcttggtaggagcagcagcctcacacacaatcaattgcctcattggcttctgtacccacaaattccctgtccaaacatgtatatttcagttccaaaacccctaaaattttgacactagcgaaagcataagaaaacgaatggattcaaaatgccgataacatttcaataattctccatgacc

SEQ ID NO: 40390 - DNA, 501 bp, Arabidopsis thaliana columbia
aggctgcaattagagagagagagtttatgtcatctatgtggctcatcgtgtactcatgaaagctctacacatgaatcatttgtgttcaagtgtttgtcatgtttcaccattactccacatgttaaagtttaattggacaagttataatggatacaaactatcattaactaattgggttttgaaggttgctatttgaaagcaatgtctacatattgttcttggggcttggagacctataggattattagtttatacataatgaaatcgtgttggatgctttgatagtttgtgtccatgaaaacttgtccaacaagatgtgaccatgtggaaatgatttattctcatgtgcgaagtaaagtgctcttagcttagaggttcaacgaaacatcaatttatcaagctagaatcaaatggtaccaaacaagctgatcatatggatatgaaattcaatactggaatttgctaatctggtgctccatggaatagaacggagtaacgagg

SEQ ID NO: 40391 - DNA, 488 bp, Arabidopsis thaliana columbia
  unsure (1)..(488): unsure at all n locations
nnnnnnnnnnnnnnnnnnnnnnctaaagccatatcattggttgcggtgatgagtttcagccatggcggctacacagctaggcggctaaaagaggcaccataggccattcattgccgtggataattagcttcgattgcatggatttgagaatacgtttctattttcaagcagtgcggttatatctttggtcaatgtgcgctatttctggcattttgttcttgcgcggctgtgacgccgtgattattcgttacacgttcagatgctccggagcctcgcgaacagcttctggcccggacccccggccaatgtgagcagtcatcctggccttcgccggaacaaatgcttgacatatcagagaacatttggggtggataccctcctcgctctagaccagccttccacggattgttggttagtatggtcgtcccgtttcagatggtgttaatcagtgcaggcgagtccgggatagaaagatgcaagaaatgtac

SEQ ID NO: 40392 - DNA, 650 bp, Arabidopsis thaliana columbia
  unsure (1)..(650): unsure at all n locations
cgtctcttaccaatttatataatacaacaaaatttatgcatttaaagattttagcggctggctcaatcaacacaaaatagtttgaatggtagataacacaatttataaccatactgactagttcattgattgagcatcatctacttaacagagagattattaatctttttacttactctgtttcaccgaataggcaaaataaaaatgtcaatgcttaactcgtgtttgtttagtgaaaaagtaactaagttaatttttggcaaggtttccaaaactgcgagagaaacaaccagagccagtcaataaaaactcaattatgaattttatgatccatgcaaatcacttgctagtactcttcacactctctacaatgttgtctatgctctggttccttctatctcttctctctcttcttctacttccttgtctccgaccttgctttcctgctaaaggatctctgaaaaacaaaaagaagatgtacaaaatcttgcttttttctggttaaactcgatgaaagtcccgctaaaattttcatgacttagctttttcttaaaaaatgtttttgtagtgcaagggacttatgtggcggagaggaggagcacctanagagctcagagagactgatgcgagaccgtgcagtgatatggcgg

SEQ ID NO: 40393 - DNA, 254 bp, Arabidopsis thaliana columbia
aataaataaataacagcccatctactctgaaaaagtaatacatgagatcagcaattggcgtctcagaagagactcaaaccgccgaggaactgtattccgatatgatgacttctccagtgcgagattggtcatactatcttaggtctggaactgacagaagtgttatatatcaagccccagaaatgtctgtatgcttcccgaacacggttgaatcacgccataacatggcagacgaagtacggacactcaatgtg

SEQ ID NO: 40394 - DNA, 605 bp, Arabidopsis thaliana columbia
gaatataaatttgaatgtttgtggtgtgaaaaaattcaacttacctttattggttatgtatatatggattgaaaaatgaataaggagttcaaatatattttctgagcttaatttttttaaatcatattagtgtcattttgcgtagtttaacaaagaatctcgatgaaaatttagcgttgtaaatttatttcgttaagcaacttaacgaagtgtcttatttcaaaaagtcaataaaattagctattaaaaatttaaaacaaaaagtgaattaaaatttgagttttattttacctaaaacagtattaacgtgtttataatagcactttttaactgttggagattttctttttcttttttttgaattagagtgagatagtgatcaagaaaatgaagaaggtgttagtgcacatcatataatccaagtaaatgttaaaacataaagaatatgaaaaactgattggttagaaatatacatttttttttgtaaccgatattaagtagagaatttagtatagaaaatcttgttctagaaatttattagtataaagagatgaaagcatgtttaaaactttcagaattagaagaaaatggttacatatagttta

SEQ ID NO: 40395 - DNA, 473 bp, Arabidopsis thaliana columbia
actcaaacgtttcaaaaattgaaatcataaaagttcgaaatgtcatgtaacatcggaacaagaagatgtattagtactgtgctttctattgatgatcctcatcagtttggttggttcatatactgtagtttggttggttcatttttaattgccatttataaggtaatgaggagatttcgtcgatatgtgttgggattattgctttatttgccagagttttaaggtctcaattaacacaaactacacaaaattttaaactatagacggattagtcacaagattttatttggtgaaaatcacgtggacaaatacgattgtctttatatggtctaaatatcctgttttttgtttatttaatttaattagccttgaaatagttctgtctgggatgaaatttacgtgttgtcaaacaaaaaatccgtgccaaaaagatccacactaaccagatttgagttctgttttaaataagatgg

SEQ ID NO: 40396 - DNA, 450 bp, Arabidopsis thaliana columbia
tgacattttcatttcttgaaaattttaaaaacttactttttaaaaaatagttttgcagaaaatgtctagggtgaatccggtcttaatatgcattttttttttttttgctaagaaagttaacatcatataatgaaagtttaggtgttacaaagatttggacgacctaagatttgttccttgcctttaacaaaacaagaaaaagatttgttccttgccaaaaaaggtttaaagaaacaagggataattacaatttcatagtatatatgcatattaacattggaagaatatggtacgacacactaaatctaagcgtatacaaacaaacaaccaacgccatatagacccaattataggagattcagaatctatggcttctatcatcctctatagaagtgggagtggcaaataaccttggtggcttgtgtgtaaacaaatgacgcattagcttcg

SEQ ID NO: 40397 - DNA, 436 bp, Arabidopsis thaliana columbia
agcatattatgaatgtctacgtggtggacttgattttataagcaaacatatgattctcctcttacaggcatttcaattcataagccaacatataacaccttacgttcttgctccggttctgagtttaagggaagtccatccgcttctgacggatgtaataatattcatgcaacatatataagtcatatatatactgaagtaattttaaaacgtcaatcgcaagaatgatacacaatacactaattaacgccataatttttatttcattaacaccataattttattatgcactaacgcggttattaatcaaatcacgtagtattagtaatgaaatagggataagatccacatgcggaaagctcaagaatctgaaacctcaccaataaacgcaatcaagtatcaaacactttaactttatatacataggcactaaatg

SEQ ID NO: 40398 - DNA, 664 bp, Arabidopsis thaliana
caaagagatgagtgaatcaaatatttactctttaccatttactgacatctctctacaatcatcatgccacctttccgttttcgcatcccattcttctcctccaactctccttctcgtatctcttcagggacttcttcgccatcgccaccacctactcctccttcacgccctccttttcgtcctgcaggcatcgctcagccgtcgaagtcagaaacaaagcccaaggcgtctccgtcactttctaggagtagaagtaatgttgcagccctagctgcttcttcgtccgcgtctcaattgccttctctcggtgcagccacgccaactcgcctggcgaaacagactaaccaacaatctggttctccatcaaagaaactggattctctgaggatggaggaacaaaaggtggcgacaaaagagaagccaccgggagaaactgaaaaaatagctgaagagaatatcagtcctgtaaaagagaaacctccgattggagctcgtccagaagagcatttagaacagaaagaaacagaggcagtgcaagaacaggggaggaatactgaagcagcgagacttgtggtgcaagaaaataagaaagtccttcctgaaggcagtgggaagaagtcagcagcaaatcagggacaacagaagatagaagaaatcgagaaaa

SEQ ID NO: 40399 - DNA, 1238 bp, Arabidopsis thaliana columbia
aaagtttgaaagaatctcgggtgttaatgtttcaataatttcaagataaagatatttaataaaattacaaaaaatcatcaaacaaataaaacaagagtttacctaaaattacaaatacataaacaaagaacaatattatatcattttatttaataaataacctttaaaaaatcatacatcaatctcttatgtataagtaataaaactcatgtgtatgaaataacatttaaataaaaattaaaagtatatttattttatgaaatgacaagttatccttactataaaatttactttggataaattaaacaacttcaaaagaattaaaaaaaatctctttttatatttttaagagtacaagttctttttttttctcatcatgtgaacatacaaactatagaaaatagttaattgcaataaccatgaaaaacaatactagaaataaaatttaaagtaataataaacgaataataatataataaaaaacttacgttttgaagatgagaataatagagatatcgataggttgaaaagagcttcttttctttattagaaatcacttaaacaatcttacagatctgtttaatcagttttacacaggttaacacaacctgttactgaccaattcctaatctacccaactcacaacacagcaacagctatgtatccctctttgttcactcaccaagaaccctaatagcttctagcttagatcttgagattcacaaagcttgtgagataagacggctacctaacctaaagtctagcttccgattatataggtaacgacacaagcgtcattaacctatttcctaattctaagatatcttcaaatcttctttccatgatttgcttatatcttgaatgacttgttcatcacgttctggaaactccagcaaccaaacgcagctcgccacgtcatcatcatttgagtctcgctgcttcccgcatacagctccttcatgtgcttcacagagtcgccttgtgctcaaacatctatatatcttcattctccccctttttacttgaatgtgacaactcaagctccaatggatcctgtcatgattagtccaacaaaaaaacacaagaacacaaagacaacatatatcccaacatcacaagaattctgaaaaacaacatccattagcataaagattcaagaaccaaaactcaaatcacggaataaggtgcaagcagacacatcacccgaagaaacaaaggggacaacacagagttttagt

SEQ ID NO: 40400 - DNA, 433 bp, Arabidopsis thaliana columbia
gttgcaatagattaaccatttttatttaattttggtaaaatagattaaccattttgttagaaaaatgaagtttaaaacatttacagttctacgtgtacatgcttcgaccaattttcttaacatgtaacttccactctaagaaacttcaaaaccaagccataaaaaactcacgaaaagcaactcttctcctaccaccaaattccgaaaacttaattcctcctaaaacgaacacgacactactctatacatatatgtttgtatataaagttatacatacaatggtcacattgatagacgaagaaaaagacaataaaaaatcaaccatggtttcgaaaccgctattctccctaatgcgtctcacggatgcaatggttgtgtttcaaacggaacccttgtcaacgctgaagaatccgagccttcgagctcaacgaga

SEQ ID NO: 40401 - DNA, 573 bp, Arabidopsis thaliana columbia
tgctaagaaattatgaatgtaaacttgaattgcacataattggttttttgtgcacaacttgcttatataaattaagttggtattacaaaagtacacttaaacacaaaacattttgtcagaaaatccgttttatatggttagaaagaaatacaagataactattatcattctcataaattcaaagagatctcctctcggatcatcagtttccaagtctctccaaagacaattctagttatacttcaaaaaaaaaaacattataaatatttgtttgttttaattgcatcacaatttatgaaaaattaaagggttttggttaacaaaaaaaaaagactagacttgtttgcccacgtcaggtcacctggttctgtcagaaactagatttgttcaaaaacaaaccctttgtttatatttgtacatagtacactggcgttggatccgtatattcgtttcccttttttctcccaaaagcaaaccaagttctccaattttactatgtcaaactctagaaagaccaaaaccactgttgcaatgtcaatgattcagtagaattcaaacacttcttcatataat

SEQ ID NO: 40402 - DNA, 606 bp, Arabidopsis thaliana columbia
cgactctagacaaatgaagaatccatagtagctggtgttggtgcgggaagaaacggagggaacaagagtgactcggatgaagaatccgcagtcgtcggcgttggtgctggacgaaaggggaaaaacaaaaaatcctcttcttcttcttcttcatctaagaaaaacaagtcgcctgcaaaagcatcgacaaaggtttttgattatttctatgtttagctatgttgtagttaagtaaatgcatgtatccatatatcttcgttcgtttctaatttgttgatgggaactgtgtatcagagatttactaaagaagacgaggaatgggcaaaggtaacatctgatttgtgttaacgatatttgctagccaagttcacgttctgaaataatttcaatgtgtaggatcttccatctgattttaccacgaattgcaaagattggttccaatacctaagtggtgctattaaacaaggaaaactaagtaagcattcttgttcatggatggatcaaggaacactaactaactaataactattgttcaattcttagttgcatttgttaagatactagctagctatatttgtgggactaacccacaagcaattttgttta

SEQ ID NO: 40403 - DNA, 435 bp, Arabidopsis thaliana columbia
gaaggacaaagcctgatttattactctctcttaatcctcagggaacatataggaacctgtaaatttgtaagatcaatttgtaaaacttgaagctacgacgtttcgttaaactttagacgtgtacctaaaggaaaccaatgcgtgtttgtgctcaatgatatctccagtgtttgtttgtctctcagatatttgttttggaacaaaacattctttgtcctctttcacttacttggcaagtcatttgttccaatcattgtcttactttcttttaaaatgcgcattatagttgacgtctcaatttctttcatcactaatagtgtcacagcccaaaagtaccaatttaggtcaattctaagctaagtaaaaaatcttaatattaggtcgtatcatatagacatatgataatggtgaaaaagatttatgaagaaagaaaaa

SEQ ID NO: 40404 - DNA, 480 bp, Arabidopsis thaliana columbia
caagatattttcttcctcaagtgggatatctttattttatccatggaggagaataaaagtcagataaacacattgataatattactaaaagaacaaattaaatagcaaaagggagggaaattgctcaactgggaaataagaagactttttttttttgtttggtgtaaggaatacaaagaagacttgggaaagcagtgggaagatggttggttattcatttttataatataggagatactatttctgatgtcacttttgtttataagtaaaattataaaatgcatacgattcgaagcctacaacgtgtgacaaatgaaaattggtgcatatattttgttttgttttcaagaagataattacgaatgccaattttgtagaagaagatattttgaagttttgatgtcagtcaaatggaatttatttgggcctacacaaagggttggaaaaggggtcttgatctgaaatcttaatttgaaaatg

SEQ ID NO: 40405 - DNA, 989 bp, Arabidopsis thaliana columbia
gtaagcaagttaaaaaaactatgtaaaaaataaagatagactaagcactctgtatgttaatatacagaagtgtaagacccattaaagggattttgaatatttttcctcttccaagaaataagtcctataatttcgttagtgtagtgaattgtgtccacaaaaaatcctatataaaatatattagcaaaattttaggctaagatttgtgaaaaaagctgttatataagtctaaaagttcttatataaaagctctttcttcacaaattttagcctaagatttggctaaaataccatcaataatgatgctcttagggagccacgttctattctgccatcatttttgaaaaacaattctgacgtaccactttttattctgagtaccactctttggtgtgcaattacccctctgtccttaatgaataactgagaagaattagtaaaaaaagaaaaaaagaaaacagttaattccatttcatttctgcatcgtgtttatacggacctccgaccactaaagctccgatttcgccggcgacttgagctccgatttcggcggcgacttgagctctgatttcaccgacgagttagttttcgaggtcttcgtagcttccaagatgaaaatctgctcccaaaattagcttcctcctcaccagcaaaagtaaatctgatctccttttgatttgtagattaatgtgaattttttgttcgagttagttgttaataacataaaattgttgtattgttgattctgggctgttgtatcgttttgaatcagagagttcagtaagtgttcaatcgaaattaacgatttgtaaaacccagaattgacgaactgggacaaatggtaacaatgagacataatagtacaaggggtacaaacaataggacatgtggtacaaacggtattagtgaattatgtctaaatctgaatgattacgtaactgtgttttaataatttatttgtagttacaggagacgatgaagaacaagca

SEQ ID NO: 40406 - DNA, 1375 bp, Arabidopsis thaliana columbia
tactatatgctaaaactattccaaaagtaaataatcaacacaatgcacgtaaactttttaatattattctagcagtagcagtccatctaaaataaaagcagacgtttacatagaagatttgttcgtgttagttgtaaatatgcttgtcaatgcagattaagcaagtcttccggtaaacgtaaacttgacgtagtcatagataacttatataaagtatgctctagttttacctacgtcaaagcaaatttgcaaaaaattgtaattctatctatgatatatctagaagacaaagatataaatatgtcataaatctgctcatttcaacagtcttgcatggtctataacgtgggcagttgagttgtctaaatctgctaaaatatatttgtttggcttcttgtatataatttttgtatggcggttttgtagttactgacaagttgactaatgataatttatttgttttcaaaacaaaatgttattagacaaaacaagtgtttttaaaagcagtctatacactatacagttgcctaggtcccgattagacgtttagacgatgcatagatgaccgctttaatcgtctaaaattacataaattttgttttagacgatgcatagattggactacgttagtaatatacaactacaaataatttatttaagacctaaaataattgaaagaaaaaaccaaaaatgaggtaccacttgtaggagtatgtaatcttaactagtatgaacaatgagaagtcagacactcagaccttaaataattgaaagacaaagccaataatgaggtatcacttgtgggagtatgtcatctttactagtatgaacaatgagatatatatataatcgcagaaaaacatattggtgttattttcgttagtgactgctccgatctactaagatggtgtatgtgaatgtcggattcgcacactcaagtatttatttattttgtgagaaagattatttttgaagacaaaaattaaatgtaaaagctagagattaacactcaaatgactatagtatgatttagaaaaattgtgtgtgtgttagatagtcccaaacctctactacttatactaaaacatcgtatttacatgggagaccatagtttctccaagatgtataaatttggagaactcaccaatttcgaatatactgcttcgccctatattagctactataacaataacattgataacaaaattgctccgactgacgctggaaccaaagaagtcaatataaccatggtggaaaccggaccaaaaaccggtaatcgagatggcttaaccaatgttcctaaaccggatccacgacaacagattcctatttctccaaccaagtcttgtcactccgaaacaagtaataacagtac

SEQ ID NO: 40407 - DNA, 663 bp, Arabidopsis thaliana
tcttgatatcacaggagataactgcttggcatgggcactagatgctgaaattcatctagattcaaaggatctccttgatactattaaagatggtaatcaaactccaagcagagaaaaatcaaaagctatgatttttctgcgacaccatttccatgaggatctcaagaatgagtacctcagtgtgaaagatccacatatcctttggaacgatctaaaggataggtatgatcatcaaaagacagtgatcttacctaaggcccgatatgattggactcatctgagactccaggactataagtctgtaagtgagtacaactcagccttgttcaaaataacatccaaattggagttatgtggagagaaaatcacggatgcatataagttggagaaaacattctctacttttcatgctaataacattgtcctgcaaacacaataccgtgaaaagggattcgtgaagtattcccaacttatttcttgtctccttgtagctgaaaaaaaataatgagttgcttttgaaaaatcatggactacgcccatcaggttctgctccattccctgaagcgaatgtgacatcctatggtcaagaaagtggttacaaccgtggccgtggccgtggttatggtcgtgatcgtggtcgcggtcgtggtcgtgggcgtggat

SEQ ID NO: 40408 - DNA, 548 bp, Arabidopsis thaliana columbia
gtagctgttggattttatcttcagaaggaataacaccaggaccaccattagagaacacttccttgcaagtattaaacaaccgccgcaccgccgtgatcccatccgccggggaatcaatcttcttccgtcgccacgtcatcatcatcttcttattcttgtttttgttcttcttcttcacagaattgggattagacttgcattgattcttactagaaatcaattccaaaacctctttctctggtttcatctcaaaccccataaaagtctcaccaaacccaacaaaaaaaaataaaatgtaacagtgtatcacgaaatcaaaagtgtgaatctgggaatggatttatgaagaattaggatgagatttctctacagggaaaaataagaaaagaggattataccattatcgattacaaaaccaggggccattcttttgtttcctatgggctgtgtttttttcaaacagcggattctttttttatccgtttcggtcttcgcaaaggggcaaatttggaaacacatacactttattaaaatattatcatatgttt

SEQ ID NO: 40409 - DNA, 555 bp, Arabidopsis thaliana columbia
ataaggctttcaggagttaatgtcgaaggcccattagctaactctacaatgatgtcaacttgaaaacatattttcgaaaaatgatagagaaatcatagagtaaggcatatgtctacgagttgaatttggaattgggatgaaacttagataggtggggaaagaaatggtaggactcgaccattaattagcattttatttgtaatcgcgatcatcacctaacgattaagaaatcttaagagaaaaatttctagtcattattgtcgaaactaaattttgtataaagacatatcaattggtaaagatcgtaggcgaaacttaaaaatcgccgattcgattgacgtttgtgacgaaactaatattacatgtcgtggtttcgaaccaggggaattacgggcttcgacccagaatctcctgatattcaaaaaaaaagaaaaaatcaatcgtatgacacgtgacgtgatcattcatgcaagacgagaccttcgtagtatggtttccgcactgacattaatcggggagatagtcgtgatcgtctatatatggtgagtgttggag

SEQ ID NO: 40410 - DNA, 528 bp, Arabidopsis thaliana columbia
tgttttcttttgtaaagcttctcaatgcaacattataaatttggtttcaatgttgttgaaggcttagaacatgaatcttaagatgacattctttcacattattatggtaaacactatgatttggttcccatatagcaataaagatactatatatatcggaaaacaaaagcacaaattcagtgcctaagtcattgggatattaattactgatgttcatacatgtgtatgcttcaattatgttttaaggaatcggaaaccagatgtaatactgattgaatcaaaccaactctacaactatggggaaagaaaacaatacattcgtaacagaagtattaaaaacgttaacaagagaaagaggctttaaatagctaaatctcaagccaaacagaaagcgaatgcttagtgatgagattgaggcctgtaggtgtgtgccatctgttgaaggggtcataagtgcaattccacttcgttgttgggacattggggacagtatcggctacagcttggtgagtggccgccacgacttgt

SEQ ID NO: 40411 - DNA, 507 bp, Arabidopsis thaliana columbia
tgacatacgtttccttggtttgatgttgtatataaaagaagttgagtattatagtttattattatcaatacaaaaaacggcttatcacgatattttgtaaaacacgttcatcttagattcatttcgatatttgtattggtagactgaatggataaaccacgacataagccttggaagctctttaaatttgttgatttttgttgataatttaggtttatttgtgtttgttagttttagatgagctaattatattttgtttcgtaatgttgattaaggatgtgaaattggtaatgttggtagatagattggacgattgttggtttcttgttatggaccaaagtttttaagcaaaagtttccttttaacccaactctctcttagagaattaggctaactgttggagtttggttctttcattaagaagaagagaccttatataggccacaatacattgtgtaaaaagaaacctcaaacctaattctaaaagtaaaacttccaaaacccatg

SEQ ID NO: 40412 - DNA, 467 bp, Arabidopsis thaliana columbia
catacacaaatccactagcccaccacttttctctttccacacttttgtttttaaactaaattaattattatttaataactatattgtaaatacgacaattttgtaagcttgcttctactaatatagccaattagctatagatattatattacggccgttacttttctaatgtttcttttgcagaaacgtttgaaagtttaacataaaactaaccttgaaaaagtaagtcaatgaaagaaataaattttcaattatcatgtctatatatatatccaaaaaattatctaaaatatagataagaaagtatcaatttatgctaatattttttcccaaatatgctaaattagtaaatttgaaaaaacaaaaaaatcttactagtagaggggaattagtaaaataataaagtcggctttttaagagcacgtgacaacgtctccgaccaggcgaccataatcagttaattgaga

SEQ ID NO: 40413 - DNA, 588 bp, Arabidopsis thaliana columbia
cagttttttttttgtttttcttacataaattttcttactgatttttattttatttacagtttatgtggtaacagtttttaaaatattttataagacaagttgttcaatttacctggaaacttctagattgaattggccaaacaacttttacatacatatgacggataattttgttcatgatatcaaaaactaagatttaacttgcggtatatagggagataattttgatttcacataattttgattatatcaatctgttttgatatgtataatattggtaatgttaacaaagtaaaataatgaagattaaacccatattaaagtatctgatcaatgatattttaaatttttaattatctattttaaaaaaatccgccatataactcatttcgatataaatatatctcgtgttattaaactttctattaactttaaaatttgaaagtttaaaatttactatcagaaaactgaaatcgtaaaccattgatatatttttataaaattgacgaagaagtcaacaaaaatgacatgcatgctccatagaaaaaggttcgatgtacaatatttcggggttgatatcttactttc

SEQ ID NO: 40414 - DNA, 573 bp, Arabidopsis thaliana columbia
tcgagcttttgacaataacaaaaaaaaatatttagagaggcgtagacaaataaagctcataatatcctcaaggaaagatgatcgtttagatcttatcttataaagtcagcggtcacaatttgaggaatataacaatgatactatatgagactgatacaaaaaaaaatatatatatatacgcttcatctatctcaattaaggttttttttcgtgtaatctacatatatttgaagtagtactagtctttggagataatgtgttttgtctccaagataggtttctgaatagtacaatttatcgcttagcacaagtcgttagaagaacaaatacatctgtctccatataagctagggaccttggtttgtagaaacttcttaaatgaactgcctcgggcctttccctttaccattaatcttttacgttatttattagtctctcatttgatcattgcacaataaataacacattgaaaaaatgtggtctggtgatatagctaataaggttcatggctttctatagtttcaaatatataagacctgtacgtgaatcacaagggaaaaactttgaattata

SEQ ID NO: 40415 - DNA, 464 bp, Arabidopsis thaliana columbia
gtaccaaaattctacttgaaaatggacaaagccatttcccaaaagaaattgttttgttagggttatgtgtgttatcctaagctttttctttttgttgtcatcgcataatataggctcccatcactttagatttataaatataaaaaatactaagctactagggatatgtgggaataacacgtgtttttacaactaatacccttttttagtaagtgcgtctagtacatcgatcatggtttttgattgagaaaaaaacattagaaatcaattacgaatatatattaaacgttcaacattgttatgaactaatacgtttagcaatacttttacaaaaaaactttcaaaatatttgagactctagctagtgtttgtatctataccatagggtatgatatagttagtctttttctatatgcatttgtatatcattaatgaataatgaaaagggtttgtagaatatacga

SEQ ID NO: 40416 - DNA, 512 bp, Arabidopsis thaliana columbia
atttgaattataacatgtctccattcaatttcttaaaaatgtatcttgactaaagagaacaagtacgacctttccatagattcatcagactacaatattctattattcctcatctaaccaacaaaatgaatattgttatttttatttaaagacgaaagatagagatctcttaagtttgaactatatatatattaagtgaaataataacaagtcttcttgtccctcccttagtacaaaaaaccaccaaatgactttctcaaaacaactcttcctttacctcttcttcctcttccctctcctacacgcttcacacccacaacaatgctcttcctcctcatgcggtcgtgatgatgtccatgtccgtttccctttctggttactctcaaaacagcctgagctctgtggccatgccggatttaatctccaatgcacagctagtcccaagacagctctcaagcttcctaattccggaacatttcttgtccgagagatcgactatttaagccagcaga

SEQ ID NO: 40417 - DNA, 454 bp, Arabidopsis thaliana columbia
cttgccctgcgctgttcttctgatactttcatcttgtggatggcaagaagcaaagcctgcatcagcaaacagagcaaattgtttaactgactctgaaagaggagaaaagaagagcctcacagaagaagctgggttcaaagctcatacaatttgtggcctgtgcataggcggtttcatcttcagtatcacatattccattgtcgccgcagtatatgagtgccctccaactgtataggctgcctgtggatccagtacaaaaggaatcaaataaggcaacaaagaaatgagaagaacaaaacacaaccttctgtcaagtgatataaccttttgcatcaacgagaaaagcttcaggtcgctttttgggacgccataagccaaataagcctttgttcacataaacaaccattactctcataagctttcgtttcattcagaatagttcttgataagtata

SEQ ID NO: 40418 - DNA, 516 bp, Arabidopsis thaliana columbia
aaatggatctcatactgcgggagatgtgactaacacatagttggtggatccagatgcctccaaagcagccaactttgctggtttcccatatgatgtattcttaaatggagacactttctcagaggaaggctttgcttgagatgggctaggagccgaagaagcagatttattcataggttcagaaggaataggaggcgctacagttggagatatatccgccacgggaatggggtttgtggctgctccaatcttccgttttaggttcatctcgaaatctccaacctgtagcaaaagaaagcttcagaagagtctaattgttggaacctacattctattatctcaaatcagtgatatttagcccatattgttggttgagtaaaatgcactcgtctttgtagtagctcaaagaaagtttacaaataataataataatgaagttaaaactaatggcagagagacttgccttaagttgcagcacagcaacctcagtttcatcacacatctcgtgaaccagtg

SEQ ID NO: 40419 - DNA, 480 bp, Arabidopsis thaliana columbia
tgtccaatatcaaattttaactatggataagtatatgtctaattcgtggccaggcccattagggacttttagagggcctttaaaacaataagcacgcgcgtcagtcttacgtattgtaaggacgcgtggacgttttacttgacgtgaaggaaagagaaactccgataccagagcttggtggagcagtggagacgcttccacgcgaatctcgcagtcccactcgtcttcctccttccctctcttcctttgaataccttacctctctcggtctcgctccctccctcgattcaagcctattcgtcttcttacgctgtgtcttgaaaccctaatctttttcatttcaatccctaaaggtgaagtctttattgcgtgttcgtcttctctgtcttcgtttctactcctaatcgtctaatttgcgatctgggttagtgtttatatcttacggattttagtgggtccgtgttagattatcgagatatt

SEQ ID NO: 40420 - DNA, 571 bp, Arabidopsis thaliana columbia
ctctagacctctaaaccaacacttgtgttaattgtatcattggctactaagtttcctccagtggccacagctacctccgcctgtccctgtacatttcctgcagttgcatccaactcagtgaagaaatcagagtatgaaccaaacccaccaccgtcatttacagatgaatctgcataaaacgagccccagtcaacctccttaaccccaggactcccagatccatcgactatattactctcttttcctgtttcagttagtgccatatcatccacctccgatcgcaccacatcaacatcccttaacctatttgcatcactgttgacaaattgaacagcttccggagcaatagatgaagaaggctcttcttttcccaccgaaccacttgtaccctcgtttgcaacatcgttccccaaacctgcttcattcaatgcgacatctccatcacccaaaacatcgtcaacgacggagagattagcaaaagctttggcgtcatcggaatcactaccgtcatcgaatttcagctccttggcagaggatgaagcggtaggagtataggaatcacaacaagttt

SEQ ID NO: 40421 - DNA, 541 bp, Arabidopsis thaliana columbia
tggcattgcagcttcagagggaaagagtcaggtggcaaatgaagctgatacattgttcttctccaatttgaacaacatccaaaagactactggcgggaaggcatcatcgcagccaaagcgcacgccagtttcaaacgaagaaatggaagccattttggtatgtaacttcattttgacatgtataacaacacttagatgaacatgtatctaacagtataatgtgtgaccaactactaagttataattatgtgaccaattacaagttgagagaacccttttcatgatttaataatattgttctgtttctaacttccttatccttttctgaattttttttacagttgggaggctgcatctgatcatttcaacatgatctgttgacaagaatggtggatcacttctcatctttaccatttacagaatatactcgatagtcaagaagaaactgatatggttgatgtttcaacaaccaatgataacaataaacctactccattgcagtttttaactctatactgattcacattgattgagtcatttg

SEQ ID NO: 40422 - DNA, 619 bp, Arabidopsis thaliana columbia
tcagtatgggccagaagggctatagttattcttagaaaaaaaatggaggtaatgtcgaaattgacgaaattaataggcgtatttttaaaaataaaggttgtttaagataatcatgaaaaattagcagccactgagtaacataattacataaacagagacacacttacttgaaatagaaaacaaaataagatccttttaacaacaacaacaacaacatctcacaggtctcgctaagacggtcctaaacaaaaaccaaactgtttaggtttcgtcgtcgacgcgctctcatcaacaaagtcccatacgaaatttaaccaaaactatatatcgagggacgaagcgcgtgacgttagatcggagatctcaccgagatcgccggtgaattagggtttctacttcctttgttcttgttaacgttatatgaaagtttggaattcaagatgactcaatctatctgttcgtcgtcacaagatcaatcttcttctcctcgctctttgatccaccacgcaaatcggcgacgaagtttcaccagccgcagttcttattgatacctttttgtgctttgttgcttctgaattatgggaaaaggaatggtaaatgttccgtttaagagatttga

SEQ ID NO: 40423 - DNA, 366 bp, Arabidopsis thaliana columbia
accatggcctcagataccgtcctagtctaagctgaaaaaaaaaacacgaaagaagagtaaaataaattaagaagatcatacagttgaattaggagagaaaacatataactaatcaccccaaaaaaaaagaaggaaaggagaagcacctatgtatctctgatctctctatggatttatactttagttaaccctcattataaaaattgattgattactaaattttattttatttttcagtggtaagataaatatgttgacaacaaatgaaataagatattgcaggttaaattaaccaaaatgaagtaagatattgcaggttaatttaaaagtttggttaattaccaaaaaaaaactccttttgatagt

SEQ ID NO: 40424 - DNA, 529 bp, Arabidopsis thaliana columbia
caaagactagagaggttaatgacttaatgtgtttggttcgggtttggtttacactttcgggtttgggttatactcgaacccgaaccgataccacgagtacacttacataggacccatcagtgtaaaatccatatacttatacccgccccaaacaagtttttcgggtcggttccggttcgggtactcggatacggtttatatgcccatgcttaattcctttcattacctagatatttctctcctactttttatctgtagctttaatgatatttttatttttgttgaaagggatatttggttttttctctttgtataaacagttcctcaaaccaggtttagttaagtagttacaacagaacaaagaaaattctgtttagtaatatgaattaagctggtaaataagatttcaaatccagtatctatatgaaccataaatactttcatgtttccatgactcctttctttaatttataaacaattaacctcttgatatatgttcaaagaacactaaaatgatcttgttggatag

SEQ ID NO: 40425 - DNA, 967 bp, Arabidopsis thaliana columbia
tgaaggtccgagtgtattaaggacagttgtgccgtgaaaccattgttcggagaagctgttcatcataattgcatatgttacaagtagttaaatatcatcataatatgattagattaaatatcactagtaataatgtaataacatggaggaaaaaaaaatgcagacaataagcttttgaaatgcataaatataatatttgaatactaaagcagagtaatttaagagaccattttaacaacaaataatacttcggaaatacaaaataatttcaataaaaacagaggattagagtactttaactttaacaaaataaaacatgagaaatttaacaaatagtgaagctttaaatgctatatttgtattttaaaagcatttacactcttaaaaacgatgttactaatcaataaagcttcgacttttaaattatggacatttaaatcttcaacttttaaaaatgtcattaaatgcctaactattcacttacttcatgattaaataattaacttatgacgaatatgctatttaaacatctacaatttgaaagttggctttttctattttttccatttttatatataactagattctgacccgcacgttcgtgcgaagtttcatattttaaaaaatatgttgtataaaatttatattcaatatagttatctttgttttagtcatatatattgtagtacttatattataatatatctaaagaaaattatcgattattatttatgtttgtttatgaaataatagctaatatttagtctgttcgtttagtggccgcaagcggagcgtctacgtcatgcggcaacggtaacattgccgcacttgcgtctaccgcagccgcaaatacccgcggcgacgaaacgaacagactaattgtgaactataagtcaaattctggagttttaactgaatagtagattagaaatatcttagatggaaaattatgttagggtataatgat

SEQ ID NO: 40426 - DNA, 464 bp, Arabidopsis thaliana columbia
atcatagagcaaggaacggaagttctgagggggaaagctcctctctttcgttgcatttctctgcaaaaacagtaggcgttggctgacaaatttcttctgcaatgcaagatttcttcctgtggtggacagattagctaaagagaaagacagttacctgcaacaatgtcttgaggcatttgtgaatgtaatcacctccataataccggagttgctggatgcaataaccaatgatatccaacagctgatgactggaagacgccatggacctgtctctccccttaacagtcgagcttctgtaaagactaatgcacacctgttcccagtggttcttcaccttctcggaagctctttgtttaagaacaagatggtaactccacaagtgctaaggcagttggcaaatcttacaaaacttgtggaagcatcgtttcaggtcagtagttagaacattgccatcccctattaca

SEQ ID NO: 40427 - DNA, 517 bp, Arabidopsis thaliana columbia
  unsure (1)..(517): unsure at all n locations
nnnnnnnnnnnnnnnnnnnnnnnnnnnctaaagtgcggccttcagtcaggctctggtgtcattaaggcggggtgctgactcgatacgaagccaggcggcaccactaccatttcggacaggtggactctacctgattgactccgtccttgattatacaacgaagatgaatcattatgactgtgaagggagatcggatatgaaagtgacggcctcatcctccattttcacaattcttgatacgcaatcttacagctcctcaccttgaaccgtgttcaacatggcgacgttaccgcctttagctccacttcctccgccagaggtgcagaggtccatacacttgggagaatgggagctctacctagatgcatggatcctgttgcttgaagctcgtttagagacttcggagtctgagttcaaggcatcggcgctgaatgatgaatctgctgtacctttcttgacatcattctaccaccagctcgccgcatctggaggccatgcttttcaatctggagaaaag

SEQ ID NO: 40428 - DNA, 287 bp, Arabidopsis thaliana columbia
agtcgaaaatggaaataagaagtaagagaagaaaaacaagcgaattacaagttcagattaatctatgccatcaaatgctacttctcagctgctagttactagaaatcatcaatatacgatacaagtagaatcgatgagctcgtgaaaaagaagaatcatgttgtggcttaatggacgatgtttaaggctataaatacatgatctaatatacgacacaaatacttccaatctaaacgatttaagatgaatatcgactaaatacatctaaatgtagggattgattcttt

SEQ ID NO: 40429 - DNA, 361 bp, Arabidopsis thaliana columbia
aagatatggaataataataaccaaaaagccgaagataaattggaaagggcttagtttgaaccaagttttaggaattacaaatcacattttgaacagagagtattatagaacaagaaggaaatcatgaagataattacttggaaactttattcttccctgcaatggcaataattgtgggatctgtgaacaatgcacacattcttcatcacatatataactcgaataggcttaagagtctggacttagaggatattactcctccgtgttccatctataaggccgcagaataaaacagtgagtgaagtagatgagattcataaacccaatatcaggatatcacattcttatgctcgattagacc

SEQ ID NO: 40430 - DNA, 521 bp, Arabidopsis thaliana columbia
cataaattgccacttgaattaggttggtagccaagaatcctaattaagaagttagttgctaactgggggcttgttccaattaaaaatgagggtaacttcctttggaggttagcgctaattttagagatgtacgctggtatgtgttatgtgtgatgatctctcaaacacaaacgcagcatatacaaatacaatacacacacctatttcaaactactaaccaaacacacaatagtgctcgcgttgttcatgacgagaggccgcagacaacaacaaacgtcgctctaagacgagctcatcggatgtttctgcaaaccgagaataaataaaaagaaacaatgattacagatataagttggttgatacaactacacaacacacgacacagtctcgaaacacaaaaattgggtgtctctgtctttcgtctgtgaatcctaaggatgttaaagtaacaaaagtaattaaaagagagaaactcacaaatggagtggctctgttttgctttttaatcgatccacgtgtga

SEQ ID NO: 40431 - DNA, 390 bp, Arabidopsis thaliana columbia
tacaaaaccctccttctaaatcctcctcctctgaaacttaaagcttataaacgcagagaaaattaaatttaaaaatattctttttcttcgagggaaagaaaactctgtagagagagagagagagaaacaagaaacagagacaaagaggaagaaagaaagacagagattttagaagatgtgttttttaagacaaaggacgaggtttagctgatagatatacaaatttaattttcttgtgttaattactttgtatggtttcagcgccgccaaatgaaaatgagtcggcttctctctgtacccgtgtgaactggaaacacgcagttttttttttaataactaatgtttatatatatatatatatatatatgggggagcggatagatattttta

SEQ ID NO: 40432 - DNA, 127 bp, Arabidopsis thaliana columbia
acacactcgctcactcgctcagcgctccgcgcacactcgctcgcacacgctctctcacactcactctcgcacacgctcgcactcctcgcgcgcgctcgcactcacgctcagctctcgccgcacacgc

SEQ ID NO: 40433 - DNA, 573 bp, Arabidopsis thaliana columbia
ggcatacctgaaagaggaatatgagaaaagcctgaacaaatgtgtattgtccggtaagaagaggaagcgggttgattggaatttggctgtcaaatattatctcgagtttaacggcgaaaagattaaagaaatcgttcgatttgacaagtttaagcctgatttgtgcaatgtactccgtcttgacgtgagtcgttgttttttttgttttttcattgtgctacttgctctgttactacacaaacttatagctttgagacagcttttgcggatctgattttaagtttctcaataataatacttgtgatagttaacatatataattacaagtttatgtgtctttaaaatacaaggttattacttaggtccgagtatgaatttcttcgtttttgttggttttgtttatagatttgtaagacggcgcgtacagagaacccgagccagagtgaagagtacaatccttcggaagaacaagtgttgcttggagatgataatgcagaaactaagcaaatttcaatggtatgtttctgtgtcaacttagtagaaattggtatactcagatgattttgtaacttg

SEQ ID NO: 40434 - DNA, 568 bp, Arabidopsis thaliana columbia
cgctctgcctcaaaacttacaggtcacgatcacgaactgcaggtatctcagacagccaatggaacagcagcctcaatatcatcatcctcagtttcatcttccaagatcaaacgtgtcaggctcaccgaagtctcatggttcacacagatcatatgattcacgttcatcttcaagatatgactaaacctgattcggtcgcatcaatcaaatacgtttttctttgttccatttctatgtagctttttctttcccgttgtgtgatatatgtgtacaacttttctaagttttgtcagtaatcttttcctcagtaacagggattttccaactaaaatataaagctttgctcattctcatcaaatatagaaaatatcagggtgcaatttgtaataaacaaaagattgatctaaaacggcccaaatgggtgtagccttattcatagccaagcaaacatctttttctcatttttcgggctctccgattggtggactctctctaattagtaaaggcaatcaacaaaaaacaattttgataaaatgcgaaaaccttaaaaaccgatatttttagtatg

SEQ ID NO: 40435 - DNA, 420 bp, Arabidopsis thaliana columbia
gttcatgtctcatctcttgtaaagttcccgaacgagtagccttaattaacatatacgttagagactctatttgaaggctctttgtcgccgtttgggggttaacgactgtaggcgatattattgttgtagatgataatcaaggtctgcttatctgtattggatgttctatataaggacatccgcagatcacgttgcttaggtcagcgacggtataatatgctggaggcgcgtcacgttcgtatcgcctacgttcggttaatctaatattgttcactccaacgccgattcagatatcatttcagttagatgccatgttcacttttatatcatatatactgcttgcattttcaaattcaaattcatcaataaaatcgcagttaactaagtgggtagtattggagactatgttatatagatgat

SEQ ID NO: 40436 - DNA, 518 bp, Arabidopsis thaliana columbia
ttataacacagaaggacttgctctgacagactgacgccttagatcatgtttacaattatctatacgcactcctatattcattccctggttaaaaccatgctagtaaatctgctaaatgatggaaatcatttgacgagtagtatgcaaaacaatgtcttagaatatacgaatgggcaacaataacgaaggacaaatgacagttggcatcagagagtcctgcgaatccatctttaaacattccacttacattctctgatttaaggtgtgcaagctctcctttaagagtttctgcagcagcccttagccttgctgcttcgccagttgcagctgcctccatctctgcaattttagattccttctctgcaagcagtacctaaaagaggtgtatacttggtgtgaagaatttatcacttatttcaaactattctctctcgctcatttgaaaaccaaagcacatcatccagtaatagaactaaagaatttagtcaaaagactaacctgcagcgacgataatggtt

SEQ ID NO: 40437 - DNA, 526 bp, Arabidopsis thaliana columbia
tacaaaaaatatatatatataatattcctttggtccacatattaattcccgtatcaaattgtaaatcacgtacttgttgattttgtgaatgtacacgcgtacgcctccctaacatttgttgacaattagggtttgcggatatgtatcttgatttatacgattttacacgaatcacgatgacttccgattgtactcgcattattaatggtatttaacgacgaaacctaaaggaacccagacctatatttatatatacgtggatgttaagtttaataaagatctttacgaaaggttttaaagaaaaaggagtcttttacgcaaattgcagttattaatagcttatatggtgattaagaaaacacaagctcacgccaaacacacattcatttcatatatataaacacaaagtaaaaaggaaaaaaggatgaaaacaaacaacgacgttttcttttttaatttgctctctccgtagtctaattatacataatttaatcacacagtctcgaaagagtagtatgattatagt

SEQ ID NO: 40438 - DNA, 533 bp, Arabidopsis thaliana columbia
ccttcatcgtactcttcttagtcgaatctgcctgtgattcgttctatttctttatatatttagaaattggatttagccattataggcttatgaataaggttctaaaatctttgttgttcccaactttttatttatttaattataaaagatctatatcctcttaacagttcactcttctaatttaacaaatcttaaactgctcgtttccaacaaaaagaaaattaagaaactaagatagcaactacaacgaagtatgacatattttgttcaaaggagaggagagtgtatagtttctatttgtataggtttcagttcttttcgattcttatgatatgtacatatgctttcatggaatctttccttctatctattagattttctgtttacagatcgaggtactgtattacaagtaaagcttcacttaaaaatgtaacccaaataatttgttgagcctaaccgaacttaaattagataattagttatgttttgggctagagaccttaattagaagttaaaacccatatggtaaacat

SEQ ID NO: 40439 - DNA, 627 bp, Arabidopsis thaliana columbia
tccaacattctttggccttctacggatgcctaatcaatggaacacatcaaaactaaatggacgatgaaaaagcatagatgaagaatatactaaggacctagtataaacagaacctgccaatattgttgtcgatcacgcagctgcaaactcctttgccaaagaattttggtggcagagatgggtagtggttgctcagaaaaccattcatcagtactgctaatgctactagttcttgagacggaattggcagggactctatctatcctattagagcttttactgaggtattctgtgaggtaagcttcaactctttgaagaaggtcagtatgcaaattcacctgtaaatatttttgtatatatctgctctttaaagaaaaacaagccgtcttgcgttaagtgtaagagaagagagtgaggagcagcggataatacctccctctgtggcttcttgtcatctaaatcaaacctatagttggggagtgggatcttactgaagacaacaaccttagcatatgcatgactgcaaaaaagaaacagaaatggttgtactagtgagaaagaagaaagaaaggagcagcatgattgatgtacctatacaatccagggttgtagcagagcagcaagttt

SEQ ID NO: 40440 - DNA, 527 bp, Arabidopsis thaliana columbia
aaaacctaaatccagatctaaaacgaacaaaaaaatcgtgtttaagggagaggaataacttctaaacatgatttattctccagatttcttctaataaaacaacctaaaaccagatctaaaacgaaatcaaacactaaacgaacaaaaacctaaaaaaaaaacagaaaacatggagatctagaagctaaacaccaaaacgagagagagagacttacgtagaaaaaccagggagagaggaaacgtcgcaaacaacgaaggaagagccagcgagattaagctcagaagagagaacatgaggaagctcttggtcaagcttacgcttagggtaaagagaatgaccagactcgatcgcaccaaaagcagatttgtagaaagtaacagcgtcaccgaccttttgagcttcaacgagcaacatctgcttgaactcagtgaagacaagatgcgtctcaccggaccagcaccgttagtagcacagcagtaacatcttcttgagccatcgcagagagaaaataaactttgagaagaga

SEQ ID NO: 40441 - DNA, 434 bp, Arabidopsis thaliana columbia
  unsure (1)..(434): unsure at all n locations
atgttcacaatttcacggttattgtagagcaaatggtaaaatgtatggttctctcaagctattgcaagtacttcagatacaaatacgactaattcaagattcgatcgtgacgtcataattttggcataagatagaatagcgacatgataaaatatcntgagctctatagcaatgctagactgaccatgtctggagggttggagagacggacccctgccatctgggtagagtgggtacggtagagacggcaatcgagtccgcataatgaagaatgatgagagagtctgcttcgttttgatttgaaacttgaatccttactttatactgttattcgattcccttttgtgcatgatcgtcctctgtcttttctcttatcccctgcatattgcatgccttattcatttggtacgatgctcttatggttttgtcaccac

SEQ ID NO: 40442 - DNA, 562 bp, Arabidopsis thaliana columbia
ctaagtccgcacgctcaatgattaagttggacagaatcggcgtgaaaacgggccgcaacagcaatatctgccatctttgtgacgcctttaattagttgtaacttgtgctgggcgttgaaagcccattctataatactataatgttattaagacatgcagtaatgaaaatcttcatttaaaaaaaaagaacctaaactcttcacttctcgtggcccatgggttcgttttcgttgaaagattttgaatcacgtatgacgtgaatggagtggtcgagaggtcccggtttttttttttattagatcgtgtaagttttttttttttgtttatgttgcaattttgagggtagtgttttattgcttagtctaatatcacaaacgaagtcgttttaatagtttagaaagtatataaacaaatcgatatcatctgaaacagtcccaatagaaaattaactttctttgtagaataatcaagatgtttacgaacttactaattgcaaacattcgcgattaacttacatcgttaggatttgcatcaaatgaagtaaagttacccccagattaat

SEQ ID NO: 40443 - DNA, 543 bp, Arabidopsis thaliana columbia
  unsure (1)..(543): unsure at all n locations
nnnnnnnnnnnnnnnnnnnnnnnctaaaggatgcagaagctgaggaagagtaacaagaactagtagcactaggagtattcacaaaagtttaaaaacaagaaagttaacccacctgaacctgagcggaagcattccatgataagcctcctgacgtaactggcaacagcattacggcgatcttcggaaggtggatttggctggatgcaagcaatgagcttggcagttcgatcctccgccttggcccatcgctcagcatcgagtggcctagtcacagatgcagccttgcctggtaataaaccgttgggatgtaagccagagagtgacggcggagaagccgcccgtgattcatgctcacccatgcaaatctctgccgtgacagtcaccgacgaaagcttacccctctaatccaaacaaagaccttaaacctaccgttacgttttcttcaacggttgctaataagcacctccctgatgaatcgtagcttcaaagtcaccggaaatggggaaacaaatcaaatagctacgagcctaaagaaccttggat

SEQ ID NO: 40444 - DNA, 239 bp, Arabidopsis thaliana columbia
gatacccttgtcgtgttaccattttcatctacgaactttggggattagattccccctcttttgaaccttgttttatgttgtatcacgaaaaaagcttattggcctcatttatcatcatcatccaccgatgatatatcgtttaattatatgttcatcagatattcttgtaaacttaaatgattaaccaaaagcatatgattttaggttttttaaaaccttggtggactagtccacgttcg

SEQ ID NO: 40445 - DNA, 471 bp, Arabidopsis thaliana columbia
aagattgttctggatctaggtcttatcttattgaaggcccttcttctttgctattccatcgttctaatcatgatatatcaattgatcatgtcgttcaaaagcattttcagaaacacagatcttgaatctaaaaagggtttggtgtcctgtgtgtggctatcagatgatcattagttagtgtatcaatctggcgtttgtagatctccttcgttcagttgaatctgtttccgagcaataggaatgactagttcgtatgatctataagttgcgcagaagttcagcctatgggttacttatgtttatatatcgtttagatcgttgttctcagcgtggccatgacatgtgagggatgtgttggagctgtgatcagagttcttgggaatatggcaggttagactattattcttagattggctattgatgttatgatctgtatcaatatgctttgaacccacttgtcttacggtaaac

SEQ ID NO: 40446 - DNA, 481 bp, Arabidopsis thaliana columbia
agattctcaattcaaacctgtaaacacacgcctctctacaacttctctgtattcttgttgaatgttttgtcttagagtctgcaggtgacaaagataagagcttaggacaactttcttagagaacattttcttttcagaatttgctaaacttacttggaattcagatatcttgtccttaaatttcttcttcaccgcactgccgaagaaaaaagcgtcaaggaagactgaaagatacttgtatatagacaatcttgagttttaataggctaaaactcacatagttgtggctgttcttgttctgtctacacctgttcctttcccacaacccggtttagtccggttctccagattctgaagatatcaatccaagtcttaaacaaaagatgaccagatcatagaaacagatgcaacaaacaatgtattcatctctaagcctaacctctcggtccagttcctcgatctttcctttgatgaaacgaga

SEQ ID NO: 40447 - DNA, 508 bp, Arabidopsis thaliana columbia
caaaaggaaaatatggtattcagagaaataaagctccaccaaataatagaagatagactgtccgcagatttctattttcgaaatgttccaaaatcatgaaaagaatgaatatttctatttatagttcatgtattaaaatagaagaacttcacaaaattcgaaaatatttttgttatgtcgttaaagtgaacaaggacctattctctgtcttcttggcatggtcttcttctttagtcaactcagaaaaacaaaaacaaaaaaactcataagtcataacaaggagatgaaacgttgatttttacagaagatttaattattttcgatttgcatatgtaaacaaaatcatttcgtttcttttgtaaataagcattatagttttagcgtatgaaacaataaacagtatagtctgtactaaaatctacacccacagttactttgccctaaaaggactgaaaaaaccaaaactggtaagagagagagagagagtgagagagatggtgacatggag

SEQ ID NO: 40448 - DNA, 380 bp, Arabidopsis thaliana columbia
aattcttgtatctgatttaatatcagtgaacaaaatagatgtaacaaaaaataagatacactgactatgacaaaatcttcttaattggaagaaataacatgattaggaataagtcctcccgtagtggtattggatggattgttggttctggccgacgttttacagatcttggattaaagagccttcgacaatgttgatcctctcttcatacggagtatgaggttcttctatgggcaatgcgatcccttacataccgatgtagtttggacattacttttgagacacattgtaagaaagttgactcagcttttggacgcacatgtatgagtggcccgctgatatagcacgtgtaggcgatgttaacacttgaaagtagagct

SEQ ID NO: 40449 - DNA, 522 bp, Arabidopsis thaliana columbia
gccaatcgccaagtatccttacatttttacattagtgcatgtcatcgtaattattccatgcaaatgaaattgcgagtttcacttctatatatatatataatagtcagttttaaaaatccccataaaaaaagaatagtcagatttaaaaatataaaagtaaagtaaattgacaataaaatgatgaatatgtatgactgtatgagccgaggaagcctatttttgctgaaaacacttgtttaataagagttgattctttaaacaagttgcaaatatctaagttttatgtcctctgtttccagcttgtatgtatcaaatttctctctatattcaaatcaagcgaacatgaaacacgaccctcgagattgtctccctagtccccccctttcgccgatgactttttcacacggccaaatcttatatcttattacaacaatatgttcatatgttattacgctaataaaagccgttttttttttctgatgccgacgaatccgatgagaaagtagtgtacgcacataaaag

SEQ ID NO: 40450 - DNA, 558 bp, Arabidopsis thaliana columbia
gcttcacgttccacttcttctccataaatacagctctcacaatctcttcttcagctttctccattttcacctctctctctctgtgttttttttaactccgtttaaattttccgtctgaattttacaaaggaacactaatgtcagcttttgacggcgttgaaaatcaaatgaacggtccagattcatctcctcgtctctctcaagatcctcgtgagcctcgctcattattatcatcttcttgtttcccaatcaccctcaaggtttcacttaacaaaactcagattttcaatatttaattcgtattttctaaaatttaaaccacactaatctattgttgactagttttgactctgttcttgactctgttcttttattggattgttgatattagttcgttgatgtgtgttaccgagtcaagatccatggcatgagtaacgattcttgtaatatcaagaaactattaggagttaagcaaaaaccgtccgatgagacaagatcgacggaggagaggacgatactaagcggagcagcggaatgatatcaccggcgagtttatgg

SEQ ID NO: 40451 - DNA, 464 bp, Arabidopsis thaliana columbia
tatatatcattaacaatagtatggtttatggtaatttaaccatctaatctactgtttaaatataatggggaatgttgagtctttgttcccaagttcgaatatacgttggaaaaaggatggtttacgtgtagacaaatattatcaattttttattcccaaactaagagagattatggtacaaggccttgaactttctttatccccaaacaaaaaaagtggcagtcatgtgtgtgtcgaatacatgtttactttacctaacaattaacataagacatttttaagaagagaaggggcaatcataccttatatattattcaataaaatgattacgaaagacttttcaatccatgattcctcatgtttgccaatatagataaatacatgctatagattgtaatggaagagctctagaagtcagacatggctgtatcagttagttagcagttcatgacaagtcttgtagt

SEQ ID NO: 40452 - DNA, 494 bp, Arabidopsis thaliana columbia
aaaagaattgagagcttggtctagacgaaaaccagacacaaaaatttgcatcatgaaaaacactcaaagaatctttacatgagatatctgagcttgagtttggatattaacgttggcaaatctccattgtggagaattgaaatactaagctttcattatcctccagaatcttcaaatatacatcaagatatgaaaacaaacagtaatgactaatcatctacgtcaataaatgtatcattaccttaacttattaatggaaaagtctgctaaatatggaaagtttattgattctctcccttgcatatataagatttaacgatgcctatgtacaatttctttttctccatctagttacatagtttagggtttgcttcttcttcttttcaccaagcttcctatcaatggcgaacccaaaccaatccgtccgggtacttcttcccgtctctcaatctttcaatctatctctctctctctgtatatcagttgctaatgat

SEQ ID NO: 40453 - DNA, 472 bp, Arabidopsis thaliana columbia
  unsure (1)..(472): unsure at all n locations
aaagtgtctcaagtgcaattacgacagaggtcataacctagtttgaaattgaggtcgccattagaagcttagtgttcgtaacgcggattctcaggttggatttagggtcggtgctgcgggtgataatcgatatgcggttgttagaagacgtagaaacggaagaggacttgtaggagacattaataggacatgttagagtttggtaaatcgagctgttgtcagcgtttgttgtggacgtggcaccacagtagtacctgnagtcataagtgtgtagaccattaagttaggtcgacgttaaggatgaggacgacgaggattgcagattaacntataagctgtgcctgaagtatctttatcttcactgtgcatgacacaatatgccagcattttcattaccatgactgaaatttctattacttatgtttttgttaatggactttgtaattcatcaagcccgtttatgatatattta

SEQ ID NO: 40454 - DNA, 516 bp, Arabidopsis thaliana columbia
ttggaaactccgatgagatcaactgtccagttacgggtcaaaagttgaccactgaattaagtgcaaatgttgtcttgaaaaccatcattcaggaatggaaagtacgtaacgaggcagcaagaatcaaagtggctcatgcagctttatccttaggcggttcagaaagtatggtcatcgacgcgttaagagatctgcaaatgacctgtgaagggaaagagtacaacaaggtacaagtccgtgaagctgggatcattcagctgcttgatagatacctgacgtacagaagtaaagatgtgaggtttgaactactaaagttcttaaggacactggcagatgaagaaactgatgacggaaaggttggatctctttcacatacctattatgcaatagcacactaccttagacgatatgcgctgctgtgattatttgtcctagctagacacagcagttctacttcttgtttcaatagacttttatatttcaaagttgtcttacagaaatgactgtgaagacaat

SEQ ID NO: 40455 - DNA, 484 bp, Arabidopsis thaliana columbia
catatattgatatttctctttcatttataccttagtgcaggcaaaaaaacatctagaatgagctagcttttgtattccgagttcatctcagccgcatgcttataatgtccctttcttactgcaggatttaaaagaaaaaatcaatattgacgaagaacgccgagttgaattagaagagcgcctaaaatgtttgcaggctcaacgtgaacatgctgagcaagagtgtagtagactgcaaggtaaatcgtatcttgatttgttgaagtttgataactatgatggggtttgaacttgaagctgcattggtgctatttttttatttgcttgcgttctgtttttgaaacactatccctaaatttggtgtctagaacattgcctacttctttagttctgacttctgagcatgctcaatacttaatggagagtttccaagtcttatttcaagagtgttctaattcaaaataatggcggatcgtagcataaa

SEQ ID NO: 40456 - DNA, 597 bp, Arabidopsis thaliana columbia
tgcctgaatgatttacttcaccaactggcatagatccatgagtagacgaactgaagtgtgcgtcatgctctccctccaatcgcattctagcagatatcagatcttgaaaattataggcatttcgttcatggaaattcatctaagccataagatttacaaatagactcagcacacgcaagagtggtagtttctgtttcagtacctcataggagatattgacgaatcgaattgagagggaccagtaccatctatagctcttttaacagtgccattacttatagtttcttcagaatggctttcaaaacgattactcacagtagcttcttcaccattagcattcacatgggggtgaacaaccagcaagcctgatgaatcagcatctgaagctttgatcacaactggcttccagtcaactggctggtgaaccaggcgggacacagtggtagaatttgtgtgatctccgatattagaagtttggggcaaggattcatctgatttctaggcaagataacaagagcaagactaccaatcaaaaatttaccaaatatgatctacgagctactaaacttatacgatggaagtatactataacaaaag

SEQ ID NO: 40457 - DNA, 534 bp, Arabidopsis thaliana columbia
  unsure (1)..(534): unsure at all n locations
tcacttgaccagtagtcatcgagagacaattgagccagtaaattcacagagctcggtcataattcaattatagttttaaagacaactttttttgtttaccaatattacaaaagaaaggtgtgatagtccactaggcactagctagtggcctagacgcctagttctggtccanattattcacatattcgaaaacaaacgataccaaaacaagtgagaaaacaaacgttgaatggtatgataatttactgggaaaaaatgaaaaatggaaattgaagacaaaaagacgttaattgcgtcaaatcttaagaaatgttacaatttctgcttttatacagaacctgatgggaaaactttaacttttatcccttatcggtcggtccattatttgtcgactcggaaacaagaggtaattaagaaaagcatcataaaatatacaaacaaaactcaaaatcaaattcaaacatatcaacatagacatgcataatgttcatcatcatgatcatgatcatgaattcatgatcaatgacccattgg

SEQ ID NO: 40458 - DNA, 886 bp, Arabidopsis thaliana columbia
gatccccttttgaattgaataattaccagagataaaaatcaaacctattattatcttcttatacgtaatccttttctaatacgtaagccctgaatgattatctttgattaattgttatctaattctcatggttcagtggcacctgtcgaacatttagataatcacatgcatatttgatgtgacatttgtgtcatatcatagctttttgagtgaatgtgttttgtacttctttttttattcactttattttaaaatctacaaaagtaactgtaaatcatattaaagatatattcaagaaaacaatatatatttatgttcatttatgtataaattgaaaaattatttagaaaatcaaaaagagaaaaagaaaatcaaagtgaaattgtttttgtttgtttgctaccccgaatccaaaatttggtcgacatgtgcctaacgatgaagcaaaccaaactttatggcaactattatttcccaaatagtatacattattgtgaagacttgcggagagcagcatgggcaagttacaagtggcaagtcacctctgtcatgccttttttggcatcgaaaccttctatcagcccattattaagccaatcgaggccttacaagttattttcttaaagcaaccttcaaagaactaaatgggcctggacaataaaaataaataaattaaaggccttatatgagcccattatttattttactgaaactgtaatcatctctcatccgtcaccttcgtgtcagcgactctccgtctctgtctctctgccaaaacctcagatcggaaaatccgatattcgataaaccctaagtttcagaagatgagcatcgctcgtttcgctaatcggtcactcaacaacgtaactttccttcgaccatttcg

SEQ ID NO: 40459 - DNA, 566 bp, Arabidopsis thaliana columbia
cacctttctgcaattaacaaaaaaacgaaatggagagttagaaaacgtgacggttttaggagtttcaggttgatccatggcggaaattgtttaccttttcattcatacacatgcttctttctgcctatatggaggctgaaaaatcttgagtaaatgttcttgatgactattaggaggtaaaatgactagggattttaaacatacccattgctacgctaactgatttgatgaggcttccttattattatgctcggtatcagactcggtttggtaggtttcgccagatttttttggagaaccaaacaagctatcagggagagtattctccagactcgtctcttgcctagagaaataattagttaactgtctgtaagaactaaagtatcatatttcagtaacaagaagacttaaaaaagccttgattcttatcacttcatttaccctttgtagaaactgttattgtaccacgttcttcgttgctggttggacttgttgaagatcttctcacttctacgctgtcgcctgccaaaggatacaaaagaggagaagatgaataagaccgagaa

SEQ ID NO: 40460 - DNA, 563 bp, Arabidopsis thaliana columbia
tttcacactaagaagttttgttgttttatcatagaaaaacttatatatagacaagtctttgattactgctaaatttttgtgaggtgatccgacaaaactgtcattagatttgtttggctagatttatttcttttctattctaaacttataattaattactttgttttcgaaagtccctaaagtttcgaatgttgatcaataaaagaaaacatagtaaccagaaaataggaccacgattaagagtgaagcatatggtggatggagctaacaatctatttttctttttcataccaactaccacacattaatcatatacttttcttgaattaggtctagagcaataaagtcagttatttaattagtatttacttgaataaatgaatcttgattcttgaccgtttcgataatcatggtcttttcatttttatcattttgtgcagattgattgtaccatgtttatttctgtttctaaccaacattcagaaacatttttattcgtaagaagaagatgcaagaaatgggttacaaggttggaggtagagggagactcggagattgtggtg

SEQ ID NO: 40461 - DNA, 516 bp, Arabidopsis thaliana columbia
gattccaggatcacccatcgtgatcgcgagagcgatcttcatcatgcttatcacatttagcatatcaaggcttagacgacaaacgttaatggtgtctttcaatctctttacaacttttcatattacaaagttccattttgcatttaaaagttatgttttgtgacgacaaaaaataaagtcacgtattgttaattatgtgatactacattttttttccagcttttattataggaacctttattatactccattcatttcttgaaattttaaatttttaggtacttgttagatatttgtttaatattttgaaaatttggataaattttatatcataattccctatatatagaattattgcttagttatacttatgatttctgtttgaaagtaagaggtgaagtatatataccgtattttgagaatgattaccacaaattatgcaaatatcaatctttgtgaaaaaagtgtgtaagaatatatcacaaggtgtataaagaatatataaagcacacaaac

SEQ ID NO: 40462 - DNA, 478 bp, Arabidopsis thaliana columbia
cccaatccagaaaactattactctttgaggaaataagctgaaaaaatccaatgcagagactaagagacacgtgtgaggctattaaccaatgttgagacacgtgggtagatgaatcaaatgtcgacgccggtcatcgtcgatgtagaaagcgacctaaggaaccttcaaaactaccggaaaccgctagagcttttaaacaaaagagggttaaggaattacaattctaaatgtaaaaattgaaacgcaaaagagtccaatcacatcgaatataaagaaatcgagggaaaaagcataaatctaaaccgaaaaacaatccggccaaaaataaaagagacaccgaagataagcggtgaaactctagatcttagctagcccaccattgctatagaagccacgaaatctagacgcaagccgaccaccaccgtaaagagaaatgggcagtgtcagaacgagggccagtcttacgttgtcaaaaaga

SEQ ID NO: 40463 - DNA, 526 bp, Arabidopsis thaliana columbia
ggtggttctagacattttacaaacaacggtggcggaaaaaacggcagaacgttctattacacaaatatgggcaagatcttgaaatctaaggtacgttctgtaaacaatgaaactacatctcgtttattattctcctttactttctttgctgaaaacggctccgtttaacagtcttcttggccaagaaccgtcgtgaggaaatggttaaacctacgtagcggcgcttacgaatttcactctgattacccagtcaaaggtgagatattaactcgtgccgttttagatatttttgctcaaatttcttgccgtttttttaatattctcgtctgacttaccggaggtttttttttctttctagggatggagccaaggcgaaaaagctgctccgacatgatcgtgccggaaaattttcaaggtaaaaatataaaaactagctcatgaatttgatttaattatactactattgttttgttgcatcgaaaacggcgtcgtatctattgtccgtagaccgtactgaattgagact

SEQ ID NO: 40464 - DNA, 1107 bp, Arabidopsis thaliana columbia
tccatcctttgtcacttgtgagcaagagtccaaacttgccacgcggaaggtggatgatgaaggtgtgatctaacacgctgcgatcgcttctctcgtgtggatcgattcaaggggaattgatgggtagttgggtgattgactcgctcaatcagttgggtaatcgactcactcgatcaatgaacgaatgaaggatgttgaatcactcaacaaacttaatccgcagattcctgacgtacttcatgactcactcacaaagaactaaagaacaaatgacaaagactcaactttgacaagaaaacgtttctgttactttaaaatgatcaagggttgctttacaatgaatgagaaatcagcttatatagagctgaatacaatgttctaaggcattaatgaaagaaacaaaacataaatgaaaatattggacattaattgtagaatatgtccaaataaggcaagtgagatgtgccttgtatcttgtcaacttggggaggaagttgtgacgtcttggaaggttctggagggtctcaagattctcacataagcgcacaaacaaagaaggaaagagttgttggtaatcgatctccttcggctccatatatggcaagtagtagctcagcgggttcttgtgtggtaagatgtaccaaagttcgtgtggtacatgtattgtgtggtctagatgttctactggtttccatatgtagctttgaggtgcgtccaagtgtagaataaggaagatttccctgtttggcttcatttcgtgcggtacttcagaaggtagttcagcaagtagttcagccggtctgttagcaaatacatcagatatatgtacttgtgatatcttagaatcatttgcttggtaaatgattccttgatgacttgatgttgcctcgttaaaaacctttctaggtaaacccattgggacaaaccctagataagggaaaaagagtgcaacagtcatatttccacaatatggtgacccggcttgctggtatttgatccttcttgaatcatcattagtcttcttatggttaatttgctggtgaataattaaccttgtaccttgtgcttaattgagacttattgggcaagagttcgccaaaatgcttc

SEQ ID NO: 40465 - DNA, 513 bp, Arabidopsis thaliana columbia
cacaaatataaccaaaactcagaagcctatttcaacaaaaacccagctcgcaaatttcagaaacctcaaagaattcagctttgaaactaaaccccaaagatcgatgaataaaaatgaaatcttgaagcaggtagagaattcagaaagataacaaaactacagaaaaaaaagctctgagattccccacagatgacaatgatgatgaatcttcttattccctcttaattttccttttctcttaccgtaagatcctttcgaagaaattctcgaaaaacccagaaaaagttatgagtttaatgaagaagaagaacagaatttgacgaaagacaatttccaaaagctttctttgagagagaaagatagatagagaaagagagagagaagcttgtctcgttcggtatttggttggcaccggcgtttccaggtaatctctcgtatcgtctatctgtcaaaccggagctaaattaccgacacgtgtcaaatatcgacggctacgcattactttgaccgggt

SEQ ID NO: 40466 - DNA, 573 bp, Arabidopsis thaliana columbia
gctatctttggtagctttgtttgggtacttctttaagtaagacttgatgcattatactgacttttctttataataaccgtctcttcaagaaaacagaaaattggtttttgctctaacctgaaatatgtggctatatttagtttagtcatagatggccacaaattttagcaatggtaatatatggtcaaactggttgcaaagcggtcacggattatatccatagatgtaacactgatatagctagcagtcaagatggaagcaaaactgacaagtgattattgtggacaatcgtttctattttattttttctcttttttctcctacggcaaaaaagtagatctagagttttttttttcttttttttaccgccgttgatcttcattgatgaatttgggcattcttgacatttaaaaagttttccgccgttaatctagagtttcctcttggtctgcagtagtgcggttttgtcacgatatagtcgttgctgatcaggttttaacggaggtgaaggtttaaagccgtgttacgcggttgaagacgtcgtgaagtgcttcgagttcagagagttaggtg

SEQ ID NO: 40467 - DNA, 290 bp, Arabidopsis thaliana columbia
ggatccccattaatcaggtctgtataaatgcttccaatcttttttcttttgatagccatgtaattattttgagatatctatctcagatgaacactgagtgaccatatgatactaagaaccaaatggttcaaaatttattatagttgatccgggttaaaggggggggaattttaaaaagggtttggggaaaggcccaacctttgggaaaaaaatttggtttttaaaattgggtttgggaaaaaaaaacccccaatttgggggccttttttttcccccttggggggaaaaaa

SEQ ID NO: 40468 - DNA, 404 bp, Arabidopsis thaliana columbia
aaagaagagtacttcatcctttcttcgacggtatactatacgaaatagttttctctcttttttttttgtgtacttctactctaaaatgttcttagagtgattggaaactcttatgttgtttgcaaacattatataagattgtttccatcttaataatatatgtaacctaaatttaaatcctataaatttaaaatattttcccgaataagtttagcaagacgaaagtgaaatattgggaactgattaaaaaaattatggggtttcagacatactaatgcaaaattaaggatatataaatttgatacacttttcttttcatatgacttggtacataagtaacttgcactagcttagttcaagccaagaatagattttgtatgaacaattactagaatttaaaatcc

SEQ ID NO: 40469 - DNA, 417 bp, Arabidopsis thaliana columbia
tctgaaacccggttatacttaacattaaaatgttctctttctgatttactgttttaatcatttgagccactcgtctgaactgtacgtctctatacgtgtgtacgttagccacaaagaaaatgattcgcgggcaatcacttccaaatttgtgtctaatcaaacttttaattttcatacgacaaacagaggtcgctgaaaatttagttttaagtataaagtgcttttcttttgtcaattagttttagtataaagtgctttagtgtattatttatttggataccaagttgaaaattgatgttggactaataggaaaatgacacatgtaaaaacacgaggttggtattatgccattgggcaccataaattgtcgtgaagtagtaaatctcaagacaagttttaaattaagattttgaacaa

SEQ ID NO: 40470 - DNA, 400 bp, Arabidopsis thaliana columbia
attttgatcgataatatttaaattttgaatagtacaatagtaatcaatattttttctttgatatttaacttaataaaatttgcttcatttcagtcttttgcattctattattattttacacactcaatcttatggatgatatttgaataataaatagtaatccacatttaatgttatatttagagactaataacttatattcttagtatcccttctcagtatgtgtcaagtgtgataaaagatgcaaaaatgtagagaaattaaattctatatttagatataaaatgtatggatgatatttgaataatagatagtaatccacatttattgtatattcaaagaacaataacttaaattcttagtatcccactcagtatgtgcaactgtgataaaagatgca

SEQ ID NO: 40471 - DNA, 585 bp, Arabidopsis thaliana columbia
tgtatattcaatctcaagtcaagtttatgtttcatggttatgtgtaaagatgaaaagttagggggtatttcatggttacaaacctcgtgtgaaagaggagctgcagccaccacggagggcgttccttacatctctcggggtagcacgattgtaaaacacgaaatcagacatgacactattaatgcatgtaagcacaagttctgtttctgcagaacaaggaccgttgcagaatctgtctgtttcctcaggtggaaccttgaattcaccttgttggtttagtctgaacgcctcattacatcctctgtagagctgcaaaaaatcaagaaaagaaactattgtcaaaaagtgttttccttttacttaaggggtttcgacatcgatcatactaaccagattattgttaaaacagaacgcggctctctgaaccaaaatccccgcgcccccgatgataccaccagcctgcgcatttactgcatcaacaatctcaaaccaaataaacttaatgagtgtttgacaaagagaactaagacttggaaaccaaagtgccctgaatgtcctgactacaaagagcacactgcatagagt

SEQ ID NO: 40472 - DNA, 485 bp, Arabidopsis thaliana columbia
taattaatttatataatattagtttatattagtacagagtaacattatctaagttttgtacaaatgcgacttggtatttttattttatatgttggtagaagaaactacgaccggtctttcttttattttgtcattaaaacaaactacaatgtgtgtgtaactaacttactattcttttaggaaatttgagtttgttatactatctttttttaagtcgaagaagagtgattcattcactataattgtagactgtactaaaagtttttagctgtatattacgtcaactaattataagggttttatacaaaacaattatcaaagtcgtctatttttacaattttaccatatacgtcgaaaaaatacaaaataatctcatgaaatttaaaatagtagacaataaacctcatttttaaattttatatatatatatctgtaacgtttttacgattacttacatttgtttttaaaaatctaatgatatagtt

SEQ ID NO: 40473 - DNA, 544 bp, Arabidopsis thaliana columbia
ccctacgaatctcatcagactgagatggtatcacaagattatagttataaacttaattataatgtagaaaaggaaatcaaagcagtaatatatatgcttgttcaatagcaactatagtgagttacttcgtacatataaaaaaaaatagaaatagagagaagcttcagtctcctctgttattggcattcgcagtcttatgaaaacaaaattcacaattagcaagaagaaataatgtataatcactacaataaaaaaggtgttttcgtcacttatatatacttatataagtgacactctgaaattggtcatgcaaatatcattggaaaaaattggtcatgcatgcatgggcatgtaaataatgctacattagtaacgtgtaactttatatgtattgattcttgattacaatttttcacactacacattcctcgtacaagttaaactagtgaggccttggtgagagtttctcttctcctctcgatgtgctgaaagacaaagttaaacgttccatgaaacaatatagatatagactcaaatatttaat

SEQ ID NO: 40474 - DNA, 585 bp, Arabidopsis thaliana columbia
tcgccctgcatattttcaaaatgcaaaattagacaaagaaactgcaaatcttacaaagatcatgtctaatgcaaaatattttacctttttgcatttgcagcatcagtaatctcagctctagttggaactccggatttcacaagtgattcaagaacctgagttgccataatcaccggtacacgagcagctttacaaatagctataatctcctcctgcatattagccaatctctcccatccacattccactgcaagatcacctctagctatcataattcctaaaggattcgaacacttcattgcttctaaaagaatcaaagacaaattcttgaatccacttttcgtttcaatctttaaaacaataccaagatcatctagttttcttttcttcaactcttgtcgaagaacggttatatcatggacatcacgtatgaaagaaataccaaccatatcagcatgtgaagctacataatcaagatctttaatatcttttgatgttaagcctttgaaatggatatcgctctgcggtatgttaatggacttctctgatcctagttttgtacttttggacgtgcatgagttatgg

SEQ ID NO: 40475 - DNA, 1091 bp, Arabidopsis thaliana columbia
tgccaaacttaagaacaacatagttagtcatacgcgaagtaggtgggatgaagttctgcttgttctgctctattaagcttctcaaatcaacgctgcacacaatttacaatccaaaaactacttcaatcatcaaaacacattggcaaatacatccacttttaaagtttgtgaacaaaattatacctagtggagaagaaataagctcgcacaggaatagaaagcttggcttcgtcctctaagcccatagaaatctcttcatcaacctcagctggatgctgattctgattctgaagctgctgcggctgagcagaagcgacgggggtcgtcgtagacgaagagatagccctctcagtgaagagatttcggaatccttgaaaatcgtaaatcggagaattggatttcgcaacgacattggagaaacaacgagtgggaatattcgacgacgaacgcaacgaaaagtgaaatggaagcgaaggcagcgacgaaggtttttgctgagaggtaaagatcgagtagagaattgaacggacgggagggcctagagttttcacgtagacgtcaacggaacgcatcattttgcttttttacacagagagtaagagtcaccggagaagaagatcaacaacagagccgccctctctctgcctaatagcagaattattaatacttgtttgagtattggggtttatgcgtgccgtttgtttatttcacggactaacaacgtgctgttatgtgtaaacgacaagcattgtgaagatagaattgaaaaaacggcagtgtatcagaattcaggatctagaattttttttttgggtaaccgagtatttatgggtcttaggcccaataactaggacaaagtaaatttttgatatatagttgtgagatgaacaagatttttagaaaattcttggatgcatattgaaagatttgaatggttacagtgaccactttctattcactagaagaccaattttttctatcatacctaaaaaatagttttactgtccgcatgtagtctttcaaaccctataagcaagcaagaattgcataaaagaaaaaggcaaaacatgtaaaattcaagaacaaaagtg

SEQ ID NO: 40476 - DNA, 883 bp, Arabidopsis thaliana columbia
taacatcaacagttcgagcatcagcttctgtatccttaagtatcacataagctctatcacacgagctacgaagatcacaagaaccacaaacctaggattcaaaaacaaaacatttcttatgagttaaagatctctctattatcaaggtttaaacaattccatagctaatgcaacaacatacatctccttcgtttaacttaacatgagctcgaatccttttggaagaattcacagtttttctgaagagattagggcatccacgctccacaagagcttgtacatctcctgatgataaggatctgcatcaagaggcacaaaatcatcagtttcaacactgaagattgatgaatttgagaaaattgtatacctgagaacgtcgtaacgatcacgagcgaagctgagacaagcatctttaacgagaatcatttcctgataaacagtatcatcttcggtgtctttggtgaaatatcctttcgtctttaagcgatcgacgaaagttatccactctggccatggatgaggagtgagagacggcgaatccgaatccacggtggttgctactgcggcggcggcgtcactggagaagcatcggaagcggagaaatacagatggaaaacgattgaaagagagaggaaaggatggtttgtaaagtcggaatatggaattaccgactaggaatattctggaagatgacattttattgagatctctccggcaagaattcaccagagacgactataagtaaggttttagtaaggattttggcaggcgaacgagtggataaaggagaaggcttttcaagtattgactatttgcaatatgaccttttatttatataagcattttcattattgaccctttagttttagaattgcaattttgc

SEQ ID NO: 40477 - DNA, 521 bp, Arabidopsis thaliana columbia
gtgacttttgacacttcgattgtttttttgtttgattcactatttggtattgtgatcacatcttggtacttaaggtagatgttttgtaataacaaatcgattacttgacattgagttttcaagaactttggtcaattgtttgccttctctttggaacttgttcttgtcctctatccttatattagaaacgatgccgtataggatgagagggaccaagcgaattagttaaaaatgccttaaattgtcggcacaacgtcaaaatcgagctgacaagaaaagcagaacagaatcaaacaactctttatgagtaaaagcgaagtaaccatttctctcactctcctttctcaattaatataagccaatcaccatcaaaatatcatttgagaactctagaaacctgcttcaatggcgatcgacaagcttccacttcttctctttctctccatactcctctgcctcaatcgccctgttcttagcgacaccggtaacttcctctctttcttccattgttttcttgttga

SEQ ID NO: 40478 - DNA, 651 bp, Arabidopsis thaliana columbia
ttaactcatcttttatgaaaacataacatcaagtaattttggtaggtgaaaacacattagttaaataacaacatgcatgtcgacgactattaattacacattgaatagagcatatgtctatcaaattaacattttcgaagaacacaccaaaataattaagaacaatttgaaaatatctatacatcatagtaagttgaataattcaagtccaacaaataccatttaaaaaaacaaagtaccaattcaaaaactcgaaagacaaatccttctcagctaacattcatttcctctttaattctcatctcatctcccttataaacacataatcagatcttaaggatacaagaagaatgggtgggatgagtatgtcatgttgtggtggtggtggcgatgatggttcgagtttactaacacatcttgtcataattattgtaatctgtctctccatcatggccgtttgcacctccaacgaacgccgtacagccgttcgtgtcgtccggtgccgttgacctactggtataagtcatctctataaatcagatcatatttctataaaagatttcttcggattctctttacagatgtatgtgttgggtcttgattagtgatgaattaccgatttgatgaaatgggtttaaaatatttaacaga

SEQ ID NO: 40479 - DNA, 481 bp, Arabidopsis thaliana columbia
taactcgggatttaatgcgcagtttaagtcgtgatccttccgtttctttattaatgtcggatcacctgttaagcggcctggcccatgctgggctgtgaattgggcctaactcgtcttgaagcctattgaatgcggattgcgccgaagtgggccgaatccgacatccacatagatcactttggtgtttacaaacaagaacacgcaagtgaacacctaatgcccttcactagcacttaggttcactctgtaatgtatcttgaataagagaatacaatgctcttaagcttatgctaacaaagtttctctcttctctcacaccttagtataactcgcaccacccctctctctttgcctagagttcctctttatagtggagactctaaacccttatgccaaaaaaaaccctaatcgctgagctgtcactccttaggctcttctagatgacccagacgctctccaagtttgagctgtacaacatgac

SEQ ID NO: 40480 - DNA, 544 bp, Arabidopsis thaliana columbia
taataattattcttttttgacagatctaaatgtgtaactataatacaaagttactaaattacatatgttctacgggttaaatctaaaaacacatcaagattaaattttataattttaatataaaagttttttgaataaaaataaaaaattatcatgtggtgtaccacaagtcaatcctaaaagaaaaaaataatattagacttattaatacagtaaatttatgacttattaaaaatcgtacaaaaccttatcgaaaattattaattaacacaaacaacaacaaatattatacacaacaaatttttcattttataaaatacaaaaataaataaaatattaatccgcggtatacccggatccatatcctagttcactacaagagaacaaaacttttttcaacagattttccaacggtaaataaacggttagaaattttcgacggtttcttaatgatatccaacggatttctaacgacatgtttcctatcaaaacatcgtcgaaactttccaacggattctaaatgatcgccaattcgtcagtgatt

SEQ ID NO: 40481 - DNA, 525 bp, Arabidopsis thaliana columbia
ccaataccatcatattttgaatgattttagtataaaattcagtaagactagatttgagaagattattaaatcataagttccataataagggatttgacattaaaaaaaaaaactctttttgaaatcttagtgaaatatgtcctctatgttttcttgaagataaacaaaagatttaggaaacattaaaggttttagccttttaggctttgattacaattcttttgtcctcttattttctttacactcttttaagattagttttcttcatgttcttgaatttgttttggacaaatattgtcttttacctaacttaatttgtgccatctgttgggaaacataatggtgaattaaataaacttctatataggttgtccccaaaagaaaagaaaaatcaacctagattggatattgtatagttaatacaaatcaccattttgtagcaagattaagatcaaatgggacaattttattaattagaaaactggattatcaaactataaatatagcacaaacagaacaagtttg

SEQ ID NO: 40482 - DNA, 851 bp, Arabidopsis thaliana columbia
tagtgtgattaacaattaacaagccacacaaagaccttaaccaaaggttgtcaactacacaaccgttttaaatatttattcaacacacaaactatctaacctggtcgttaccgactgtagtgttgtcgcctcacatatcaatgtcgccttacaatagaagagatacagtcggaattgcgaactaaagaaggagtaaaaactggatattttgtttgttgtcggatatgtatgttaataattaacaatctgttttgtgttatcggatatcagatattttgttatcggataagtatgttaacaatcggatattttgtttgttatcagataagtatggtaacagaagagatacagtcggaattgcgaagttaaagaaggagcaaaaactggatattttgtttgttatctgataagtatgttaacaattaacaatcttttttgttgacaatcatttattttcgtttccgaagaaaatgtacgtgcgaagtgacacgaatctaacataacaggtaagaaaaatattttcgaaataagttacaatctaacatgccgatgatcatccccctataacgaaattgaaaaccaaattaacaatattttttcacgatcggttacaaatttgttacccgataacagtgtgaataacaattaacaatccctacgaagacctagtccaacgttgtcaattacacaactgttttaaatatttattcaacagaagaactatctaaaccaggtcgtagttgtatcatctcccatctcaacgacgccctacaacgcagacggaaatttgaaatcagaaaaaaaatacgaacttgcggtttgaatattacatggtacgacaaatattaaca

SEQ ID NO: 40483 - DNA, 599 bp, Arabidopsis thaliana columbia
  unsure (1)..(599): unsure at all n locations
cacgtctttttataacagccgtcagcaagataaagttcctgcaacatccaaaccagcaactttttagctttcaataaaaattaaaattcatctctcaagtcaaaatagctctgttgcttcacaaaatccacaaatcgaaccaaatcaatcgcagtttcactgattttcaaaataaactaaaatcagagacgaaaaaacacagatcgtaagcataatcacacgaatcatccaaaaactcaatcaaaacaacacaaaaccactcaaaatcaaacgaatctaagccgatctacaatcatcgacttcaacaaaaaaaaacaattcaagataaaaaaaaaaatcctcaaatcgcatgagaagaattgaaacaaaacgaaaagaaactgaacatgaacatgaacatgacggacctcttttttcagatcgatcgcaggcaacaagggtaatctaaaagcaaaagctgaccagaaaaaacggaggaaaaggagaagataagatttgcttatagagaaaaccctaagccggcgatgacgacgaagaaganacagaatcgaagagtcatttatatataatcggcgatattggagagatgatgaagaaga

SEQ ID NO: 40484 - DNA, 520 bp, Arabidopsis thaliana columbia
ttttatcataaaaattgagaatggttgagtttttgtaatctctcttaaactatttgttcctctttttcaaacgaaaaatagtgcgattatattttagtaataccatacctgtaatatttattttttgataaaatcatacctgtaacattgttcaaagataattgttacttttgtcaattatttattgaatttgcatgtaagagttatttaaattaaaatataatatatgatatgtgatatcgacacttgaatattttctcgtactttatatattcattaaatgtgttaaatcatgagtatttttaggtggtgtagtgtgaagaaaagaaaagaatttgcgttggattaaatatttgtaattatcattccaaattgttgtaacaagtttctttccatttccaaataagagtgaaagtgtttgttttttcttttcttttttttgtctttttgaaaatattggaacacatcagcatgtagacatgtaacgagatagtgaggtaacttgaaatccatgtttttg

SEQ ID NO: 40485 - DNA, 363 bp, Arabidopsis thaliana columbia
tggcagagagagaagctgacacaggagttgagagacgactcaatgttgtgataatggctgttttttttctttctaagtactaatttttaaccgtacatattggtgaaaggcagagttaactgatgcatgcaggaccctgcggaagtgtgttttcgaattgcaggttttaaatgctgcgatgcagaagctgtgcgagtatttactctggcgaaaatcctagcgtgtctttcttcatgttttttggttccatggagtatatgtcaaaaaaaaaaccatgaatactcggttttatgagggtactatgttgtaactcgcacaactcttgttaaagcttttggcaatttgtacagtaagaaaaaaaga

SEQ ID NO: 40486 - DNA, 301 bp, Arabidopsis thaliana columbia
ttcaatcagtagtgtgatatgaatctagtaatatattctaaagtcccagacattccaggtacttacatatcgcagtgacattgttaatagcacactcggactctttctatatgtacatcctcaattacgagattgcaatagtgtaaacccgtcagccttggtcgtcctcatccaacgcgtacgtattcctgacagtcgtagactcattattcctctcgtgtctttagaccatgtgtgaatattgactggtttagccatcttcgctgctggcacaatgtaacggtttcacatgcataaatct

SEQ ID NO: 40487 - DNA, 558 bp, Arabidopsis thaliana columbia
gccatatattgctggccacatgacagcatgatacgacatgtgataacactaagatcacacaaacatttgagacttaacctttacacagataaacacatgcataaccaaatcattggcctaaggtggggtcaaaactcaaaaggtttcacaagccatcgatcgtagtatctgagaaatcttccccattaaattttttgaactgagggatctgcaacgtaaaaaaaaaccagcttaaaattatgttcttattttataactctaaattatattgtgtctaaacgttgttaggagtgggtttctttaatgttttcacatgtaatacgtctaaagtcatttggatgcaaacatgaaagttgaagatcaaataatatggagaaatatcctagcatggtacgtattcaatgagaagatgcaaccgttggatcaaattaaaagttggaaaattatagggaaacaagtgaggtttaatttagctctggtttgagttctgtcagaccaatgaactaaatgctaatgctatagtgttattgaagaagttgatgcgaaattgagatttgt

SEQ ID NO: 40488 - DNA, 535 bp, Arabidopsis thaliana columbia
tagtaattgtttcaagcataaagcaaaaagttaacgataccataaacattagtttttgttataaaagttcttgttatacgtacgtggttgtattgatgatcgacttatataatcacaaagggttaactatttttgatatgggaattatcaaagcccggtgaaattaagagtccgaggaacaaagaggtcaacaacaacatcagctgaagccgacccgaccaaaatctcggctcctcctccacaaaatcaaaatacgtgattacgcgtaattttggtagactgcaatattaaataaaaaacttgtaagaaagaaactaatcatcagactttttttgataatctatacttaatttaaattaatcaacgatcgtataaatgagaatccacaaaccaaatagccagaactaataacaagactctttctctctccacctctctttctctcttaaatttcgttctgtctccggcgaagtcgctgcgggaagctaaaaggcaggttagaacgaattccggcagacaatcaacaatgcgaggg

SEQ ID NO: 40489 - DNA, 526 bp, Arabidopsis thaliana columbia
cggtggacagtgacatatgttttcgcctatcattggtcagttgtggaggtgctgcgctttccactgttgtgttgtgtgatgggggaaaatgtataattatcattagtaagtactaaataattatttttgccaaattatcctaaatagaattccattgcacatttgttttttctaatctgatattatcatatcttacttgagaaaaattacaagtttctttcaggggtcaaaattaactcatgagaatacccaagcggtagaaaaaaagaaaaactgattgaaaccagtacaaatcaaatgaatttaagaagtattactatagtttataccaaatgtatttggatggtgaataatcaaaactgaaacgaataagtcaaaggagtgttttttttttataactactaaccactcagactcagtgacggattagaagattataacttaaaccggatataaccgaataatagaaccagtcagtgcaattcgatttaggacataatgttaggaagcctcctcggttaaaagt

SEQ ID NO: 40490 - DNA, 617 bp, Arabidopsis thaliana columbia
  unsure (1)..(617): unsure at all n locations
gggtaccactgttgaatcatctaaccttgccgtttaatttagaaaaaacagaacaaaaatgtcagaacttttgtgtagttgatgttattcttctgtctgattagtaggaagcaacaatgaatttaaacaccacatgcatcttctttttgaaccaaccaaagcagactctctcaacattatctctcagcgacaagtttagttcagattcctctagaacccattttcagatgtctcgtcagatttccggccaaccctctcgccgtctcatcgtctccaatgctgcttcttctccttctctctctggtggcttcccaggtttcttacaaaaattgttcctttctttctacttagaattcagatttcaattgatgaatctttctgttcgtgttaggtaactaccatattgaggtttcttgactcacctatgagatttagtattctgctaattgtggaacatttgagcttatagtccaattggatgaaattagatttgagtaatctctctgtgtatcacaaattgttcattttcncccataaagactaattttatatgagtaacttcttgttcatgaatattagatgtggagccatagtaagagagatgaactgaacagaca

SEQ ID NO: 40491 - DNA, 514 bp, Arabidopsis thaliana columbia
agctagaggatcccaatttcagagattggtatgctcttgatcttctaatgtctgaatcttttttccatctgctctaaacatcttgacccttcattttgctagccagcagaatgtgacaaaagttttgattagtcaagtaattattgtacccttcttaatgatcggatgattggctgcaggtttaatggtgctctatcccttgaactctcaaatgaccatccaaataggcgtatcatccaccgaaaagttgctatgatattgggacattgggtttcggaggtactgctgtttacttgttttacaccggctttaccatgtttatgcagctaagcttgacaaggctttggaggaaatcacatcttatctttttttctaaaagcatcttaagattataacataatttgcaaattgacataatatcttgtccataagttgagtcaatgagggatagccactaaaagcagaattgtttctggttatctgttacaaatggctattagggttagttacctgt

SEQ ID NO: 40492 - DNA, 553 bp, Arabidopsis thaliana columbia
taagtatgactaccgtttatagtttttcttttcaacgtcttaaatattgaatttttttatgaaaaagttagcagagcagagcataattaacactcgtaaaaaacagtgaaataaaactaaggttgtcgtttctccttaatgcgattatgaagccatgcgggacctcccgttctaagtacgagttgaaacgcacccatctctcgtaacacaactacacaagcaatatcaatatatcataaaaattcgttttcgcctggaactaaagaatttgaatgattcaaaacctgcaataagttgacgaattctaccgatgagggagcaatgaagcttctatttcttaaataatttgacagcagagtaaacattttgacctatgcttgacgttatatgggaaatccatatagtttttttcttcctctcgctaacgctctttggcgatctttcctcccaactatgttgtatttagataatctctctacaaagggttcacgtgaacatgacacaaacagtagtcgagggaacaaaaattgatcgatcgataggaagtgttggt

SEQ ID NO: 40493 - DNA, 524 bp, Arabidopsis thaliana columbia
ggtaatttccatttttggaagagttgtagtttaggtctaggttatagatcaatttctcaagcttagaattatctaatcacttttcgtttgtcagtcgaaatgttgtcatgcgttagaaccattagaaaagctggtgagtaaactacttgacggctacactcacactaaagagattagtcatgtggtaagatcttgggttaatcaggtggtaaaaacttggttcatcactagttatcaaagaaaaacaaattatgccccataacacaaaaagctcaaaagcacaacttgtaatgataaacaacattggatcactactatgagagacataagatgatgaacattaagaaatgtatacagtttcatacagcaaactgaaccaaacaaaaggtaacaaagaaatcaggaaacatgtgtaatcatgatattatttgaaacaacaaaagcaagttcacatctccacgtcaagaattattgggaatctatagacttgaagtttaagtgtttaggtttcgaggaacaggagt

SEQ ID NO: 40494 - DNA, 548 bp, Arabidopsis thaliana columbia
caaagtagaattccgatagttattagaaaaggtaatgcaatgctttctccaagtagactctgagctgaatgattttggtaaagactaatgtttgagatcatgtccacaacattataggcttatttcgtatttccacaatttgatgagccaaagataaagtatcggaaattctcttcataacatccatcagcactgtaataagtctaagtgtgactattatatttgctcggcttaaaaataaaaccaagtttcatcatttagtgaaaaatgcataaaccagaaactgtttattaaaatactagagattatgtgaattctttttcacagtttttttttaactacatttgtaatacaacgatctacttaacatatcattacttcttctttttattttatcgaaaacatatgacgcaaatggttgaaagtaacaatggttgtcattcctcctcaatttgttcatctcttgtttgttaacaaaagatttcatatctttccttactcattatatgtcctctaactgacctatacaatttatagggtgaatatta

SEQ ID NO: 40495 - DNA, 591 bp, Arabidopsis thaliana columbia
tattttttatatattaataaaacataggagaaaatcaataaacctaggaattttgttttcttcttcttcttcaatttttttcattcgaaacacaaacaagaaattgaaaaacagagactgtgatcgagagaaagaagacacaatataacattaagacattagttgaaatccaaggacacaacaattaaatccgaagacacaacatatccatcttaaaggttatacgaatttaaatccgaaaacacaacatctttatagttttacaacgggtttccagttcgaataccatttttacatttaaaaaataaagaaattgatttcaaaatagcaaaccgatgtcattttagttgaagaatatgctacttcaatatatatgtatcaactgagtcaacaatcactagcgttgactgacatcttttaacattgacttgtagttaaacactatattaatagttcatgtagttttcttttaaattacttgtttacgtataaatcggtatttgtcgttagttcacgttgaaaaacacactttttaccagaccaagggcttctctctcttacacacctctatcctttagagagagagggaga

SEQ ID NO: 40496 - DNA, 576 bp, Arabidopsis thaliana columbia
aattaatacactcattttccatacgattagatatgtttttgttttcttctcttaattaaatacactcatttttcatgcgattagaaatattgatttcttctaaaaaaatagaagtaatttaagatatgatattcggtaaattaaatggaaaaagattttgtaaaaaaaaaagaatatgatttaaagaagaggattaattaatacactcattttccatgcgattagatatgtttttttttctctcttaattaaatacactcattttacatgcgattagaaatattgattttttctgaaaaaatagaagtaatttaagatatgatattcggtaaattaaacctacgacctggtggattgctaatgtgtccgataccattaattgattagattaactccgaaccaactcaacaccatgaaaaagtcatgagttatacattaattcacactatcaataaacttccttaactaattttgttttttatattctaacactagtattgattctctttgtaatctagtttattaatagggagattttgaaatgctatagtcctcaacaacatgaaaagtggaaca

SEQ ID NO: 40497 - DNA, 526 bp, Arabidopsis thaliana columbia
gatgaaggtgttcttgagcatgtttggtccagctccaagacatgtagaaggggaaaggcaagatcatcgaccttcggtttcatcagtaccttaggtgaattagtatttttgttttgtaggttttgtctttaattcatagtatccatttgtaaatggttaaaattgtttcaccccacagccacagataaaaacttaagttcagtgcatagcggaaaaagaaaaaaagatcacaccaaatgttattcttttgggccggtgttactgttttccattgtttactaattcatgatttcttcgtcttagtttagcatccatacgagtgagcgtgacgctctctctatgaatgaattagtgcgggggagtcttaagtctaactgcgttattttacagaacatccagtcttataagcaaactctacttgtaaaaaaataaaaagggtgaaactttggtgaagttttggtgaagggtgaagggtgaactcccaaagccgaattcgatcttctctgaaaacataatcacatttgtt

SEQ ID NO: 40498 - DNA, 293 bp, Arabidopsis thaliana columbia
  unsure (1)..(293): unsure at all n locations
tgtgtgtgctngtgtgagtgaggagtgtgcggtgagaggtgtcggtgtgagagtgatcgcgagtgagcgtgtgtgtggcgtgtgtgcgtggcgagtgagagcgtgagcgagtgagtgtgcgcgagtgtgcgagagatggtgtgtgcgagagagtgagagagagagagtgcgagtgtgngcgagagagcgtgcgagtgatggcgagagagggtgtgtgagtgagtgagagcgagagcgtgtgagagtgtgagagtgagcgtgagtgagagcgagcgtgtgtgtgagtggtgtgt

SEQ ID NO: 40499 - DNA, 703 bp, Arabidopsis thaliana columbia
gaaacagtcgttttgattgttattgaaacaatttttgtgtatgtgataggacttttgctactatgccaatacaatcttcttggttgatcttcttctgtatcctaagaatgaaaagcttttcatggtttgcttttcctttgctgaggtatgctttttaactacatgtatgtatatgagtcttttgtgtcattgtgtgtgctgatttattttattggttgtgtcttgtgctgcagggaccattggcgtgggcgattattgtctggcgttgcagtctggtttttagttcgccggataagattgttagtgttcttatacatctcttacctggtgagttctataatcttcttgttgacagaagaagatatgttattgattcatattgctaaagttgacggctttgattaaagtagttgtatgaattcttagcttgttgttcccctctcaaccgtttttaattcaaacacatggttccttgttgtaatgcatatgatagatatagttaagctttatgctctctctctccattgtttctttattattgtaatgaattttggtttcagggctcgtgtttttcacgattaggtggtggaatccagcgacttttgcagctatgcaccctgtaggcactgatcgtagggtttcatggccttatgttgaagacaaagcttacctattcacatggctgtttctcgtccccttagtc

SEQ ID NO: 40500 - DNA, 548 bp, Arabidopsis thaliana columbia
cctttgtttgtgcaaccatctaatggaagccgcgtggttcgtgatgtcaatctaaatgcagaatacaatgagcatcttgaggatatgaatccggttacagttcatcctggtcattttgaggttaatggacttaggtctgagtttttactagataacagtgttagagctgggttccctgttgatggacgtcgtgcatcctgtaaaagaaaagctcttgatgcaagcggtggtcagtcctcttcaactggaggtttccgtgagttccagcgtggagtatccagttcttggatctcaggtcctacgtattacagcccagcaatgacagcaaatgatttaaacatatctcttgatcatggtcgaaggggtttggtatctagcgctgttccaaatctatctcctcctaccatcacagagagctctagtagaaattaccctgtctgggttaacccacatatcaacaagaaaccgtaagcaattttgctccatccttgaactcaccagggcttatacctgcagatcaccagcagatcagcatgagatatggacat

SEQ ID NO: 40501 - DNA, 1289 bp, Arabidopsis thaliana columbia
tgttctaaataaaggtaaatagttgataagaaaccacattgtgggctcgtttccgacaatctcacatgttgacatcagatcaagctcgaataataacaaatgaatctatcaaagtaaacgatacacgaaaaagtcattgcgtggatagaaactagagcaaaatcacaatccacaaatcagaaatcagtaaaattcacccttatagactatttcatctctctgttcctagacaatgacatagatgataatgatcacggttttacatattttttaccccaccaggtccaagaggcaaagctcatctcatcactcactatacgacactagcaacactaacgtaaaacagctggcaataacttttttttttttgggtcccatacaacaatcatatctttcttccctttaatagcagcactatgtcacagtgttgagattttttcctgtttcccattgattttaaagttaatgattacaactaaaccaaaatcatgaaatgaaaatatcttaaattaaagtacctaggtatataacatttgccgacatcaaataacagtgaagaaagacgttttaaattaaaacttttaatacacttgacttgaaaatgtactattcattagtattagagagtaaatataataaaagcttaccagagatgtgtcgcccccacggaaaagtctgagtcccatgcaatctgtgaatacagagtcaaatgaaaaaaatagtgttattaaatctacgaatcatacgaaaataaataaatacaaagaagaacaaaaaattaaagatgacaagcacatagcattcaatacgaacgaagaagatttatccatatcaataatcattaactgaattcacactttgaagctatctgaatcattcatatccagaaaataggtagatttgcaaattaattaccaagaagatactaaagtaagaaacgattaatcaaaatttatatggaatctaatactatgaagaatgagtgttttactataccgagtggtgaatcgcaaacggaggcagattcgaggacgagaaacgcgaacctgacgaagataaaagggaggacgatagcgagcagcagcagcaacagtaacaacgtgcgactagagaatctccgcgctgctaacgccgccgctgcagccgcacatcctccgcttcctttaccgattccgacgccgggatttgatatcgtaaccttcttaatccccgtcgctgatatgtaaacttcatttcttcacagttccctaactttctacaacgtttcttcagtccatcaaccaaaacag

SEQ ID NO: 40502 - DNA, 364 bp, Arabidopsis thaliana columbia
cgaatttcttataaaattcaaatatttataaaatttaaaacttcataaaattttaaaattatttatattttaaaaaatttataaacaaatttaaggtgattttatgaaacttttaaagtgtaagttatttaaaataaagaaagggagtaagctgaataacatttttaattttggatgtatgacaaaccaatgttcatgctcattcgtattcagaatcattttggtccttttgatagtataactctaaacgatttatttaatttctaagcaatgtgggaccttgtacacttattttttcatcgattgagtattatatgtcggttttaaaaaatcgggattacatcatatgtagacaaaatctaat

SEQ ID NO: 40503 - DNA, 481 bp, Arabidopsis thaliana columbia
gggtaccaatctgtaacaaatacagatatatactagcaagaaaaacccaccagccacccatcaaagcctagagaagtagcaagttctgccaaacgcactgcatacatctgagcagactcccttgtggcaagcatctctttgcaggtagcttttacttcatcccattctagtgatgaaagtccccaataccttcaagtttccataaacacttctgcgcataaaaatcctcagcaatacacaaatcgcgattcatctctctgagcacagacaatcaaattttccaattttatcatcctaatcagcaaattcatagatatctcaaccataatcgaaacgttggatgttgaaaaattcaaaagttttgagcatacttactttaacgccatcatccctatgagcagtattggtccagcagaaggaggcagagtgaccagagtaagtgtgaagtaaacataaatgtcgatccgaaacgattcgcaaa

SEQ ID NO: 40504 - DNA, 574 bp, Arabidopsis thaliana columbia
ttgataaaacttgaaatggtcagaactaaaaacttatatttttcaaaaatatcataaagagtccggtggtcggaaaaggaaaggagagtgacgtggaccacaagcaattgtttgcccactagtgactggctggtcgaaagtatatttaaaatatgtcccacttcataagatcttcaaatcacttcttctgttccaacaacaatccattctcatttcaacgtttcaaaagcaaacatgttattggtcaatttcattgtttctacgccatcatccatagagcaacaataccttgttgtttttattaaacaaaatgtgaagaagaatagaagaacaataaaaaaagagtgcttttgaagattccacgaaggtatgaagtgtgacataaacggctctttgcgtcgtccaaaagccgcctcccccaaaagctttccctttataaccccaagtttttgggttcacccaactacatgcattatataatgcatatcgactctatacatacaattacttatattatggtatgcacattgtttaatcttttttagagtttgtatcatccggagaatgtgtggta

SEQ ID NO: 40505 - DNA, 927 bp, Arabidopsis thaliana columbia
tgcaaaatattcaaaaagaatgtccgaacatatgattttcgccccgtaatatagcaaagatcacgaaatgcacgaaaaagtacattaagatcaaaatttggagtagaaaaaaaaacaatagaagaatttcattttccttcctcattcatcggagagctctctttgggctttccgaaaaggtatcacatgccaagtttggcctcacggtttgaaagttctagagtcatacatttttaacaaaaaaaaaaaaaccgaaaaagagggattcaacacgaggaatttcctggaggtcacacatcctagtactactctcgcccaagcacgcgtaactgcggagttgtgatgggatccggtgcattagtgctggtatgatcgcatcagttactacatgcaatgcaatcgtatctattcttttttgaagactttatgatctatttgccgtggctcccaccatctatgtaggaataccctatcttgttataagagctttgatacatgcaaaatattcgaaaacaatgtccgaacatataattttcgccccgtaatatagcaaagatcacgaaatgcacgaaaaagtacattaagatcaaaatttggagtagaaaaaaaacaatagaagaattccattttccttcctcattcataggagagctctctttgggctttccgaaaaggtatcacatgccaagtttggcctcacggtctaaaagttttagagtcatacatttttaacaaaaaaaaaaaaaaaaacgaaaaagagggattcaacacgaggactttcctggaggtcacagatcctagtactactctcgcccaagcacgcttaactgcggagttctgatgggatccggtgcattagtgctggtatgatcgcatcagttactacatgcaatgcaatcgtatctattcttttttgaagactttatg

SEQ ID NO: 40506 - DNA, 1261 bp, Arabidopsis thaliana columbia
aagttctaggtgatcaatctaaaactagcaataagaataatcaagatcaagatgaagaactctaagaataatcctaaggggttttcgatctactaatcctttctaaatccctattgagactccttaaacccaacaaggtgattactcagacatgataatagaaacacaaatcataatctgaatagtttgcattgatgaattagaatataagtaaaaggagttcagaattctctctgcagtgattggattcttctctcaaaatgtatctcaatctctaaaaaacacttaggtctaacaatgaccaaataataaggtatattcgtgtctaaaaacgtgcagggactactttgcaaataaggaaaacttcagggcttctcaatgacttggcaaaagacagaaattctctcgatcgaaataagggtgtcgatcgacataggtgtggtgatcgacataggtgtggtgtcgatcgacaccatcgcgtgaaaaaacgtcttagataatcttcattgctgaaaagcttccaaaattccttattatgctccatacctcccagatgcgtaagtgtacctaaaatgactcaaaacatacggaaaagactagaaagactctaaaaaccattctgaaattatgttataaaaagaatatgttcctctccccttataaaaagaaaaatataatgagagattgagacgactttcagatagtgtataggggtaggaatgtttcctatgaccccattattatacattatttacaatgatcaattacaaatgttggaaaaatactgagggtgtcgatccaatatgcgagttcccctttgtttactctctaaaaagaataagtctgggggagagaaagaacaccaaagaaataaatatataacgaatggtcgatctatcatggtataatacaggaatgagtctagaaggttcttaagcatttacttgattgatgagacccagcgatgatagcctagtggatatagttgagtgctttggtatggaatctaggatgttgtgtgggctagcggagaattacttggtggtcaggatttgattagaactgttcaatacatggatttggtttgtatgatcaaggtaataaactagagagattgggagtttctatgttttccaaacctctttcacagattcaaccttttgtttgcttgagggcaagcaaaagctaagtccgggggagttgatatgtcctggtttttactgatttctaacatagtttcagaattgtttttagagtcttt

SEQ ID NO: 40507 - DNA, 700 bp, Arabidopsis thaliana columbia
caaatcagatagtctcttcttcatccttaccattaatgaaaagttctcttgaatcgtaaagaaaagaaaaagaacaagagaaaatgtttgagttatatattgtaccagtttttttagtagcccctaagcatttggctctgcaatcaggcaaggcccactccagcaggaggctttgattgttgaggtcactcgagaatcttgtttccccaaatggcgaagtagccggaacatgtaatctcttcacgatttgacaagaaggaagcatagactgtgcaagagaataattagacgtggcgaagaaggatgaagtagaattgcttaggcaaggaatcgacggataccaagacggcaacacgacctcattaggacaagacaagaacgtgtataagatatcgaagtgaggagagaaaggagatcctgaaatgttgaaggttaaaagccgtttagccaaacagttttaagggtcgttgatatagattttttgccttctgtagtcgatatctcggacaagaaatgttccggacataggaagttctaggacagtcttattgagatcggtgcagtggagattgaatctcgcatggttacagaaagggaaacgaatggggacttctaagggtccacatctgagtggtcttgatgaagaagatgaacagttattagggtttgaggcgtgtcggagagagacgaggaagagaag

SEQ ID NO: 40508 - DNA, 1000 bp, Arabidopsis thaliana columbia
cgagtaacctaatcatctatttcacttctaataattttttcactataatttattttacttaatttcatgagagatgtattgtgatggagtacaaattaggtgttattaccagaacataactttttttaattacagtcatatttttaatactcagtgtgcctctactaaacgtaattatagggaatgccactgtcacgtcagaaattgatgacgtagattaaatgaactcagccgtaacgcgatacaacgggagtaatgactgagttacagtatgttgcggctgacttataacaaaaacatatgaactataacaaaacggcgaagtatgagtataactcagtcagacgttacgtctgatatatcaaatgttacctcagttatactataactcaagcaacggtatggctgagttaaggaatgttgtccgagttataagaagttatacgataacccagacaatgttatggctaagttatgagaaaacggctgacttatttcctcgacacggccgagttatatttttggacggcttagttataggatgatgtgacggctgagttatggtcgagtgttataaatcagccgtaaagagctggattacggtataactcagccttgttacggcttatttatgtgcaaaagattaattattataatagcatgcagttacggctgagtttttaaacgttacggctgagttagttgagttatgacataacacggctgacttaactttgttttgttcctgtttttaattactgtaatagtattcatgttgcgactgacttatagatttgtttgatggctgagttatcaaatgttcgtttggtggcttagttgtcaccccatcaattcaaaacgacatcggctgtaatattccatgtcatcattccatgtcagcatcatcaaagggcaaaaaaataaaaccaaattttttcaactcgtcttcttcacctgagtttttcacatcactggaacttctaattcctcatcgttttcc

SEQ ID NO: 40509 - DNA, 534 bp, Arabidopsis thaliana columbia
gatttgagaataaaagtcatacaagagcatatcttcctactgatctcctcgatgtctactcatatgaactccaccatacttatacatatatgcttgtagtgcctagagttgaaacatattgtatctagatcgcaaaaattcataataataagggaagttaaaaaaagggatatatgatgatgtttaatgatactggtagtttgtactacaatcccttgcaacatgatgagatatatattatgattttatcatagtgataagtcaacagtaaaatacaaaataatattaatacgacattctgatagggataaaaatacaggagtcagtaaagattgagtgagagagagagagagtaatagaagtgtcttttagcatattagatagagggattcttgtacatagatatctatatagcttatacacacagtgagccaaaatactctcccaaacatttgagtataatatggattcccaaatgccctaacttatgaagtagatgttgaagttgaatcttaccgagagttttatttatgt

SEQ ID NO: 40510 - DNA, 1015 bp, Arabidopsis thaliana columbia
tatgtaggaataccctatcttatttataagaggtttgatacatgcaaaatattcgaaaacaatgtccgaacatataattttcgccccgtaatatagcaaagatcacgaaatgcatgaaaaagtacattaagatcaaaatttggagtacaaaaaaaaacaatagaagaattccattttccttcctcattcatcagagagctctctttgggctttccgaaaaggtatcacatgccaagtttggcctcacggtctaaaagttttagagtcatacatttttaacaaaaaaaaaaaaaaaccgaaaaagagggattcaacacgaggaatttcctggaggtcacacatcctagtactactctcgcccaagcacgcttaactgcggagttctgatgggatccggtgcattagtgctggtatgatcgcatcagttactacatgcgatgcaatcgtatctattcttttttgaagactttatgatccatttgccgtgggtcccaccatctatgtaggaataccctatcttgtttataagagctttgatacatgcaaaatattcgaaaacaatgtccgaacatatgatttttaccctgtaatataacaaagatcacaaaaaggcccgaaaagtacattaaggttaaaatttggagtagaaaaaagaaacaatagaagaattccattttccttcctcattcatcggagagctctctttgggctttccgaaaaggtatcacataccaagtttggcctcatggtctaaaagttctacagtcatacatttttaacaaaaacaaaagagataaaaaaaaaaaaaaagagggatgcaacacgaggactttcttggaggtcacccatcctagtactactctcgtccaagcacgcttaactgcggagttttgataggatctgatgcattggtgctggtatgatcgcatccgttaatacatgcaatgcaatcgtatctattctttttgacgactttatgatcgatttgccgtggatcccccagctatgggtacga

SEQ ID NO: 40511 - DNA, 425 bp, Arabidopsis thaliana columbia
ctggtgggacctacgacaaatggatcataaagtctacaactaagaataaagtccgatagcactgcatgtatgtaacagatgcgatcataccagcactaatgcaccagatcccatcagaacttcgcagttaagcgtgcttgggcgagagtagtactaggatgggtgacctccaggaaagttcccgtgctgcatcactctatcacatggtctcactcttgagttctttgtgacaaatgtatgactctataactttgagaccgtgaggccaaacttggcatgtgataactctccggaaagcccatagagagctgtccaatgaatgagcaagggtgttgattctactccaaattttgaccgaactgtattgattctggccttaacgagatctttactatgatacaggacaaaaattatatgtacggaca

SEQ ID NO: 40512 - DNA, 429 bp, Arabidopsis thaliana columbia
atcagagaataaagaagaagaaaaaatctcaaaaccttcctctaaaaccaacggctcctacctttacttacaccctatacatacacttctctttttatcctccatcggcggcttatggcggttttccggcactaatcatctccggcatatataaataaacgtacttcacgtttttctatataacttcaaagtagtttcagatttgtctctatctcttcacttttaagtcttctggttttgtcatcaccagctttttatgttctgtctctgtctgtctctttgtgtagatctattctcgtcatcgttgttcttctatgagaggaagatcggaatgtcgaagagaattagaagattctcgtacatcacttcgttggaatttcacaggtcgatgagagatctgcgaactgtatcatgttgatccaaactcat

SEQ ID NO: 40513 - DNA, 603 bp, Arabidopsis thaliana columbia
cccttcttgttggcctttccttctagcggtaaagctgttgttgcttttgcctctggaaactcttccacaggaataccaagttctaccagtgaactttcgatatctagtttcttttgaagttttgctatttgctgaccatcaagaagttgtcctctcgattgttttgcttcaagtatctcaatttgttgcaactttttcctcaaagctcggacttctttggaattgtgttgagtcagctcatcttctggttgcaagaatgaatccattcgagtaccaccaatactggaaaagtgtttcacatggctgtcacgagttcttagaatgtcgctctcactttcctcctcttcactgtcaataacaacaggaaatgtggctgttggggttggaagtggtcgggagctccatgtttcagatgatctgtcatccagtaatttctcaagattggcaagaacatcaggtgatgtatttgcaatagattggggagaaaatgtcaaaataaagtcaaggtttcgaatcacaatgtcctgcagggagaacacacgtgtaaggtaacatcagcacaacatagaaagagacactgtacataaactctctaagttttgt

SEQ ID NO: 40514 - DNA, 391 bp, Arabidopsis thaliana columbia
aaaataaatatgtaagtaatctatataacgaagtagaatttctcctttatatgttctttttttttccttaataggtttttttttaaatgaagaaaaagagggaaccaggctggtgacagtcatagagaaagaaaaccggccgattatggggaacaagatggcctccttgaggcctaattcaaggcggttcctacttctagcacatgaccctttggtcccctcattctaggcctcatttattggtttgttggtccaatttccaaatggcccatttttcaacatccctccaggtaggatcagatgttttagagtattttccatagtttgcacaactacgactctccgagtttcttcaggatgtaatttgggaaattcatttaaaatgtccagg

SEQ ID NO: 40515 - DNA, 517 bp, Arabidopsis thaliana columbia
ctttctttttaactaaaagaagacagagaaagaatgtgaaaaagtgaagaaaaagaggaatattgaagcaaaaggaggatacaacaatttgatgtacgagcaatgatgctgtctaaagccgtcccatgctcagctttttcttccacgaggttaaattttatttcaatttcttggagttagctaagaacttagtatttatatttctactgtacgatttggcattcgactatgattatcgaatgtttatattttatacgattcagcattggactatgattagtcatcattttttgaacaaggtgtttcacaaagcggcgtgattattacatttttgttcggaccatacacattattactgatacatcatcatgatgcaaatgatgattaatgcctgcaaatgtgactgtcgcttttcttatggcaaaaagggcctgagatttactattttgggctttatatgggcatgaagtatattgggctttatttggtgagacgaaagaacatttgtatgtcttat

SEQ ID NO: 40516 - DNA, 495 bp, Arabidopsis thaliana columbia
attttgtcatatgctaaattttaatatatatgggctttacaatacccaaaaatcttcgtatatggactttcaaaagcccaaaaacacttatttctgagatttttttttctaagttttatttattgtttcagcttcttctacagtgcaacagagcaacaatggattttttcgacgaagacaggcctaaattccgttttcaaatctcgtccttcttctctcacacggcggaggaagaagaagaagctagaatccctaacaagcttttcatttcaatctccgtctcaatctccctcatcatattatctctctccttcttctacttcgaatctgaacctgccaaatcgctactattatggcttccctctctttcctcgtcggtcctttcgctcctagctcgctcaccggaggtaagattcgcgtcggttatggtcagatcttggagccagaacagattcacgatgagtcaccacggataacgaacgtgaatccaggagg

SEQ ID NO: 40517 - DNA, 692 bp, Arabidopsis thaliana columbia
caagaaataagaagaaaagaaagacaaatatttcatttctttttattttaaactgaaaaatgaaatcaaataattggcgatttttagatttgtggttcggtaaaggaaaacagtacaattgcgagatttgtccttgtcaccgcaacaaatatatttcgcaataataaatgccaattaaagtataccaccggcaccgaactagtcaatgacgtcactctatctgagacataagcccaattaaatcgtgcggttaaaagcccattaactaatatcaatataggcccattattaagaaactatactatgactttttagtatatttcgcgctttaagctgatttcaggaatttcatggcaatcccgccaatcgcccactaaaatcattcaccaatttttattttatttttaaggtttaaattaaaatttgaatttatttttctccagagacagagagagatggagttgagtatcagtggcaatgcgctcaagaccttgtctaggtctataatctgcctcgcacgcgtcggtaacgagctcgttgtccaagcttcgccgacacaggtactctcctttatatgctttatcggttcctccgtaaccctaattttaaggattggcaagtatttggtgcgactcttgcaattaaattgtttataagttattttcgtcaccttgtactgacgattagggttt

SEQ ID NO: 40518 - DNA, 547 bp, Arabidopsis thaliana columbia
tgctcttctgaagtgttgttttttctgataatggaaccttgcctcaggcgcatgaacgaactctcgttagcaaatgctagatcaatgttaagctaatatttgattcggttattcggtattcaagtttgttaccaatgatgcaattgtcttagttaagtgtctatttttagttgataaccgcattggggctcgggtttctatcggtttcttcatattggaagttgtgtggatttttctcacaaatgggttataaaacttcacttatgtacttccaacgataaacttaaaagggacgatattagattcccgtgttcattgtgctttgctgcaatgttcattttgcatttggtggtatttctagctcgcagaaatctttttgtctgaacttttattgtgatattatttcagctataaccgggtttaagtgcatagcctaatgatcctcggcaatcagcaaactctgtagtaactcttctggacaaagcagaagcttccgattccccgtgagttgcgtcgaagactcctgtcagagttggggtatgaacga

SEQ ID NO: 40519 - DNA, 600 bp, Arabidopsis thaliana columbia
agaaaagacaagggaatcaagagaaaacctcgaagaagctagggtttagttaggtcaacaaaaatacagcttgctactcagcagttgagatgggtggctagagaaaggaatctcgagtagacgatttttcaaggacgaaaccagagagacggagcagcgaattcgaatggttcttaggtcacagaaacgagagaagaagagtagcaacaacgttacattctgcgaattgtgtgcgcgtctcctggtcctggttagacatcggccaggtcgagcgaacaaggaagaacgaaacaacaagaccactgactcttctttttctttttttcttaccgctgtgagatttttctggaaaatctggaaaatacaaatttgagaataggaaacaacaatacgtaagagttttaataagcaaaaaaaaaaatcttatgtgtgagaagacagatacaccccttacttgttgttgcattttcttaaaccgcgtgagaattataggggtataattgactctttagcggctgggcgacaaatagatcggcttaatttttgttgttttctacaaattcatatataacatttttaccttcagattttaactggtga

SEQ ID NO: 40520 - DNA, 323 bp, Arabidopsis thaliana columbia
gaggataggatctggagcgttacggaaataaaaatgatagaatttgtctgagttgatcattagaattcgaatcgaaaaagaccttgccaaaaagagaaagcgaaaatggtttaagaaaacgaaagacttccacttttgtcctttttttttaacatctacttttgtcatagcaaattatctgtaataagatagggtttatgctattgctcaatgagcctaatcctatgatgtgattgcgatttgaaccatgcgagtttaattatttgtttactgctatagtgatcattttatgatgtgtttttattaattacaaaacagagcat

SEQ ID NO: 40521 - DNA, 477 bp, Arabidopsis thaliana columbia
taattgttgtaatgcaattttttataacctactactcaagtaaagtactgattctgttaacaactttacccgaagcaaccaaactatacattctcacgaaaagtatcactacctaaaagggaagattcagatgctaaccaaagattcttagactaatgttatgataaatgaaacatgctttgctaaaacgtgacgacggaaaccaattactatacttatatgtgtttatataacagttaaatcaatctgtcagacacattttcacatctctagagaaagcataacaaatgaatatgtgaaaaattccctatgcaatttgtaccaataatctatcttctcgttatcttcatgctgtctctgaagccgcgtggtttacatatattgaatctactttgtatctccttacacagcttcaggaccgtcttgcggtagaatgaattgacgcattggccttggcgacttggtacactcgtggcg

SEQ ID NO: 40522 - DNA, 618 bp, Arabidopsis thaliana columbia
tttggtttttgttttccaaaaacttattttcataccaatcaagattttaaaatttctggtttccctacaatttagaaaaattattttcttgtagttttccattcatgattttagttttttagttctcctaaaatttaggaaatctagtttttactcaatcaacgttatttttctcaaaaaccaaaaaccaattttttggggtttttgaaacaaaaatataataataaaaatctgaaactaaaatctaaaatctataaactaaaatctaaattcaaaaactgaatccaaaatcagcatccattcagggcctataacttcgtcccaaatcgttgttttaaccgtcaaaaaaagactcaaaatcaaatgatgatactgtatcattgatacattacaataattaatttattacaagatcatgttggtatacacaaaatagaacaacccttctccaaaaaaagttaacaattactccaaatggttaggaaactaatgactgaagctggctctgtccacgaaagagagaagagattgaagctcccttgcaggtgctgctcgtggaagactcaccacatcatcataatcatgggacatggtccttctcacaagcatgatgatgtg

SEQ ID NO: 40523 - DNA, 465 bp, Arabidopsis thaliana columbia
cgtgtggcaggctaagaacatcaacaggagcaccaactctcagtaatagacatttcatatgtaacatcaaaagtgtttaatgtagagttttcactaatgcagtaataaaattaccatctatcagtcgtcaaacagaaatatataacctcaaaacaatttctaataatcccacacaaatgtattcagactgactagtatagtctgcaatacatctctgtagaccattacttaacactatttatttatcctcccaagaacttcaccaaattttagtttcttcctatagcatctgaggtatccataagagtgagatacgaaattatctctaagtctatggacactgacctgtatatctggccactacagttttcagattacaaattccctcaaagtaatgcttctcgaacatattctctatacgacatgtatagcagtttccatgtatagtgtttgagcaatttgtga

SEQ ID NO: 40524 - DNA, 331 bp, Arabidopsis thaliana columbia
cacgactagttgagaggaatcttgaagacattaacggtttataattcatcaataataactaataaatgttgtatagaaaacctaaataatcaatctttttgaaaaaaatatattttttaaaaaatcaaacaaaaataaatagagggagtataatctatgcagcttctcatatacttcgattttgtctgagacttcttctctccatcaattagcattgtatgagccaggcaaatatatattaataaatctggtttttttatcaactactaaacgtacaatctattaagatacaattccatattagaacagtgtattcaaaatatcttggcat

SEQ ID NO: 40525 - DNA, 587 bp, Arabidopsis thaliana columbia
gattttcaaaattttaaatctatagttttatagggtgaatttgaggtataatcaaaatctaatgtaaaataaaaaatataaaatcttattgaaaaatattaagaaagtaattagattagtgaaaagataaaattgtatagtgaaagacacgcacaataaaaaaaaagaagaggttttgaatgttttgtagattttgtaagagtttttggttttagttttttaaaaacttatttttataccaattaagattttaaaattttggtttccctacaatttagtaaatttattttattgtagttttccattcatgattttagttttttagttttcctaaaatttaggaaatctagtttttattcaatcaaagttatttttctcagaaaccaaaaaccgattttttggggtttttaaaacaaaaatataataacagaaatctataactaaaatctaaaatctataaactagaatctaaactcataaactgaatcttgaatcagcatccattcagagctagagtatatgatgagatatgtaaaaaagtagagagaataatttagaggcattgcaaaactagcacgtttttacta

SEQ ID NO: 40526 - DNA, 767 bp, Arabidopsis thaliana columbia
gatgtcgtaagtctcgcctttgggtggttccgaagagctgattccaatgactcttctcttgctgtctctctggtcgtggttggtttgaagtttgttccggttcttcactgaagatctattcacatctcttccgcccctatcctcaaatatttaccagatcctcccggccttttctctctccatcctcgtttcatccgaatttccgatgtttcagagtttgctgttagcgttttcggactcctctgctcctctctcctccgccagccgccgtgaagttgctcgtgtgtatgagctaggtcaaattctgggttacaggatgcaaaggttgttcttggttttggcttggcccaacaacaaccttttctgttggggcagttctagcctaattttctttatgggctcaattgacaattaggcctctgtgagtttttatttggtttgccctaatttttctaatttctctttgtcgcttctttcacctcatctcctgcatcaagacatcgtgcttcctcagtctccttttccatcctaccaagacaaggagatgtacattcctcctactcgaagtgagagccctccttcatcgttatccttcccaagttgttgagaagatgttcacctttatccttcccattttgttgagaggatgtcttcggagagatctttctcttgtgtcttagttggcttagcattagccaaatctttgattggaattgttgtcctagttggagcgtcaacccgtacaatagacacgcttagtgtctttg

SEQ ID NO: 40527 - DNA, 532 bp, Arabidopsis thaliana columbia
aacatattacaatgtggggcatcatcattcatcgtcaagtttacgcagttttagcttttcgatgagtttcatttttttaaacttaaaacatcaaactttgtttaataaattcaaagaagatttcttgaattaattataaattatttttaaaaagtatatcatggacgcagaaggattttgatcgaatataacaaaatcttccagatcagtaagacgtgtctttccacattcatagccttcctcttttcttctttcaaacattccaagttttactccttcatgaatccaaaagattcccaattccattaataatatattcatatgtattcttttccatctgctccctaatatattccatatgttcagtcatttttctaattgggtcagtcagctatctcttttaccaaaacactttttttccatttccctcctatgtaaattttgtcttcagtcatgttttccctccatagatttttcgttgtttttttatatatgtccagaaagtgaagacctttccacctcttttgttttt

SEQ ID NO: 40528 - DNA, 699 bp, Arabidopsis thaliana columbia
atattcgcatttactatttagtaatccaaagactttttgaaagtctctagagaatactactactagactagacaattaggtgttgttaaagtgggccgataaagaacgactgttaggcccgtttaagcccgtcccatacaagaaaacagaacaaaatttatagtattctttgctagtcttgcattgcaggtgaccaagtaaaagttttatcaaaacaacaggaataaacagtcttgcaaaatctcacaatcctaccaaattgacagtagtacaaccaaacatgagtttatttctgcagttgagattgctcattttcatcactgtcttcgcgcaaatcatgctcatcatcaccaacattgtcatcctcatctgattcaggtccactagcatcatcatgggcatgatcaggcacactaccatgaccaataatcccgctaactcttccggacttgtttgcatattcttcaagggaagttgagggaaacacatcaccaaccttgctgctatcactccttgacgcttcttcatctgatttatttggtttgttatctttgttcatctatgtcaagcaaatacgcaacttcaggaccaaatcacacaaacatacacattgacaaatctcaaaaactcttcaaagtaactagagaagcttacagcacgtaatagggtccttcgatctctttccctagcattcttgat

SEQ ID NO: 40529 - DNA, 449 bp, Arabidopsis thaliana columbia
taatttgattccaaatttagtaattccctaggaagtaaggaaagtgtaactgtcttgctgaatccttttggtgagtctacacttcacagaagttcggggttgaatcgaagcagttgcaatcctgtttgtaatattcactaataattcacaagtgcgtgattcaaaaatgctgcataagccaacatcataaagagaatttattgggagactgctttagctagcaaacttagtgcatacttgttctagagatatttaaactagcacataattttttttgatggaccaacaatcaatctcagcaaaagaaactcaaaaccggatttcctgaattagatgtcttcctgaatgatcaattattagatttccggattgggatctaagtaagtccaattggtatgatgaggagtttttttttttttttttgtgttttccatcctggggcattgttt

SEQ ID NO: 40530 - DNA, 540 bp, Arabidopsis thaliana columbia
gagaacataaactcaactagacccgttgacaacaacctcgggaagtaaaaaccttactgggacaggtacactcgagccattcttatttgcaagattgtatcacagcttaaagcacttgaagagtttgttttcttcatcaagtcattacgaaaatagatatctagatacttacttaatcaggttgaatcttgtacattaaattgtagaccttataacagcagcagattcagatttctgcaagtgaagagtgtagtttatagttgaatagattacagataagagcctaccttttggccaattttttatagattaacaaatcatatagtatttaagttataaactctctgtctctgagtgcgttttctactttaagcatgtgcacaccaaaccaacaacctgcgaatcacatattaacacgtgggtaaaaatagctgcattactaaagccaatctgatctttgtccaaacacagaccatcatcactcatttcctacagaactcagcacaattctttcaaattctctttctaatcttcaatgga

SEQ ID NO: 40531 - DNA, 422 bp, Arabidopsis thaliana columbia
ttgcttcaattttagactctaacaagatcaacaaaattcccaatttaaacataattagacatgaacacattcaaaactggagcaggttagaaaaatgctaagcaagagcaactgagagaaataaggtagcaacagagtcgcttcgtcgattagaagaaaagagagctcaccgtcgattcgtcgccggagaatgtagcaccggagctcttgataactctcagagtcactggagatttttgagaaatttgtctgcttaggttcggatttgggaaagttttttcaacagaatgaggaaaatattccttttttaattgggcctgaggccatatagaggcttttaactttttgagtttaaaataatctcaaacatcatctaaaagcttgggctaaggcttaaaaaaaaaagtaggaaaagagttttt

SEQ ID NO: 40532 - DNA, 566 bp, Arabidopsis thaliana columbia
taagacggaagagcattgtgggagttggtgagaataacaaaggaatgttcaagagaagacattcgaagtttggctcatcgtactctctcttcaagtcccgtcttccgttctgagatccgtcgcctcggcatccagttttgacttgttttatgttttgtatcatataatcatcatctctctcaacgagattcacacatcatcaccatctgtattctattttattcattttatagtaactatttcatttttctttgctttttcatttactcttgattataaaaagaattactagatcacgttgtgtgattcattcaacctcgaaataaaacaaagaaagattgctaagacttattatgcaacaacgtgtcaaaaacacagactgtctaatattttacaatttacatataagacagttaaaaaaaaaatccctcgtgaacactaatctcttcccatggctaccaaacaatgtaagtaatttgtgataaaaactcaaagaagacccaaacagaattatgatgaaaatcgagggagtaaatgaagaaatcttacagagagatagatagata

SEQ ID NO: 40533 - DNA, 315 bp, Arabidopsis thaliana columbia
cttgtaatctcgatgcccttttggtgatgatcgtttatgtttagttacaatgttaagataggtgatgaaaagtgaacaatgttgtctctgtgtcagacttgggagaagagtacgaatctgtaacctcagcaccaagcaacgtgtgactttgcacatcataagatcaagtcatttggaactattttgggtatgactctgttaatgatgaatacgaagtgcttcgcaaagtttgggaggtgagcaaggaagatgggcaggtgagatccgagcatcaagtattggtagttggtcctggagcttagaggagaagtactt

SEQ ID NO: 40534 - DNA, 508 bp, Arabidopsis thaliana columbia
taccacttataaatacaaacgatccggtgggtacaaggcatcaatcatgtaaaagaggtacaagccggtagtgaattttgagtcggtcggtcttaaaatcgcctaaatttactcttctcgtattcaaaagattttccatatctcaaaaagtagtgtaaaactgaatcacttttcttgttaaaaaaaaatacaataaaaacaaacgtaagagaaagggaaatgaaataataataatcaaaaaagaagaatttattgataacctaactaacaactaaaagatgaaaacacgacaccaacttctacctgcatactaaagtttcgtctttaaatgttgcagctgtctccttacatttcacatcttccttgtttcttctctctctctctctcccctcaaacttaaattcacattttaatacttgttacttcaactataataataataataatctgtcttcattatatattttcctctcctctcagatcttctctctcaccatcttctcttgag

SEQ ID NO: 40535 - DNA, 805 bp, Arabidopsis thaliana columbia
ctcattccagagacaagaatcgtcattaactcattaccgttcagtaatcactttaataattgtttgctgattagagagagcctaatttatcgtgatttaaaaagagcttaaaagttcttacttttaacgctaagatttgtttaatcataatgttgctctctctaatcagcaaacactcgagtttggtagctaacggtagttatagaaagcattattcgaccccccaaaagtaataatattatatttaatcagcaaaaagaagatatgtttaatactattatatagggtatcatgttagatcatttatcgggcacgaaatgtggtcggtgtttggttaggttgggtcgacgtttcggtgaagcttcttctatattatcatccattttcgttattatatactcactatcctaaaatttaaactgcttaaacatgcgccataaaaagtaatctaaacgtggttatcttttttagagcacaatacctaaccaagtttttttatgtaagtgacatctaataggaattcgaatgtaaatacacattgtacaaaatcttatgtaagactgataagtaacagaaaataacttgaaatagaatcatcaccagcctcaaatgacgacaatgaaatttgctcttcacaatacataaattgatcatctttactttcacgtatcaacttttgcttaaataatccacatttaattatcaaaaaatatatatttaaaacacactttaaaatgattatattcaactactataaatacaaatgttacactcccctctctctctcacttttatctgtagaatt

SEQ ID NO: 40536 - DNA, 366 bp, Arabidopsis thaliana columbia
aggatccccgggtaccgatgtggacaacccccgagtgatatagttaaagagattgatcccgggtttgatttcgcaagtcttggccaaatgtgagttcctctttcctcctctgtatctcattttctcaattgggtttggatctcccttacctgaaaatgaaccaatgtttcatgtttatattatctacagatccccagagatgctggagtcctcgccaaattgctgtatcatgtgatggggccaacagctttcagaatttttgtccgttgaatcccttgtgttataaactcaaaagctctgtttcaattatgattggaattttccccccccaaaaggctttcgatgataatagcccattcccccatt

SEQ ID NO: 40537 - DNA, 555 bp, Arabidopsis thaliana columbia
tttcatctcttcaacaatcgcttcataactatcttttgagccgataatgggcctaacatggcccgttaatttagtatttctttagtttccgaaaaccccagtggtcgaaaaaagtatagaaatgttgattaaaaaaaacattttttaccagacaaatgaaagataaacccaaacaaatctaaggacatatctcttttactttccccaaaatctaattatagagaaactattgtaatgttgatccaagaaaaaacaaataatgatcataataatgttgaaatgaagataaaacccaaacaaatctagacatcagatcataaatctttctttttgtccctcaaggttccatgcatgatgccatgatgttgctgtaggttgagggaatcaataccctattatatatatatttcatactaaaatccaaaagaaaaagaaaactttatgtttccctctttacttgaataaagtttattattccattcagaaaattatgtcctaatgtaatgagaaatgttgttaaatcgtgtaataagaggtggaccaatatatgtcaaa

SEQ ID NO: 40538 - DNA, 544 bp, Arabidopsis thaliana columbia
cctcggtttatatttatttgatgtttgtccaacagttgtaagtccgacattgttagaggatacaaacgggatgtcgtttccacagagtgtccgaatgtagtttttatgttataaataacaaaatagtttattatgatgaaatagatagttaaaatataagtaaaattgaatgtgtatgattaaaattttatgtaatacaaaaattactactttaaatattagaaaaagtgtgtagattactatttactatataaagtttaaatattattgataaatatttaaataaatttatatcatacacccgtctatttaagcgagccttatctagtcaattataattaagtcttcttctttgtgcttattactcttcttctctttcttttttgaatcctacaatttggttgatctgtactaaacttggaacataagagctaaaacacacagatgggaaacaatatcctccttgattcgcaggagcttctccaagacgcacttttttaacgtagccattctctccaatgatgtaagctgcgtcctcgtagcg

SEQ ID NO: 40539 - DNA, 935 bp, Arabidopsis thaliana columbia
taatccaccaaacttgaagacttgcttagtgtaagctatgtaacacatggcctttgagtcacaacgctcgtgaactttgtgcaccaaacccatcaatgcttgccttgtagcaacattttaactctcttcctaataaaaaagattgttatatagttgaagaactttagataagaaatatacttattcctagtggtagaatatataagtccacatgttgctacaaggacttagattgagaagaagggaataaatttatttaccttttaggaaggttttgtttaccattgaaagagagaaaggaatttcgacatcgtcgtggtaagccggttgttgcggcggccggatattgtctattttcttaccggagttccaaccgaatagactgttgtaaggacttattctcttcaaggtcttgaaggttacagtatgaaatgagtttgagatggcacacgaagccattttcttgcaagtaacggccacacaacaaaacccacaagaagaaaagtagacaaagcatcaataattgtggttttcaagaacttgtggttgtcattgttttgctaacaagtgtccaatccggtttaaccaaacaaaaccaaaaacaaaccaaacgatagttgatttttatttggtaaaaactagagaggcatgtttcctccaaatcgaattcatcaagataatcacgataataagttattttacatcgtgcaaagatctttcatcgaaaaaaatcaaatttcctgagtgtaaaaagctctgaggaagaagctaaacatattatttgtacttacaaagtaaaacctgaagttgtggtgatctctctgaaacccaaagagaagcttatttctgcttttatgaggttgcccaaagatacggattcgctgctgaaccaaacctcggcaacaaggacaagtgactttgcttccgccgttgtt

SEQ ID NO: 40540 - DNA, 603 bp, Arabidopsis thaliana columbia
gacgctctttaatggccatatccctccccaaactaaaatatcagatatgtaagtagcaccatcttcaatctccactttccttctctgagcatgactgatatttttaccttacactgtttgttacagcatcaatttcttcaaagatgctggagaagttgttcgtgttcgactttttgtaaccgccaagcgtatccataggtgctatggccttgttgactttgcttctgctaacgaagcaaaaaaggtttagactagtttatagttagttatgatgaaaaatatatagtgtatctaagtttcaatttgaatgtacgattgctgaataaactctttattaccgtaggtgctgtataagaagaacggtgaatatttgcacgattataagatttttctttatgtgtattcacgacgtccacagcctccacgacgtccacgacctccaggactcaagtaaattcaattttccatgttattgacatttgtttctggtgacactggttattaattactgttagagcttttgatacaatattactgctagactaacgcttttaactttgttaattaggtattgcataagatacacggtttggtatgggattt

SEQ ID NO: 40541 - DNA, 539 bp, Arabidopsis thaliana columbia
ccctcgtttaaatgtcatcgttgatcagcttggaggagagcgttttcatcgaacgatggctatcaatgttcaagaaagcattagacagtaagaccatctacgttcataaagagtttatggatatttaaagtttaactacagaaagacacttcctttttttggatgtctaaagtgttttatttttagttttaaactcaaatttaattttaaaatagaacacacattacctcgaaacttatactatttcccgcgttgaatcagtgatctaaccataacttgacagcataacgtctagacggagccaatacaaccgcctaaaccgcttttcaataacacataaatgcttaagttgttcctcgtatttctcccaaattaaaaaaaaaacgtttttctatcatgggaacaagatctaacgtcgaagtccattagtaattaatcttcagaatgtataaatacttcatatgtttacctttcaaggatttaataattaaggtttgatcctaggattcgatcttacacatgtgtttcttcatacgtga

SEQ ID NO: 40542 - DNA, 559 bp, Arabidopsis thaliana columbia
cgactctagatatatatttcataatattgcataagtagcttattcttattcttattacttattcttatgctggttgggttttgggtaacgtcacgtgatgatgacgtgtcgcgatcctagcggcgttaatcacgtgaccgacgacgacgggagcctaaaatttttagtgaacgttggaaaatcaaacctcatttaattgttaattattaaaaaaaaattatatctttgggctttgcttttctcctacgttatttacttcatccttcaattttgttttctttaaatatttgcaaatgatttaatcatttactgaagcatgaaatcagaaaaagcttcattaatttccgcttacactaaacggcgtcagtgttcagacttccgagttatatatattatccacttgcacccttatttcgacttcacgtttcgatcaaaaattggggtcctaattccggtttacgaaattgtgatttaaggttaggtttacattatactctaatcaacaaaactgatcatataaggtttgattttcagtttaaattcaaagggaaaattggat

SEQ ID NO: 40543 - DNA, 445 bp, Arabidopsis thaliana columbia
tttgaagtatttaagtatatataagagaattgagaaaatgtataggagatgaggtgcatgtgaagaagacacatggtttgatttggatggcatagtggggaggttgactcgggacatccgatggttcaagttttaatttgctatttagagatgtgttagtgtgtgacacacccttgacgtctgtatatccttatttgatgcttgttcattgaccaattgagaataaaaaaatgtttgcattacggaattttagtatcattctggaataaagtatgtttgagttaagacaaattttttttgtatgtaatgaatataaagatggtaaaagtaacgttcacaattttttgtgaaattaactagacgagaggatcaatttatggcacatgttttgatagtggtttttagagattagtttagtaaaatctgttttactgaaattttcatt

SEQ ID NO: 40544 - DNA, 537 bp, Arabidopsis thaliana columbia
tttgaaagtaacgtaatcatgaactcatcttcgataaattatctagaagtttcctaatgatgatagcaaaagacatatttatgaatggataaatggacaagaaaaggaggaccaatgcattccaaaccatggacataattcacaaggaagctagctatccaacatcatgatgtgttaagccgttgcaaggaatgattgtatgcaactttaatgcaatataatcatggaatgatatgacctgatcacatgagctagctggatcttgcgaaatgaacgtgagtgctacattctctcgttgtcaacaagactgccacaaacaaattcggcactggaagcgaaggaaatcttttccatgcaattcaaccgatttggtgtcaaggacactgattggttgtcatggatgaagactacaactcttactaggttctttaaataaatccgatatggttcgaccggaatacaccagttcaaaaacatatatttgactctggaaagtatttcacattgcccttctcgccaagtaaaaaggactagtgg

SEQ ID NO: 40545 - DNA, 586 bp, Arabidopsis thaliana columbia
ttcccgtctcaggatttgactgatactaagcaaatctcaactcataaaatcgaaaatagtgtgtctcttggctattgatctttctgtttaaccaatatgtgagaatgtgaatcaggtagcaggcctttgctacagctcaacgaggagaaagctattgtcctttacgaggtcaattagaactgaaatggtttctataatttaaaggaccttttctcttatttttctctttggaacaaacaacttatatcatcttcttgcatttgaacagcctgattcccatccaaagcaagcaaatcggtctacctcatcagatgaaaactctaagtatacccctttgcgtgaattgttttttggttttcaatgtttttcaacaaagagagtagttaagtatctaattggtaatatgtggaattgtatcagagctcaagttatgaaagttctggagacacggaagataatgttgcagaaagaacaaggaatggcctttgcacgtgctgtggcagctggttttgaggctgatgatatgattcatcttatatcttttcgccaaacttttggaagctccgtttgatgtgagaagatgtag

SEQ ID NO: 40546 - DNA, 371 bp, Arabidopsis thaliana columbia
ctagagccggatatcgaaaccctaatttccacacgctttctatcattttcacccaaaatgtaacgcgctttttatttcctttcctgcattcataaatttgtctcctgcatgttgaaaaaaaaaaatttacatcgagattcgtttttattttttagagagagatatgacggagacgacgaaggtgatgtacatagtggtggtcgatggaacggatacggcggagactgtggaagaagacgggaccgtgacttggaaagattcgtttaggtatacacgtcctgttttgcagagtactcttcagcttatgggatgcaaagcccgtcacgccttcaaggtgatcctcgattttacactttcgaaccaaaaaaact

SEQ ID NO: 40547 - DNA, 1270 bp, Arabidopsis thaliana columbia
ccatagttactatctctaaatcgaagatcgaagaaagttgaaaatccatcacaagtgctagaaaacatccacagaaaacacctatctgcagcaaattgcagcatatcaaatccaaaattggagccaacggttctaattcaaacccaaaattggactactcatacaaaactatgagtgaagaagaaggcatcaggatctaaccgagaggatgagtcacgccagtggccaatgcgacggagattccgctaatgccaaaatgagacaccacctttgaaaacggcggaatcagattctgtggcttcctcaattcttcattcccttcaacaactacacaaattccgcgacatttcagccaaattattgaaatataaacaaaaatgcagaaatataatctcgaactttatactaaatggagaaaactcaacaccttcatgttttagtttatgcgaaagcaaatcaaaagattcgatgatcttgggattgaaattgaggcatatacagagagcaaaaagatccgacgaacctgggattgaagtcaccggcggggagatatctccgatcattttgttttttccgttattctttcttgggaaatggtctgtttatacgtcgtgtgaaacgacgtcgctttcagagataattctccagttattgatagccgttagatatcataaatgaatctggaccgtcggatgatatcattcttttttttattaaagtaggcgaaaagtaaattcgactccctctttgcactttcttcttcccgtcgctaccgaaagcttctgtctctctcactcgcagggttctctggaactttctgaacgatgccgaggtatagggtttaagatcctcagagttatactactgatacatagatagttacgtagttcgagattaggttttttaattacttgtttgattttgattttcgcaggtattactgtgattattgcgatacttatctcactcacgattccgtaagtttcctcctctttgttttattgtcttccctagtaatcgtgaactcgttttaggtgatgaattcgatctccggaggctgtctattaggtttccgatttggattctagtttaaaaccagtatgctatttacatatgtatatcacgctggttcccttcttgcctttgactggatttagtcaatttagtacttggaatcatggttttgtggttaagctgaaattctactatacgagttcgatttttgttttgtgaagtgaacttagatccaatttttgttaccaatttatag

SEQ ID NO: 40548 - DNA, 514 bp, Arabidopsis thaliana columbia
ccttaatagatccatgataatcgatcaataacagcgtaaaaaaggagaaatcagatagaaaacaaatgagaactctagaagaacaaccatcagcatcaaagcttgagacatttgggtcagacttgagtccactggaagcaacagattgattctctacattgccggaacttctgcaatcataaaccgtatatgaaccctaaaatcgatgaaagcatataattttccagctttcaatttccctaaaccacatttctcatatctctcctagtttttccgatcaacaaaaatcagtagtgtaccttgaagaggcaagatcacaatccaacgctcgttgcttaatgagggaagagcgagttcgaagctcatcggatttaagggaaagtccctcagaagagtagagatccgccaactgcgtaagagcggcggataattgaagcccaaactccgttctctcgccggaggaggaagaacctaaccgcgattgaagattggtctcaaagactcgagaaaggag

SEQ ID NO: 40549 - DNA, 448 bp, Arabidopsis thaliana columbia
gccaaattaatgacgttgttataggcccattaaagcccaacacagtttactattacaaatgtggaggcccaagttcaactcaagagttcagtttcaggactcctccctctaaattcccaatcaaattcgccgtgtccggtatacattccatgtttcctcgtcactcatataaactctttagattgtcctatgtaagtatagatttatgtcatcatggttttgtagctttatatgttattttattgataatcttgatatttttagataaatatgaaggtgaccttggtacatctgaatggagtaaatcaacattggaacatgtgtcatcatgggattatgatgttttcatcttgcctggtgatctgtcatacgctgacatgtatcaaccactgtgggacacatttaggtcgcttggtgcagcctcttgcgagccaaagaccttggatgg

SEQ ID NO: 40550 - DNA, 481 bp, Arabidopsis thaliana columbia
atcccccacttataaccataatattatgttttcaaattatatatatttttatataaaaaaaacccataagtttttgttaaacattttataaatgtagcatgtcaacaaaacatcattctataattaacaatcatcttgtgtaatgaacaattgtaaattcattgttgaaagttgaaacctatgaataaaaacaaaatttattcacaaatcacaaatgctttactattagagagatcctctgtccctgtcaaaaggtttcatggtccaggtatatatagatttacaatgtagagtaataaaatacttgaattaacaaagaccccatgtgtattaaaacacttagttgttagaaagacttattacaacttagctggcaaggagttaatactaatcacttgtttagattttgtcattaaacaatcagattccaactactttattcagcagtctttgtcatcatcgaacttgtcttagaagtctc

SEQ ID NO: 40551 - DNA, 483 bp, Arabidopsis thaliana columbia
cagaaattgaaaaggttaaggagctaaagagtctttttgtttactaattaaccataattaatatgctccgtcatcaaaaacagagcagctaaaaacacttcattagaggcccatatgtatatgggccggagtttaatacggcccaaatcagtataaccgagttcaataaccggtaagaattaaaatattttacattattcacccaaatctttacattaatcacaacaaactccaacatctattcgactctttcaaattcacactcttcctcctcttcgaaatctccgagtacaaaatcgatcaatctctcggaaaatgatcgtgtattctctctctcagcctcactgcttcctaatgaatctctctatttctcctcattacggttgctgctactgcggagtttggtggggaggtattagagacggagctttggtgcgtggcgagaacaacgttgaggattcacactttaaacggccattgact

SEQ ID NO: 40552 - DNA, 493 bp, Arabidopsis thaliana columbia
tgtttggattcgtcaacgttaattagttcaagtagcaattaaatcagagacaagtttcttccacttaaatatgcattgacctacttagtcaacgtccttccactaaacaagtccaatgcattctttttcttatgtatccttctcttttatttggtttctcacttctgttccatttttaatttattttatcataggctataattcaaaattttacggccgtaccttactttttcacgcatgtaaatgaatgtaacattgtgcgctaaaaatgttagttcgataatcattcttctttgttatcaaatattttaataaaataatgtgactaaaatctcacattttcggcagttttgcaccatatctcttgtattcctccttctataaatagccaatctctaaagtttcaaagaacaccaacacaatctcttatcaaataactaacaattcacaagaagaaacaatggtacactctcgttttttaaacgttgtttta

SEQ ID NO: 40553 - DNA, 606 bp, Arabidopsis thaliana columbia
agctactatatgattgctgcggggacagtacgaggaggatatgcatacacctgggtttcccgtttccgaaactaatgatgggctagacaaaggaaaaaaaaaccgaaattataacatgttagagcctcaaaaatgcaatgataaaattcttcaacttctgtgatgtgtgacctctaccttccctcgctaccactaatgttccactgacacagcccgatggaagaagcagataagagggtacggacatcagaagttggactggaattgccagagagatgatggacagtatgaactggattggttgttaagcctgtcatcgatgcgaaaggtcccgtggtttgacgcatgtcaaatatcaaaaccattccattttgtagtccagcataaatatggtgagagcttttgagatcccacgagcaagaccaaggtgcagccggtagatcataagataagacagtattgtggctctccaagcttataacagataatttttttcctagagacccaaatactgcaagcccattattgtgaggggaaaggtgaagatctttaattgctctagtggtacgaggcaacaaaatatcacaatctcacaaggcgaatgta

SEQ ID NO: 40554 - DNA, 545 bp, Arabidopsis thaliana columbia
caaagtaaagatagtgtgatattgatgaccgaaacatcatagagagtaacattagaagtccaacatcactaccaatttacaataacattgattccattgtcagtttatccactaacctgataaatctcatgaataatgtaattaatttaaccttgaaactcagttgtttttgcttttaaatcaaaatgcaaagactcaaaaaccactggatgatttgcatattttgcagaaacataaaaactatccaattgattggtcaaacactgaaaaactatcatctggtatgttcaacatcattggtttagacaatatgtagcttgtaaatttttaatcatgattctagtaatctgttttgtaaacttgaacaaccttttaaaatctaaagtaactcattctatctttctaattcatcataaaattcaaaatttgtagagatgaaaaaccacaacagaaaacattttgttagaggtttaatttgcaacaaactattcctcaatcactttgatagaaactctttaagctatcattcgtagtttactgatttt

SEQ ID NO: 40555 - DNA, 576 bp, Arabidopsis thaliana columbia
cccttgaatgctttgctgtcgagtgggtataacggaaagaaccagtttggagttaaattagcatccatgtgctcggctgctccaatgtcaatgtagacaaggctctttttcagagagagatcaaggaatttaggtaagtaagctactgattttgggaaatcagcaggcttttgctccagtagaggttccatgaactctgtgtaaggtctattggtgtcaacagatttgcaatctcttggtagctgagactttccaatacaataagcagtctccgttacattcctcttgaatacaatgacggtgaacttatccaagttgttcacacgcactatctcagactgcttaagccccgaagtcacggatttgacaagacgattggcattagtactcacaaggactgctccggttccaccaggcttcagaacccgctccatctcaagcacaagaagagcaggggaagcaacatgatcaacatccccacagagcacgaaatcaaaagacttgtcacactaagctcaagctcgttgacatgcttcctactgaaaaaggaaaacaatggatgcttaggaccccttg

SEQ ID NO: 40556 - DNA, 539 bp, Arabidopsis thaliana columbia
aagagttttctaatacatgcttaagtcctaatcatcagatatttcttcttcaaaccttttttgttttgttttgataatttgccccattttgtactctaggtttttccacaaagatcccaaacagagattaaaagatgacaatggcatggacctttcaatgctttgtttttttgttaaattagatataaacctttccaaacagtaaattatcaaattcattaacaagtatctatatctctctagtagaggtagaccacaacttaaaaatctcctcaagtcatggtgggtctaacttgtaggacttatatgggccaaattgtataactatatcatgttaagctgaaactgaaagtaattggttccttttaaaagcttagccaaaaaaacttcaaaatgtctgagtcaaatgtaggttgatttctctgcaatttccatgaaagatagatagataaactcttaccaaagtttctgcatatcaaaagttgtcaatttatgctcaagtctaaaccattccgattacataggatcacatgctttga

SEQ ID NO: 40557 - DNA, 450 bp, Arabidopsis thaliana columbia
cgtcgattttatattctgtatagagttgggaagggagtgtttaaacgtggaggtgaagttccatccccggtgaaatcagaggagcggatcacagaggttcgagtaggttcttggtcttatgtcgagggttcaatcggtaaagctccaggtaagttagcttaggcgacaagaagaaactctgtattgtgttctgctttgtgtaccgatcatagtgttatctcgtctagtacagcgaaggtggttggaaccgtgacgcctaaggaaccaatggaggattgggaggcagcatgggaattttctactggtgatgaattgtgcatccgttgggactcattaggaactatctcagaacttcgtttatattcaagaaaccccggttcgctggtacgactatcaagatttcaagtgcttttcgcgtgtttcaaactggtacttgacatctttgatgaa

SEQ ID NO: 40558 - DNA, 413 bp, Arabidopsis thaliana columbia
tattgtggattggtggattgaaatcttcatgtagctataagtattgaggagctttgaatgtggatttaaaactgttctggagtgtcattgactttggatactattattatgtatttgtattaaattcatattatgtatgccacagacgcattctctatttccttcaacaagttgacgagagagcaaaatctttatatacgtgatatcaaagtgttctaatgtccacattcttctcacttctcaggctttaatcgaaagttgtgctctctgctgtctgcgattaaaagatggtggcttttgggaaatacttgcagcggggaacaaatcgaagaatggagtgggtatgcatttgcgtacgacatctcggttctagccatatgtgttgatcatgtgattgttttttccgaatgaag

SEQ ID NO: 40559 - DNA, 754 bp, Arabidopsis thaliana columbia
gtgcagcagcaaggatatacaagttcgttacccaacactctactcccatcaggcattcaagatggaagagaatctaatcttcactactcgcctttcacaacactatacaacactgaaatttccatggccgaggtaaccaaatccccgtttctctttcatatgatcttattctaagctttccttcaataccattgcttacacaaatttgattgcaggcactaagagctgcgagtatttcacctcaaaacgcaatacccagtgcaggacagcaagcagcaactcttgcacaacatcttgccttaaatccctactctcatcagcctgagatgcctttaggacattatggcaatttgataagctacccattcatggcacagtgttacaaccctttcatgctttcagcttttcaacaagtgtttcctactggtaatcatcagtctttagttgatatgcttatgcaatacaagactcaaacaaccgctcctcctgttcctcctccctctgcctatgggttcggtggaggcgctgtctcaagtaataacttccctttgaatcccacaagtgctgcaaactcctacgaagatgtcttgagctcacagtttaatgagagcaaccacttggcatcatctcttcagcagcaggtaaaccatgaaattcttctcaggttttataatcatgttggtgtgttttggttctgtttggtttccttcctctgtttagtcagctggaatttatactggagtattcgatttta

SEQ ID NO: 40560 - DNA, 626 bp, Arabidopsis thaliana columbia
gtaacgtccgccagtgtgctctaaagttcctcttcgcttgctatcctttacatggacaaaattattagatggttattctatgtcagagaaggcgttcttcctctttgttgtcttacatgtcgctcacgtcgagagggattgacagttgggccggaaatagtccttttagcacatcggaaacctatgtagatagatagacttgaatgaaacataatcaaaccatagcaaattcgagtttaacggttctgtatttgttccaacacatcgttttgagtcttgtctgtagctcaatgccgctgtcacatgaggcggtacaacatcgtacatgcctgtgatggatctcttgcttggcagccgagcacgtagctcacaacaccaatagctgcagcatgatgagctgctccgggggctgcgctctttgatcactggcgtctatcctctggacatgagccgattttgcttctctgacggtcaaggggcgcgacgaccaccacagctcgccgccgagccatgctctccgcattcactgctcggcctctcgtcgagctcaaaccgcgagacaagtcgcggatcgaagctgtcctcgcatacggcgatcgggtctcgtcggactgaataacggaaat

SEQ ID NO: 40561 - DNA, 407 bp, Arabidopsis thaliana columbia
gataagtattagaaattcataagatattttcattaattactttgcaacattattaaaatattgttatcgtttctgctaaaaccactccgacttttgttttaagagccccaatatatgtattcaagagcgtttaaagttttacatctttagagaataaattaaattacaaaataagggagttaaacccttcacattactgacaatacatcaccacagtttcatgagtttgtggtctttttcgtaaggtattcaaaacgacgtaattttttaagatatgttaaattatactagggatccctctgatatttacattattctagttaacgttcctatatatgtcctattattcgtctaacaactttttctactatctgcttagtatattcattattcatatatcaaattat

SEQ ID NO: 40562 - DNA, 450 bp, Arabidopsis thaliana columbia
ccgggtaccagcgtttaatttgcaaaatctacaactacaaagggagctttctagtgagatgatcattgaaccttaccaatacttaaagaatacaaaagagtcttattgtactattcgatatcgagtttattattttacataattctaaagtatacataccaccaaccaaactcaagtgcctatggaaaagtctaaccaaggccggttagtgagtttcaatctaatctaccttcattggttctttactcataatccataatcaatggacacctaacatcgatttaaaattgatttaccacgaccaatccaaacagactctccaacaaatgacgagattaacaaccgtgaacatccataaaacatgtgcttcgtcgaaccgtgttattaggtataattatattccgcaccggaaattagacaaggatcttgaccatatatcagagatatggg

SEQ ID NO: 40563 - DNA, 607 bp, Arabidopsis thaliana columbia
tgatcttattgttaatccaacaacttagctttagtgttgttgtgtaatcattctctctttagcttttctgtttctgtctctcttaatggtagggctcttgttagaatcttagggtttatgtttattttgatgtgcaatttttataaaatcaatgtgccttagtttttgtttcttagttcgtgtctttcttatctttgtggtcacccattactactttcactcatatgtctcagatttcttttcagaaattaagcatatagtatgtttagctttaattgagttgtactatatgtcctatccttttcttatttaccaactatttaaaatgcatataaatggaggagacttgaacattaaattttaaaagcatgtgaagatttccgtgaacaagattccacaaggttttgcaataatagaaagaatgaaacattaaactagagaagtagccgttagttagattcccgtgagtgaaagaggaaggaaacaaaatgaaagtagccgccgtggagtaatgaatatgccttgtgacttgtgagctatatatcaaaaggacatgaatgaatattcatgtgctcggaagagtcaatgagaaatatagacttatttt

SEQ ID NO: 40564 - DNA, 608 bp, Arabidopsis thaliana columbia
tacaaatgtttagctaggtttatttgtcagcatttttttttaattgcttgtataagcttttcttgtcaactatgtgtaactatatcctgtcataattatactagtttaatagaatttactttaacttgaaaaattcccacaagtaatgagtaaatagacaaaaagttttggatatacttaacacatattttaaacatcgcaaatacggatgcaatatcaatagtaacatttggtatgttcttgcatatcaaaatgtgttcgacaaaaatagactagaaaaacaaggaagatgtcgcatcgaactcaagtgtttgtgtgaaaaataaaatttgaggcgaagaagaacaatcatgatataattggccgaaatgaataatcatcatatatcataaaacaaggcaaactcgaagtcaactttgaaatctcagttttagagatgtccgatttatgattactccaaatctctttggaagaccatgcaaggcgatcatcatctgacgcagaattaattatggacctctggttttcaattttcacaatcattatatttcgcacttcttatttatgagacgtagatcttgatatcggcaatatgttataggtttgag

SEQ ID NO: 40565 - DNA, 204 bp, Arabidopsis thaliana columbia
agatcccccttctataaactgatatcaatgagtgagataaatataagatatacacaaaaccttaaaaagcctcatatcaaaaggaaattaaaatctacaaaataaacctaaatttaaaaaccataaaccaaaaaatatgaggcacattttctttcttttccaaaatcataaaccaaaaattcaggacacaataattcataaatt

SEQ ID NO: 40566 - DNA, 532 bp, Arabidopsis thaliana columbia
tgaagtttttactgcaatccccaagagtcaacctttaatgtccctcactaataattagaagaagctaggaacaaatttgaaaagttgaaatttctctagcaagccaacaaaatctatcaagagagtcaacaatctacaagaatcaccattcaagtaaattcatagagcctaaagattgaattttgatatgtacagaaaatgactacacaccatagactatctagagaattattttgacaaatatggtaaagttctaatgcagagataatggcaaatctctttgacattgaaatgaactaaaaccgatcataataataatccaaattccaaactaatactgataaatctctgaattgactattcatcaccaagtaacagctaaatgggagagaaagagatgacctttcgcttaatctcatgaacaggactctccggatcttcaacatccggcatgtaattgagtggaaccgacccggatccctgaaaaccgcgatggagtaattgtatatacacatcagagccaaagcggtga

SEQ ID NO: 40567 - DNA, 617 bp, Arabidopsis thaliana columbia
cgatatatttaagtactcaggttatatttctgaagaattatttgattaatgctgctttatatatgtagttaaccatttaaggtccgtatagaacaccaacacgtacatatagcagcgagaattcgagattttttttttaaaattacatcaagcatcgtgatttgagggatcatgttatcccagctattatctaaacgtacataaaaatgggaggctcaaatccggattcgaccaagtttagggaagtccagtaaacaatagtataattaaagttacatattagtgatggaggaaattaaagtcgcaacctaataaggtgaaagaaactgagccgccgatattgaagcagaaacaaaggctactttaatttatgatttatgtagcttagtgtaatggttattttactaatttatactaataaaggaagaaaagggtaagagagaaataaaaagttgaagctgttacgtactagatctagacattaatttagtataagaaaagaaacataagtagacatctaaacaagcacatgcggattacgcttattatattcaaaaccagaaatcttttgaagcagttgatatcatcgttggattgatgagattagatttgattag

SEQ ID NO: 40568 - DNA, 558 bp, Arabidopsis thaliana columbia
  unsure (1)..(558): unsure at all n locations
taataggcctaatattggcccattataactttaatgctcaaatttaagtagtgaagtgaacacatgttaaaaactaagaccatctctatcaatggtttcttatctagaaactgttcaaagtatgagaaagagtagaattagtttttcaagtgagaaactctgagaaacccataaaaatatttatatatcatctattgatcaaatattattttattattaaaattccactctctccacgatattnattaaaatactaatctcttttttttactgatgaagatgccttaatcttttcgttgtcatcctaaattcctaatatctgtattttgtgatcattaaaaacacaattatgttagcagggaccacaatccaccactaaaagataattatctgtaagacattaaatgaaattggtccaacacatataataagacaattaatgctaatttgcaaaattaaaatacaggagcgtagtggatcgagaagagagtgtaaaaatcgtactgctttacatagatgaagtcgtctcactaaagctaacaaagatgaagaaatcaa

SEQ ID NO: 40569 - DNA, 563 bp, Arabidopsis thaliana columbia
gtaagccaaaagacttcaagacgtgttgctttgtctgctgaagatatcaagaatgctcatagagaagcgacaaagatctcgagttcgagctgtggatcaagcaaatggacaggaaatttcattctcatggtggagcttcgaagaaagattatcaattttagaaccatcattgatcttcctcctctgacctattatctctctatatccaatgtacgttacctcttccctacgttttctttctttcagataatcgtatctttgacctaataaactcacagactaatcacaatgagaattttcttttagtttctgaggtgaaaagtaatgtgaattttccattaacaaaatcgaaaaaatgttatttgcataatgaataaagaatgtgaagaagttgtaactagctatatctcatcgtagcaattacaaaaaaaaaagatatcccagttcataagcagtgatcaaataggtaaatccagtgaaaatcgattccttggttaaaaaaaaaaacgcaccactctgatttgtgtgttagatatgactgatttgtggcggtgttgtttgtt

SEQ ID NO: 40570 - DNA, 405 bp, Arabidopsis thaliana columbia
tgggagatctttttgacatgtctgtaaagaaacgggctttggagagcaagaacaaatggaagccccaagtcgagtcattataatcgatgcttgtcattctcgttcttggagtcatcaacgggagagaagaagaaaccatcatcgttgaaccgtatggattccaaaatgctcaaggcagagatcgttaagtgggcaaagcgtgtcgcggcttatgctcgtcaacttagctcgagaaaacaagattaagacatagatgaagaaagcttatgggaagattgatatgcactcattttacattgatttaggtccacattcgtttaatcattcatagtgaaattgtcttatttcaaaagatgttgagaagtcatgaaacttgtacaagcagatccatttagtgattgtttt

SEQ ID NO: 40571 - DNA, 481 bp, Arabidopsis thaliana columbia
ttcaagaattcatttaacggagactcggaaactgcagatagaagaaaaacgagcaagtattttggtaaagataaaacaaaagttaaagatgagaaagaggtggaagcaattcctgccaagaggatacttaagactgagtctgatgatttagtcaagcctcgtccaagaaaggttacaaaggttgctgatgatgatgatgatgattttgatgtacctatttcaaggaagactcgtgataccactcccagcaaaaaactaaagtcggggtcaggtagaggaattgcaagtaaaactgttgataacgacgatgatgatgatggtgaagataaggagactcctctaaaatctgccggaagaggccgtagctgtagagctgctccaggggtctcaactggtggcagaggtagaggtggagggcgatgtggatttatgaatcttggtgaaaggaaagacccaccgcataaaggagcaaaggtctgta

SEQ ID NO: 40572 - DNA, 976 bp, Arabidopsis thaliana columbia
caagtttgaataagagaaataataaagtagaagaatggaattttttaaaaaaaaagactgtattcgacatttgtaagaaaataaccaagtaaagatgattcagatttctgattcaagaaaggagtatttatagagaggcattatctgaatctctttccaataaaatattataatttcaaacgtgaagaaaaatgttaccgtttcacaacgttcatattttttccactgtcaacaagtcaaatcaaactatacgttagaacaatagtaaaaatcgtaaacgcacttaagactctttgatccgtttactgtgtaaaaaatctctgaaagcttaaggcccagaattaaggcgcattatatgttactgtttcacaacgctcatattttttcactccaacaagtcaagagcaaaatattggaaacctaaattatgactcttaaggcccaaaagtaaggcccattaagtgtgatataacgacgttaaaataaatgaattgccaaaaacaaattagaagaagaaaaatcgatggcggggatactagtgaacaatatcctccctcaacctccgattctccgatcgctttcttcttcttcgcgaagaagttcaattcgaaccctagttatggtcaaagcttcttcctctgaaccttccgagtctgtttcagtctccacgaagaccagtgacgacactggagctgttgttgtgttcactgctcctcctggtttcaagccaccggagccaaaacggttcgccgtcaaatccggaaaactcttcgatgtcttgggtgcagcaattggattgtttttccgattcggcactggtgttttcgtttctgggtaatcgtttatttctctttcccccaaattgagttgattcttttttttagcttgagttgagtgtgtacacagtcgaaagcttgatgatttcaattgttgtaactgcattgaattgatttgatttcgttgttgtactgagtag

SEQ ID NO: 40573 - DNA, 278 bp, Arabidopsis thaliana columbia
ctgattgaatcagaggaatgactgagaaaacaagaacagagtgagataaaaaaaaaaaaaaaaaaaagtatgaaaaaaaaatgaggacaaggcaaaacgaaaaaacttctctttaacgaagttgcagctgagtaagaagaaagcattttggtagtggtggagatggtgatggctaaggaattaaaattggtttaagtatgaatgggatagtgaccggatgggacccaggaccgttaggagttttcgttaggtaccggacatgccccttaccgccctgc

SEQ ID NO: 40574 - DNA, 547 bp, Arabidopsis thaliana columbia
gtaacgtccgccagtgtgctctaaagaccctcgtcagggggcgtggcagagcatgtatccttcttcaagtatgtcctccaggccgagctcacttgcggtctgggacgtgttcaacacgcaagctgcaattgatcagcgttatatgtgacacaggcgcgcatatataagtacttgacaattggccttgaattcttaatggcagacatcggccacaggcaaggactatcaggccgtagaaagtgatgatgctgtgacaatcgtgatgatataggcgacttcaagaagcagtcgcaagcttgcacctacactccgcgaggaagacgacttcgagcacaatatatcatgccaagtaagccgaatgcgaagtcctgatacagagatgttttcaatgataacgacgtcgagataaaatttgaaactgtgttaagaggctattgtcgatcctgatcttacgtcatcgctggcccagaagtatacttcatctacgactcaaagtcactatacagaaaaattgatgcttgtaattaacatatatgggcaatatata

SEQ ID NO: 40575 - DNA, 687 bp, Arabidopsis thaliana
ccaacgttgttatcaaaatcccaacttcaaggcctatatcccttcctcgattgctccgtatcctccttctgcacagtttttctttctttcaagtacatcttttctattccatatatagacttatgtatgctacatttcttgggttctatgtatatttatgcagacggaaaatagcttaaaattaccaaatgacataataaatatgcattaaacaactactaggtcatttaacaaaatatatttctaaatatttaattttctgtttaatcttgtaaatatcatgtatttttttccagcaaaactataacaaaatcgattgtttttgccctcttacaaacacataataagtgtaactatgtactattttttttcgcaaatctctgacaaacacacacctagatacaataagtgtaattgtgtactatttgaaatgattcatattgagtaatggtatatttaccctggtcgttgaaacaagaatatttattcaatattgcaatcgtgtactagtattaatacacacacacacacacacacacacataatgtcgataactatgtatagactagttctataggattgacctaaagtaagaaagtgtatttattattgttaccagaggagaagtcatatggaatgatcttgatcttgatgtggggaactcttgttggaaatcacagagacaga

SEQ ID NO: 40576 - DNA, 570 bp, Arabidopsis thaliana columbia
tgaaaatacaatgtatgtgtcctcaaacttactggcattactaggaagtaccaaacggatatgatcccgatatcgagcacaacactgctcaattcctgctggttgttaactcctgttattgctaaggctggatggtcaatctgaaaaactaacgattttcgattactgaccactgttgtctcatagtttcgatagtgaataaaggtctcgtatgttcttaccgtggcaagaactgccccgagttgagctgccaagattgtcttctttgctccaagtatatcacaggcctttgctctcatcttgttaacattctgcagtgaacaataataagtcacggtgaagaagcagagagttttctgcagattcatgttgattggttgtacacttagctaaggtagagaagtcttacatgaagaagagtgtcgttgggtttggtgtgagatgtaatacagaaaggagatttgacactgcgtggcttcaaggagagagatggcaaagcatttggggcatagagcccaagagagccgaccgcgcatctctatgtgtctgttgtcttgtttttggctgtga

SEQ ID NO: 40577 - DNA, 600 bp, Arabidopsis thaliana columbia
tttaaaaaaaatttaccacatgatccgttagattgatattcactaaataagatgttggagaaaaaattatttctactgaaaagtaaaacaatctatacatttaaattagggtcaatttaacttttaggcacaatttggtaagaatattttttttttgtttgacctataaatagaatagactcgacaatcgatattgtttcgacgacaaaggttttgcactataaacatcaaattcactttggaatgtgtcgttcaacctatcattcctcccattctaggaggtggtatcaacatcgtgattcctccgaatgtagatatagacctgagtgtaactacggtggacaaagaaaacgcgtattgggatttcaacttggtttgataagaccgggaaaaacctttgtcaaagttgttatagaagttggaaaagaagtcattctaaacatacgcacaacgccaaaagacgcacgcttcccgaagacttacaaaaataagccacctacttcgtatcttgtgctcaaccaaagagatctcacattatccggatttttggaagataaattggtcaagtactcgtcaccacccacactggccgcagagaca

SEQ ID NO: 40578 - DNA, 240 bp, Arabidopsis thaliana columbia
agagtcaatatcatgtatttagtgaagtttttttttgttacaacagttgcgttttagaatttaaaaaaacaatcataaacatgatgcaattacagtatgattgactttaaaattgaaacgaaaaatccattttagattatgatcaacaatatattgttttaattatgattaaaaccttacagaaagtttctaccaacaagagtctcttagcaaaacttaaatcattagtaagtaactcat

SEQ ID NO: 40579 - DNA, 608 bp, Arabidopsis thaliana columbia
caagtagataaatataaagaaaaatgcttgataagcttattattggggttgccggaggattaccggaggattcttggaacggtcgatgggtttgccaaaggggtcgggatatggcccaataattatcagagcaccggtcgcttcgagaacaacaatatgacgagtccgggaaactacggcaatggtaatggcggtgcagtgaaggcatccgagaactccggcggccgccgccagaaagacagggagtaaaggactcctgaccacacccagtaatgattatgtatccaaaataataaatgtatacgatgtatgtataagatggacatgtttcagtatcttaccaaaaatataggagacttttaatgaaaagtcttcttgtttaattttatgaactttatgattaataaaaggagtgtgtttaataaaagtgatgtatattaacagttatttccacacgtgaaaagattgaatttatttgcacacaattaagtttgaaaagtaacgttatggtgtacgaaaaccctaatgaatttataagttacgtagtgcagtaggatatgtcgttttaatgtttctggttcactaaataattagataatttattttgc

SEQ ID NO: 40580 - DNA, 651 bp, Arabidopsis thaliana columbia
tggtcatccagagaaacgatcttgctcaggaagagatccagtagttctcaatgataataactcaaagacagttctcgggaagctgtccgtttcccaaaatgtagatcctttattgaaggaaacaaagtctctaggaagattatctgtttctcagaactctgatccttcgacaaaagaaacaaagtccattggaaggtcatcaacatcacaaaattcagagtcctcgatgaaggaatcaaagcctctcgggaggttgtcagtttctcaaaattcagacgtttctaaagagtcaaggacgttttcatgtatgcttgcttctattatttttctcttttcttcttacttaatcttagcactgattaaatgatatgccatttctggttttgtctgctgtttgaagccacaggaagtttaccaggcactcctcatagggtcagttcgaccaatgtatcaaaagccacttcgggtgtttcaacagccgtctctaatgctgcaacgtcaaggaggaattttacaaaagctaacccaaaggcgaatcctgtcaataaggcagcagattttgctccggtgattgtcccagagcagacctagaatagagcaggctactgaatccagagcagaacttgacataattgcaagaaccatgccgta

SEQ ID NO: 40581 - DNA, 392 bp, Arabidopsis thaliana columbia
gaggatcgaattgtagtgaatggccgaattggaaaaccgatgtagctgtcgatcatctaattcatccgcaacagaaccagagctccaaggataatcatcaaaacggtgcaagttctcaagctggtgaatccattagccactctttgtcctctgattattgcccacgatccgatgatgaggcaaacccgaccgtagctgcaacaacagaagatcaagaagcagagaaaccaggaagcttggaggaagaagaagaagatgagaggttaacagaggagttagacaagatagaagaacggttcagagcagagatgaaagagataacgaggataagagaagaagcaacaatggagaccacgaatagatttttcgagaagacgatgcacaagttgagt

SEQ ID NO: 40582 - DNA, 547 bp, Arabidopsis thaliana columbia
agaattcattagaacgtataaatgttagcttgctttggtataagagattgtgaaaacacactcatttataaacaaacaacaatacttaatgattctgtagatatgtgtatgtatgtaaatgattcatacaacgaagaattataaaccagtttacgtctaattacatgattaccataataaattgataaccatttttatacacttcattattaaatcttctcccttcatctccactttacattagcactgccaagtcacaaaatgcaaagacataagtacacagaaaccgtatcaagaacactaagctatagctacgttcttgtttgaatgtaaaacctatcaatattcaatctttgcctattttggcacaagagattgtgtacccatggataagtaatggattctcatgaaactaacgcagaatgttgattgtcgttttaccataaccaaaacaacaaagccaatgcaagaagacaatctcatctaatactagtgaaagcgcaattataatgaaagataagggtgtggatgatcatccaggaacata

SEQ ID NO: 40583 - DNA, 395 bp, Arabidopsis thaliana columbia
atcccaacagatcggtaccatatagtttttccaacataaaaaatatcatgatctaatcttaaaagctaagaacattttacaaaatcaaggaaagaaaaaaaaaaagagagagaagatgttataattactatgatcacatgagcacataaagttattaaaatatttgaaaacaatgtgaaatcatatgaatagcgaaatcttaacacttatttttgtttcaacatgcattttgaatacttactctatttgaataccttcttcgatttatgcctcatggtgtctgaaaacatcgcggagtcgagaactatatatatcattttctgaccaaactttagaacatttacatccatggatcaacatgaatctctgatagttggacacgatcactaaaagac

SEQ ID NO: 40584 - DNA, 575 bp, Arabidopsis thaliana columbia
gattgaccacttgtattggagcttcataatctgacttgcccgaattgctacccatatgcttttccccgtcctcgccatttgtttgctgtggagtggaatctgcattattgaatcctgcaggaacagctcagcttactattttttaaaaatagagcttctcttgaggtgaggagtgcagactaggatttgacagttatttacccgatcctttctccactagagacccatggtggagtccttttgctacgaaatcagtcaaagtccacaacaggccaatggcagtcaaacttatattcaaatcagtcttttgtgcactataagctccagtaacgtctatgcacctgagatattaatatcattaactaccatcccatataagacaaggaattgtgttgacatctctggcagctaagtatcagcatgtaaaataagaaaacatagtaatttaaacagagataggaacatacacatgaagacagtcttccgggagtgtaggaagtccacactcataataacccggagactctgggaagaacaaacaaggtatcagtgacaaggtataaagtaagagatgg

SEQ ID NO: 40585 - DNA, 599 bp, Arabidopsis thaliana columbia
agcttcgtcttgtgaacatatctgtgaaattggaattgcttctaaagttcttgggatagtgattcttgttagtttcttgaaattgcagaaactctgatacgatcatagaatggtctttagctttttcttgtgaacacgtagaatctggttaggttctcagaatagtttcacgtttttataatgttacaggctaaatggtgcaagaactattggcagaagataaaatctaattatcaggtgagatgagatgcctttgctcgtgttttgttttgtttttcttaaatttcttcatgccaaagtttgaaatgtttccttttctgcagccactttctagggagttgtataattttgatcccgaattgtttctgcttccctctttccgaaaggcgatcagcgaaaacacaaaggaaagcttcagacgtatcatttctgaaccgtttcctggtgttcttgtctttcaaatgtttcagcctgacttcattcagaaattgatagtagaggtaaccatcatcttgccacttatcctaatacctctttgtttaattcatttgctgctgtttgattcatcaggtagaaaatatctggaaagtgggtcatga

SEQ ID NO: 40586 - DNA, 550 bp, Arabidopsis thaliana columbia
ctcaatcgggttaataattatacgtgcttaactatactacactaagccacgtcaccataagtattttaaaacacaaaatgaacgatttatgtatttttaattttagtatccaaatctattctcactctctaattttgttattttaaaatcgaattcaacaacaagactcatggggcatgggggacgtgcctgcctcttatactttactagtgcgtaataaaatagtgaatctttgtgaccgttggatatcggtaatccaacggttttcatatcgtttgtgtataatgagcactaccacacatgacatggggttttgaattaatgtgcatgaacatcatcagtcatcacccgtaatttgacaaaagcaaaaaaaaaagagcatcatcgctagtaacatgtctcccattactttcttaaaatattttattccgtcatgatcaaatgtcaattgcagctgatattataagaaaaagaagtcaatcaaaatcttatattatatgtgtgtcttagcaaagatagctctattcaattatgatgatatgacatatat

SEQ ID NO: 40587 - DNA, 645 bp, Arabidopsis thaliana columbia
tgcattaataggctttctagcttctcttgtagttttattcccagatcagcaaatgtctcggctgattctttagcgaacactcacaatctatgtatatgcgcaaaacatactctgactttaaggtatctatttggtgtacaaaaaaaagaagatctacatattctgagtttctaccgtttttagaataaattaaaatctggaaaggagaatgatatagttcaaaatgactcacgattttaatcagagagtacactgaattgggagaaaaagctattcagtggaagtagaaaagataaagattcatccagtaactgttgatacggaaattaccttctcattttgtgaatgattgttcctaatatctctgttgaacaatgtttctgttgaataccaaaaacatgggaattaattagcaactcttcctagatattctgcaaattaagaatagactaaaggaactagaactccatagccgagaaaaaaaaaatcatatggtggactcatgtagtacggttcaaggacaagactactgcaaaatgacactacgctatgatctaatagcttatgcatacttttttttttggtaaaggttaaatacgttatgcatctggtagatagatggttaaagattcatagccgtatatg

SEQ ID NO: 40588 - DNA, 479 bp, Arabidopsis thaliana columbia
taaagacaaaacgtacacagacaaaataagaatcttctctacaattattgattgttcactaagacacgtaataggccacaccgccaaacgcatccttatcactttcgttgtatcaaagacacaaacaactttactattcaatcaatcaaacaggaatatgtataagttgagatctaactttaacaacaattagggaagcaaaccaaacttaatagctaatttgtcttgatttaccctgttagatcaaaatctcaaatgagtgacatgttttcgtgcattaggagccaatttgcttgataaaaaaaaaaaagggaaccaattttaaaattaatgctatctgattaagacggcataagtcaaatgtgagattacacacccatctaactaaactagtagaactaatcagatatatcagttatcaaaattagtgtatttcgtatcataaaaattaattttccttaactaagtgacttctaaca

SEQ ID NO: 40589 - DNA, 440 bp, Arabidopsis thaliana columbia
caaagcttcatattagaaaaaattgtttatatatagccaaaacaaaaccaaatcatcattagaatatatgctgtaattagaaagtgtcattatattcttactagttctaattcagtctacttatatttgcaggagttcactaacaatagttactacaatgaaccaacattcaaaaattacacttatcaaatagaacatgaatctaaaacaagataagaatactaacaaaatcgaaatagatgagaactagaactcctcacatcgttcgttctctgcacatgtcaagaatatgacgtatattggcggtggcgttgatacaccaatttgaaaccaaccctaaacttacaagaagtttaaacgagatgaacacctctctaattaggagctcggtaatatcttgcatagacgtcacatgagattgatggtacatgtcatggagt

SEQ ID NO: 40590 - DNA, 889 bp, Arabidopsis thaliana columbia
tggatgggatgatacaaaaaaagggaacagcaaacctgaagttgagctgaaatcgatgctaatggctagagaaattagggttttgaagcttgaatcttagcaaaacagatcagcgagacgtcaagagagggatcgagagacggaggagagaaacgttcgcgtcagagttattctcgttttctctacatatttccaattctacccctttcttcctttaagtactaaagtcattatgatttcaaagattttttaaaaaagaaaaattgataatattatttgaaataaagatgttttataataatcatcaatccttaatccataaaatccacatttccaactattcaaaaaagtgatgtttgggctagacactagagtctcactaaaccattgtaatctacaaatcttgaagaactaaacatgttcactacttgtctttcagcatttacaatctctctaaagcattgcgaccagtaccacacaagttgatcaaatccatgagaacagagtacaagacatccagagacaaatgacccaacaacttcctactctccgacactccttccctctcctctgtgcatccattctccatcactagccaccacgagatgcatccttttgcgtcttccgggtttacatgcgccaccaggctcactctctccccttccactatctctaacgatagtgacagaaattccctgctcgcttttgtccctaccgtccgtgcttcctccagtagccaacacactatctggctcgccaccttctcaaataaataaaccgcgtgtttaagggaccgtgttgctatagacatgatcaactttaggaaacgaaagaacatacctgttggagatcatcacgggaggtcgccacgttcgagctcgtacccggg

SEQ ID NO: 40591 - DNA, 762 bp, Arabidopsis thaliana columbia
ttgtacaaaagtgcgggaaatgtgagaatacacagaaacaatttaaattgctttcattagtttttttaaaggcggaaatataccttttggatttacaaccaaaaattaaataatgtttgaatctcacattattttttcaattcattgtcagttggttttaattaagtttataaccataaaatgatagtttagactttagtttagggtgatccaagtagggtatattgcagttttaaaagggaattcggtaagataaaaggtcttagctattattttgaatcgtgttacgaatctcacatcctaaatgtaatggaatctttctttcttttttctttttttgagcaaatccatcgtaagtgtaatggaatcccacattatattctttaaatccaattgccaattgatttttgagttaaaactatagaagggtatggaagtatctagaagattctcaatatataatcaaatattgtatagttatgatataagatattttacatatttgtattcatctagtttatgaaatctctttactatataaacctatgtaatcctaatcattattcttatgagagtaagtataacttcttccagttctaaactctcatcacattatcaaaaaccattgaaactctgcatgaaaacgttaacacatatggtatttcttcagtttagtatgatttaatattatacttgtattgattcgatatgcgtacatttgtgaatcaatattgtttttgctttcacaaacgaggaaaatgg

SEQ ID NO: 40592 - DNA, 546 bp, Arabidopsis thaliana columbia
ttccatgagaaaagactcaaggataaacgtgaaagaagaatggccatcagttctttctgtaagtctcatagactattatggtggttatgacaacgctcatgacaaaattcttcagggaatcgtgaagcagggaggagggaccaaagaaactagagattttgaggttgaaagccatcttatccttgagtcaattgcggcagaactccatgctctatcatggatgactgttagtccagcatatctggacaggcggacggcattgccgtttcactgtgatatggttctgagattgagacgtcttcttcactttgcggacaaagaagtctccaggatacctgataagacaggagtttaaaacactgtaaaagaacgcagatcactaaatttctctatcagaagattagacgaatctttcagcgaacttcatcctgcacctcccgagtagtcttgtcaaatataaggcatgtaggtatctcggggtagttcaccactgctatatgttacaataaagtagggagaaatggtgtagatgtagtcgaggttttg

SEQ ID NO: 40593 - DNA, 595 bp, Arabidopsis thaliana columbia
tagtaacgtaacggcgccagtgtgctctaaagtcgcatcacccccccaatcccactcccactcacccttctcatacaccctgttcacgccgtcatacacaaacgagctgatcgtgcagtcgccggagcggaactgttgggcgagttttgcttcgcgggtgcgtcgccatgctgtaccgggattcacttcggagtgctggtggccggatgagccgagttccaggggtcgaagaggcggtgatttgattgtgctgctgtcttagttggcggcggcattgtgaggacagccacgtaccccttaaatcctcttgtgagaatatgtaaggtgaggttagattaaaacttggttcgtgaggtcccaaagtatggataggcttatcgataagaaaattggtcgtttgctgttgccgggtcgatagacaatagggaaggaggcatcaggtatgcacaattcctcaggtaaagcgaaaacacttctatctttattagtatcactatattgcaagaatcagcagtatctctggacagggtatctgaatgagctatcgagcactccaacagatgcttcacgtctatcatttggtcccatcaatgta

SEQ ID NO: 40594 - DNA, 640 bp, Arabidopsis thaliana columbia
gttagatccctccgcgttcccaagccgacgcgccgatctttcttctactacttgtcctccggcaataacaaactaaccatttcgaaaagtaattatctatggctctctcctcgttgatctcagccactccgctctccctttcggtgccgagatatctcgtgttacccacgcgccgccgtttccacttgccgttagcaactcttgactcatcgcctccagagtcatccgcatcatcatcgattcctacctcgattcccgtcaacggaaacacgttacctagttcttacggaactcgcaaagacgacagcccgtttgctcagttctttcgctccaccgaatccaacgttgagagggtaatatcaatcaagcctgtttgtctctttcttcttctatatattgattttgagactttagaatatttgttctgatatctggtttcttggtggatggagcagataatatttgatttccggttcctagcgcttttggcagtaggaggttcgctggctggttcgctactctgctttctcaatgtaactaacttgtggtctagttttagtctgaaatgttttgccacgcatacaaccattttagtactaatctcatggctcatttgtgtaggggtgtgtctacatagtgg

SEQ ID NO: 40595 - DNA, 410 bp, Arabidopsis thaliana columbia
aatatcaaaccaaaattaaataaacttaacagaattaaaatcgatttaagttatcccaacccaaaataaataccaaatgtaattatttaacatcaataataaaatctaaattctaatggatttagaaagttttaaacaattactataaaaaaaaggcagaaaaaaaaaaatgaatctcctttcgtcttcttctgttcttcgtccttcccttttcaaatcccagattttttctggaaaaataaataacaatatacaagttcatggattcgtaaaatcttctccatgtgaattgatgttaatcaaaacccaaatttagaattgatggtaaattcgaattttgcaattttgaatcaaatccaaaatcatttttttctcgaaatgacattaattcacatgagaaacaacttcta

SEQ ID NO: 40596 - DNA, 383 bp, Arabidopsis thaliana columbia
gatccctttattttttcagaaaaaaatctgggatttgaaaagggaagaaggaagaacagaagaagacgaaaggagattcatttttttttgtttttgcttttttttttttaatttagttattgttaaaaccttctaaattcagtaaaaggtttagattttattattgatgttaaataattacatttggtatttattttgggttgtgataacttgaatcggttttaattcggttaagtttatttaattttggtttggtattgggtttggcacagtaatccaaagataaaccataaaatttgaatttatggagaacaagaattcgaacttttggtttagggagaaattggactttaatttccattatgtggagactgagatagaga

SEQ ID NO: 40597 - DNA, 1070 bp, Arabidopsis thaliana columbia
gtcgactctactactcgccaaaagtttccaaaggcgccgctaaaaccacattgtctggatcaatcttcacacagagctgcctcgccaccttcataaaccgacacaacaaccaatgattatcagacctacttacaacactagtactcacttaaaaggaaagaacacttgcctcagagactatctcttcctttgtgataggagtttgaacatcaggtttgtcgtcttttgaggagcggtttttgaacttttccttgtcaactaacttcctcaatacctgtcaatcaaacaaatagatcccatatttacaccattttacatattcaacaagaacaagaatgctgaatagtgcgaataaagagggttagctaaacttaccaaattagcattcgccagacgctttgcagccttttcatactcttttgtctggacttcagaagttttatgaaccaccttaacctcctcctttacttcttcatgattatacatctgaatatattcccatcaagaaatcaaacactttaccaagttaactgtgataccataatgattatcagggaaagtcaaaactatctgcagttccctttacatctgaagacattcccatcacgaaatcaaattaaaggagaagccactaacactaaaccaaaatagtttcaataccatatcactatcacattatgtcaaaagtatctgttttacccttaacatcaagaactaaacatcatcaagatcacaacctagataccacaacaacaagaggagaaaaccactagcattgtacgacctaatatcagactaaatctattttgcaaaattaagagcctagtaccttgcgttgctctcggatgagataagcatacttgtcaatgttaggcacagcaagaagttttggcataaggtgattcctgaagtatccaggagctaccttcacagtctcaccagctttgccaagcttctcaatgccctaacaaaaccagatcagataaagatcaagacaaatcaaaacaaacccaccatctgatttcaattcaacccaacgaaatgtgaaggaaatttcgaaatcaaacgat

SEQ ID NO: 40598 - DNA, 597 bp, Arabidopsis thaliana columbia
aggaggattgatacaaccaaaaatagacctcagggtttcgtttatattgcctgtccccatgctgaaaactatctttgcctaccttttgtagtctaccaatgtatgaatgaagaagcctgatttttataacgaaatataatatctgttacagtacatttttgtatttcaaatgtaagaaagtaacagaaaatacaagaatgttagcaacaacgtctaatgtagagcaatacgtaattattgattccacgaaccagagctgagagccttaatattagtgccttaattaatattacttatccgttctaattatttacttttacgttgtgcattgttgattagtctcctttcttgcatctaattagtatcttattgaatcaaatttgaaccatacatttactttggcacaattgaatataatatttaaatgtactgtggaaatttcggctttcatcgcaattcgtagataatagagggtttaggagcagaaaaagacagaagggtactggttcggttccgacataagctgatagtcaagaggagatttatatcgtaataatacgattctagtggaaacgcgtgaaactgtaggaaacagaa

SEQ ID NO: 40599 - DNA, 819 bp, Arabidopsis thaliana columbia
gggaagaagagggaactggtagaattatatatgaggccagttcttgcatcacaacaatgttatctcgagttgcccaagatcttaaatcttcaactcctgattctgattctaaacagatttaggagcatgctaacatgtctcgcatagttgatcatttgtgactttgactggctactactgggtcgagtttaacttccggcactacgcaaatgtaagcagctgcctgtaaagcatgtcgagcaatatggattctcatagatacttccgaaacattcttcaagaacgatgatgtaaacatattacctctagatgccttgcagaaccgtctctctcagcatgacataggaaacagtgagtggggtccgttatctgagaaacttgtcgatacagtgacaagagcatatctccgatcaaagcatgtgcaagttgctgttggtcattgccttcaccaacgagtggaggctccattggtttctgcaattcaggtgattatgtgatgcttctcttcttttgtggctatcttaacaaaaaatttgtgggttgtctctggattcacagctataattgaatttgtgtttttttttttccgctctttaaacttaactggaaactacttatgtaatgctccagctcttgtcaagatgctgccttcataatggaattctgcctagcatgctttgtggtcttcccagttcactgcctattacgaccgtagtcagtggtggagaggatggtacagttatttcagaaatattttctatactatcatacgcaacattatcaagcaaagaccagcaaacaggagaaaaagataacttc

SEQ ID NO: 40600 - DNA, 899 bp, Arabidopsis thaliana columbia
tgaaatcgatgattgttggcttttccgtggtgttcgttcttgtatcatgatgagtgcgcaaccttggagtcaggtaggttatacaatctctatttcagacatataacattaaatacatacagtcattggttatttatatatgtatgtatgtatattgtgtactgttttataggtgtgtgtatgttgtaatgtaagtagattccgaaatttgcagtagttttacggaaatttgtgtgtaggaatgtttcgttcttttttttagctcatagaacattcttttagtaggctatgtatgtgtatttgaatacatacatagatatgtattgtgtgttctcaatcatttgcagtgtcctttgactgtatatttggtcatttggataacgaatatctatgagaatcagctagttagtgcactgcacacacttcaaaggtaatatttggtttctagaggactgaaatgatatgatggtttgcttgcttagtaccaataggatgatcttcacaaaaatcatttgcaggcataactgagtttcaatttgaacccaaatagagtagttggatcgagaaggaggattggaagtatggcaatcctcaatcctcatatgtaaatcagttggaagcctacttaatacttgatctctattctcggctggcaccacctgtatcctgtctgaatacttgattatcgggatcagaccacatcgtccgcgcaaaataccaccctgaaccagcaccaccataagcaacagcctcgaccgggttcacacctgagacgttagggctaaaagaaactatatgagagtgaaaaatcctgagatatcattcttgattaccgttatagtgtctgaactcaaaaccttagacgaactcatgctactaaaaaaaacaaggagacgaga

SEQ ID NO: 40601 - DNA, 783 bp, Arabidopsis thaliana columbia
tctagaggatgcctgacataaatatgccattagtcccttactattgcaatgcaataatgtacgggcttgaggatacatgaatggtgcatcttatgaacggcaatggtttgatattcaacatctttaactagctcctggaagcacgtatttggaaaacacatttttgagacgtaaatattgtttggtatcatcggtcttgtactcatcgaacggatattttggctaagaaccagaaatttgcttctattaatattcagcatgattatgtttctctttttttgaatgtgtcacactcggattgtgatattttagaattttattaaagaaaattcccgttgacattaaaaaatgacattaaaaagtccaacgcacaattgaatttgatgttacacaaagagaaaaatatctcatgtttcacactctatgattgatagaacaacatatcattaatcttctccgtttcaaaagaaaaataagctggctcctcccatcacaacaacaatagccaaaacggttgaagaagatctagaggcggagctagatgtcgaggttttgacatcctgatccgcttcagattgagcaagcgtatcgggggttcctcttggactaatgggcgcgtaatcccccaccaccacaacaccgtctggtgcaagttctaaggggatttcgtaatccggataatcttgagatggaccaagactatcaatcaaactctttgtagagttatctactgttggtttgttgtcagcaagagtctttgatgaagatggcgattgcagggca

SEQ ID NO: 40602 - DNA, 858 bp, Arabidopsis thaliana columbia
tgaggaaaaaaagaatttttcgtgaagaaaaatatgtgatctttggggagtgaagaaagaagaagagagaaactaatttaaagaggaggtttgattttctctgctatgatttttttatatttttttttaccgttcgattgttatagggagtgatgatacttagacttgtcggaaatttatcacgtgtttggagattgaggttacaaatggttgtcttaagatgaatagttggaaaatattaagttggaaaaaaatgaattgaatattattcaacatgttcctctacaaaaatgtagttgaatgagttgaacatttttgctgcagaatttgttcaacttttcagtttttaaagttgaatgggttgaatcatttttcaactctttcatctcaaatggtaaaaaataagatgaatgctaattcaactcttttaacttcttcatttaggtcaactatttgcagcctaagggttaaacgatgacctttttgatcggtttatgttcagttttgctcataagcgcctaaccctaagatcgcgaaagagaatcatcgcgtaaaccataaccctaagagaatcgggaaactactcacagtttcatgcgaaccaggaggagtcggaggatttgcgtccagaggatttgcgttcggaggatctgcgtccggatatttgttatcggaaaagaatccatttttctaatgaggaaaaaaagaatttctcgtgaagaaaaatatgtgatctttggggagtgaagaaagaagaagagagaaactaatttaaagaggaggtttgattttctctgctatgatttttttatattttttttaccgttcgattgttatagggagtgatgatacttagac

SEQ ID NO: 40603 - DNA, 453 bp, Arabidopsis thaliana columbia
tataacttatatatcttgatattgaaatgtgagtacttgcaagtaaaagaaattaaataagtaagagacaaataaacctgtcaaaatataacttatatatcttaaaagacatacctgcagagattaacccatgacttatcgagcattttatctaggcctgggcattcgggtatgccagtcgggttcgagtaataccaggtcgggtacgagtatgtcgggtatacgattctaggacccaatagggtaaatagaaaacctcagttcgggtctcttcgggttcggatcggttcgggtataagttttgagaaccgctaagaactcgaaattaaacagttcttgctggtttcggttcgggtcaataattatacccgaatacaccattaaaccaaaattttaccctgtttacactacactatacccgaatataacaacttagcatttcaaaaaacagca

SEQ ID NO: 40604 - DNA, 894 bp, Arabidopsis thaliana columbia
tgtggtttatcagaatggcccgtaactcaaaggtatttgagaacaaggatacccatcctgctaacacgtttcaacatgctttgaaggaagcagaatctttccaagtggcatgagcccgcaagaggatcctttctccacatgcatgtatcccatcattccatagagacactcccatttgacactctagtttgctaggtacatggatcttgggaggatacttgcaccttaacaatattggttggattgtccatattggtttaaagagctttcgcagttgacaaatatatccaaagacctaatcatcaacaacataccgaaactccaaacaccgatttaaaatgtaagagcatatcaatactgaagaatgagaaattgtaagataaaatagaaaaagaaaatcatctcatacctcgtagtagtggaatgatcagccaaaagatgcaacttgatggttgagcagagaaagaaaggtaaccgattgtgcggtgaggtcatagactccaactagacagaattgggattccaaaaggacccagtgtggccgaggaaagctcagtaatcgccaatgcatgtattcagttacatcattatattggtcttttccaacttgtttggtgttttaaacttttgtgtaataagacatcaaatatgtaaggtagagagactagagagagttgatcatgtaattaccataaacccatggaggactaaccggaacgtacgtgagagaaacttgtatatcttcatatctctggtaggtactaccgaactggttaggatttcacccaatgttgctcctctgatcgttagagatcgagtattagactgtgggcttcaacctaaaaccaattggcaataggtggagaggctcatatcttatatatacacttaaga

SEQ ID NO: 40605 - DNA, 546 bp, Arabidopsis thaliana columbia
aagacaaaaacagaaaagaacaacacacacacccttaattttaaggcattagtatttgacaaataataacattttccaaacttatcaatatgggacatgttacatatttttttctttccataaacagagtgttttgttcttcgtttttcaaatacatgtgaaggaattatttttcttctaatttcgcgatgtatactctaaaaatccagtatatatcaaatttatcatttatctttagtttcagcattttacaagggctccttgtatttcttatgttgggagccacaagttacaatacctttggtccaaaaaaaaattaaaggaaaaaagacacaaccaagaagcaaccctttggtggttctttacaaattcatactttcttgagtaataatttcataagaaaataaacctatctctctatattatataaataagaggaaacactccactttgttaaaatgctttccttatttgttggtttttttatgcgtccgtcaaagttgcggttggaccaaaatagtatgtttaaggtcaccaatgtgcagc

SEQ ID NO: 40606 - DNA, 502 bp, Arabidopsis thaliana columbia
ccaaattcgcgagtttcaagctttgtcgtgcataaaggatattcccgtacttcctctgatcttaagtcctatgaatgattctaattatgattccgaagttaaaagatcagatctgcgttcactaccacattctctacagcaaatacttaaatcatctttcaatgagagtcaacttcaggctattagtgttgctattggctcatccaatttgatgaaagcttttgacatttcacttatccagggtcctccaggttagtcattttatctctttgtcaataaagctaataatatctataatttgctctgggagaaagattagcattttacagtaattgattgttgatgtcggacatcaatgaatgtaaagaaaatttgtttgctctacagggactggcaagacgcgcactattgttgccattattagtggcttgcttgcatccgcctcacataaaactagtgacaggggaaattctgaaccaggtcatagttcttcgacctctag

SEQ ID NO: 40607 - DNA, 764 bp, Arabidopsis thaliana
ctcaaatcattttgtttttttttaaatatagtttttatgtgaacttaaatatactataaaacaaaaatgtgaagatttttgccttctagaaagacctagagttttttgttgatctgtttttgaatagagtagttgataagtattctcattgatattgtctaatggtagttaacaaattaagaaaggaaacattgataatctcgaaatcataataagagacaagagagtaaacatgaatgaatgttttatttgcacaaaaacatctttgactaatttcatttattttgctttaacgcacaaaaaaatatgggtcatttgcaacaataaccatatttgataaactatttaactatataacactatatgtataaattaaaaaaactaacatagagggcaaatataataaccaaatgtggtggtggtgatcaaaagtgatggtggtagtgactagtgaccaaaggtagtgatgatggtggttatggtcacggtgctggtgggagtggcaaaaggttgtggtgctgatgggagagattaaaggtggtggtgatggtgattaaaagtggtggtgaggatgattaaaggtgatggtggtgacggactgtggtgtgatggtggcggcagtgacggtggctgtaatgacggctataatggtggtgatgattgtgacggcggcagccgtggtggtggtgacggcggcgacggtagcctgtggtggtggccgtgttatgatttggtggtggttattagtgatggtgatgaggacg

SEQ ID NO: 40608 - DNA, 867 bp, Arabidopsis thaliana columbia
cttctatagtttagacatagtaaaacgatttcttcctagaaatgtagtttaaagtttggacacattaaaccattttatatctaggtatgtatatatatatttaaatcatatacaatataggttacaggtgtatattttatataatttttatgtaaactttatctgatgcaaaaacaaatgtctataatttttgtaatcgcttttgtaaaactgataaaaataaatgattttaaaatgtgttgccgctgccaaaataaaaaaaaagtgttgacatcacggcatacatgataaatatttcttctacccattgtcgtctataaggacttacggagcatgtaagaactttcatcttcgtggcagcggaacccaacattgacaaatatttcttctagttaaaacttgaatttccaaattaattaaactaatcaaccagtcacgattacggtccaaaaaaggagcaggaaattcaaaagacacgtttggtatgaaagaacattaaatattcctttatttcatgcaagagtcgctttctctacttttctcttcatactattactttatttaacaacaccaaacagcttatatatacaattaactaaaacaaaacgtgaagacactcttctccattaacacttgcttctctttattaacttcaaaataccccaaacttaaagccgaatcaagaacatgtccgatcaccagaaaattcatccggtgagcgaccccgaagcgccgccacatccaacggctccccttgttccacgtggttcctcaagatcggaacatggtgatcctaccaagacacagcaagcagcaccgttggatcctccgagggagaagaaaggatcaagaagttgttggtgcaga

SEQ ID NO: 40609 - DNA, 590 bp, Arabidopsis thaliana columbia
atttcctagtaagttgttatttgatttaatatatcttacacacactagttaatttagtaattttgaaacaaataactagtatcttctattccatctgcacaagagagactcattaaattttggactaagacttgttcataactttttgatactatgtagagggaaacaaagcttactctatcatgtatgatatgacttcttgatgctagcttcatctcccctatccaatcttttcatggatgattctgatagtaggcttttaatcaattatcctagaacaatatcctgtcgttgtaatattttaggtgtcaatccaaatgggtgtgatgcgaacagatgagatatgatcagaagttgctaagtcaaaccacacaaaatttggttatttttcgaacagtcctagtgtttgatgcagataacagtaaaaagtcacaaaaatgactgatatactcggctgcatagtcgactgccagaagggaccttgtgaacgagtacaaacggctaccatagagtaaaattgcagaaaatggacctgtttactctatcacatagactcactactaatagcagagtgtgatcgagtagaattg

SEQ ID NO: 40610 - DNA, 702 bp, Arabidopsis thaliana columbia
  unsure (1)..(702): unsure at all n locations
ggttcgaccggttcgatccatctatatattcgaaaatttaaattataggatgtgtctttagtcaagtgattaagttcatttgattttacattttcttaaatctatttgattttatcatttttatcggagttcgactctattaagccgtataacctcgcctatgtagtaggaattgggtatggatcgggattataaaaccaaacatacataaagaaatatcaagatgtaacatgtaaaattagtcatatacagagacaagtagtttattgaagatgcaccatagtgatcatatatgttgattaagtacacttgttctctcgaataagtcatatcctttgtagccacgactgttccttgatcattggccacgaattagtcaaaagatggacacgaagatcaaataaaagttttacctcttatctttcgtggctattttgaccgtaagagacaaaaaaacaacaagtaaaaccgtgaaagttaacactaattaacgaataaagaatctatagaagcaaatattgtaattaaaatttcaagtgatcacaattcacaaatgaaaaaagttcattcctttatgtggcgtacgttcatagtaattatatagttgcacttgagaaacccaaagcataaaccacatagaaagagacaatagggattaggtgaatacacactctccattagcagacttgtnactattgttgt

SEQ ID NO: 40611 - DNA, 561 bp, Arabidopsis thaliana columbia
catgctccatgtgttgttgctatccttgcattgtcctcaacttggatccttgcattgtcctcaacttgtatcttgtcattgtcctacacaaagcaacaaatagtgcataaagagtgttaactagcccgaatataattcaacttgcaaaaataaagcttgctcgaccttgcggacgaaacatgaaccaaacatacaccaacacaaagcacttgattaaactgaaacacagagcacttgattaaactgaaacacaaaacaacaagaagacttataacacaaagcataaactgaaacacaaatacatgaaagacttaaactgaaacgcaaagatatcgagtaaaatacatgtttttaattagcttgttctttagttctgttttcacttcactaagagtgtcagatcttacaactaaactatcaagcagtttcccacataatttgcatcctctacagcccatttccttattcttccacatttgttgaatctccagccatgctcctttttcctttacctttggcagccttaatacccgggggacgagcttgggaagcttcaactac

SEQ ID NO: 40612 - DNA, 585 bp, Arabidopsis thaliana columbia
tagtacggccgccagtgtgctctaaagtggtgaaaaagttgcccagcttgccgatagcctcagaggcactgtctgtgatgtagtaatggacagtctggacaactcggtcgctgtaggtgatcgtcaatcggacgcggccccaaaccccctgttgtggctgtagtttccactgattgctcgcatcgccttcggtaatatcgaatcctgagctggcgtcgttctcaactccgttacagtcttgttcgtgaaaagatataatgatgcctgtaaatccgatgggataatatagccagggactccaactgcatagggtgtccccgtattctggacaacatctccaatcccacgcaccccctcctttaccagtgatatgcgcaatccaaccgtccaactactccctggcgccaggatcttggaggtcggttcgttccacggctcaacatccgcccactcggtctccgcgtgggctttgctaagagtctgcactcatagaatccctcgaagacttgactgtgatatggaagtgctccgttcgttggttctttaaggaagttcacgcttcgaaaggtgtatcacaagaggagt

SEQ ID NO: 40613 - DNA, 872 bp, Arabidopsis thaliana columbia
gaggattagaggatcccccaaacagtgaatctcgaatcagcaaaaacaaacccgatcgataggatgtttgtctataatgatgaaatcgttcgatgaatcgcgaatatcaaagaagaagcagtgttaccttaagcgttgaagcgacaaagcaagaacactaaaagatcaagagaagagagacacagatacggagaggaggaaataatcaaatgattgtgtgggtaatgttaaattggatctcttcttaatcacacatcgatattgttttacactgacttaagtttttttaggctaaagtcattaatataattaaaccattgagttttttagattgatcaatacctttatgtataccaacttagtgctccctacgaaacatatgctcaaacaattgaaagcgacttttaaaacgaagacatggaatctttcaaaacttaaggtctaaattgaacgctaaaaagcgtacgtaggcgttgtcattatatgctcttacgtggcttttcttttagccaataattcaaaaccaacagaagaaaagaagaacacaaattgttcttctcagattattatttattatctaaacaaaacaagagtcaagtcacctccacaccaaaatgttgaacaacatttacgtttccatcatctttttatggaaacttttcccacatactcctctctattaatattattacaactcaggaactatgtcggctagttcctctccttaaataacatttcctcttttttatatatgttactccgataatcatatcagagatgtgaatttacttgtatcttatatataacaagaccgaatgatttagcaagaacagcttaatgctgaattaccaaaacactttgccttgtgtttc

SEQ ID NO: 40614 - DNA, 1290 bp, Arabidopsis thaliana columbia
ctagtaaccgtatatcacgagacatttttggttttatacaatcttatataagttaggttgtttagatatatctaatattggtagtgttcttatatatcttactctgaacataaatattaaaattaatttttgttgataaaaatatattataaggaattttcggagtattttgacatcactgcctataaaggtatatatcaagtaactaatatagttctccctaatacttttcttctacttatatacctaaatgacgaccaaatatttcaaagttgatttcaattttatctgaccaataagaaatcttttctgactcgttttcttaaaaatattttttaaaaagagtgtctttctctctcaggcacggacatcgaagcacctcttccgttcacgtattccgatatcggcgtacgttttgttcgccggtgtcgagaaatatctagtttcacccttcatcactttgtttttaattttcttgtcttcattttcacgattttttcccccaatttgtttatttttcttcaaatttctccaactttctcgaactcactagatccatacgttttctcaataaccagcgaccaaggacaaaagtattttctggcgaactccctcctcctcgctttgctcgcaacctccttgacggcggaccagaagaccaccgccgaagactattttggatctggacttttgttcactcttggaaactcttcaacatggacttcgttgatggcaagagttctctctcttggaccatcagatgtgccattctcgatgtttttcgacgacgcatggtgattccttattcagagtgataaatccttctcaaaaacccatgttttatttgttcaccgcctccgccgcagataatgtcaatagctttctaccaacgaatcttattacattgaaggagcataattcatcgcaaatctatccttctgctttgatcaactgctgcactctctttccaccttggtcagcaatcacgaaattagggtttcacctaaagggatttgtccctagattcggcacattaacacgtgtgaagcccaagcccaacaacgttatattcaggtctgtttcaatttgtattttgacaatctttggtcgacattatgctcttgatggtcgacgactccatctcagaactaattcaccttcgttgatatagattaacaagtatcttttgagaactctggcttatgattcatctatggttgcgacctttgttcccaaatccaatttgttggatgaatgaatgttatcatggaaaatctatgcctaagtttc

SEQ ID NO: 40615 - DNA, 479 bp, Arabidopsis thaliana columbia
ctagccacggggtttacgaccaaaagcaatacataaataataatcagggagatccatgaacttatatatacaaagagtgaggacacgagaagcaatatgtgtcaatgtgtggaagaatgtctccatcattaacctaattatattatatttttatgttttataattttaatggtcttctccgcttggtagttttagccttacagccattaactatcgtaaattagggtactaatacttgttattttttttggtaaaaggtgaaattttatactatttttagtttgtgatagaattacagagaaaactagaaacagattaaagcaatctacgtaaatataaaaacaacattacaactcaagatgcaaaggatcactactaagtggtcaaagccaaattgcaaaaagaaacaccgattccgaacccgcgaagtctagaaaattgtgtggttgcccaaaaccgaagaactggaatcatcatct

SEQ ID NO: 40616 - DNA, 146 bp, Arabidopsis thaliana columbia
atcccctcattagtgttcggaaacgtcgtccttgaatctcagtttttggggacaactcctcgaatatatgccgctgacatgctgtcttattctttacgccccagtccttatgtcactctctctgcccccttaaatgatttaagagg

SEQ ID NO: 40617 - DNA, 605 bp, Arabidopsis thaliana columbia
  unsure (1)..(605): unsure at all n locations
taagtcttaaaaggtattaagtgtctttggaaagacattcatctcttcttggttctttaaattctttttattgttattttatatttaaagatcttctatttttataaccaatggagatggtcttaagattatgctcaacttctggtgggatattattatcccaaatagaaagtcatatgtggcttgatttcaaattcaataagctcataaatcactcccagcttaatttttgttgggtaaggaagatatattcatttgtatctggttaggacacagtttagtgaataaattaccttatgatgtataataagttatagtacaagttaatcatgtaaatcctaacaatagatcacctacagatgaagaaaccatgatgagtcgagtttgagctacctttcttagtggatttttgaacacattcaagtcaagactcaaagttttgtttggaacatgaactcgtaaattttgtagtggcctttacaatttttaagctcttccgttcacaaagttgagagcttaaacgataaaaaacttaaaaattttaaaaaaagttgggagggagaacttgaaaattanaaaaagttaagagtctctcttatgaatga

SEQ ID NO: 40618 - DNA, 562 bp, Arabidopsis thaliana columbia
gggtaccgagctcgaattctttgacttgagtgttgttaaatctcgttggctttactgttgcttcataaatctctcatagaaagtgtgctttatatgatttttatacactatattgtgtaatgatgattttggcaggtgcataatgtctaaacacaatctagtggctcaatctaagattacattgcctactactagatacggggaagaagattgcaagatattgggatcaatcaacaatcattcaaaatttagttacttgaagattattaaagaaatcctctctaactcgttattcagtaggctggaaactacttttcttggcccaatcatcaaagcgggtttaagaaaagcaggtggtaatcaaaaaggacctaatggcttgggtttttctggtcagttggttcgctttctggtagtaagacaacttgtgtcgtcaagggaagacgggatttggttttgctatcaacaacaagccgatgagattctcattgactgagttcatcttgtcacgggataccatgctggataaaagaagatgaagtccagtagattttgagtgtga

SEQ ID NO: 40619 - DNA, 550 bp, Arabidopsis thaliana columbia
ggatgtctggttatttctgtcctctagcactagtgttaataaacaactacttgagatcgttggtagtgatgtgaaaaagatcgttgatgaagtatcatgtagattatattacaggttgtaactttgagtgtctgtacttaggatttgatagtaaagtgaaggtgaagtatttgaatcgagtgttgtgtgaatgttaaatcttgttgactttactgttgcttcataaatctctaatagaaagtttcctttatatgaattttatagactatgttgtgtattgatgattttggcaggtgcataatgtctgaacacaatctaatggctcagtctatgattacaatgcctcctactagatatgggaaataagattgcaaaataagaggatcaatcaacaatcattcaaaatttagttatttgaagactgttaaagaaattctctctgactcgttattcactaggctgaaaactacttttcttggcccgatcatcaaaggggtttaggaaaagtagttggtaataaaaaaaagagttgattgcttgggttttttgg

SEQ ID NO: 40620 - DNA, 476 bp, Arabidopsis thaliana columbia
cctttacgagaaatcccaggatcttcaccttcccatctgatatctcccggagatatatctgatatatatatatatcgagaacatccagactcatatgtagccaagtatcctacgaatgagaagagctcttaaaacatacttctgcacaaaagtttatatatatatataaagaacattcagaattatatataatgtagaggatcgagcactaatcatacacttttgtcctctgccccttacagatggcaatcaagaaactgaaccattagatgagaaactaatggatgggtgagggcaactaacaattgtttttaacatcattcatgatccaacttgggtggcagcgaacaagtaaaactaatctctcacttctagtgtgcagaatcgaaatgaattgcagttggtataaaaactgacaagcctctcattgacgtgcaaggaatgtcgaatataaaccatcgagatcataaccaaag

SEQ ID NO: 40621 - DNA, 1144 bp, Arabidopsis thaliana columbia
  unsure (1)..(1144): unsure at all n locations
atagagccgtcaaatcaatggataataaaatgatcaatccaacaaaaaaagggagtatgaaaaacaaagacaaaaacaaaaaaaaatacaatatccaatcaaatcacgtgattttcccacacattccaacaattagaaagaaaaaaatcagttaagttttaccccaacaacccgcaggttttatttcaacgattatatataagtacaacaatagtgtacctaaatgtttacgttatttgcccaataattctatactcttctcttgttgcctcagtatactctttgttctttagtcaataaaccccttgaccatgtcccatagctgcaccatttgatgacgtgtcccatgcgtcatctgttataaactgcatccacgaatcgtctttatcatcgactacttcttcaacgcaggcggaggaaactcccacctccggcgacattgtctcataatcattattataattgttgttgttattcgaattgatctcctccattgacgccgttgtgaagctacattgtcccgtttgcaattgccgttctgattccaactccgaacatattccgttctttttgaatacccgacacaatgcatacgagtcctgcagcaaaccatttatattttcaatcttagaatgtttaaatatacttgaataaatatcttctggtattcattcgagtatatgaaagtcataagtaaataaaagaacatgcatgcatgagtatgagtgataaaaaaaaaagaacatgaatatttgtcttatataatgaacaattaatgaataagatatagcttttcttgaagaaaaaaataattctatatagcttttgtcttcgtcgcagtaaagatccaaagcgaaaccctaagcttttgtcagcttacagcaagaaacgaatatgtatcattaaatcagggtaatcttaaaaagtatatgaaaattcacacatatctttctattaacgtatctactataagaaatggagaaatctcaagttggttactttttttttgttgttgttgtntagtagccatgcatctctacgtaattatcttttttgtntctatataagttacaatttgatcatattagtaactatatatttactaattactatcatttggtaaatagatactgagtgatgaaag

SEQ ID NO: 40622 - DNA, 616 bp, Arabidopsis thaliana
atgaaacaaacaagttagttgcagttttttttaatcaaacaaaaaaacaaaatttatttatcttgaaaacaatttattatatattatttatattaaaaaaatgaaaaataaaaagagttataaagtttgtgtttgagataatctctctggtttgtttggttcttgtttctgtatacatcattactaaagagaaaaacaagatgtttatttattacgatggtcttgtccgtacctgattatagcatctctctctatctctctcttcttcttctacgatctgatcagccattaaagctttttcccccttcactattatacctcttttgaagtgaaacaaaatcataaaagtcgaaactttactgtttcctctgcaaatttaaactctaatctctctctctctctctatctctttcacttcgctttctctatttcccctgaaaccgttcttgtctctctctctctctctctctctcttcttctctgctcaagacaagaacttgatgttcatgtcttgaaacttaacaaagtattgatctttccttttaagtaaagaatttgggggttacacaacttcgtctagatggagcaagagaaaagcttggatccacaactatgg

SEQ ID NO: 40623 - DNA, 536 bp, Arabidopsis thaliana columbia
tgaattagtttttcattttctggttatccaactatttttgtaaaatttcttaaatataacccattacaagacacttttctttctggtttggctcgaaatttcaccgattcaaatctaaatctttagtacgtaaaccggtctacattaaataaaccaatccatatactgtaattaaagttacacaagtaaaccggatccaacctaagaccatctctattgggggtatctcataagagtttctcataattaaaaaaataaaaataatgaaaatgaaggaaagagagtgtagaaagtttctcacttgaaaaactctgagatactctttacaacccattgtgacaattctcatcttactattggtttaattttttaacaagaatcgtttttttaatcaaataatcaaattataatataatattgaacttaaaaagttcgagaaattttgtgggtttatcatggatggaaatgccctatgctttgaccttacacacatccccgtgattggtgtggacgtacatcggcgcgtgaactccact

SEQ ID NO: 40624 - DNA, 476 bp, Arabidopsis thaliana columbia
  unsure (1)..(476): unsure at all n locations
agaaggagagaaaatgtagaaagtttctcacttgaaaaattttgagatattctctacaacccatcatgacaattctcatctcactattgattcaattttttaacaaaattacttttttaatcaaataattaaattataatataatattaatatctcccttgttttagaaactttgtaggtttctcatggatggagatgcctttactcgtacttagcaatatgtataatttgcattaacataatatttttcagcaaaaagtaaagcacatgtttattcgaaaatatgtgcaatatataagagcttctactaaaaagtgaaaactcgatctacgcccatcttcaagaattcagcaaatatattttcttttccaccgaacacatcctttaaattgataaataataatctttttgganaaaggtgagacaaattccatttaaaatcaatttataatattttactattagagctaaaagtt

SEQ ID NO: 40625 - DNA, 686 bp, Arabidopsis thaliana columbia
ctcttcaccactcttaatcctcttgatacttctaacaatcaactttggtccatttccattaccactgttcaaactagtaccacaaacttgttcctgcaattctaagtttgacgatgtttctgtgttggtgacatgaacatcatgatacgacgtcctgttgttgacgaaacggtaacaagagtttggagagcagctatggttaatccaagagaagcttgaattatagagagcgattccaagagctagtccgttgctatcgtgcacctcaacggcgtttgttagcacagcacatatagctgcttcttccaactctgtgtttttccggtttgatctaataacggtggctatgaagttggcggcgtggtgaatagcgacggagatggaaggatcagccatgaggaggtggtgattagtgagaaggttgttaagacggtggggagatgaggaagtgtcgacggcggtggaattgaggagatggagagatgtacggatgtcggaggggaggattggtgttatctccggtgggaattgaggggaattggtgaatgaatcggtgagggagcatgcggcggacgagtagagaggttgcggcggagatggggggagaagggagaagcaggaggagcagtgagaggagaggaatgagtcgtagagagaggaagcgagtggagagagtgcggaaatag

SEQ ID NO: 40626 - DNA, 858 bp, Arabidopsis thaliana columbia
tcgaaagtttctcacttgagaaactctgagatattctctacaacccatcatgacaagtctcatcttattattggttcaattttttaacaaaaatacttttttaatcaaataattaaattataatataatattaatactttggttgtttgagaaactttgtgggtttttcatggatggagatgccctaaaggtccttaaaagttctctgttacaactaattaatgatgacaaaacctatcgtaactgatagcatgcatgaacacacttgtttaattgtaatattacgtgggtccaaacaaattggctaggtttaataagaaattggcattacataaaaaaaaaaaattttcgtcaactacattacataaagatatgccaatcaaaccacgtattatttgctaatgatagtacgtggatccaatctaattgctagctttaggttcaatgaaaaattgaaagttttaccaaatatacttaaacttgatataatatatacaaagaaaaactaatgatgtatatctcactaatcactacatttgctaataaatctcttgggggttgatcgctcaacaaaaaaggacagaaataaactgattttacctttatcatcatatatgcatgtaataaatttgctgtgatctacatacattcataacatatgtgtgtagtatctatgcatatatatccaaagtaattgcttatgtgatgagcatcccattctctcattagttcacaagtcatgccttcactagcagaagagatatgtattggtaacttaggcagtctccaaacactccctcgagtcgttcacctggaaactcacagccgccgactcccttctgcgtccctcctccgccg

SEQ ID NO: 40627 - DNA, 500 bp, Arabidopsis thaliana columbia
  unsure (1)..(500): unsure at all n locations
tcaatcatcctcccgattccgtaagtttcggttttgaatcgtttcttctcctctgccactatcgtcttcttctcggttttctatatcgttttagtttctttcaccgtcgtttcttttctctcccacgctcatccaattttcttcccctaaagaaccggaatttaggtcagttatcatcctcgaagctttctttctttcttttggttctaattatatatagacgaactagtaaagtttcgtttttgcagtgtctgtgtgtgatggagtccagtagagtagtagtgggtggtgggctgcccttggcgaataggaggaactctagctttgccaaacccagaatcctacaagggacttttctatctctatctcggatcaataatgtctctgcccccaaaaatgctcccttcacaccaatccaaaccccatgntcccttttgttacttcgcgcaagagccagactaaccctgattgcggtgtcgtcaagttgggggaagaagatg

SEQ ID NO: 40628 - DNA, 803 bp, Arabidopsis thaliana columbia
ctgaatgagagtagatctgtatccacttggtggctttaaagtctttccttggttattacttactctcattatggtttcgttttttatatatacattttcatcgatttagttttgaatatgtgaaatttgtttagaaagactatatttttgtttctgggtagtaattaagtctaagaaacgtttggaggacatgaagagtttgttcatgagaaaaaagtagatctaagcatgtgatatactagtaaacaaacaagataaagaaaacagagtctcttttttcagtggtggagctagctacgtctcaataaagtccaaacctacttgtacaatgttttgtcttctctttttttggttactagtaagaatttatttggtggtatttagaaaaaataaatatgactttaatcaaatctgttacttaacacgaagttcggattttttttttggttgtacctttccgtggtacgtttaacttctctgtctttagcaaccaacaaaaaagaacacatcttttgtgcagacgtaacttcttttctgtgtttcttgggacaataatttgaatcttttttattaaaatgctacttttacataactttggactgtatttacgcgaccaagcctcgatttttacgccgggaagtgaggggaatctttcggcgcgtgtgtttcacgtcgccatcacgttggtcggtggtggcggtcccacttcaccaccgctatttccccccgccaaaaatatttcattgtcaccgaactagtcaacgactttttccaactattgtacttatgaaacagagtagatt

SEQ ID NO: 40629 - DNA, 643 bp, Arabidopsis thaliana columbia
cgtagttagacacgtgtcctaatttaattcgatgtcaaaataaattaggataccgctgccacatccagttccatgtgaaccacgatgcacagtagtatttccttttagagcaatctaaagaatgacgtggcgtagtatgatttgttaagatttacctgattacggtgaacttgcacgtaccagatcgtaactactctccgttccaacctgtgttttcttttcttcttggaagctcccttccctctctttctctctcctccgagaaaggaaaagcaccacttctctctctaagaccccatttttcggtgaaggtttatgcgcttttcttcttcaacgagacgactaaaatacgtatacatgcgtatgttgatgtatgcataagtgttgttgtgtgttggagatttagaagagaaggtttgtttgtgaatttgtgtctctgaggttggtttttccagtttattcttctcaatgatccgaattggggttgaatcgaaaaccttagtagacttcgtctgtgatgactcttgatactagtggatggctcgatttcaatttgctgcgtcttcgtcttggtcgctcttgcggttttggccgtaaaccctagttcaagctatcgatttaccattgtggaacagaaatcggg

SEQ ID NO: 40630 - DNA, 672 bp, Arabidopsis thaliana
cgtgaaatgtagcaaaagagcagtccataagacatggacaacaacaaaattgcatgactataaagaaccaaagaagaaaaaaaagccctataattaaaaaaaaaaagaaagaaaaaccaaataagagctaactaatacttaacatggcaagtgtaacgaataagtggaacgaagaaaggatcggtgaagaagcccaaaatgacatcggtacattcatgtctcatgttgacaataaggttgcagcaatagtcactaacaagaaaccctcttctgtagtaacttacttccatctgttgcttacatattgccgacggtccaaattcgctaatgcagttcgcgaaatgcacccacggatcctgataactaggcgacggagttgttggtggtggtggagacttcttgggagttggacgcggaggtgatggtttaggagatggtggagttgttgatggtttaggagtcggcggagatggtttacgacgtggaggagatggtttaggaggtggctgagatggtttgggaggtggcggagacttcttaggagttggtggtggcgttgatggtttaggaggagatggagatggtttaggaggcggtggagattttttaggacttggtggcggtgacgagggtttgggaggagagggaggagacttcttaggtgttggtgga

SEQ ID NO: 40631 - DNA, 961 bp, Arabidopsis thaliana columbia
gagaattatcccaagtgattcctgctcaccttttggacctgagctgtcaatcgggtcatggaactcttcaatttacaaacccttagcaagttacggctagttaactacaaaacgaaacggtgctcatcgactgaaatagagttaaatgtggttagagatggatcagtgaggacaataatttcgaagttagctaccttcaaggtaagttcatccaaagcaggataagcagacttctctaattctattgtccttgcagctaggaagctacaaatagcttccaaagcaacctctagtgcccgaaattcaaacgcggattctatatagtatcaagcaatcatattaataccaaaagtaaaaagagtgacaagtttttcttacgatatttatagaacataggtatcaaaaagatcaagaataaatcaagaattgagttctaaaaatgactaaggtcaagggctaccatcttcttcaaccacatcaccatctaattgaccaccgtgtgccttgtttccaacagataagcgtgtctgaaactcctccagggttggaataagattttcatctgacgaatcctgaatcaaaacctgtaaacatttgaaataactaacccaatccatcatcacttctgaaggagagaaaaagcttcaactattacataagatcagctagcatgatgaaacctgtttaaagttaagcacactgacacctaatgctctaagcagtctataatgcaaacaagatcaaaaccccaccgagattatgaccaatttaacacagtagctatgagccaaatctaacaagtttaatgtttgcccaagtcaatcaaagtacactgagactgacctctttggcagtgatgatcgccttgatatgctacaaaggaccgaaacacacaggaactaatcaaacatgattaaccaacaaagctgtgaaaactatgaaaaacagaggagaacacaaa

SEQ ID NO: 40632 - DNA, 536 bp, Arabidopsis thaliana columbia
tagtaacgtgcgccagtgtgctctaaagtatcagcctgctcaacattccacgtgccgcgtataaaccattcgcagggaatgctggaatgccgcacacgcaaagtatccaattacgtcaacagcatctgagagacaatttatattaaagtcttctttgtcttcttctcttagctgcatgtaatctgcagggatctgactggaagatcatgggcttcaccaacctcgcgctgaccctcggcctcctggcaccacccgtacgcccttaccctaacaactagtattgacaagacctctaattcagtgcctgaacacgtgcagtctcctccccagcacacgctcagaatcccaccggaaccctctacactgacaaggccacaaatatcaccttctccacctggtctatcccggcctcgcagtcatccgagtcgcaggccagccccttaacattcggcctcaccctcccctcaaaggctctcgaaacggacgcgactgacttaatcggatatctcactgctcatccctaccggctggtgcgg

SEQ ID NO: 40633 - DNA, 1405 bp, Arabidopsis thaliana columbia
caataagacacatacttgctcatgatgtaagaacatatcgccaggaaaggagacctcattttaattaaccagaaagaactttcgaaaaaggtttttttaaaaactgatattctctatactttaacaatctctctcataaatcacttcatcaaaaatctaatatttacgaatcaaaggactggtgagaaaacagaaaatgtaataaacaatcaaccggagagatctaaatctctctcacgaccaccggccaattaacttcttatttaagctaggtacaacagtttttttgacaaattcaagaaaaatcatatattaacggaaccagatggaactttttttattactgtcatattgtcgtctttttttgtatatccagcgtgttcctactaaacattaccggaaaaaaacgtaattacaaggaatgtcattgccacgtcagaaattgctgacgtggattaaatgaactcagccgtaacgcgatacagcggcagttacggctgagttacggtatgttgcggctgacatacgacaaaaatatatgagtcataaccaaaatatatgagtcatgacaaaacggcgaagtatgagtataactcagccacacattactgctgatttgtaaaatgttgcctgagttatacaataacccagacaacgatatggctgagttaaggaatgttgtcccagttataagtatttatagcataacccagacaacgtgatggctgatttatgagaaaacggctgacttatatcctcgtgacggctgagttatatttcgggacggcttagttatgggatgatgttgcggctgagttattatcgagtgttacaaatcagccgtaaagagctgaatttccaaataactcggccttgttatgactgacttatgtgcaaaagattaattactataatagcatgcagttagggccgagattttaaacgatacggctgagttagttgagttacgacattacacggctgacttaactttgttttcttcctttttaataactgtaatagtattcatgttgcgactgacttatagatttgcttgatggctgagttatcaaatgttcgtttggtggcttacttgccacctcatcacttcaaaacgacgtcggctgtaatattccatgtcatcattccatgtcagcatcatcaacggaaatacgaaacgtcccttgcttcgttaactcgtcttcccagtctgtgtttaacgcctgagcgttacaacatcaccggaacttctatctaatcattgttttcttcattcatcttctcattcatcttcaatttctttcatatttctctcgatatggttgatcccgttttggtcatagttgtttccgatatttgggttaagaaacagtgattcgtactaccccgacgaaagagggtgtag

SEQ ID NO: 40634 - DNA, 468 bp, Arabidopsis thaliana columbia
tagaggatcaaccttccctcacgaagtttaccaagtaatgactctttgtatgataataccctccctttatcattcttcttagtactttttcccttgggatatacattagtccaagactccgtcacagcgttttgatcgttcatcaaaagattaatagaggcgttaaggtgggcgagaacatccagattgttgttgtctaaacttgacagaccaagagaagctagatgactgttgagctgctcaatgtccagagatctcaaagccatataatgaactaagtttgttgcacattccagatacttactgcaacagacggtactaggaaattaggcgaaaaataagtaatgcaaactatatataaaatggttaacaaacctgtcacataagtgtagttgagaagcattccatttctctgctgctaagagatgtgaccgaagagcattcagtttttggataacactagccaca

SEQ ID NO: 40635 - DNA, 1024 bp, Arabidopsis thaliana columbia
aaatgtatcatttctaaaactcactgaagtttttcatttctgtttccactctccaaaaagagagtatatctccaccatacctacatcatacctaaagaaagcaacaaccaaatacaatgaacaaactacaagatccttcagaattcgtaaatcatctacttatccacagttccagttacaagtctcatctacttatcaattactatgtattttgtatacttggctatagtctatggtctcatctacaatcactaacgatgaaagtatatgtttcgtttgatcctacaggcaacacacaattacatttcaaacaccaacaaaagtatacaacctacatatagtataaaaacacaaaaaaatatacaaaatattcatatcattcggaagaaaataacctcacaaatagataaacataagatttctaatgcaatcaagccgaacaatgaaaaaggtaaaagatgaacaatgacacatcggaattctttgtggtgaatcaatgaacgcatctacaattcgcctaattccacaatagaaagccataattcaacaataatcgcagagtctgagaatagaagcttcgtcgtcaacactctccgccggcagctctctgcaattgtactgcaattctcctaattccacaatttgcctaattcctcaatagaagctttgtcgccagctctctccgccggtaactgtctccatcattggtagctctctacatcgccagcagctctctacgtcgccggcaattctctctgccgtcgtcatctctcttcgtcgttagatctcttcccaaaagttttgagttttgtttatttgtttactattttttttgtgtgcaaagacctgtttcattcaatcaaccggaataggagtgtacaaagcttagagttttagccaatgataaaggaagattactatcatagctaaaaggcaatataaaggatagatagttcagcaacgtatccaaaaggaattggagacatgggcaatatagcaccaagtcacatgcgagtccaaggga

SEQ ID NO: 40636 - DNA, 575 bp, Arabidopsis thaliana columbia
taacggccgccagtgtgctctaaagctttagacaggaggaggcatgctcttccaccggtagactcatatatatcatgtatgatgccctcaccccacccaacgcctcaattgcttctggtggaggtggctgcctttactctcaaacgtcaggaccgccacatcagacttgggaactggccggtatggtctatccacagttggagttgcactctaaaagcatttcagagcggcccctgtccgcgtgcttgtctgtgattttctgaaaagctgtgagagtggcgcgtatgacatattacaggtccacctgtcttcttgagctctcatgacgcttctagaatgtgtcactcacctgtcgctgccgctgcacccagcctgcgtcctgtgtttttaccagccaatgcaagataggcagcttttcaagcaactcggcctcaatgtcaggtatttactagagattattaagtatccttttatatatgaccgtagattgcgcgtagtcacgtcccttaagggaaatgggagcctttgtatgggcgcagtaggccgagtaggccgacgtttgaatgaggcttgat

SEQ ID NO: 40637 - DNA, 1403 bp, Arabidopsis thaliana columbia
gatcccaataatttttacgagattacgtttttcactaccgcatagctctccattggatcctcgaagcatagctctctccattgtagaccctgcttcccgagtccttcatatcctctgttttttcttcataaatcaatacgccaggtttcgtttttaaccaaatctcttctcttcatggttactgtcatgtgaggacaagtctgaatgtgattgcttcttcaattaaaatgtgtttactatttcaaaatacctttgttgtgaatttgaatgtcacagtttccgcttcatagacgattgatttttgaatacaaaagtgggaaaagaatcaaaagctcttggttttgctcattccaattcctacttggttcttcaagataccttaaacgttaacaactatgtcgtagtgacaatgtttatctgatttcctagattataagagttgtagttggtaatagactaagaaaagcttttacatcttttggtcaaaaggtttgatttttagtgctatatattgcagctcaattccatggcgcctagatggaaatggaaaggagctgaagcaaaagctcttgcagaacctatttcaaaaatcagtctcagagctccagctctctctagccgaaacagagtcctcgggaaccctctcaagttgcaatgtgcttctagcggttgagccagagcaagctgagcttcttgaccgttgttgttttggcagactcgttctatcggcagagaaaatcaagaaatggattcagttatcttttgaagaagctttctttttgcattacaatctcaaatgcatcaaaatctcacttcaaggtcgttgcttggagaatgaagtagacacatggctctacatgaaatcaaaaagaccaaactttccaatgtttttcaaagcttattcacatttacgatcgaagaactgggttttgagatcagggttgcaatacggtgtggattttgtggataccgtcaccatccatctcttgtccactctgaatactcggttttagttcagtctggtgacagtgatcggttaagagtgtggtcagatatccattgtgctgttaggttaagcggaagtgttgcgaaaacgttgttgactctctacgttaatggtaacttcaaaggagaggatgtgaatctacttgtatgtttggagaacttcacagtggaagaacaaacgataagtagatggagcccagaactcagtcgtgaagatcaatccacaaattcaaaacaacatgttcccaacgtgagtaatttgaacactctttgaggaaccattctcggtaactcatgtctggtttgaatttttcatatcaactttaaattaatttctactctatataaagatgagtagcatttctttcaactaatctgcaagaacaatcatcatcatg

SEQ ID NO: 40638 - DNA, 649 bp, Arabidopsis thaliana columbia
  unsure (1)..(649): unsure at all n locations
tggatgtagcaaaaagctcaatcctggaaaacagaagatacaggctctattacaactctaatgcacataatcatcaagtctgttctagtggggaagttaaataagaatacctgtgcgtgaaaacataaatgaaagaattatgttcccaataaacattgcgatatcagtaaagacatccataatatctccaactttagaatgcaattcaggcattgagagaagcgctgctgacaaaggaagaaaaccccgctcctgtgcattgtcagacgctttaggtaaggtttattaattaccgctaaaaaaaattgatttcagtgacagaataagaagtgaaaaagatacttccattctgacacacagcatatttagcaactaaaatagtgcataaatgtctaagtcaaaagactaatttaatcaaatgatttaccttcagaagtgccaatatgtgcgaatcaattccagagctataaaagggacatgtccatgaagaagttagtttacttgtggctttgtatgacaccacccttcagaatgatcagaaaccanacttctttctgcgtaggctgatggtgagggatctcactgatcaagtgcttcataggtctgaatgatagcacagtacacagtagatgtaaatgtggttctgatg

SEQ ID NO: 40639 - DNA, 718 bp, Arabidopsis thaliana columbia
tctgccacgccttgtgatatctccgggtcaagatgataaagacgtcgccaaggagaaaccgagggttggtgttgttgatgctcgtgctgatgctcgtgccagatggccgattcctccacatcaacccgatcaaggtagatttctcgttgattcgatttaggatttatgaattcgaaaattcaacttagatgatgatgattcagaggatcttaatgatcaggaggtgtttgttgttttgtcttttagggaaaaaagttcagtggagtcaatcaaaatctcaacgagtgcctgcaaattcaaatccaggggtagaggtgaatgtcttcttctatgtttgtttttcaaattcttggaaaattttatattgctgattcgttttttttgttgttcttgtgaatgcagagtactcatgtaggtcttgccaaggaaacacaatctccacgttttcaggcgatattgcgtgtcacaagtggaaggaagaagaaagctcatgacattaagagcttctctcatgaacttaattctaaaggtgtgcgaccttttcccgtgtggagatctcgcgcagttggtcacatggaggttagtgttggttgatgcttcttctcacctctgataagttctgctcatttggttgatcaatctgtggacgttttcaggagattatggcggcgatcagacgaagtttgataagcaaaggagatgtgatgctgattaggag

SEQ ID NO: 40640 - DNA, 865 bp, Arabidopsis thaliana
cactaattaagcacacatgtgagatttagattgagattgagttcgacagagaaaacactttcctcacaacacagtcaagatttaccgagaaagaagaaaactttaatttgtattaatcaactggagacctaaacgtttttgtatagttttattcagaacaatttagaagaaagaattaatcaagaaaaatattagcagaggaagaaggagcttctcaagaacttgaccctcaattccagaattacacaaattcatcatcatcatcatcatcatctctgcagattctgtaaaagcaacaatgaatcagaatctctcaaactaaaaaagtctcaagcttttcaaatccgtgatgatgatgatgattgatgattataccttggtttattctggaaccttatatgcatcatgtgtcacttcagtcaaatacaaccctggaaacaaactctgcaaagaacaaaaagaatccaaatttcagtttcaacaaaaatctaacaaaaaaatttcaaatcgttcaccaaattgcaaaatctaaaagacttacatcgagttttttctgaacagttttggaccgtttcttgggccgacgcggtgctcggtgacctaccatcccaatgaaatcttcttccatctccttcttcgatagcttcatagagaacataggacgcttcttctccgcttcgaccactccgccgccgcctctcaccggagatggattcttcactaccttctcctcaatcacaattcctttattgatcaaactgttggattccggttctttacacgctgctgctcttcttttccttagattcacggcttcaccggtagaatcatctccttctcttgaccgggaacagaaccaggacca

SEQ ID NO: 40641 - DNA, 597 bp, Arabidopsis thaliana columbia
taacggccgccagtgtgctctaaagcaggcgccagggcaaaacccgggatccacgctgatccatcatctggatgaatgtcaccatatcggtggttcaggacgggatagtgtaccacatcccgttagtcgccccggagcgctcaagggtcatcttcttgcccagtgcagggtttatacgtagtgagtggaacaaccataggtaatcatatcgtccacccatgcacgacggtgatggtctatgcttgcgttttctccgcgctagccagtgccaccctgctatacggaaagacacggatccgcgagcacgcgcctgccacctagtctatgtacgtttcaatttccaccgttagccaagtcgagttagcgacgtaggaaggcccagcactctgacaaaatgcgagttttgaaagcctgaagctccgttcctaacagtctagagatgaggagcgtaccttgttagccacacgacatttgatccgcagaatgcacatagaaccagataccaataatgggcgttcaagactcgcaaacccttccatattgggcgcatattcccgcaaatgcacatctgaaagccgatgggctaggcaaattggc

SEQ ID NO: 40642 - DNA, 632 bp, Arabidopsis thaliana columbia
attaacggccgccagtgtgctctaaagctttagagcgccttcttggttatgacggcgaatagctgctggttcaccggaagggagatcttcaagtcagcaatgaaatccctgagagcgaccaaccacgccgtcgcaaccattgacattcccaaagctagagccgccaaccacagctgaagctggttgctcgcgcccgcatcgcgcgcctcaaacagtcgcaggatagtgagtaaaaggagattcggtaagaagccagcgacacgattacagagctggaccgtgacttgcagggcaacagatcgccagtacagtttaagccactttcgccactgaactgaggttggatcggtggagaaaaatctgtcggagagagtttgtgcgcgcacgtcatcggcgacgagcggcaggtcttctgggttgaggcgcccgttcttggctgcgagggatagggttcgatatgcccaagagaaagtataccggtcgatgaatgatatggagtcccgtgcgtcgattacctggccgtcgcggtatttcagtggtcccgtggaaggctgaggtttacgaccagaaggaccagtgcagcgacgagttgaacagcgttcaatgcatggcggttgccgacagaacgagat

SEQ ID NO: 40643 - DNA, 622 bp, Arabidopsis thaliana columbia
tagtaacggtccgccagtgtgctctaaaggaaaggggttccgagaattggtgcagttatttttgcagcactcgctccaggcgcttttgtgaagattgcggaaacagaagatgacggtaaaaccggggaaagactgatgttggaggcttcgcgccaggagttcagagaagatgtccttgagaagacagaacaacgaatagggctcgggggccctgttgtagcttactggacatattatgtctacgacacaatagcgactggctttcgtttcgtccacctagtcatcatcttcctacctgtcatcctgacggcgcctacgatatggcttggaaggcgcatcaagaataacgacggggctcgcacaggcaccttgtggtggtatagttttcttgttagggccatggagcgcgcaggtcctgcttttatcaaggtaaatacttttgactatattattcaaaacctgctgacttcgtagcttgggcaatgggccgcatcacgtactgatattttcttcccgaaatgtgcgaaatcatgtcgtcattacactcgaatgctccggccattcgttacatgaaacaaagcggataatagaaaaggcgttcagtggaatgccctttgaggat

SEQ ID NO: 40644 - DNA, 1909 bp, Arabidopsis thaliana
gcatgtagtacctcagggagatttcagatctaagacttgatttgattaatcagaaatcgtaatcccaaatccgaagcaacacgaatcgaatcgtcgacattgcatcaccaacaatgagagtttatggtatcacagattcaaaacgaaaattgggagatgaggatccgaaaaacgcaaacctgtcggcagattcctgaacttcttcagcagcgggaaagaaaggatctttctcccaccgatccaaactcgtcgtcatcacttgagcagatgaaaaaaaacaaactaatttcctaatccttggaagatgagaagaaacccagaaatggaggaaaatggagaagatggatggatcgagaaagatttcagagaagagagggaacgttcgttcatcgattagccaaattacggcctttcgttacacacacgtgcgaaaattagtactattaatgtttggtttattcaatgtggttctcaataaaccggtccataatctctaattctcttcattttggttaacgctttatttatgacagcataattaccaaaagaactagtaatcgaaagtatgattaaaggaaaaaaatatgccatgatcctacttttgattacttatgacttatctatcaattttattcatgttataatcattttattacagtttcataattcattgtttcctctggaacatatgtgtgataaccaatatgttcaaatcagatcaatggattggtacacgagtcactccttgttttcttttatttaagaaaaaacttgagactgcaaaatgaataataatgaaaaaatgcagcaaaaagtgtgggaaaaatcatgcgaatgagaaccatcacctgttacacctttctggtgagtcaccatatatgcacctctctctctctctactggcacgcccatgccaaccatcaccgttgtattatgtcccaagatatataaatagtggtgtgtgtttgtggctgtgtattattcaaacacacaagtccttttacttcctttttcagattctaagcaaacaaattgtgtcactaagcagccatcatggctagagtgatcttgtggtttcttgtttcctcgtatctttgtctcatcggtcatatgattgccgaggctgcaagagaaggtgcctccatgaggaaggaagcacactccagtgggattggaagagaaagtaagctcatgaggaatgaaaaacactccactgagattggaagagaaagtgcgtccatgaggaataaagcacgctcgagtgagattggaagagagagtaagctcatgaggaatgaagcacactccagtgagattggaaagagtatccgacacgtaaccggatttaagggtgaactcacagctggtggctacggcggtggaggcccgggatatggtggtggtggatacggtccaggtggcggcggtggtggtgttgtaatcggtggtggatttggtggaggtgccgggtatggttcaggtggtggtttgggttgggatggaggcaacggaggtggtggtccaggatacgggtcaggtggaggaggtattggtggtggaggaggtattggtggtggagtcatcattggcggtggtggtggaggatgcggaggttcatgcagcggaggcggtggtggtggaggaggatatggacacggcggagtcagcacgaagggatcaggcaaaaactagaaaaaacatgcagcttgctttaggtagtgaaaggaagaagaaataaggatgtactttagcatcttgatcatgtttaggagtttgtaatggcattagttttaatggaataagaacctttctacaaaaaaaaataaagaattggtcctatgtcttttcttggtttcaacatccgagcagattctattgtatacgcgatacaatagcgtcgatcttgaca

SEQ ID NO: 40645 - DNA, 601 bp, Arabidopsis thaliana columbia
  unsure (1)..(601): unsure at all n locations
gatcatcggtcgtccatctcgaaacggcaagcgaaatggtgtagccacgtggcgtctcaggacaccgtacgatctgacctccaaatttgtctctgtccacagccgtcggatacactttccgtagcttcgacgaaccggagaaaacgcaaatgagatcgtcttttgtaaataaccgacgagactgagggtattttaggaaaaccagagtttgttcaggtaatttcaccgcttcacgaatcgtaaccgccggagaagacgatatagactcacggaaaaccgcccttgccgtaacagccgttgagaagcttatcgtcgaacgaaccaccggacgaaacttccccttaaaaataaacatggtggagacgagaacgaaggagaagacaaacagaatcacgaaccaaaagaacgtccgccatgaaacaacgacgtctccgccgcaaccaccaccaagtttcctacgaactttcatctcctacgtcgccgaaatcgccggcgtaatggattagagaagaaattctgtnttaattttgttctgtttttctttactcccctgattcttttccggtcaaagtttctggttttggatgatgagaagagtttt

SEQ ID NO: 40646 - DNA, 615 bp, Arabidopsis thaliana columbia
attgtaaggcacacaacgtgattttccaaaaataaattttgcgcagccaaacgtttatctttgcgggtcgggtgttaaactagttaggcgaattctttcctgccgaatctgcccgggttttagtcactgggttgggccgaaattggcgaagcccaatttcaccccttaacaatattacaaactcttggttgagattatatgaataattcaccgatatcaaaggccaaaaaatggttctatcatgaaatcacttatcatggttactctttcttgaaaaaattattaatagaaataatcatagaacaaggaagaaaacttgagaaaaacattctatcaataatacataagctttgtatctcttagtcgacctccgaaccctacactaatttcaacctatgattaggactttgctgatttgcgggcaaatcggctgaacaaatggaatttccaaccacacatcgttgaatatacatgaatcatgactatattggtatggtacagacatatattaacgtatcaattgaaaatttggacgaatgtgatgtcaaaaagacaaaaacaaaatgaacaaacgtgagccgtttactctcaaattcctataaatgggcccataac

SEQ ID NO: 40647 - DNA, 1039 bp, Arabidopsis thaliana columbia
tagtaatttgccaaagaaaaatatatccagatgaattcgaatgggtcatatagaaaatagtaaacgcagatgtccaacgtagaagttggaacgtgggcactacgatacttattttcttatatcaaaattttactttggtttactttatttaatagattaataattctctcaagatgagtcttttcttcgttctaatcttaaaaccgtgttgaataacgtggttcgttattgtatacgttttttattcatatacaacgtctggtatggattggtgatgaaagcgtaataaagaacacattcgtatttgtcatttctttagcattcagatttgtaccgctaacactcaggaatcagggatataatactatacagtagtagatgtcacccaaaaaaaacgatgccgtcaaaaagattatatatatatacaatagtaatttttttttccccgctaatccaataaaacaataattgggaaaattatgacatattataatttactgtccttgattacataaatttcttctttttcagcaataaatctcacttaatattatgaagtatatcttatttaacatgtactatactttttggttcatgaagccaaaagtgatcaaagtacgagggcataataaaacccacaaactggaccaaccacatattgaggaaagaaacttagaaattggatttttatattttataaaattaacatctaaatgtaagatttaattctaatcattactttattacaaaaaatctccttatgttagtcaaaaaaatccataacaaaatgtgaataaatctacgtacatttataatgttaaaccttcttcctatctttttttttcccttctatcttatcttgtaaaaaattctataatattttttttggatacaacttcttgtacatacatatacagtcctgtcccagtttcttattataagtagtaataatttatgtcaccgtgttattctcgtcgattcctcgaaactgtgtcaacagtgacaaatattattttaataaaataaataaaaagaggat

SEQ ID NO: 40648 - DNA, 591 bp, Arabidopsis thaliana columbia
ggtccaccatttcctctgatcattagaagaagaagacgtgagggtaatataaagagaaacacctcattcatctacaaactttaataagtgaaatcattcgttcgtgttgctcttacacaaaaccctaattcagagaatatcctaaatcctggaatttcaattgaaaatagaacaaaagcaaaaaggctcacgatattgtggctgacgccggaagcgcctgaacaatggacctcgccgtgaggattcagcgatcggcggatatgtttgccggcgcgtcctcattttggagtgatcagatagggttttcgtcttctagatgagaaatgagttttgtttttgtttttatttttagatctctctctcaagtctcaacattttaagaaatttttacattttttaaaaagttgcataagattaacgtcactaaatttatatgagcattaacgcttaaactgcagcaaatttacacatcacaacccaaatgtgtaaatatcaatatgtaaaaatttctgcaaacgctctaaataaaaatactcaatatttaaaaacagaggtttattattggcaaaatacagtttcagacaagatctt

SEQ ID NO: 40649 - DNA, 612 bp, Arabidopsis thaliana columbia
taactcttccaccatgaaagtggaaacaataaataacactctgcaatgtctaataaccaaaaaagctgaattatcttcttctagctactaggatcatgtgtcattaagtatagaaataagcatcgtgccaagttcatacatcagcatcctacttatgcccattaattattgcattattagagttaccatgtgaaagttttatcttcttgagatgaattattgatcacatatataaaaggccctgcaaaatttatgacattgtcaatgtcttcttgcttttaaaggaaatagcactaatttcgtgcaggtgaaggaagtttcctgcgaaatttcctcaccctacgtaataattagttgaatgtgaaacaaaacattcttaacaaactactaatctttaagtaactcagaaatttgagagagcctgtctttaaactgacaccaataaaactattattaatctgtcatttcactattcatttgacataacagagcatgaaatatttcagtctgtgcttgtaatcttctaaattaaggttcacaagtttgattatcccaccataattcgtgtacaataataattagtactaaacacgttttaatattctatatgaa

SEQ ID NO: 40650 - DNA, 1226 bp, Arabidopsis thaliana columbia
ttgggacttgtaaaataaagaagatcttggggagaagaagacccaaccaattttaattttaatttttttttttacaattacagtttcgtatttttatgaaatggattttgtttccatcgacagatataaatgactggattttgtccggtttgtctctccaattttcaggagtatttgtattccaataaataatcttttactacgtgtaatgcaaacaacttcagtggtacaattagaactgtgtcagtttttatgcaagtgttctcaattttgcatatatgttaccggagaatgttgagtagacgtaaggaacggggttactttgcggagatagtgaaatcagatagctgcttggagaaagtgaagtctcggcttcttaatgcagtgcggttttagcgataaagcagaatgaattaaacttggatttggagaatggaaagagtttccagggaggagaaggtaagaaaagactaagcgtgtcttgcggggattgatcaggaggaggcaaaggaaggcaaaatgggacgaggaggaacagtaagaagcgagagttccgggattccaagtttgttcatggtggtaggagagggatgagcaagcatagcactgtaaagagttcgatcatctacaacttcaacactttacagttataaactttcgtttatgtttttagaaagtgttatttttttgggataattgtaaacttcgaacgatggataatttaaaaatgaatagaaattgtaatgtaaaaaaacacacgaaatcagtgctttttgtcttaattaaaaagaccagcttgcaaagtcacgcaacgtcgaagctctaactttctcttctaaaagtggcttactttggtcgcaaagacacaaattttaaggaagaaaaaaaaacaaaacaaaagccagataatttacttgggagaaataggttcgataattcgattttttcgatgaattagagtaaccttgggagcaaaatgcgaccacgcttcgtcatcttctacacaattccaagagaaacgagtagaaatcgtcagtttgggatattttgtggttttatgatttataggaacgggttgaatccttaaactgttgaatccttgatatttgtttgaagtactcttcatctactttcctcacaaaaatctacttggcatgtagatcttgagaattctagaatgtggatacagttgaaatgaacctctaattatttttcttagaaatcac

SEQ ID NO: 40651 - DNA, 538 bp, Arabidopsis thaliana columbia
acggccgccagtgtgctctaaagtcccttcgagccgctataggaattgccagagatcgcgcaaagcgtgccctgaaggcactctcgttgtctctgcatccgaccctaaggctgacttttcaaccgtccaagccgcagttgagtccctgccgcacgataacagcagccagacgatcctgatcctagcagggacatatacggaacaagtcaatgtcacccgtcccggcccagtcacgctgctcggccaaacagaccatgtcaccgacgcctccaagaaccaggtgacaatcaactgggcacaagccaaccatgacagcacgggccagagtgttgacaatgttttcggaagcgttttgactgtcgcacctactctgaacgcgagttacactggctctggtcccacgggattccctgtacctgaggatactccctttggctcagtcgactttcgtgcgtacaacattgattttaccaacacctgggcggactattcagacggcccggcacatgcactcagcttcagcagggctaatggcggg

SEQ ID NO: 40652 - DNA, 408 bp, Arabidopsis thaliana columbia
tataaagcctactatctaattatctaggctcaaatttgagtccagttctgattttctagtatacttaggttctaatattttgggcctagacacagcctcacttatattttagacttttttttttttttttcatgtgggactttttcacatttgtcccatttatgttgttcaatgcaatcagctttggacatccatttggttttagatagttttataaaaataaggtaaatttgaaaatattaaaaactggaggcctattttgcaattaaaaaaaaacttttggaatgtcattaaaattcccaatttattaaaaacgttgatttaaatcttcagcgttcgacgaaacgaaataaatattaaagttacgttgactttttaaataaatatcaaactttcgttgatctatga

SEQ ID NO: 40653 - DNA, 451 bp, Arabidopsis thaliana columbia
tttttttttgtcgaaattgattctatagactattagacttgaaaataagtagacaaaaccactaacctagacgataagaagacatgattcgatatgtgggccggttgtggtataaaagaagttgcgtacatatatagtttatacaagaacatatcttgctttcatatatatacacgtaacatatatgattatatcattaatggaattagcttcaggacgcccaacagaaatggaattagattcaactatctgcaagataattctctgatttatccggcgacgtactatcagcatgctcatattcacaactggtcgtgattccacatttcgtatgattctagaatcaatgttgaaaatacaatatatttaaaatggtttgaacaaacgtaaatgtgaaccgattgttgaggtttactaacgtttggacatgtactatattactatatgcaaa

SEQ ID NO: 40654 - DNA, 502 bp, Arabidopsis thaliana columbia
ttagcgcttatttggattgtatttaatacagggttccaatgctcgaaaagcgtacttcatgatttttgagagaggaccaacagcttttgtgaacgagagtacgaagttcgtgagcaaaagtctcagtgaggattctgcgatgcagcatctttgtcagtcatcttcgtctcacatgacagagaggatgcgggtcttggtggagttaagatctgcactcgcgtcctttattgcccaggttctcatggaaatttaattcctttttaacattataaagaactctgcatgagtagccttgttttgcatactaatgtcacttctttcaatgggctttctagctttatgttgagttggataaacgtggagaggatcttgtgaagattccagaaaaggcactggcatcattgttggctgttatcaatggattgtattcgaacctggagggatctttcagccatttgcatgctgtgcgtgaggtaaacatcgtgtgtttcactttttgttg

SEQ ID NO: 40655 - DNA, 561 bp, Arabidopsis thaliana columbia
ttaaaccggttcttgctcgggctagaccggactgatccgatcaacaaaaaatcaaaccggaaggaccaataagtctaatttctttgtgaaagtttagagaacctatggaggcaaaggcaatgatcaatctatctgtaaaggatatataaaaaaacaagtcttcatttttctctcactgtccattgcaattgtagttttatattcacagatccaaagtcctttcattttcttggattctgattctcccacagtttcatttcttcttgtgtggggaaatctgcatctttgtccactctcttttattttcccaagaaaggaaacaaattcccacaatttcttgtcttctcttaaagttcttcttaagttgaagcttcttgtctgtttttgagatttccagtaagaagaaacttcgctaattttcccgcggaaattctcttacaatcataaagttttctttttttttgctctcgagaaagttttgagaatttttacttcttcaatggcgtcaagagaagtacaacgatgatcaaacaagggtttacgcagcccttctctctcttt

SEQ ID NO: 40656 - DNA, 538 bp, Arabidopsis thaliana columbia
gtattcataatgtcatctgtaaccgtatcattgcgattttaatcctctcttaagcgtttatttgttgatttgtaattttaagatgttatattcgtataagtgcctttatgcctactattgtcaatttgtcatgtgtaccactaccacccctctcccatactatagggcctatctgttttgaaaataatgatgttagccaattaagactcatatgcgcacatgtatcctccaaaaagttgaaaagaaacagagataagtcgagcaagtcccaaccttgataaacttgacacaatgaaggagaaatgactcttggtccaagaaaaacgttgtttatggttgaaatatctactgcgaattattggctacaattctcatgagttatttagacgaggagagttaatcaaaatcaaacatttatagctttggtgtggtgattcatgaaatgctaaccgggaactcaactttaactcagcttggtcttgaggatgagtgtgtggtcctgatgttctaagggtgggttcggctgctgcgaatgaat

SEQ ID NO: 40657 - DNA, 1726 bp, Arabidopsis thaliana columbia
atttcttgaacgagcttcttcaactagtatagcagacctccttaaatacgctagcaagacccatctccgcataaccatctttgtttgcgtccatctattaactccaatatcatctccttatgagttctctcccattgattcttagccttgtaatggcaccacatccatcctcctttcatccattaactctaaatctgcattaacatccaaaacgtaaaacctagtaatccctctacctaatccctctacctatagcacatggtagcaccggtttcctaaagttgtctttgcgactcattttgactcgataaaacgtttgaaaacttgtgtcccttaagcatgaacaaaaccatgctctgataccactcttgtaacacccccaaaccgttctaggactaagaacgaatctggaagcgttacttttgatgcccgtagacgatccgaccgagttcccagaacacatctggtaccaaggtcaggccatcatcgaacaacgttcctcacgaacatggcctaaggcttttcaacccgtaccatgaccgtaagttgtgttagtcgggacaagactaatatcagaagtacacaaggatttttaaagaaaatctcctttattcaataaaacatgaaaatacttacaatggattgggatcccgagcctaatgctcaaatcgagtcaatttacaaatctaattttacaaagacaacaaactttacaccggttccccaacgtccgtgctcccctataggtctccccaacaaaggttacctataagacaaaatgtagaatcttgagtaatctaagattactcagtgagcccgggtttctaacaaataacataaatcccaatcccaatccccaatcaaacaatcaatacgagtatactaaattgagtatactcgacaagaaatcacacaacacaaacaaacaagcaatgaatactctttatagagtatatgcagcggaaactacttaatctaaaactagcatgctaacgactcttcatcctacgggcccctacactttacgatgctgatttcccacaaggcaatgtctccgaccgctggacacaaagtctaaaacgatcacatcccttccccaatctaaaccgtctacatggaataactcccttacggtaaaacttttactaccccgtcgggcagtctcgggtggtagcgaaccattccgagctagtgggacaaccacgacatcgtcacaccttattcatataactgactaaccacattacttactacgagtctaatgtaacctaatactactggtaataaaacctactagcaagcaattgacactcaaaggttaatcaaggcaaagcaagattaaccaacaacaatcaatcaaacaacctaacatgcttgctaacaatttaattcataataaaaattacgaacaaacaaacaaacaatcaaccaacataatggctaaactaatgtccagcctaagcacacaaatacttcatcctaaactaaatcgagcatgaatgcaagatctaatcaaacaaccaagcccatcttacgtaaaaacgtagatccgactatcaacaataaatgcataaattatactaagtataaaaatgcaacctcatgcctaacaatcataaccccaaaataaaacctagtcatgtgctactacacacgctacggtactcaccttggccttattgtcgagagattaaaattctacccttgaccgcctaataattttgat

SEQ ID NO: 40658 - DNA, 537 bp, Arabidopsis thaliana columbia
tgtggttgatttgcatgaggatatctgaagttagagataaggaaagacgtaaaactttagcagagatcatttactgtttagtggtacacagatttgtggaaaaaggaatctctatgatgcctcggattaaaccaacttcagacccagcaggacggatagacttatggccgaatcaagaagagaagctcgaagtcattcactctgcggatgcgttcgagatgatacagagtcacttgtcttcagttcttggagacggagcagcagttggcccgttaagctctatagttcagataggcaaaatcaagctaggaaaactctatgctgcttctgctatgtatggatattttctcagaagagtagaccaaagataccaacttgagagaaccatgaacacacttccgaaacgccctgagaaaaccagagaacggttcgaagaacattcgcctccttacccgttatgggacccggattccttgatcaggatcaaccagaggaatatgatcccgatgaatacgcgatacaaagaaatgaagatga

SEQ ID NO: 40659 - DNA, 583 bp, Arabidopsis thaliana columbia
agtatttaaaagagatatttattattaaaataatacaaagtggtgaaaagaagagagaagtgagaatcgtctctgttttcagaaactctgaaaaatgtttatggccacgtgtttttccagaaatgattgattttattctttttattaaaatttaatactttatctaaattcaattaaaataagcaatattttattcatgagaaactcttttttgagaatcaaccgatgtagatggtctcatactctactttgttgattgtgtttaagtttctgaggatttttctactttccgacgttatgccaagaggctggtcttcactagaaaactacttccacccaattcaagcaagtatgacctcttctcccaacaatttattcatgtactgaaaggccattagaagttgactgaagtgtgaaggtggagattatgtattcacttgttgatttggtatacattctatgtaaggttcaattatttacgttatataattataatggagtaatttacagtaattgggttaaaatggcttgattcggtcaggttgatacggtttggaagttaacccggcctagatatgatgtt

SEQ ID NO: 40660 - DNA, 527 bp, Arabidopsis thaliana columbia
aaaaagtaaataattatccattcataattctgcaaaaagtagattttctaaaaagtaggaaaaccagattttagtagattttaccgatttcttcatataatctaaaaaccaagttttgtgggtttttaaaacaattcacatgacatttatttattttattttatttttattttttaaatatgttattttcacaatttaccaattcattcaaactttttaatctaaaactaaaaacctggtgataaaaactaaaaactaaataaatttccattcaggattttgcaaaaactaaaatctacaataaaaatcaaaaactacaaaaatcaaaacccaaaaaccaaaattcaaaaaaccagaaactgaaaactaattaaaaacaacaaaacgttcatggcctaagtcttggggagagaaagaacaccatttaaaaaatatatataaaaagaatggtcgatttatcatgttatagtacatgaatgattctagaaggatcttgaatgttagcttgtttgatgacaccgagtgat

SEQ ID NO: 40661 - DNA, 575 bp, Arabidopsis thaliana columbia
gtattgatttcacagttgtggggaatcagtccattgatccttccatacatagatggtggtatttgaacactctcaatatcgaaaccctaagatcccattagcaaaaataatctattttaatttcgtgaaacacagaacaatccaaaaaatcacaattatagatcaattttataaacaataattaagaagatgaaagacttacatcggattccgccacttgtcgccaatattctctctgcaagctaaaaaaatcatctgtcgccatttactccttatctgatttacgaaacaaacccatacaaaatacgtttctatctttttaatacgttgattacttttttttctgcaatagatgtaataatctgtgtaatactctgatgtaacttggtataattgcagattgatgtagtcaatttcgtttttaagcagctttggagaagagattaatcaaagatttacctcaatcgaagaaatcagagaaacgaaactccttgagtttgatggaattgaagatcttcgagttgatttcgaatgatcgagttcttaagagactcgatctgagttatggagaagat

SEQ ID NO: 40662 - DNA, 609 bp, Arabidopsis thaliana columbia
gatatgtaacgaacttaaggatccagaaactcggacttaaaatgctacaaagaagagagtatgagagagatcttacacgacaaagattatgacttttgctgatagatttttcatgtaataaacataattttcaatagagaaaataacgacaaacattcagaagccagaaaccatctatacaattgatggtgctgctgatgtttgggggtttaataaataggttcttggaacttttctatgaaaacaaaagaaacaggagtgcacaaaagccaaaaccatctatacaatagggtcaaaccaaatccacaaacacacacgaaaccgaaggatgataaaatatcaatcatcctaaaaaatcataatgaatattgagaagttaagtcatcaaaggtcagagaaaacatcagtttttaatagtttcagatccatcgctcttgtttctgcggtgtctccttcagacctgccttacgagcattggttagcagaactctatgagctaaccttcctctgtttcctatagacagcctaactctcttccaccctacattaatgccgcacctcttctcattggttgctcctcggggaaggtgcatttgcagctcttttgta

SEQ ID NO: 40663 - DNA, 535 bp, Arabidopsis thaliana columbia
cttgatttctttcatgcatttgtgggaagcatattattccatgacttaattcaggacaaaaatatgtgattccttgtggcagatgattgctactaacgatgggcttatgcacgtgctagctctacgaataggtataatctggagaagaattatcatcacaggactgacaacaaagaaatggaaagaagggttaacctggaaactgtattagagtctgcttggtggcacttggggttcatgaacgcatcgatcacctgcttgatctcttccagtctttctggatcacgattatttcctgcaacaagttgaaattatggaaagagcttttcaatgataaacaaacattctgtttggggtacaccaaaatcatgtcatatcaaaaacacaaagaagttgttgctttcattaccatttataaccaccaaaggtaaggtcccctttttgctgcacacagaaggcctaacttgcttcttagactttctcggctttccgcaaaggaaagtccttctgatgcaactttttcaaggataacatt

SEQ ID NO: 40664 - DNA, 357 bp, Arabidopsis thaliana columbia
tgattttatacttgattaaaatattttacaatttgtctgttcttcgttttttttttattttccttcacactaggaactgatcttaaacaaagcttctctaaccagaatcataaacaaaatctaaagttcatctaaagaagtagaaaccaacagataacagaaccccttatgaacatgtattacgagtatctactttgggctcagatacatagtcacagagtcatcaacgaaacagagagagactcgcgttatcatgcagcattattaagaactctgtgcatttatctctcctgcatgtaagcatggttgggtctcgacgaattatgaagctacgagcactaggttctttaaccaatc

SEQ ID NO: 40665 - DNA, 884 bp, Arabidopsis thaliana columbia
tcaaaacccaattagtagttaataaaagcaatcaagaattacttcgtaatgttcagaattctgcattattgcacagctcaacctaaaccgacccgacacatgcatttttttataaaatttttagtaagacattctaaatccaattaaagaaaatcacatttactgtagctacctatggtttggctgaactaaacgtgaacagctgtggtataagtgcatgagtatgtcaaaacggactattacggttttaaatgttatccagcaatttatccagctaggatagtaactaaaaatgggtatatttatcttttcgacaataaaaaggcgactttttcggcattaagtcaccaaaccctaatttgtcgccgtcggctggcctcacaatgacaaacgaaaaagccacaatggctaagaagaagaaaaagctcctttcctttgctcttcctccttgtccgtctaagttcctctgctgctccaccatgttctagcccttgttcggtcgtcgttccttccgtggtcagtcttgctcgttcagtccatttctttgcttcagttgagatggtggaaataatttcctcttctcctggacacttagtcgattcagatagcagcagataagagaaaaattcactcatttccaccgttttggttgaggctaagggttccttcccatagtccccaagataggagtcttgtcctcgttacattcctcctcaaggatttcgatcccctcttctatcgaaatattgcttttggtagatagctccccagggttgaagctaaccttaagcagatttcctcaaagagtttatcaattgaccccattaatattgctctgaaacagttaactgtagagttttctcaggatggggatggtcgacctg

SEQ ID NO: 40666 - DNA, 124 bp, Arabidopsis thaliana columbia
ttattgttggttatatattagtatatatcctctttttgtttttgcatatacagtacatatttcttgcttttgcatctaaaggtagaggaaaaggcagggggcgaataagatctgaagatgaaga

SEQ ID NO: 40667 - DNA, 447 bp, Arabidopsis thaliana columbia
gactctacccagagattttcgcgcgaaatccataactttttttccggaaaaaagaaagaatgctagatcgaaacagcaaaaaaccaatacttaatccttgaatcaaagtacagaaagaggatcaagctcaaaaattagggaaggtaacgaacctcctttcaccgatcagaaaagagtgatggaacctaatgaatcgaatcgagacgaaatttccgattaagaaatcagagagggaaacaatagcacgaaaattgaatcaatagatgttgatgagcagcgaagatcgaagaggagaaaccctagcaatctcgatgaagcgcaatatttggggacgaaaaagctaagcccaaatcatgcagatagatcttcgtttagagatgttgagagagattgtgtgatatatatatctctgaaccggtacaatgtcgataattagaaactggttta

SEQ ID NO: 40668 - DNA, 1519 bp, Arabidopsis thaliana columbia
tgtatcaaagctcttataaacaagataaggtattcctacatagttggtgaaacccacgacaaatggatcataaagtctttaaaaaagaatagataagattgcattgcatgtagtaacgaatgcaatcatagcagcactaatgcaccagatcccaacagaactccgcacttaagcgtgctttggcgagagtagtactagcatgggtgaccacctggaaagtcctcgtgttgcatccctctttttttttggtttttctctttttgttttgtcaaaaatgtatgactctagaacttttagaccgtgaggctaaacttgacatgtgataccttttcggaaagcccaaagagagctctccgatgaatgagtaaggaaaatggaattcttctatttgtttttttccttctccaaattttgattgtaatgtactttttcgagccttttcattatctttgctatattacggggccaaaattatatgttcggacattgttttcgaatattttgcatgtataaaagttctaataaataagatagggtattcctacatagctggtgggacccacggcaaatcgatcataaagtcgtcaaaaaagaatatatacgattgcattgcatgtattaacggttgcgatcataccagcaccaatgcatcagatcctatcaaaactccgcagttaagcgtgcttggacgagagtagtactaggatgggtgacctccaggaaagtcctcgtgttgcatccctttttttttttggtttttctcttttgtttttgttaaaaatgtatgactctagaacttttagaccgtgaggccaaacttggtatgtgataccttttcggaaagcccaaagagagctctccgatgaatgaggatggaaaatagaattcttctattgttttttttctactccaaattctgatcttaatgtacattttcgtgcatttcgtgatctttgctatattacggggcgaaaattatatgttcggacattgttttagaatattttgcatgtatcaaagctctcataaacaagatagggaattcctacatagatggtgggacccacgacaaatggatcataaagtcgtcaaaaaagaataaatacgattgcattgcatgtagtaactgatgcgatcataccagcactaatgcaccggatcccatcagaactcccagttaagcgtgcttgggcgagagtagtactaggatgtgtgacctccaggaaagtcctcgtgttgaatcccttttttcggttttttttatttttttttttgttaaaaatgtatgactctagaacttttagaccgtgaggccaaacttggcatgtgataccttttcggaaagcccaaacagagctctccgatgaatgaggaaggaaaatggatttcttttattgtttttttttctactccaacttttgatcttaatgtactttttcgtgcatttcgtgatctttgctatattacggggcaaaaattatatgttcggacattgttttcgaatatttttcatgtatcg

SEQ ID NO: 40669 - DNA, 435 bp, Arabidopsis thaliana columbia
gactgactgtgcatgactgaaacgtgtgactaaaattaggaaagcacaactgtcgttactgattaggccagctaaagtatccataatggaacccaactactacatggtgtctctatatgtaataactaaacggcacgatgtttgatatgggcttctaaacgggcctgtaaacgtttgggcgttgtatatagtttcaaaacagaacagattagtgtcttactgtaagatgttgtctctttcagtgtaatgggaagacgcactttttgatgatttttcagagttttaggtagttcttacatgcgtcggaactattcttgttcttatatatgtattcatgtttctatgaatcgggtatatgttaaaatttaaatagccttttgaacttgcttatgacacaggcatcttctggtgatagcaaaaagattgtaggagttt

SEQ ID NO: 40670 - DNA, 551 bp, Arabidopsis thaliana columbia
ctatccctagagaagtgaagactaagaggactaattatttaacaaaattaatattgagaaaaacagatccacattaactcactaccacatagctaaaattaaaaactagaagagattagatatataatctggtgggcacgattcagaatagcacgtgaaatattatatttataacaaatccagctaaccgtgatctacgctaattatgatttccagagcaaaagtgaccgtattattattggtgtcttcattaaattaacaataatttatagacctaatcactatgaaaaatcaagttgattataacatggatacttccatagtattaaattatgatctattaaatgatccaatgaccaaaaacaatatccaatgttagagagtactactatttacctgttcatactaaaaagacaacggtaattaccgtttgggtcccatggataatgattggattaacactaattaattaaacctaacggtaacttgtagatatagatactgcttatatcttttgatatagctgcgtgcgtatagactttacaataatt

SEQ ID NO: 40671 - DNA, 637 bp, Arabidopsis thaliana columbia
agtaaccgtagtaacgtccgccagtgtgctctaaagatactccttccacagcaccgggggttagctctccgcgtcgtccatcgaccgtacacagtactagtactcgtgctatggacgagtcccctaaagtatctcatgacttcaatgctagcaatcagtccttccagagccctattatggatgctcaatctcaggtgtcttttggccgccatcgtgctgactcggcattctctactcggattgcttccgagaccccagaccttttaatcacacaagtcttgcagcagggcaacaacgcatcaacatcgtctgttccatccccacagtcgcaaacagaatctttccccaggcttcccagtattagcctcgacactccatttctggcggacgtcataccactcgcaaataacgacaacgcagcagatgagaaccgtcctagttcgtctgccggccgatattcgggcttcttctcgtcagcgatgcctatgtccgacagttcacaggaaatcgccgaatcagaggccaatgtggttaaagagcctactgttttattccttgccgctagcatttacgaatttaatatagactgagcccgacgtgaggctggttaccttatttgacgtatgttgcgggtgag

SEQ ID NO: 40672 - DNA, 100 bp, Arabidopsis thaliana columbia
ctgctggggacccacatcatcctccgcagctgctggcccaggtgctgagcccttcactgccccgctggcgctggccggccgctccaagtgcggggccgcg

SEQ ID NO: 40673 - DNA, 558 bp, Arabidopsis thaliana columbia
  unsure (1)..(558): unsure at all n locations
cttctcttagttatcaaaaacaaaaaaaaaattgctatcaactatttcgcgtgtatataactttgagtgtatgggtataacgtactaccatccatttctattgaatgtcgcaattttagattcctattatatgtttttattcttgaaaaatggccactccacgattggatttctacttaagtaattgtatattaacattcacaaaataatacttaacctatgctgaattgattactcggtcccataaaaatattcttacaaataagaattagagatgaacatataagcttaaacatcaagaaaaatattccctaaccagaacatgtatgatacttttgtattaaacatatactcaaatttgaaagttttggtatccaaaatcttagaaaggattgagatggatactgatcatatgccaccgttaagaattatgcattaatcatatgcttactttcgcacgtatatgtgatgtacacatggaaccagctggttaacaaaaggtaacaatgaatgatagaagacaagaggagtagttgcaagtagtggttanaagattga

SEQ ID NO: 40674 - DNA, 438 bp, Arabidopsis thaliana columbia
gctatacaggtcgaagcggtcaaggtccagatcaagatccccccacaggcgccatcgtaaatgaacactctagcaaactggtctgagactgtacccgggacaatattgtgcgcggtggatcacaggattgggttaatgtactggacggacatcgatataatcaaaaactataaagtcaccggtttgtgagcgaaatagtgcatagtaaaccgctctttccttagttcttcagaagaaatatccaaagatttttgactgacttgtttgacaatatcgttggttggttaagcgttcctatgtaaaattttgttcctctgaaacattgcattatctaaatctatgtctttacattccacattctaatgaaatcgcattaacctaagttaatttatatttttaaactaattaagataagagttgtggtgtgtgccccaaaaa

SEQ ID NO: 40675 - DNA, 543 bp, Arabidopsis thaliana columbia
gctctttttgattatataatgttaatagttttcaacatttcatttccacctaaccacacctagacattatgttagtgggagttggatacagatcaattctattaaatcttaatgtaaaactttcaaatctttgacgtagatgacttttttgtttatagtgcgaatgttttgtagctgagagaagcagctgaaatgcacttttagtaggagactcttaagtggctgagcttagacatatcaacagctaagcacacattataaacgcgagaaaccatgtcaaggaaatcataacataccatctcaatctctctgctcacctcagagatgtttgtgatgattatgaagttgtagagagttagtatcatagggtagttcggtcatttgaagattctagaagctgaaactaaaattgaatcctcaactaactaactgattcagcaaccagcatattagagagtaaacgcattaacctcagtttatgttcaacgtttcctttgcaacgatttagaggaggctgaaattgcaaagtgagagggagaagaa

SEQ ID NO: 40676 - DNA, 477 bp, Arabidopsis thaliana columbia
ctcgttgggggtgaatttttggatttcagagattaatcgatcgggatgcaaaacgcgtaaataaaaccgtttgagatgttttactctcgaaattctttatgttgaagctcttcagaagtgctctctcataaccataccgcaacaatgcgatctagagtccacttgttgactagaggctccaattgttggaacgtatgatccggagtctagaggcctcaacacccgaaccactcaagagtccctttaaacatttagaatgttaaaaacgccatgttggctttacaaaaactttgtccatatttttgacgtaccaaacatgacttctagtcgaaaaataataaccattttaaattcatagtaggcatgaattatgtcgcatgatactttataagaaaaaacatacccgactcatcggcaaagcaacctcgttaggccacatttttatacgaaatcaacataaacttaatttcttgagat

SEQ ID NO: 40677 - DNA, 649 bp, Arabidopsis thaliana columbia
cgcattgataatgatataatatgtaataacgtgaaatctcttagtggtattagtagaaaaatcatggtccataagccatatctatgacttgtagttacctccttttttctccaacttttttttctttctctagttatttttgagatctgacattataattttaatttcaattttgatgatagtttgaagattttttttttttttttgaatctcacattttaatttaatttgagttttgatgatatatactaaatgggcctcacgtgagggaagaagcctacccgctaattcatgtaaagtgtatctcagcacttgactttcagtctcagcgatcggagacggagaagctcatggaagctgctggcgttacaagttctcatcttctctagtcttttacatttcacctccctttcgtcggcgacccaaatccacgttttgggaattctccctaaaaatcagaaacccttggcttttccacatggaagacgcctacgccagatctgtctcagaggtgctttcatttctcttccaatccgttttttgctgagagttgttttcggatttgtaatctgtgagatatagctgcgatcgcatataatgttagctagcagggggtgatatcttggcactgtttactgtgatggagtga

SEQ ID NO: 40678 - DNA, 641 bp, Arabidopsis thaliana columbia
  unsure (1)..(641): unsure at all n locations
ttttattggataaatcacagattatagattgcatttgctgtaaagtgttggagtttgatatgcaaacagttttgattggttcccttttttcggaggatgcatggaagaagaagaagaaaattcaaacctagtttcactaatatcttaagctaactcaatttgttacgtggaaatgagagtaatttttacattagcttgatactttggtagtttatgtcttaatgatagtttacagctgtctcttagttcagacattgtgacactgagagagatagatgaaggaaacgcagacgcaatattgttcgaaaacacagatgtagtgtttggcgtttaattgtctattttatacaaacgtcattagaaattttctaacaaacatgaaacgtcgaactgaaaacaatatcgcatttgtattggtgttttcataggtttctttaattttaatatatgtatacgagaacacttttagttttcatattggatagaaaaataaaagagaaaaactctacaagacaagtcaaaatgtttgtgtactaaatataaagacaaagcacagcgtganaattgctaaagtctacattaattgtgagggagaaaggaaaatgacccgagaggagacatcaatttaatgacaattttga

SEQ ID NO: 40679 - DNA, 181 bp, Arabidopsis thaliana columbia
tcccttcaactataaaaggaaaaataaaacagccacgattataaacttttgtttttttgataacgacacaatttattcatttatggtacgtcttttatgaaaatacactaaaagagaaacacactgttctttttgctataaatccatggaaggttgatttatgaggaatcatatacatatg

SEQ ID NO: 40680 - DNA, 544 bp, Arabidopsis thaliana columbia
tgaaatattaattgtatgattcctttttttttttcttcttcataccttttcttcttgctttttagttctgtttctttgcatgtattgaattgacaaaacaagattttgaaattactttttggtatttgatgtggagttattttcattaatgtattgtttataaataaggaaacaaattttaagagtattttttttttttggaataatccaatatgatttatatgaatatctatcacagtaattatagatttaatgtatcttgaaaaattaatcatatattaaagtacttggaaattataacatgttatattttagacacatatgattctcctttcaaattttaaatataatcttgttatagcttttaagtatcactaattaattaggagagattagagtgtttccataaactcataaaagtagatagagtttctatttagaagttaattaataataataaagatattgctaagttgtacttatttttcagttaacttcaatttagaaacatcggtggctcaataaccaaacttatatttttgat

SEQ ID NO: 40681 - DNA, 849 bp, Arabidopsis thaliana columbia
cacgttataattcccaattactttattatctgattaattcaccaagatacattaaatctaaaattatgtgatagatattcatataaatcatattggattattccaacaaaaaaaaaactcttaaaatttgtttccttatttacaaacaatacattactgaaaaatttctaaataaaatatcaaaaagtaatttcaaaaccttgttttgtcaatttaatatttttatttttacaaaaaaaaatctgaaacatgcaaagaagcacaagtaaagtacaagtggaaatgtatgaaaataggaatcataaaactaattttttaatttaatgataggaatctgaaaaaagcaaaattttatcacatcccgaataaagaggaaaatgcaaaatatgtctccttttctcactatgacaggttgtttctttaaagaagcaacggaatttaacattatagcaaacattaactatcaccagctatcatgcgcccacctctccaccgtgctctccatcatcatcattccatatataaatcattcacttgtagaatcttcttctctttcacactaaaattcatcgatgacggatcctcccagacccgacccgtttcctgttacccgactcgattccgacgccggtgctctcttcgtcctccaatcaaaaggttaaacccatatatttatgatatcaatctccaattttggaattttaactgatttgagaattaattctcaggcgagtggtggcacgccggatttcatctaacgacggcgattgttggtcgacgatattgacattacatatgcgtttagaggattaggatggtggttagggtttgtttgtttaacgacgatgg

SEQ ID NO: 40682 - DNA, 578 bp, Arabidopsis thaliana columbia
tccttggggtcattgcatataacctctttcacagccattcgtaactcatctgtgaaacaaaggcaagttttgccacacaaaaacatgatgaacaagagataaacattcaaatgtatagaccagagaaaccacaaaacatttttccaccaaaaaggctaacagaatgaaacaaaatccagttttgattccccaatctcagcaagcttaacacagttcaatctcttagatttcaaaaacacacaacaaaaatcaaaacaaggctatatgatcaaatatatagttacctgcatcatctctctctcgttgggggttaagagtaatacccttattaaaggccattcctttcacctaatttacattgaaaaatcacatcttttattcaggaaaccccaacaagaacacataaaaataacagaaactacattaccaatgctcgaaacagacatctcccatcccctttaactctatccacagcatacttctcaacctttttcgctgcaggagaccgattcctagagatgaatataagaatcaattcgcagattagcgtaaagggtttatcagagactcgattgttg

SEQ ID NO: 40683 - DNA, 550 bp, Arabidopsis thaliana columbia
tattcaaaagtctttattccatcacaaggttatgttatcttttgtatttttattttattttatacaaggacttccaagttccaacatttcaatttctaagtacatgcatatcttattaaatagtgatttaaatacacaaaaatatgaaataaattctaaacaaggtccactctataaaagaagaaaacccacaaattccaaagcccaaattaaaacaccaaaagagcccaaaatacaaactcattcttcaccactaaaatattccaaagcaaagcaacgaacataacggataagtgttatcctcatctagtcatcttcaccctctaactcaccgagaaagaaaagtaaagagagtttggtgtcactatgaacattgccattcataattaccgtcactcaaaattcatcgtaaatcctcacatagacaagacttttgcaaggactcgacaggcaagatcaaataatattacattcatgacaagtactccatggaagagaagaacgatgggactttgtttggtaagagcaagtgccgagaccggagaagaag

SEQ ID NO: 40684 - DNA, 543 bp, Arabidopsis thaliana columbia
tctgaaactcaacagaagtaatttgtatttgtatttatacaagaacaaaagaaatttaagtgacatgtatttgtattcatctaagtaaaaaaaattcttcaaatgagaagcagcagcatgtttcacagattgatatcatcaaggagagagttactcaatgctattctcgttatcttcaatcctcggcaatgcatatctgtctgaatcacgaccaatgaagctatgtgttgttgaagaacaagaagaattagatgcagatgaacatatcatcgtctccttcatctctctccttatagcccatagcttttccgcaatgcctttcatagctggacgtgtagctctcgtcggggtaacacattcgctcgcaagtctcagcatcttctcagccacttcaatggcggctcggtttctcttgagaaatgggtccattatgagaacagcttcatcgtctttgagtctcctcaatgcctgcccaagatgaaacgagtttccctgatttagtcgttgagataatctcgagcttctggtgaacagggaaagaga

SEQ ID NO: 40685 - DNA, 602 bp, Arabidopsis thaliana columbia
tctgatttacattgcttccgtcagatccgacgatctcactttctcatcatctgtcgtcagcttttttgtttcttcttttatctctttttatttttaaaataaatatattgttgattctggaattttcctagtagctcacgtcacgttacgtcatgtgtgtgctttgaattttaaattgactcgcaaggctggttttgattatgtgtaagtgatcgctggacttcacacacactaacaagtagcacttgaatgaagctttcctttaatggattgattatttaataaattgcgactttgacgtctttgagcatccatccatgttgaagaatcccattattcgtatgcttttcttctatggccttgcatcagtcagcactcaacttgtttgaatgtgcaggagcgtgtttccagaggggatggattctgttcgacgcacttacaccattatgcgaggtcgtcacatagacaagcgtgttccttctaaagagtttctctctgctttggataaagctgaaactgcaggttttttgtaccaccctcataatagtcatgattttactctattgcctactttttggtgcacacggacagtgttatatatt

SEQ ID NO: 40686 - DNA, 540 bp, Arabidopsis thaliana columbia
caacatgttttattttattatttgtttaccgacttaaaatattaatttaagatcgttaaaaaacaaactctacaagtttttgatttcagagtccaccgttgagcctgttcaattaaatcgttgaatctcgcggtgcgttttactttgattctttcgaattttttttatatggatgttgccgcgatggcgagatgtgtgggaaggtgctacgtttcgccggcgttcggtgagtctgaatcgcaccggttatcggagcggcggtttctgaaattgtctagctccacgaattcggatcccgccggtagtaaaagtttgaagcttcgcgggaaaattcatcggagaatgagctacttccgtccgatcatggcaaaagatgaatccatttcatcgcggtccggtaataatcacgtaattccgttctggttcatctctaatcctagtttgggttcctatgattcgtttttaacatttgggttcctgagaccagaaatttccatagttttagcataaagtttggaccttagtagacagatcaatgat

SEQ ID NO: 40687 - DNA, 535 bp, Arabidopsis thaliana columbia
tcccttacttgtatcaacagcattaacgtggtcatggactaaagaaataagatcatgaagcgcctgggaagcagaaggatctagatcgtgcagcgacgctttttcatgcaatgtgctgaggccctttttaatgctttcattgcctatattatcattcccaccttctgcagtttcaatcaccggccaagtcaggtaaacaattataacgttttctcaggatttaaccatcagagtcttacctgccatctcaatgcgagattggtcaatatgctcagacaggtgccttaaatcagttgaagaaggcttcgagactaacaggctctgtcaatatccatgttacaccagtaaatagaaaggtagaaaacttcgtaaatgcaagcaaagatgagaagacgaacatacacattttaacaataaggatgggtaagaaatatatcataattccaacaatctttactgatgagagagaataacttacacaccatttctctgtctatcaatcttaattgataacacaagaatccaggagcacatg

SEQ ID NO: 40688 - DNA, 609 bp, Arabidopsis thaliana columbia
tttttttttttttttttttgctgtttattacaccagttcatcctaagaactaggatttacagggataaattcgaatgaattcgtatattgactagtggatgaaacactttctctttgatggggtttaaccatgtcatgccccaaagtaaaacaaataagatacaacgtaagaaattagctagtggcattgctatctcgatgagctagtgaagaagtccacggttgcctatgcatttttgtgttagttttcggcttctctctcgtggttttgtggacaagtctcggatagatatgttcgtggcaagtaggatgaggattccagatttttggttatgtgacaattccacaaaatattttgagtttcgtggattcggaatcggtgtttctctttacgacttagccttatgcgctctctagcaatcatatgcaattagagtagtaatgttgttttatttttctgtagattgctttaatccgtaagaaattaggcggattgatcgacttatcataatagggtttcaaaattatttgcaggagtatcaaaatgagtaactgtactcaatttataataaaccgaaacttaaaattgttaaaattttttattaatat

SEQ ID NO: 40689 - DNA, 545 bp, Arabidopsis thaliana columbia
tgaaatagagagagagataatgaatttaagttaacctgatcgtagagatggctctctcagactgagatcgctgatcctttagtcaatcagaataagagaattagagagaatgaagacgacgaacaagtgtaagaaattgttgttgcaaaaattgtaatattggggataaatagaagcatagcattagtaaaaaagaaaaaaggaaataacaggagcgtggaaaatcactaacgttaataattggagtcaaatcaaccgactctaccaattaataaatatagcattcagttctctctctctagtcgccgtcgcaaaccagaccccttttccaaacgccttttgcctctccggtgatcggcttcggccggcgccgtgagagggcttctcttcctctcttctctttttagtttttcttttttctttgtgtcgttttcttttagtcagcggcggctcctccttctttgtggcttaatcagagacttttaagctgacggcgagcggttgttgtctctcagatggaggttcgttggtggatctcaatgggg

SEQ ID NO: 40690 - DNA, 578 bp, Arabidopsis thaliana columbia
attcaacctaaacccccatttttttctttggtcctctgtccaaaatgattcaagagcttcatctggaacagatgcctgtcaataaaaagggagttgtcaagtgttggtaccaaaagaaccggcgcttaagtcgacaaaaatcatttatgctttacctcgagaaaaacaagtagtggtttgagcaacctgactccaaaaggaagaggagacacagccaaacctgaatctaatatctctgaactatcaaccacgtccaatctctggtgacaagaagagcagaaggtatactcagacaaataggaagcaacacacgcgtcacatgttgctaacagttcagatctcttcttcccatattttctagcacaagaaggtagtgaactgtacgtctcggtccacatccatctctggaaatcatggaaccgttttgataaattcttgttctcggtgtcatttctacctaaatcaactctaattgaagttgaagtttcattgaatcagagtttgacctgatatagcctggacgatgggctccagaatctgtaggagaatgatcacaacactgttttcagcaagaaagg

SEQ ID NO: 40691 - DNA, 628 bp, Arabidopsis thaliana columbia
gaggatccccattatgataataatcacttgatacgtggtaatatctatctataggatgttttcacttcttgtctaatgtctacttactatttattacgtggggttttcttgcaggaacttgcggctacttgtgccactgcggttaagtcaagtaagcatgtagatggaagaatagtgaccagccgttgagtcaagagtgcagacaggtagatccttgcgctctcttggtcaactgcagctacttactatcttggatccttgccctccaaaactgctctgctaaaacgttggtagctctctgggaagatgaggaactaaagtcattggctcctctggctccctcagctatacatggaagaccatgaatgaatctagaggagagaagctcagcaacggtcaacagagcataacaaatgcgtatggcttcagtgacgatcccgggccatttcttagatttctgagagagacagagtggctgaatgagaatgatcatagacattgtttctctcttggtatcaagagaggagatggtgaaagtaatctgaatgtttcttggatcacaagattcaagtactctacgttatgtagacctcttctgtgattcaagtatataagattagactatttt

SEQ ID NO: 40692 - DNA, 964 bp, Arabidopsis thaliana columbia
ttctgcatacaacccctcttctctcgttaggcagaggtatggttcagaagataatattgacgatgatgatcaggatccactctttggaatgggttctcgacgagaccgtgagaaacctggatattcaaggcctggaaagaaacacaaatcttcaagagatggagaaccaatttctgaacattttatgggtccaccatattcatcaaggcagtaccacagcaattactcaaaatcgagtagatatgctaataatattcagcctcacgcatttgccgaccagatgaagcctgtaaaaggtagtctagcagaccttcgtggtgacttatatcggcatgggaagaatcatggagatggcttttctgttgatcccagatatatatctgatgacttgaatagtaaaagcaaaaagttgaagtctgagagggactcacctgatactagtttgagatcttatagagcttctatgcaacaaatgaacgagaggttcttaaattctgattttggcgagaaccatgtgcaggaaaagattagggtgaatgtggtacccaatgcaaggtctggtgttgcggctttcagagatagcaggatgttcatgggaaatgatgatacagagtcggattcatcccatggctatgatgatgaggaggagagaaatcgcttaatgcggaacaaatcttctgtctcagttggtgggatgaataattctcattttccaatactcaaatccagacaagatattaaaaagagcaaatccagaaagaaagatatgcaggagaatgaattgcttgatggacggagtgcgtacttgaaatatttaggcgtatctggagaacacatctatgcgccagggacagagaagcactccttcaagtcaaaacagaagggtaagatgcgtgacaggagtcccttagagaacttttcctctcgagattttgaagatggcccgatcacaagcttgagtgag

SEQ ID NO: 40693 - DNA, 492 bp, Arabidopsis thaliana columbia
ttcttaaatccacaaaaaaattcttgtttcattcgcagacataatataacacaccttgatccaagaaatgtcaaagatagcattataatgagcaatccagtcacgaaatctagctttctctacacatttgaaacaaacacaaatcagtaatctcttaaactccagagaaaatcagggttctaacagggacgagacaatacctgtattctcttggtgagttgcagaagaagcaaacttcttactggaagaattaaacaagctcacatggccgtcttcatcagagacggcgaacaattgcgaattcctgctagtctgtacaaaatcgttaaacctaaatcacaaacgaccaaaagtggggtatagatttctgtaaatctactagattccagaaaagaatcaaaaaaaagatttcatcgagcgttgagattggatctagctacattgagtaatcaacagaaccagaatttggactataccttacaaaacgaaaca

SEQ ID NO: 40694 - DNA, 601 bp, Arabidopsis thaliana columbia
tcactcgtcacttgtctcttcgtatctatctcttcttggttgtctcttagaattcatgaactgtgttgtgtgtataagttaatcttgtttctcatgaatgataagtatctttctccataatcattacactacatattctgaatagtttcttacatattaatttactaccaaattttgtgttttttatttgcaactattacaaattttgaatctttccttttagataatattttatttattaacgtaatacaccttatccaaacaaatgtactatcttaaagtggtcttcacatcgatcttttattctttctttttttttggtaaaatttttttttttttttttatatatgcattagatctttcttcttcttttttgacagcagatgttgtattagtttatacatttcttaatacaatactaacacaaattatacgaaagaggataaacctccgtcgtgcttgcatattttagcataagctttcctggaaatctttctgaggtagttatttttttcttgagagtttaaattcgtaattatgcattaaaatgaataaactactatcatcaattgagatttttttctgaagacaatttatgcat

SEQ ID NO: 40695 - DNA, 545 bp, Arabidopsis thaliana columbia
atcatactgagcgatggtaacaattacacagttgattccatttcgtgaaaaactcatagaaacaacggtgacaaatgaagtttccatagccaagaattggatcctcgccatacgattaacctaccgagatgaaccaacggtgatcatctctctaaactccaagaccaatcctcaagatgatgcaaaaatctcgactcttcaactatgcatcaaaaccaaatgcctcatactccaactacttcatatgaaacaaaataccaatctcggcgaatgcattagtgatctatttcgtgatgagaggtttgtctttgtaggaataggtattgctaaaactgtcgctaagctcggtgggctagttagagtagtggttaagaaagttgacgttcgtgatctggtaaaggtaaattttccatttagttatggtgagaggtcaagggttagcttgaagggtatggcttgtgagttgttgggatttggttcgtggaaactgaagagggagatttgtccgagagagttggctaatgaagttcttgatgtagaggtgg

SEQ ID NO: 40696 - DNA, 563 bp, Arabidopsis thaliana
actctagaggctagtagctaatgtcttaaatatttaactaatagccttaggaatgaagttccaaatcagtaagagaccaacatttctttctattgttacaaacacaaattgacattttgttgccagataagaaggttctgtaatctaatacactgtcacgatctagttgtcaatggctcatcaggatcgtcatcatcgtcttcatcgtctccatattccatcagctttattaacgtatctgcaagattagggaggcactgatcattataagtctggtgctaggttatgccaagttaacgttatttgttgttggtgagtttccaaggattgattatgattctaacaaacctggaactggatttggtttctttacactgatgtggttgtcctgtaatcttgaacgttgagttgtcagtgtaaatcgcggtggtggaggaagcatgctttttgatgatagaggagacatggtcttagaacgtggtggtggaggaagcatgctttttgatgatggaggagacatggtcttagaaggcggtggtgcgatggtctttggtggaggagga

SEQ ID NO: 40697 - DNA, 609 bp, Arabidopsis thaliana columbia
caacaatcgtctcagtgatcaaagaaaccgacgcaagctttgccatgatagaactcatcaacaatcctcatgacgaattaggggttggagcattaaaacttctaatagcccttaccccctacatcggtcacacgctatcagagagactatgtaaaactagaggtcagccagagaatcttatccagtgcccagtagaagcaaatcaaataacagaaaagcatgctgtttcagccaagttacttgctaaacttcctcatcagaatctgactcttaatttagcactggtcaacgagagcatagtgtctgaaattctgcatgcaatccatctgattcaaagaagtggagcacgaacaagcaggtatgcaactgatttcttggaaggtctcgttggcatcttagtgagattcacaactacactgtacgagccccaaatgatgtacctagccagaaaccacgatttgacatcagtgtttgttgatttattgatgaaaacatcaagcgacgaagttcaaaggttatcagcaactggactagaaaatctatcatctacaactatgactttatcgaggccacccaacctaggagccaaaattcatgggatcctgagta

SEQ ID NO: 40698 - DNA, 827 bp, Arabidopsis thaliana columbia
ttcctaaaataccctattacgaaatcttgaaaccccgcgagtggccgttccaggatatctagcatctggttacatgacttgttagtgttcatcaacacaatctcttgaatgtggagaaacacatctacgatgttgtagcagtgcttatctctcagtgacttttggtcttcaggagtactcaaacgaaggtcatacggatggtaatagaaactcggtgcttgatatggatactccttggggaacttgaggtcgaagaagtacaaattatgattctgataacaatctgttacagtgacagcaactctcatcagctcttttctctctttgtaagttctcacgaagaagctgacgccttccttctctctggaggctagaccctctctagatcccccacaatctatccacagtactactcgcgcagacgcataaataagaggagtaacagcaacggtagttgtagaagtgatgatctcgcggagcgcctccatcaacagcttcgaactttttgaatctcttgtagtttaaatccactttgtctcctaactccatgatctctttctcgaagatatcaataacgaagtaactgtctttaccaaaacgaacgatgtcacccactttttcaccttccgatcccggtttagactccggtacaaggttttgggattcatcttcttcctgctcagtagaagaacctgcgaaaactttctcctcacgtctcatatattgattagcagattttgacctaaattcgtctgcaagtaatactctaggtttacctgctcgatcatcatcagagtcgctgctgcttgcaccaatacctttatccc

SEQ ID NO: 40699 - DNA, 585 bp, Arabidopsis thaliana columbia
tttttcttttttcttttcgtgataatggaagacaaaacgagacaacacgtagtaattacattaaaagaggaagccttgaaatggaaagcatgaaccgtcaaatcttaagcctccactacaggttgttccatacacaagtcatgatcctattttttggtttttaaagataaaataaagttgatgaaacctttcctcaatcaaatgataatactaacacttaaggatttcacggctattaaatcaatcgataatataaaatgaaaggcattatatcgcactagcgcacgaggtccggcttagaggaagtgctgacagtgctagggcacatgctaattatttaccatgcatattattttagttttaacaatgttaatcattgtggcaaggtgagtatatatgtacgtaggcgagtacgtatgcatgttcattgggtgatatactgatttacatatgatgtatatatctagagtatattatgttgttataaagttgttatcataaaaataatatttagagagagtatgaatcgagtggtggtgtatgtacaagtgtggtgatacgtgggtgatgatggtgaaggatggt

SEQ ID NO: 40700 - DNA, 851 bp, Arabidopsis thaliana columbia
gggtaccgagctcgaatgacatttctatacgcatcgaggatggttggcgccgatctgttttaaatgcaaagatctgtgtctaagaaacttacaaaatttccgatatctcgtaactactcaatgaaggagacaaaccaagagcgtttccggcgacaatggctacgtttctttgtgacgaaagcttcatgtccagctacggtcataaacacacaggtctgtttgccacatgtacactttgattccaaattccttgctgagattctacaaaagaaacggctcgctaaaagatgctcacaaggtgtttgacgaaatgcctgatccagatgtgatataatcagggaatgaagatattgaaattctggtttttacgttggaggaagaagaagactccctctgtttgtttcttctaaagaagctacagagatctgatgaatccaacggtagccattggatcgctcttcaagatgctttaagaaaccggttcttcatccgttaattaattaattagagcttcagatcggacgattaatcataaaacacgaattatcggcccaattattattaatggccagcccacataaaacaaaaacacaaatgaatcggcacatgccgataccagcggggttttttcttaaaagtccgcgttcccggtccaaagagccacattttcggtcactaatgttataaaaaaaattgtgatgcaaatttattcgaatctaattgaaccaaaccgaattaccaaaagaaatcatgcataattcaaaatttggttcagccgtgtatcaaattaaaatttattatgctatattattaaaagtaaatcattatactaataactattattattattt

SEQ ID NO: 40701 - DNA, 1314 bp, Arabidopsis thaliana columbia
  unsure (1)..(1314): unsure at all n locations
attgcataagtaaagagataaagagtagagaaacaagatgacagatgaaatcaaatgcggaatctaaataacttggaaaaatctagaattacaggttggagaagcaaaagcggcgcacgagagtaaaacagaaaataaaactgaagcaaaaactcaatgtcgactagaagtctcaggacagaaccctaagacatctatttatacaaaacgaaataaaatgatcgtaaacgggccaataacctaatcgctcggcccatagaaaatgggccgagatgggcttcgtgatccgatggaggtccaggccgcttccaaacactttgtcttctcttcttctcttccttgtgctcagcttgtctggttgagtgcggatttgagtagactgtgaagacgtgatcgagtgtccggtcgagtgatggtgttggtggtgagtgatgatactcgaccacagggtcgagtaacgtggtagagtgaacggtcgagtgttgtcaggtggtgttgcgaagtgatactcgaccaggtggtcgagtggtgtcatagagtggcctgagctgaggttactcgacctgggggtcgagtagatgggaagaatgtgaaacgtcccatcccgggctgtccgcccgngtgaggttgttcccatccgaggataactcaagtgtccttaggtcctatccgaattcgctctaagtgtaattctcaccggaaattctgagattcataagtaaaaaagagacaaattcacacaaagaaacaagccaactttattcatataaggtttcgaacgacatgagtgtttgcactataggctattacaatcattcgatccaatactttgcttaaacaccacccacttgcccgaacaaccatccttgcagctaagccaaatccttcccacgaatttggtcaaatcctgaaattaacgaatcatgagtatgccgtagtttacacttagcgatcatgcatatgctatgatgctccccatgttcaccccccacacataactcaatcgttagaacagaatattagaaggatagatcgcatcaaccgaattcccgagcccttttaagaccgttcggcctaaggtcggtacggttatgcctcaccttggtcgttcgaccattcgcttcctcggcctcgtcgcccaaggccgccgggagtgcccatggtctctaactcggccatcttgttccgttctctcgcacccttagaaagatcacgtttcttttctgagtttggtgagagtttcggtgtatggacttgtgttctttccttggccgaagggcgagttatttataaggaaggggcgagtaaccgttc

SEQ ID NO: 40702 - DNA, 853 bp, Arabidopsis thaliana columbia
caaaacgctacaccgtcgcgtagacaactcgaccagggtagctagcccgtctctctgtgcccttcgcactacacatcaagacccaacatttcaagatatgatgagacatggttacttaaacacagagaatcatcaatatccttactcaacaaaacctcccaaccataagccataagcataagaatctaaaggatatcatatgcggcttagtaccatcattcacaccattaactactactcatatgattcatgaaataaatcaatgaatgcaagagtatatgatcatgcaaccaaacaagcaatcaatcacccaaataaacatccaaacctattatgtgccatatcacatgcatcgagactcacagagattcggttgaaggtttaaggttagcttcaatgattctcggacattccatgacttccgaatcttgatcccagctcaattaaactctcctcatcttgatctaacacctcttgatagaagcagccttgattcatgaagctttactccaaataaacatttatgggacgtgttcctcgggaggttctcaatcggacaggataacggcatggatttctcactcatgggtaggaattctcaatcacggacataaattctttagttaagggcaaattttctcaatcgcgggcaaattttatgagtcgggcagcctttcggttctctcttctttctcccatcaaatggctcgagtttggtcaagtatttataggtgggacagattggcctccaaagaaatgcatgtcatctggtggtgacattttgcgggacacatgtccccgccagtgaagacacatatgcttcagaaatgggacgatgacacgtggaagagga

SEQ ID NO: 40703 - DNA, 1312 bp, Arabidopsis thaliana columbia
taggtaattatttgatctattatacccgaatgatcaaccccgactaagaacaaatctaagcttaatcgttcctctgtttcttatcacccgcctgattacaaacacccactttctaagcttttgctaggtttcgaaagctttacacgtatggcaatattctagagtgcttaggcggctcaatgcctactcctagaagatttatgctattcttgctaaccttaatccctaggatctccgagaatcaatgagcggaatctttcttgaatcgtcaagcctatttcttttccttgttcgagatcctccttaatatttaagcctatctctttccttgttcgagatcctccttgatattcaagcctatctttttccttatttgttgagaagaatattcaccaaatcttctcaaccgactttcgtctttaattaccatgccaagtcagcaaagcttcttgacacgtcagatcaaccactccagctccgccatgtcagctcacgcgtccatgtcagcaactcagacgtttgatgtagatttgatgcagcttcctgatatccaacagctctctgatgtccatcagctcgttgttgtcagaatctgcatcttcaatctcccccgtttttgacttagtttgatactcaagcatccttctgattcaacttgaaaagatactaaacaaaccaaacaaagataaacagaacaagcaatatctagctatagataaaagcttgttcatatgagaactatcttaagaacgcaaaacatcaataacagcgaaaatcaaattcttaaccgtttacatcactcagaagaattctaccaacgaactctaacaacaggcagtgaaactatgtctaaactcaaaacgaatcaaattcaaacaagtctcccacataaacagtgaacactgctcaactagtaattagtcaacaatacttatcaagtaatcagtcaactatgaacattactaagtagtcagcagtctgtcaaactcccccacaatcaagcattctataaaccagagtcatctccccctgcttgagtgcataactaagttaaaaacaactagttacagaagatctacattaggacaagtagttagaaatacttacctgaaatcagtgtatcgtaacacactttgatgaccatccacttctcagactactgcagccaaaccgggtttgcttccaccagctgtttgaatcaaacaatctccttgacgagacctgaaagtcaaacagaaggaaacccaaacacagcaacaagacaaaatctagaaacgtttctagcatacctatcaaaagataagattcgtcc

SEQ ID NO: 40704 - DNA, 828 bp, Arabidopsis thaliana
cggaagcagataagttggagaaaacattctctacttttcatgctaataacattgtcttgcagacacagtaccgtaaaaagggatttgtaaagtattcccaacttatttcttgtctccttgtagctgagaaaaacaatgagttacttttgaaaaccatggactacgcccatcaggttctgctccattccctgaagcgaatgtgacatcctatgatcaagaaagtggttacaaccgtggtcgtggctgtggtcatggtcgtggtcgtggtcgcggtcgtggtcgtgggcgtggatacactggaggacgaggcaatggagtttactttaagaactcaaactctcacaagaagtgggaaaacaaagatggtaacaaacaagtgaaaataccgtatgcgaatatctgttaccgttgtggagcgaaagatcactggtgttggtgtcggatcccgcaccatggacttgggaccggtcaaagattgccacataagcaggagaaggcccaaaagaagagaagcccataggataccccgagttgatagcacaagcgaggtttgacctgcgaagtggatacggaatcaaggtcaaagttacccggagtgaagtgtcgaatgggccgacagttgaagcccaagaagttcggagtcaattcaaattcgacgtttgaatagataattcaaagactgaaacggatatatttaagatagaataattttgtgtaaatgggaatttaatgtattctttgggtataaattatgggtcaaagaccatgtaaagggacacgcatttttgggcaacacactataggcatttcctacaaagctcatagttt

SEQ ID NO: 40705 - DNA, 1692 bp, Arabidopsis thaliana columbia
tccgtcaacatccaatctgccagctttcagatcgatttcccggcgacctaaaaggaaccaggacccgatctgcgcatcattatctttctaaagaatccaactttgcctcttttgttgcagtcttgtaagaattctcacagtttttccgcgacgaggcatcctggccgaaaccatagagcggagttccgctgttatcagatcagctgctttttagatcgatttcccgtcgatctggtagaatatcagaatcaaccttcacatcatcatgaagccccaaggcttatctttctatagagaccaatctcgtctctattgttgaactccttctaggttggggaacctgctacatcatctttgctaccattcttcgatcgcgtcattgttattctcacttgagatcagcaactcaaagttcaacactatcaaccaaagatttcaccgcacctgacgggtcgtcaaatgcacttaagatcaagaagttattcatcttgcttcctgtccaggaaacaactgaaaaagtcctcgatccatgccaagtctgaaacaggatttggtgtatagctagagcttttgcgagacatttttcggacgcaccagaaagagttaaggttcgagtaagtactctttgcgaagatataattacagggaatcctattctttaaacggattatcgattggtgttaatctctatctgcaaatctccttcaaagtttgcccaaaatcatccatactgcagaaatcaggaaacaatgactctgccgcagcaacttcagaggatcatggaagatacatacgacgtctgatctagctagaaactgctcggatgtttttcccgagcaggttatgaattctatcttctgaaacccagttatacttaacacatgtgccccagataagtttctaaacgctgataaatgactgaattagatcgggtcgcaatcgtgggtattcaagtctactaaattgagttactctaaacacactggtaccgagctaaccacctcgagcatgaaagacaaagcttcgcccgaaaacgctcaaatacattcactcctacaaaaacccagtcctaactggtacagagccgatcacctcggaaactaaaacccagttatcataaacattggtgctaaccttctgaataaatctaccaaaacccagttgaaataaacactggtgtcaaacggttgcttcgtctaaatagagtttcttatttgcattggcctgagtgattagaaatcaagttatcccgaataacttggtatcgagtcgatcacctcggaacaaagtatactaaatccaactttaactcaagcaatttgtacccgagccaaccacctcgggtatgcgaaaggcttaatcgaacttccattatatttatctaacttattgggaacacccctattttataattagactatgaagcccaagtccagcccgctaaggatttaaacccaagtgaaaacctaatgatcccacgagattataaaaatgaaacgcaagttgcgagtcacaccaccaaaaccctacgccgtcaaacaagcaccactcagaccaccagtgattgttgttgtgatcagccagagccactgcgtgaatcatcctcactggagagatctgtgatatcaaacccgtccgcttcgccgttcgtcccgtcacgtgaagccgacgagaaagcttgttggggagtgg

SEQ ID NO: 40706 - DNA, 542 bp, Arabidopsis thaliana columbia
tacaatcctaaccaatgggatcctatatcaaattgcattcaggatgaaaaagaagcgacatgaaccacgacaaagagaaaagttagataaatttaaagttgagtgagaacttgaagtctttaattctcattatacaagcaacaattttctttcttcggagagaaagaaatgagagattgcacaacacttcaagttctctcctaagattgttttgtggcagattgacataaccatccgtgacaatatcgcaaaggttgtggaagattgttgtcccaatggttcacccaaacctagttactatagttgggtcttgacttgtattagtttcagttttttttgttttgtgttttgttggggtccatatctagaagctgtcccaaagtaaataacaatgtttcttttggtaatagtaattcacattttatccttaaaaaatcttcaaaaaatgaatatgaaagttacgacttacgagagaaatgcaattgtaaaataatgaaattcaaatttaaagcttcaatgattttgttaagacagagagacgt

SEQ ID NO: 40707 - DNA, 473 bp, Arabidopsis thaliana columbia
tacgcgtctttattagctatttactcttttacccttcagtgttgttttggatagtgtttaatccggtttactccataaaaatttgtaaggagtggacatgttccaaagtccaaagtttaacacccaaaacataaagcgagtttgtgatcaaagttttattcaccttactcatgtaagtaacgagtgaaaaacaaaacagtttttttctcataactttaacaataagaagattcaaaccacttgacaacaaaaataaacgaaaagattcaaaccacaatttttttctcataacaaaacaaaaagaagattcaagtcacttgtcaacaaaagacagaaaaatccaagtagcaatttattcattttgatacttgttttcaaacttcccagagacgagtccaaacaccaagctgatggcaaacgtaagcatctagtgacgcctgaagaatctgatcaaggtctagatcgtaagcggt

SEQ ID NO: 40708 - DNA, 531 bp, Arabidopsis thaliana columbia
aatggtgtgttgcagctggattcctattttgaggacttaagtgtctattatcatcaaaaaaaaaaaaaaaagtcttaattattagtttaatccaaaacttaagtacactcctttcgtccgaacatagccaaaacaaaagttgccactttaagttcctttgaccactgtcggcacgagaatcgtttgacttctttctcatatgggctttaaattagcccatctctataattttacttttgttgagggttttataagcccattaagtttcggcccactcttgacgttaatctgacgtcagcttgatttttccggcggatttctcaaatcgacaaattcgttttcatcggttgtttcagacgtaatttccaaaaatgaaggctgagtctagcaacgagtctttcataatcgggcagcgagtccactctctcaacgattcgcgtcgtgtgggcccgtgaaatacgtcggagatgtggagggatctccggaacttggatcggcgttgattgggatcaagacggtgatggaaaacat

SEQ ID NO: 40709 - DNA, 448 bp, Arabidopsis thaliana columbia
ccattcaactttaggcatttatacaaatgttttgatgttctgtcatcttaaccactaaatctggtatagcacagaaatgttgattcaccccgaaaatgggcctgttacacgatcggcaattaatctgataaaacgtcataaatatctaacggccccattctatagagtattgattttttgttatgattattttcatcaaaaaccaatactgatctcgatacgatcgtgaaattatcaactttcacgtgtgactaaacaaagacgttaccatcaacatgctgagtctaagccagtagtgatcatgcattttgaacctggtccggctcagtttgcgtcatctatttatttagtttacgtttcaagtttcaatatgagaaaactttgacataaaagattgtcactagttttaagagtttaagagatctaaacctgagtggtctactttccg

SEQ ID NO: 40710 - DNA, 566 bp, Arabidopsis thaliana columbia
aaaaatgttatgtttcgattatgaatttctagcttttcaccatgtaacaataataagtaacgtttctagtctgtacatgtgattatatgtgtttcataagtctgtacccacagtcatctctatgtattcgacgttcaaaagaaagaatgttttagtcataaacagtatcaggtttaagctttcaccgataacactctccaaggatttcagtttcccttaggaggtaccttggacatgtgttctaattgacacattgcctttctctttggagattcaacgccagcaaacttggacggctttaaactccgatatcctctgcttgaaaaccttctttcctacgctaccacttcagtgggcaagatttgttcaatgtttaacagaataaaaagtcaaaaccaagaatgtcaacatcatctatccattatccatgtgatcggctgattgccactaccttggattacattttatttgactggtcatagattcgttgtttaggcaacttctgttttgtacctgaacctgaacgacatgcaacatggtgacgatggcagatgagtaaatgtggt

SEQ ID NO: 40711 - DNA, 587 bp, Arabidopsis thaliana columbia
tcccggggaggagcgtctgtctaaagctcttttttgttcgacaaggaacggcaacacttctcctactactccacacacaaaaataaaagcttctcaggagtaaatggtaattaccataaagccctcccgttgggatccacctaacaaatataggataacattatttaattaaaatgaaaatctgataattattgagtgacacgccggtgacaggacgtgtgtcactgctataggcggcggtgagtggaagtgagcctacattgcttcatcgtcgtgagagctagaattatctgaccgacatgtgttttatgtcagtgaaaccacgacacgtggcggaatacatgagcgtacgtaggtccaaatactagctttgacgtgtctctatttccatacggtaataaagtggaccctagttaacccctcagaatcgatgattttgtgttaccatttatggaatatttttgcatgcttggatcgccaaaggcagtgtataaaaattgcttagttttcttttttaatttggggtttaggatgatacgtatgtgacctacgtgtgcttttacaatcaatgaatatggatgaggagg

SEQ ID NO: 40712 - DNA, 594 bp, Arabidopsis thaliana columbia
  unsure (1)..(594): unsure at all n locations
cgcttgcgtgtgctaatgaaaatttgaagcactcttccctaagagttatttccttaggaacatcgcctgattgcgttacatcagtctgagtctcttgtttcattaaacgccttattgttgctccccagtccaagtttggcaatctcggagcatgagacaaacaccgcaaagcacttgccattgtgccaatattcaaagggctacccgccaaaggaaaacttggatttgtcaggccttgagcaagtttcatgaccatggtatgttcaggaacattgtgagagatggaattacggtcagagtcatcagattggttttcattgctgagacttgacgattcccctgaccgcatgtaagttctaagaattgagattgcccatgcagcataatgttggagctggcgatccttggtattttgtgcgataagaaatatttcttgcacaactggcgtcaactgctgagtaaaatatgcgtttgaaagcaaaggacctgatacataagagatttcctgtagcaaataaatgaattgttaggaaccatacacatttatctanaagggaataatcagcaatgatctctgagaaagatagaccagaa

SEQ ID NO: 40713 - DNA, 520 bp, Arabidopsis thaliana columbia
gtgttaagtatgcttataaccaaaaattaatgctgttttcgtttgtaaaccactgcaaccttacctgataagtatgacattgcagctaaagcagcgcctctgtgcatagctgtacaacatatagccgctttgtggaaagaaatttcaagaagtgttccagaagtacccaacaactcctgtttgatcaatataaattcaccccaagactccttaagaaattatgaactgaaagttatactttaacaagcaaagagtggttgcaaaccttatgacaactacggataagtgctgatgcgaaattcacatacgcttccaccaaatcgggttcttggtcgcatatatatgaagaatttatgcccatcagtgatgatgcttgagtaaatctttcaaacgtagtgactaaataaggacccatattcctccttatgacaaaattcatcggcgaatacacaggctgtgataacaagttcgtgaaaaggtgaagttcagacaactggctggtcaataagctaagtttggg

SEQ ID NO: 40714 - DNA, 640 bp, Arabidopsis thaliana columbia
agtagcacaactttgtttgagaatgaagacattatgtgcttctgatttaagaacacaacaagagctaaacaatccacttatatgacttcaaaggaatagaaatcaagggcacaatcttttttattaaattagtttaccctgcaaattctttgatgttattccacaagtagttttcttgctccggttcttcattttcctccttaacttcatctttcttgttttctgagccactgggtgcagtgctcagagctgaaaaaataaaggcaacatactcatgacggacttcatcaatgtatacgtgtatcaaatagtctcacatcgatgccgatgcacagaagatacaagaggttccattaatattggcatacaatcaaagagccctctttattagagatttgacaacttactactgggttgctgaggcttagcacgagttcgtgagcggttgctggacgtgtccttcagagatgcaagttcctccagcaactcccgttctccagcactgtccgtaggtccagaaaacgaattgaaagaaggtatcgacagactcacaaaattttgtttggattcgttaaataagcccaagacagttcaacggtaatacttatttgatttggtcagaactttgctgtaacaagtg

SEQ ID NO: 40715 - DNA, 502 bp, Arabidopsis thaliana columbia
aaatttattatttatgttgttatgtgattatgcggcttatcaatcattgtcaatcttaactaatagttgatgcatgacatttcaaacatgtatgaatgtacacttttctgttataacgatcttaatgtcatgatgaatatatcatatcctgttatagtcatgattcaaatcaaaacacgagtttgcttttttgccaatatgtttttagagcatttacggcaatgtttgtttgcatcttgttgtttaggtatctagaggaatgggtacatgttgtacatatatacacgcttaatagtgatggttactcgtctatgttagaaaacaccgaaccaaaccaaacgaaatcaatttggtcaacaatggttaaccaaccggtaagatcgacctgaaggggctggaccatggaatgttgaaaaagatggccaaacagtggatcggatcggttctgatcgtggctgataacaagtcccacactagaaactaagggtgtggacaaagttga

SEQ ID NO: 40716 - DNA, 575 bp, Arabidopsis thaliana columbia
aaacctctaatattccaagaaaatatcatcattactacccaaaaagtgtttttctgaaactcccgagcaacagcttgaactcttcatctcatgtggttgaaccagatcttctgcattttcttccttgctttcttggtcatgttatcccatctcggaggagtaggaaacatatctaagtccggaagatcagaaatccttgcagataaacctgcagctaggtcgctcgctggggagcacaagaccatcctctccgttccaaaacccttaggagggataggtcgctcgctggggtgcacaagatcgcctcaccctgtgaaggttcagaatgtgtccacccaggcttacagacccacttcttaacgcattcaaaaggcccctctagagtcttcttccccttctcaaccacaccattagcaatgagtctaggaggagtgctagtgaatctcttcttggagcgagaacgtctgcacttcactttgaagctagaagcaaagatgtgctaaaggacttcgtcagttcagctagacattggaggcggtaaacacatgagtgtgatatactcttttgaacagagg

SEQ ID NO: 40717 - DNA, 601 bp, Arabidopsis thaliana columbia
  unsure (1)..(601): unsure at all n locations
tgtttgattgatctacaacacatatatatgactacagatgtataggaccagtcatgtcctagatcaattaaacatgccctcatttgtattcaattggttaaccgcaagtttatctgttgcatcacaagaccttcgtatttaaacatgccctcattccaatctatgtgtagagtgagattgacaagagctgagtttgaagcagacgcaaagatgctaatggttattatttacacactggtttaatgccttcatatacattataatcctatgatcactacacatgatcaaactaataactgatggaaaaaatttaagagatatgagtcaccaacttcctcaagaaagcaaatatagatgtgtggatattgttgaagtttacctttccatgtaatgctaagtatcttactgttttatggtaaagccaaaaataaatttattttcaattaacggaggcaaaaaactttgccctaaattctatcatattttagtgtagtgtctatggtatttgtataaataaaaaagcataaccanacgattagaaaagaattcactgggcctcagctattattaagctggactcaaaatttcatatgtatatgta

SEQ ID NO: 40718 - DNA, 448 bp, Arabidopsis thaliana columbia
tgaataagtaaaaaaaaattgaaagagggaaacttctttttgaagcaagagttaacgacctgccgtttccatacttcagaacacgaggggatacgtcgtcgtttgctgattattttcctccaacatttcaaacaaacaaaacgacatgccgttttcagcatacgaagataatacgttgtcgtttaacggtcctcctctgttccttaaaattaaaaccactgaaactcgaaaaagcctcactcttactgaaccctttacttgcctccagtttttccggccaccggcaacggcgaaactccgttattgtatctaaagtcatgcctttgaatttccctctccgaatacgattcttcgctcactctctttcgggtacacatctctcttataatacctcttagctccgtccctttgctcttccggatattctcttctggattgaatcactttg

SEQ ID NO: 40719 - DNA, 1535 bp, Arabidopsis thaliana columbia
cacatccgtgcactgggaaatagtaaagttttcatgtccaccgccttcagatcttgctgagatagtaggcttgcttcgtagaagcggattataaaaagtaacccaacactctctgcttaataaataacctcatacattggaattctgatttcgttacaaagcttttggttatactgaaacatctaaactcttgttattgccttcttgcaggtaaattaatctctcgacttgcacatcaactgactgtgcagaccacgagacatgtcatctaaacaagggaactcatctttcatactctttcaagcaaccaaaatcatacttctctcaggatgattcttgacgaaacaaaagaggttacagaatccagttttaaaatcaacagccttgtttatagctctgtggcagtgtatacaaactctacaatgacatgaatgataatttcagaaacgaagtgtgtaagttgtgcaagtgaattacaacactcaaacatcaaacccaaaattctgtaagcacgtttctaaatgatctcgcttcttcttctggcaaccattttacagcaagaatttcaaacaccaaccactttaaactcgatgaatcattctgttgaaacattcatgccctatgatccgtcaaatcagcgttgatcaccacggcgttgtttctcaatcatctctctttgcttctccgcaagcttatctaaagcagacgaaacggcgtcgcttccacctatcagaagccttgtgataacctccggatccgtctcaaatcgcgccgcttcaaactccttcctcgcgttctctctcaacacgtccctccataaatttcccctggaatcaatccacgtgaagaaccgagtcgctcgtaatatgtctctgtacaaactcaacgcttcccggcgcgtgctcgtcagacgccgtctattcagaaactcagcctcatcgtgatcgattattggtttctctttcttcgctagatgtctttcgagaagctcctccacggtatctggaccttcgtgcaggaaccgcctcgtcgacacagcgccgctccgattcatcagatctagacgacctgccagatttcgccatttctgaagcttcgcagccatcatctctctcaaacaacaacattgaaaattttcgatcctggtgacaacaacaacaatgcttgataacataatgggcttcgatttctgaaactgtataagcccagttaaagcccaatataatcattaagttcgcaaatgttatacgtctctaataagacgacgacggatttagataaaatttgagcccaaaacgcaccaccactcagcgttttagacctgtcttctccagaggcagagaaggagaagcttcctcatatggcgttcatagccgaagaagccgtttgtctattccttcctctgaatgcaaatcatcatgactcatcccaaagatgagaatttgaaagatgctataaaggttttactatgcttatacgaaaagggttcaaatagacaattttttacgtgcattgagaagaaaaggatgtgattg

SEQ ID NO: 40720 - DNA, 599 bp, Arabidopsis thaliana columbia
acacagggcataatcccaaaactagatgttgtatacaactacaattctcgtcttctaaaaggaaacacacagagaaatgcatgaaagagtttggaattagtaccttctctttgacagcttctccctatctgaaatttgttgctgtttctgagacgagctagtggctgaatctattcataccagcatatattgggttcttgctccatctttttgccttctgcaactgcaaacaaaaacaagaaacaactgcatatatgaatcaaatatcaaagacctgttagtcaatttctgattttgcataataaagcagaactgtaacttgctaagctcattagttctcgatcacaagctaatcatgtgtttcctagtagtccagacatcaacaaacataactgagaagaagaaaatcgaagcaagaccatgagttggtcaactcgatgaaaagaaaattttgctgcttgtggcgacaaagcatcattagagacaacaataaactcaaatcaaagcttaaacccgattcgatgatccttaaattccacggaaccaaagagagtacaacttgttttccgttaaaaacatgatcagttttgagttaaaaa

SEQ ID NO: 40721 - DNA, 583 bp, Arabidopsis thaliana columbia
tgacttgtcattgctgatttgcggtttgatgcaaaactgtggaatataatgatttaaagaaatttataatgcgaaaaccttttcatcgtcgtggtagaagtgaaacctcaattctttttacaaacgctttttttttacctcaccggtggtttaagaaaaccttgcgaaataacatggattaagctaagatttgttcttacctaatttgtaatttatcacattcacaccccggattacaatttcattttgcatattaatattgccaatcaaaacatacatttaactagactagaaatgtgtttaattaagtattcgtagttctcttatctaaggtagtatgcgtaaactatagggtgaatttaatatatatgctcagaagaatgaaaaataaagaatctgaccatgaagttttgttatttagttctctttcatctgattcacactaatgccaaatatacccttcgtcacatatacacgttaacaagaaaaatatcaagataaaacaatttatatgcaacaataaaaaatgagtttcggcggtaacaagtttaggtagttattatttgattagtatgataacatg

SEQ ID NO: 40722 - DNA, 611 bp, Arabidopsis thaliana columbia
gataacttattttctcaagtttaaatagctgggtcatctccttggtctctaatactcgtgtcttcttgttgtttcagccttgctgctactttgcaacccagtcatgtatgaaaggagatgattgtcctttcgaccatgatctctccaaatacccttgcaataatttcattactaaaggtttctgctacaggggtgatagttgtttgttttcgcataaggtaaaaaccaatctctcgatcttctcatgattcttcttccagagtctaataacttattgatcttttgatcctactatactaatcttcacttaacagggtactccacaatctgcttcagacacgccgagtgcaaatgtaacagtctcgtctactaagatcactgcagcgtctttctcgcctcagaaaacaaaaaaacaatccgtgagagatgccatagccaaattaccggcgatccaagcaagagtttcaagctctgttgcgtttttgaagcctcaagtcattctaaccaacgaaactcatctgatgcatcatcttcaaagatcaatgaacatgtaacgcctccacaggttcctcctttgagaaaaccatccgttgctccaaagggtatgagtt

SEQ ID NO: 40723 - DNA, 537 bp, Arabidopsis thaliana columbia
aacaattcataacaatgtatcaactataagtttgttctcgtttacgtgtagagaacatgttaagttcttaggtgacaaggtaatgctaggagaagtggtcataatgtattagtagtagctaactattttgctagagaaagtagttcaaaaccagttatagcatagtagatggatgcaggacagtcgcacttgcacttgcatttgtagttttgattgttattgccgaccttatcttgttgtgatgttgttacccatgaagaatgttgatggatgcagggcagtcgcacttgcacctattgttgatagaggattgtcgtggtttacagtaaaatgcaactttgaaagtcagggaaaagtgaggcacctaaattactcttgagtaatacatatgtagatagttgatgatggtgatgaaagagtaattaaattctggatgcattgcttttgacaggcttttggcgcactggttgggatatgtcttggtatggctttgatgctatttatcgttgtgacactgctttgggcatagcagaagat

SEQ ID NO: 40724 - DNA, 1130 bp, Arabidopsis thaliana columbia
agaaacgtttatgtgtctaactgtgtttataaagattttaaatactgaatgtagaagagggattggtgaactcgtggttattcaaatcaaaaatcatgagatttaggtttaatgttggttttggttgtttcggtttggtttggtttgattatagattttttttttttttgcgctaacatggaaattttttgaatattgttttcttttttcaaattactaagtagtatttcgaaattttttttttcttttttttacgacaagtagcattacaatttaaaactaaattattttaatgtatttttcctgtataaactatcaaatttctaaggtttctctctcttctctctttcatttttcattctctcagatttctctgatgtattttttcgttgacttttatctcatttgaggtgggtttgtcgtttggttgtaccagctttctcaacggtatatatagattggctttgcttccggtgtagatgccttcgtttgcatattcatccggctatgtttctgacatcggtggtttaatcaacattggtggtcggctctggcttcggatttagcggtctttcggtaatgataggctagcttcttctccggaccgtttaggtttggtctcgcttttgttttttctttttccgactatttcgatttttaatgatggaacaaatattttggatagtaagaactttttcaataaaaacaagtatatattttgtgaacaacaaaattttttgaaggttgaaaagttaatatcggttgacgtaaaaaaaaaaaaaaattgaaggttgaaaagttgttgattgaagaagaagatgaagaaaatttacagatctacaataaatggagtcatattctcaacaaagctaaaattgggattttaccttgtttctttaggcaaatatataaatatgtaaattgaatgagatttatgatgtttttggtggaattggagctttctgacgtcgcaacaatctatcggtgactccaacttcttcaacgtgtctttcaacctggttctcaattgacatgtgtttgtactgtatacaactttatcttcagtttaaggttccttaattggacttttgttttctattcttacgtttgtttgttttaaatataagtaa

SEQ ID NO: 40725 - DNA, 545 bp, Arabidopsis thaliana columbia
taccattgtaacattctcctcttgccacttcttcatgattgtcatcagcatcagattctgttccagaattatcttgcttctttgaattaatgtaatttatattccgaatcaccaccttccctgatttccttcttctacttgatttttcattatctctttcctgatcttctgattcggagtcctcgctacaagatgaatgatgtttccgagcctttctttggccagaaccacgtctagaatcatcggtagacggatagggagatggatatggactagctcctggatagcctgggtagtatggcatgccctgcatcgtatatccttgaaatactggaaaggtgcccggtggggagtgaactggccagggtgcatacatcggctgccgatgctgcccttgcacatattcttgatttccatttcgtttgttgtctgtaggagacttcgcatctggatacaataagtttctcgaaatgaatatcaattgtgccaaaagcaatgccaaacaatgcaagaaaagatattcaactctcagctactatgactca

SEQ ID NO: 40726 - DNA, 1311 bp, Arabidopsis thaliana columbia
ttgtcaaatggtaaaagtacggaactatagatcatctttggtaatttataaaaaggaaaaaaaaaacatgtataagagtttgagttttttcttacccattatctttaaatttttgttgttttctcaaatttgtagaacctattatttctgtagattttttttttttttttaaatcaaactcggctcaagcagtcgtatggattttgggctttaatggcctttgtaatctctctactgttttgtttgtactttatgatttatcagtcctgggcattcggttatccattcggtttcggttgatgtccattctgttttcggttctttcggttttaaagtttaatatccattcgattattttgaaatttcggttcggtatcagtttggttctggatctttcggttcataatttagtatctatttgattattttgctttaaatattttcgaatattttggttttttttggatattttttggttattttcgagtatttttattattttatttatatattcatgtctttttaattatttattatagaaataactaatatttttgaaaatataattaaaaaatggatattttcgattcgttaccgacaccgattcggttttggtccttttgcttatagaattttatatgtattcggttattttcaaattttcggtttaattcggtttggttcgggtcgatttttttgattcggttttggttcgaattcagtttatttgtcgatgctagtttatctatagaataaagtcctcgccgagaaatcatctcataacgtccccttatgcaatcaacaagtctctcaactccccttattgtctctatatccctttctcttttaatgagatgtatagagactaaattacccctcctccttctttttataatatctattataaaactaaataattaaaaaaaaactatattgaaaaaaaaaaacagaaaacgatactctctctcctctcctctctctctactctcctctcctctctctctcgagctcactcatcgctctcttgctcactcatcgtctactctcttgccggaattcgctcaccattgttgccatatccttatcttcggcgagcttcttcgtcatagaaagaaaaggtaagtttttcgagctgaatgaagcttaaaattgaagattagaactaagagattttgtcaattagatttgagattaagcaaattgtgtttgggtatgcacattggaagtttatgcatactttctgggttgaatagatttttaaatgggtaagaaatggtttccacaactgaatcatagtgaatttcagttttg

SEQ ID NO: 40727 - DNA, 1226 bp, Arabidopsis thaliana columbia
agttaagtttttgaaaattaatcatcaattaagatatgaaatactttataaactatttacaaaaatatggatgatataatatggtttttcacacctagctgagattgtgacaggctgattcctgatggataatgtgttcttctattacaacatgagttaaatttgtaagatctgcaaatactctatcgtaattagactttagaggaacacattgcttagcatttgatgcattatgttgtgtaacattctattacaatctagaaatgggagtggaacagttcctctttggaggctgaaatgaatctgtgttgccattttcaccaaattccatttttttcttcattattctagaaaaacacactactattacgaattgaaacttttgagaaactaaatgatgctgctaaagtatattatgtaaatttgtataggaaataataattataacttttagcagttactttgttttgatttgtgtatattttattgggaaaattaaatttaaaggatatctataaaaaaaattgtccatctattccttttttttgtagattagtcaaataggtttttcaaaaaaaactaagtcttatttacctttattttattttataattaaaaaaaacaataatttcctaatctatttacacaaaagaaatagtaattttagtaaaattttgagaacctaaatcctctaaatgtattagagtctttcgaaaccctatcttttatctctcttcctcctttactcgattaaaaaaaaaaaacattcagctcttaaaaaaaaaattccggcgaaacttactctccacactcgccggcgcattctttgccatctccgggatcatctccgttttcgtcgtcgccggcgatttctttgccttctctgtggtcggcgccatcgtgtccaaagtcacttgaatcttcttcaatcaccgtcgtgaccactcatctcaacctcccttccttctccgccaccaaaaccgccaaggtccgtcttaatttcttagaattcatattacttgtagagaggattcaatttcttgactcttaattttaagggattgcatgtagacttaataactcatctagctctttgattcattttaatgtatttgtgtttgtgtttgaaattatagattaagacatagttagatgaatttcgtttttcatacttgtaatttagggcctcaattttgggtttaaggtttgattttaacttgggcatc

SEQ ID NO: 40728 - DNA, 717 bp, Arabidopsis thaliana columbia
  unsure (1)..(717): unsure at all n locations
cgccatgtggacatgtattagggaatggatgtaagaacacaactccgtctttagcaaaaaaaaaaaaaagaaaaaaaaagaagaagaacacaactccgtacagaaaagataataacagacaaatttcatataattcgtattttgcacatgcatttgagtttaaatgtacacatgatttgtatggtttatttacttatttatgaatatatactatgtcaataaagattatcgatcgtctaatgggaaaaatacgtaaaccgtgatatgtaaatttcactcattgcacaataatgcccctctaaattaaggtgaattataacttattaacttgtaagtcatagtgtcatttactattgtatctccgttgaaaaagataataattaagtcatactatacggtagtaatttatataatttttgtggataacctctatcacatgttgtgattttatatattaggactaaggaatatgtacacttcaaataaatgaaaattacataactttttttttagttccttagttacattattaaatcttgtacacctagcctgatggtaagtccgttctggttaaggaagctctatgttgtctttggatgttatggaacacggttacacgaagtctatatatacatttttgtaccattttgtgaaataaatcatgtagttgggacttatttacaatggttgcactgaattttaatatntgtttttgat

SEQ ID NO: 40729 - DNA, 858 bp, Arabidopsis thaliana columbia
tttgttagtcataagtcttaaaccatttgttcacttgttcatctatttaacatattatatgttgtgtacttgttaatgacagtgacattttagcggacaatctctgtcgacccagaaaccaaatctcaagtcaccaaatctccccggtttggttacaaatgtaaaattcaataggaatgcgacttcggttctccgggtcggttagttcggttatcgccaacaaaattatacagatgtcgatattaacctaaaataaattcggttcgatccggtttccggttaatttgttaattcagttatgttttgactaaattctgggttttgggttaaattcagtttggtttggttcggctattgctgaaaacggtctaaattttgtgaaaaccggtttaattttggtataatccattttcttaagtatctgagaaatagataggttcgacctgaccctaaccaaaattaaagtcctgtcgatcggttcagccgaaagaaccgaaaccgatccaaaacacgaaatctcggttcggtcttgtttggttttctcagttcggttatttatccaagcctcaagtaaaatgagagtttgtattagatttgagtcgtttggccaaaaacaaaacaaagctagctgagttataacgaaattacaagccaacatctagtttctattttattaatccatacaacgatttttttgtggccacgtttaatttaggagagttcctcgtacggtactaaagccaaatagattagatgagatgtctcaattcaccaataaacaactcttgttaatcccaacaattaaaatttaaaaacctcattttggctaaattaagaattaaactccacctctcacaa

SEQ ID NO: 40730 - DNA, 769 bp, Arabidopsis thaliana columbia
atcaaccagcattttcttacgcattcattgcattgctgattttccacaatcattcatttaaaacttgcaatctaacaatatccagcttaaaaaaaaatctaaaaatgccgtgttaacatataaacttcattttgtgaaataccggatttgattataataatgtgatgcttattaaaagacctagtaaactaaaagacaatcgtcatagagattttttgttgctgctgttacaaatagaataataattaatgagagacaaacgaaatcgtcaccggcctaattacgttacaaggtgcataagcactacacgtccgttcacacttgtttgtctatgttcccataattaaggccccatggctgggctgctcaatgtttatacaaaggaaaatgccatccacgtgtcagcctcgttggtcacgtgatggttactattttgggcgggctcacacatacaaaagtactaaaactactaaatgtggggactgttggacaggtgtcaaaggttccgtgagtcgttcgcggttagaaacgtcgcggttgtctttcacggtcaccgtccagtggtcgggaatgctttaataacgctggcaaggtggttggtgacgacacgtgtcctcaatcattccgttatgttgaagatatttctgctttctctctctttttcgtcttcgtttaggactctttccttttatagaacagtcttcttaattattattttttgtgatttaattataaccaacaaacattattagagaactaatcattatgt

SEQ ID NO: 40731 - DNA, 800 bp, Arabidopsis thaliana columbia
cgtattgcctgcatagttagattccgttaatgggaattagtctgggctagctttgcttgaggatttctatcacgggagtgaattggtctgttgttgaacctgttgtctagggatagcttgattgcgcttgttaaccattcgaataggctaggacaccactctactcgattaccccatccttaggaatttctcgtctatcttatttctctgttttatcgttatcgcttaatcgttctcattgcctgtttcttagtttttacaatcactcgaccaacttactcgaccacacccagtgtctggcaacagactgtgcagtcgagtatagctgtttcatatcctgtctattactcgacctgttactcgaccacatcctacttctggcatcagcctgttgtggtcgagtgattttagtaattctgttattgcttctgttttctgcatgttcgcttaggactgttagaaaccccaaaactgttattgcttggcttgacttagtgacttctgatcacatctcatctgtttgcatcacacccatttggattgacacctaaaatactacaacgacatgattggtgttttaggaataattgactaaaaacttattatcaatttggcgccgttgccaattgggtgtttgtttgctatatttgagatttcagaatatttaagatcaagttctttttcattttttctgaaagttactaactttgtgttatttctgtttgtctgttttgattcaggtactacgaatcactagcttcaccagttggtactcgttgtatgcaaacacggtcacgagg

SEQ ID NO: 40732 - DNA, 491 bp, Arabidopsis thaliana columbia
tgaaacatacttttattagattcagttgagaactttttttttttcttgtgtgattctttacgtttgactggagatgatatagagtcgttcgttttctcaaagttttcaaagttagaaaacaaaacaaaaatcgtcgaatttgaaccctagattatgcctatacatacataatccattaatctacatacctgttttgtaatcagaccggttgggcctaaacaatccttggacttggcttaatacgttaatgattttataagttgtaacattgctttttttaacaacaagtaatactataccagaagcgttcatacggtcaactcaacatgtctttttttttctttctctctaaccatattgtatacatacagtagtttgaccgggtttagattctccactccggtttaatattccaagtgactcccggaaagtaaaaaaactttgcagagctttgtttccatatgcatattttttccagtgtatatcctgat

SEQ ID NO: 40733 - DNA, 555 bp, Arabidopsis thaliana columbia
tgttcaaatttttgggaccactctcggtcttggggtggcttttagacgtcggcttacttcctggccacacctgaccacaccccgcctatgatttttcattttctcagccgccgccttctctttaagtcttccctcacattcactatttaagcacgtgaattttgccttatccacgtgccaattccacaagatgtgctgcatatatatcttatgttatatatgtaagtttataagatattttactcgatcagaaaaaacgaggaaagcagtgttattgcttaaaggatcaagttggtaaacagaaagaaaacgacttcaactacagtttttttgacggcgttgcaattatgtatggactgcaggaaaagatgatatccaataaaaacatatattagaaaaataattttttgtttttaaagtttttaaacctctgaattgatttaggctctcataacccaaaccatgccatgcacccacattgggggcctcgttttattctatactgagtttttaataaactgagtgagacagaggaggatcatagaagcatggtgt

SEQ ID NO: 40734 - DNA, 583 bp, Arabidopsis thaliana columbia
ggatgtcaactttctttctgaagagagcggcatcaacccagagactcaaactcaagaagctgtgtgtagagagcagactcgggcaagacggcagcaacgcgctcctgcaaggaggacttgtctggaagcttatgtttctttttcctggaagctggagtcaactccatactaggaggaacagcaggaggtcctccaatgggaggtttatgtgggaaccttcttccaggagcactaatcccttggtcttgagagagctgaaactgaggttgaaagttaggaggggccatgtgggagggagcaaacgatgcagaggccattccaaatggccaaggcagagagctttgaggcccttttagtgcgttcaactcgttattcccagacattgctgatcacaaaaaattgaatacaatcccaaattggtgtcgacagtagttactcagtaattttggctagaagaactcatcaaaatcacaacacacacactctatcgaattttgcctttctaagccgaacgtaccctaatttagtgctcgcgaggatagagcctaatcaatttcccccaaatctaaatagtaagatatag

SEQ ID NO: 40735 - DNA, 530 bp, Arabidopsis thaliana columbia
caagtgccctaaagacaaagtgtagaaagtgaaaagcacctcaagctagaagaaagaaataagaaacctaaattaagcgtcttttgtatttatgtaacccaaacctcacgagaacacataaaccctagattgagcaataaccctagattcggatgcgacttagagatacagaaattaacaaaaacaaaacatataggtacgcaattaacgaaccgattcggtcaatttaggcaaccagaacacacatcggtctccgttggcggaagtttttaccggaaaagagagaagttgtgatatgtgaatcgtggtcgtgatgtgacttaaatatctcgctctgaagaaaatatatccctgtttttcggatattagtccatttggcgggaaaatgatcatttagttttgtatcatttatgagaaattttgaacttttcaaagtttactactactcagcttttaggtttgactgatgtgaactgtgacggctgaaacatgaactgtcacatgattttccatagattgaacaacaagag

SEQ ID NO: 40736 - DNA, 378 bp, Arabidopsis thaliana columbia
tgatataactctataaaatatcccatactaattttgcttcaatattcaatataactttcttttagttttagttactttttttaattgaattacatcttttttctttatattcttatcgtataaaaaatttagtttttcagaattaaacattaataacttaacactacaaagatgtcaattcaacaacattacaattcgacctaatatcttcaatttcgacacatgtaaaataaaatctgaaaaatcttcgtcttaataagacaaactgtgattagatcatactatgagcgtctccaaatcaatatgctatagtatacatgacttatcagaatttcaccgaacgattagcggcaaagacatgcccattcaacacgaagc

SEQ ID NO: 40737 - DNA, 640 bp, Arabidopsis thaliana columbia
cattgtgattccgttgatggctattttattgcctccaatgtatacacattccacttattggctatgggctgcaggttagtgcttattgttgtgttgatacatatttagtttgctttgctcttgaagctttgttgttactttctggctcttattctagattcaattgtctggaattgcagggttctatctcttagccaaggtggaagaagctgcggataagcctatatatagctggactcatcatattattagtgggcattctctgaagcatctgtgtgccgctatggtccctgtcttccttaccctcatgcttgcgaaaagaaccgttcaaactgagaggtacattttcatcctcatgtatatgaaacgacccgacgtggcagacccatattcttgttctcattgttttacatcattttgttaaaacacaggattagcttgtataagacatggaagaaaggatccgaggaagaacggttcgagcatagctactccaacgttgcagtcgaagagactcggtagattattttgttgactcgtaaaatgtaagatgatctttttcttttgatagtttgtgtgtttacggttactggctaatagaattagatatagaaggtacagatttatgatccagttggaa

SEQ ID NO: 40738 - DNA, 462 bp, Arabidopsis thaliana columbia
cactaattgtctaattccattttatatttttaactaacaaattttttaaaagcaagtctaaataaacaatggtggttggttactagttttttttttcttttttttttggttggttactagttattagatgaatattcttgattgatgaatattcaggagaattatctacttgtaggcagtgtatctaatccaaattgtgtgtcccaattttggatcctagtaattgaaaatcatatcggaatgcttttgattaagaatttatttgagtattagtgagcttctgtcgttcattttggaattttagtgaacctcagtttcttaatttaattgtattttagtcagaagcgtttactagtctactcctaaaagtgaggactttaggcgatagtgataagcgaatgacaagtcctacacgatttacgtgaccacactacactgtttgtgtttcagaccagaacgatg

SEQ ID NO: 40739 - DNA, 467 bp, Arabidopsis thaliana columbia
aggatccctgttacgtacaattaatattagagtttaaattaaactaagactaacgacgttcccactaggtttattactacatatttgtcaacgccaacattagagtatatagatgaacaactatattgatctattattacacgaaaccaaagtgctattaccccaaaacattaatttgatcctctctaaccgcaacagctatgagtctcacgttacaaggacacgagcatcgtgtatccctaatttaccatcgtgatggtattgaatgcgatgcttgcgatcgatcatatggtgttggcttctcttgcagtgaatgtaagtttactattcacatgaaatgtatattcgtgttcacatacaagagatattcgatcatccttctcatgttggacattgccttaagctactcacaacgggagctcccgatcacaccgatcccaaatgcgatctttgcggtagaacacgag

SEQ ID NO: 40740 - DNA, 509 bp, Arabidopsis thaliana columbia
agaagaatttgagtaccttttgatttcactttaaagtgaagtgagattctcctaaacttaatatattattttatatatgccttggtgagatttacattcaagattagatggtttaacatttcagtgttccactttaatatgcttttcctctcttcctctgtttctaagaagaaagagtcatctcgtattcggtcaagttcaaaaccctttagtggctacaaacatttgctatattgtacgtatggttaagacttaagataaaatggataatggtttgtgttgtttcgatatgtagagaatagttgttacttgtcaccggctcataaaatatttagttttccggccgactaatcccggactttccagtagactcttgatttaggtttagctaatcatattttttcatctttttgtggagagtggaaatgtgcagagcaaattcgtcagttatacacttttgtcattatgaaattcgccaaaatggtataacacaagtgagacaaattgag

SEQ ID NO: 40741 - DNA, 299 bp, Arabidopsis thaliana columbia
tccaggtaattcttcaactattttctaaaatcatgatcaattaatgtccgacgtctaatctttttggccatgcatgcataaccatgaacagttattattctacacaaagcaattagacaattaaataatctttttgggcacagtggaaaaacaatcagggacgtacgtaagtcctccgccgacgatgggttatccgaccagagataagggggtgggtgatcctccggcaaaagcagtggagaaaaagcccaattgctgcgacgtcgtattacagtacatatatatttcatttagtttac

SEQ ID NO: 40742 - DNA, 572 bp, Arabidopsis thaliana columbia
tgttctttgacaccacccacaaaatatctctacgaaatacgaagccactatatgtctctttaatttcactttttatagtttttttcaccgctaaaattgttgactaaaaaatatattgcataaaaataattgataatatatttataagaaaaactatgataagaaaaaatataatcggttgaaatgagtcatgactaacaataattaaaggttaggaaattaaaagaaaataaattctgaaataactaaaaaaaaaaaaatagaagatgatgatatatggatccctatactaatattttggaagtacattgaaaaactaactttcaaagacccaattaattaagctcattaaggataaacatgttaaatactaacttatggacattaattaaattaaaaattataaaacgaaaataaattgatgacaaaaaaaaaactatgaattttcttattaggatttgtaatctactttcttgaaaaaaattgaagtttactgacggcttcctttttttggaaactccaaaatcacataacatatgaagaagttttggaatagcctttgactcaacaac

SEQ ID NO: 40743 - DNA, 179 bp, Arabidopsis thaliana columbia
tgacggctcgttctatcggtgtacatgcgcaggacccgggtgccttcaaggcgaccacctccgacagaccccgaggaatcgtcaccatgagccagcacccaacctccgagccccttcacgacctgattggcgtaggcttcggcccttccaacctggccttggcatcgccctggaagaac

SEQ ID NO: 40744 - DNA, 553 bp, Arabidopsis thaliana columbia
tatttccataatcctaagcaagtatagtaaaagaatttaaccttcttgtttgtatcaagaaatgcagccggtcctctcacttttccgttagcaatccctggcgtaaatttgagctgtttctgtgctggcacggtcattggagaaggtgtgctcaagtcttcagctacatgtttcactgaactcggcggcgtaccctataataccaacattttatttttcatgctgctttcaccaaccaaaacttaagtatactgaaatatggataaaacatggcatagtcttactaatgaagttgcaattgcttgctccctcaattttaattccttttctgcttctttccttctcaactcactctgcctcagaagaccaacaatttctttgaactgatctttcatttcttttatctctacatccttctcccataattgacacctgcattggcataaaacaagaaaaggatgacaatgttgattggaagtttaactttaaaggtgaaaacggttttcttcaatgatggaggcacttgtttctgcaagagagttgaacatatact

SEQ ID NO: 40745 - DNA, 750 bp, Arabidopsis thaliana columbia
tcaaataaatttatatgaaatttgctaagaatctatcaattaaacaattcacttgtatttcttgctagagttattctccctaaaccaatcaagccaattacgtaaaacccacaaaatactaaccaaaatagcaaacccaatcacaacaagccacgataaccaagcccaccgtggaaccactccatccgccgcaccgctaccgtaaaacgtcgccatatcatacaaaaccaccggaccagccaatccacgaaccacagtataaaaaagataaaacggcggagacaaaagctctctcactctcctcgctaacgcgacgtcgttttttctatacccggtgatcgtccagacgttctgacacgcgctcgtcgcctccgcgagtatcaagaggaggagaagcccgtgagctccgtgaccgacggcgaatctacacgtggcgaaaacgtatagggtcgcaatgtggtggaggatgaagatgaagtcgttagggaggaagattaagtaatggagaagatcaacggtgaaataagccatgctgaagtcgagtacgtttgattccacggcggtattgggagaagcgaatgagtgtacgtcggcgcgtggagttgtgagcagcgcgtgggaagccattataacggcgggagtgccgtggaagagtgacattaagcagctagcgcctaaatgtgatgattgttccatgtacggaaaactaggaaatagctgatggtgtatacggcgaggaagaggaggaga

SEQ ID NO: 40746 - DNA, 553 bp, Arabidopsis thaliana columbia
ggtatcttacggagacatgtttctccgggttgtatgatttgatcacgtagctgaattttgcgttgatgtgatcgtcattgttgcctatagcaaactcttggaccgacgcggcttctaccgtgtagatgagtcgctttggcctgagtgtgaggtatgtgatcaatatggcgctacccacgaggagtcccaagaggacgagggcgacgatgatgcataggacggggttcatacgcctgcccggcaggggttgtgctcgaggttgcgattggggttgcagttgcggttgcgttcgccgagccggttggtgggctgggtttggaggcaccattgtcagagaaggttttgatggacttcagttaattgcttggaaaggatagagagcaaagattgatttgattgctttgatatggttcgacgatatatataaagggactaacacggacaattagattctttgcctttgtataaggattagtcacaaaactactgatttaaaattcttaattctttagcattgcttgtgaatgaacaagaaatcttggaagctggaaga

SEQ ID NO: 40747 - DNA, 495 bp, Arabidopsis thaliana columbia
attgttcaatccaataaaagatttagttctttatcaaaataaatttttatgagagttcaataatcatcgcagaaacttattatataatttcagattgctaaatccaatatgagaatgtaatcgtttctaaaaatagttaactcttatccaataataattattatgtagacaaagatattaggtgccatattaaaggagaaaaggcaactattggaaaaggtcgtcgggtggtgtctacgcgctatcgcagaaaaaagtgaccatgattggttacttatttcgctcctatatatataagacgtatttcgtcccatttcgaaaactcacatcaagtttcttcaattcattaaatcacttctcaattagctcttacgaaattcttttcattactaaaaaaatttacaaacaaaagtctcttgtaataagctaaatggcgatcttcaagattcttgtattgttgttgagtttgtgttgtttcagtcaagcacaactttc

SEQ ID NO: 40748 - DNA, 500 bp, Arabidopsis thaliana columbia
  unsure (1)..(500): unsure at all n locations
gtatacgtagtgggtagtaattaaaccagattgtaagacttaattaattaatgaatgaagaagtgtcaagtcgttgagatcaacatcatacatccataatccattacttctacagttgtattacttatatataaaaccccccctccacgttagcctaaacacaccagattcacgaactacctcacacaactcactggatttcggcatagaccccagtttgcgtgtgagcgtagaaccatttctctctcttcctatactatggctccccgtccagagctcgccatggatccagccgacctatacccgtggtatgctcttattccgtaccatttacccctctactccgtttctttcatgctgttgattttcttacgattcttgctggttttgcctttgttctcgtgacttttttttctgttctccgttgtggcgatgtaatatttctgcgctcttcatttgcgtcttttccagttntggtctccttgttttttgtcttgttt

SEQ ID NO: 40749 - DNA, 567 bp, Arabidopsis thaliana columbia
aattgcatttatttttcactttatttataaacgaaagacttagcatttaaactaccacgaaaggtctgaagacggaccaacatgcttgactgttattttgcctcttctcctaagagaaactttgtgtggtttgctgttattggccttttacgtctcatttttaattttttccttggtctttcttttttgagtggcggctatttccattgtcgtttttattatcaaatgttaatataactctcatgttactcttaataaaaagaaagtgttaatggactatggtctattattaaggaaaaaaacatgagtgtcattaagttaatcgtctggaatagtctacgggtggccaaaaaggaattatatgagtaggtttcattcattttaaaagagttggcattagcttgttgacaaagaaaaaataataaaaaggctggcattttctttactaattattccacatgcggttgtgaatctaagatccataaattaattcctattttaggaaactaaaattatgctcttgacttttgaatttctgtttgggtcgcacttagctgatccaaaaat

SEQ ID NO: 40750 - DNA, 535 bp, Arabidopsis thaliana columbia
ctaataaaatatctatattcaaaaacttacaactacaaccaattaatataaacaaaattctacagctgcagtcaaacaaatcacccacaaagtcaaaattttagtttaattccaaataatagggagataaatatggaaagaagattatgaagatcctcttaccttttttttcgaattagataacagttgaaggaagagatagagttctggctgaaatcactcaacaaactttaaaagtaattaagttgagactgagactgagcgtgattcgatctatttagcaaatatagcgagagagggagatttatggagaactagtattttgtatatgagtatgacgagaagatattcgagtactcaatactcaaacaaaatgagcctccaaagtttatcatctcttcttctcctcgtcactctctttttctctcctgcttttgctcttaaaaaggtcctctctctcttttttcttatgtaactcactttctatatacattgctcgtaagatcgatatgcattaatttgtccctactgtgta

SEQ ID NO: 40751 - DNA, 706 bp, Arabidopsis thaliana columbia
tgaagaccctaagaacaagcaaagaagatgtgagacctcaatctattagtgtatatagagtctctgttgtaattagagtcttagtgagtcattgtgaactggtattttgtataaaccagtgtagatagtgttggtttagttcggtttaatggctatggtttaggcctcttacaattgtatataaaccctcaattgtatcttttatcaaattaatgagaatgacattaacttggtaatatgatccattaaccgataaagctagcaagctctcctctgatccaaaaagctaagattgtttcagaaacactaagaacactaagattgtttcagaaattcacctcggaccaaaaaggataaacacgcaacacgatgatgatgattgttgctcgtacaactcggaatcggtagcgagttcgaaaactaaacggggctccggttcgtgacccgtctcgatgatgagtccaaccttccgatggcgattctgaagccgcaacagagaggagacaaaaagaggcgatttctgaggaaactaatttttaatgaaactgggccacccaattgtccgtatgggcgcccattatgtctgcggacaaaattggtcaataaactacatgtcccgttttatttatgggctgaccacggactgcccataatgttttggattgggcttagctatagtcggatgccatttgacagactaactata

SEQ ID NO: 40752 - DNA, 598 bp, Arabidopsis thaliana columbia
tccaagcttctgggttcttcaaagcccagtacctctatagtggtcccagcgtctgagatctcctccgccggggtccaagttccctttgttgtcgtcccagcgtctgagatctcctccgctggggttaacgttacctctgttgttgtcccagcgtttgagatttcctccgctcgggttaacgtcagtacttcgggctgcttgctttcagatggagctactcggcaaatcaacaattcctctggtcagaacaatgtgccttcttatgctgaagctgccaagtctcaaagctcagatcgtccttgggctgccaaattcaaggactctctaaggaatcttaaacagatggatctcccttccttcttggaggatggtacccccgtggttgtagctcctccgtcgattcttctaaagactgcggatatgtggaagggtcatctagttgcccaattccacggtctctgccctccatcgatgaagatcttcacggaccttaatccaatttggggtaagtttggtaatatcacagtgcggatcatctccgaaacagcggctcttatcttcattccctcgcaggctactcgtaattgggtggtggata

SEQ ID NO: 40753 - DNA, 1842 bp, Arabidopsis thaliana columbia
taatttccttttgataatcagattaattgcaaaattaaattaggaatattcttaacaacaaaaatattcattgattattactccaacaaataatatataaactaaattattacttttattaaatattttcatttaattaaataatagacatacagtactactgttactccaacaagttaatctcattctcattaatttaataaaagatacaattgagggttaaataatttgtatttgtttctcattccaaaacttcttgctggctagtttctagttgaattttttgttttaaatatatgacataattgaattttaggtttagagatttaaatttctaagtaaatggtatttttaaaagattgaattgtatatttagattgttaaaacacatgaaaatgaaaaaaaaaatattatatatttatctactttagtaagatgaattatatgtaaacctaattaaaatcaagaaatttccaattatattctcatgaattacttttatcaattatatataaacctaactaaaatcaagaaaatcctaattataactgtttatcacttgttttataataacctacgattttcctaccaataacctacaaaccatcaatcgtaagaaattaattgataggaaatattccttcaaaattcctaccaaaatcatttttttttgtcaaacaacttgatttcattcattgcataactgaaacaagtttacaagtagccaaggagcaaaggttaaaaaggcttaaaacaaagtagcaacaacaagaagcaaaggttaaaacaaatgctacacaaagatagcaaagataaaccgacaaaggatccatgaaacttgagggccaatgctacggagccgactggtaccagtgagagcacgggttgtcaaaacgtcatccacaaacagagcggtggacgaagtgatggtcacggtccataatagatgaggtgacattgaaaagattctcaaagtcgagattctcgctgtcccaggtagattaagcaggaaatggtcgtcgacaaggagaggggttgagtgggttctgtcacccggtgggtttagaggtatagagttgagaagcatttggtaagcactgctccatagagccggtctcataatgccatagcttctcaaatccttgctttcatgaatatcaatcttaaaaatgttagacaagtatggctcggattcaatatttaagggatttggggagagaggattaaagaagtttcggtaaccgcctctccgtagggaggagatcataatgccgttattctctaatctaatagcatatctaaaacctagatacaccaagtccattagcctaaagctttgatgagaagatgaagcacttgaggaattacaattggccagggttctagagataaaattacacaccaaaaccattgaaatcgacaaatggcttaagcggagtccataaccaattaaggcgctaagtcgggatatcaattctaatgggctaattagagatttaagagtaacagacctgggccaaactagtggagaaaatgggctaccaaatccaaggatgggctgaagataaacaaataggcccaaaagaggcccacccaaaaggagaaaccctaggaaacctctaggaagaggagcgctgccgtacaccgccgccaacatcgtcggagaagccaatccaatagaaaacaaagtcggaggagaagttttgataatcatgcttgggagagaaaccacttagcttactgatatagtctcgtttgtttattcctaccaaacatatgactatgttttcgtaggaaattggaaaagttggtcccaatggcggacccatgtggtgaaaagag

SEQ ID NO: 40754 - DNA, 1457 bp, Arabidopsis thaliana columbia
attcctacatagctggtgggacccacggcaaatgaatcataaaatcttcaaaaaacaatagatacgattgcattgcatgtagtaacggatgcgatcataccagcactaatgcaacggatcccatcagaactccgtagttaagggtgcttggacgagagtagtactaggatgggtgacctcccggaaagtcctcgtgttgcatccctctttttttccgtttttctctattttgttttgttaaaaatgtatgactctataaattttagaccgtgaggccaaacttggcatgtgataacttttcggaaagcccaaagagagctctccgatgactgaggaaggaaaatggaatttttctattgtttttttttctactctaaattttgaactaaatgtactttttcgggcctttttgtgatctttgctatattacgggggaaaacttatatgttcggacattgttttccaatattttgcatgtatcaaagctcttataaagaagatagggtattcctacatagctggtgggacccacggcaaatggatcataaaatctttaaataagaataaatatgattacattgcatgtagtaacacatgcgatcataacagcactaatgcaccggatcccatcagaactccgcagttaagggtgcttgggcgagagtagtacgaggatgggtgacctccaggaaagtcctcgtgttgcatccctctttttccgtttttcttttctttttttgttaaaaatgtatgactctataccttttagaccgtgaggccaaacttagcatgtgataccttttcagaaagcgcaaagagagctctcccatgaatgaggaaggaaaatggaattcttatattgtttttttttctactccaaattgtgacctaaatgtagtttttcgggctttttcgtgatctttgctatattacggggcaaaacgttatatgtttggacattggtttccaatattttgcatgtatcaaagctcatataaagaagatagggtattcctacatagctggtgggacccacgccaaatggatcataaagtcttcaaaaaagaatagatacgattgcattgcatgtagtaacagatgcgatcataccagcactaatgcaccatatcccatcagaactccgcaattaaacgtgtttgggcaagagtagtactaagatgggtgacctcccggaaagtcctcgtgttgcatccctcttttttccgtttttctctattttgttttgttaaaaatgtatgactctataacttttagaccgtgaggccaaacttggcatgtgataacttttcggaaagcccaaagagagctctccgatgactgaggaaggaaaatggaatttttctattgtttttttttctactctaaattttgaactaaatgtactttttcgggccttttcgtgatctttgctatattacgggggaaaacttatatgt

SEQ ID NO: 40755 - DNA, 703 bp, Arabidopsis thaliana columbia
tgtacgagtatcagtaaataagaacagaagtccgacgaataaagttagagagacggcagcaacgacgtaacgcttgttaactgagattttccaacgattccgagctcgcgacaagatttcatcgatctgtaacgccgatctcggactcctgccaccgccgttagccatatttacggtcctggcgtcagggcgtagattgagatcgttgtctctggtgtcgttttgtgggattaaattgcggtggtcctcttcttcgtccgacgagttgcgcaccatcgccgagctggtaatcaatgggagattcttctcagagtcaaatctcaaaattcaaaaactcgaaattcgatagaaaatgcgaataaacagattaaattatgagaaaactgttatttaatacctcaacttacaaagaatggccaaattaaccgtgaactcgtgaaatggccgttttaactctcaacaaaaagttgacttctgttttaacattcaagtttgcgttgactcggcagcataattgacagacgttttagtccgttaaacatctgttactatagtcttacgacgtcgtttacgtgctaaagagaaatcataatcgtgaatagaaattctcaaaacacaatcaattaccctaaacccaaatcgaaacttaatcatgcccccaaaatcaaaatcgaaaccctaattgcttcaattcgttttctga

SEQ ID NO: 40756 - DNA, 629 bp, Arabidopsis thaliana columbia
taacggccgccagtgtgctctaaagctttagagcaaagaatctcaagatggttattgacagaccatctcgcgccgagggatatctcctccatctgcggtaagtcagagagccctacataatgagcctgacttcagactggacttcctccaccagaaacacttgttgtaataattcctgctgatcttcgccagatacctccaccaccgcgtctttctctacagacccatgcttgcgcgtatctactccatgacttccaattccaatgcctccttgtcacgaccaagtctcagccaccgtgtcctcctgagcgccgcaacgatgtgcctcgaagccgcccaacacatcgtcacgctcgtcatcgaaaccatcgaaccagatcagcaaatcggcctgctcccctggtggtaccgattgtactacctgcacatcgccggagcaagttttctcgccgccatgatacgtccagagctgttctcagattcggttgcggaaagctgggaggctgttctacttgctctgcgcgggcatcagcatctttgtacgtatgcaacgcagtgcgtacgaacctttgagagacttgcccagcagacaagggcacggtgggcgatccctgttaatggcaatgttg

SEQ ID NO: 40757 - DNA, 638 bp, Arabidopsis thaliana columbia
gttttcatgtttgagaaactttacaaaattatgaaaaactaatcaacaaaattataaaaaaactttctaacaatcgttaaaaatctttcatttctttattttttaggatttgattgaagtcatcaaaattccttgtaaattaggaaccaataacatcaccttaaacagaaaaccaaaccggaagttattcataaaccgtttgtttttctgatctgtaaaacaaaacgaaatagtttaaccaaaatccaaccggaaatgtatatacttaccaaacctatatcctataaaccaagataattaatgacatggagtgtaactacctacgagtgggaaaaaagtccttagctcaggttgtcaggtatcagagtgagtggttcggacattaaagcacagagaaatctgaaatcgaaaacacagagaagaaagaaacgatggctgacgataatggcgggccgatctccttccgccgcttagtggcattccatgccattcagttctattacaaggccgctgcttcattcttgttcacgttcttcatcctccccaagctcggtgcttttgtctctaatcttttctgggatgtttttgttgaaaaacgacttagtgttattgcttcgatagtctgtttagctgttgtg

SEQ ID NO: 40758 - DNA, 598 bp, Arabidopsis thaliana columbia
catgcctgcaattcagaggatccccattaaagaaccttgacttgttttgttagtaaacaaaaatctgggaaataataatagaaatctctgcagaataaaaacaaaaccaacaaaaattccacttttgtgctctctccctctccctccccttggcaccaaataaagaggtagagagagacgaaatagtacgatcactgaagaatatcaaacgtccatagtcattacctgtcaccggaaaaaccagttcccaactcatcacctctccctctaaaccaacaatgtctgtcaccggaccattcagtcacccaacaaaccttaacccaacagttccggcgttctttccggcgataaaccaacaccaaaaccaaaacccctccttaattccgacaagattcttcctccctcatccccctcctcctccacctcctccggcgccgccgctatacttttcttatttctctgtgggtcctcctcctcctcctcctcatcttccaccgacttcagtaacaccaaccagagccgtgatgttatacaagtccagctaccgtcattgagacattctaagacgagacatggaactattcggtgaagtcgtgga

SEQ ID NO: 40759 - DNA, 508 bp, Arabidopsis thaliana columbia
aaatataaaagatacttttagtttatattttttttctctttcatacttacctaatttttaaattatctctcctactttgttaatttccacttcttctaaatatataaatttaattcacccaaaaaaactaatatacccatacaacgaatcatctctatatttatattattgttctttctagccgacttcttaatcaataattataaaataaaaaatcaaatacacattgacaaaacgttttggtccaaataaaaaataattgatttctattgtaagaaaaatagtattggtggaaaaaattaatgtagctttgttatcagccacacatgaaatatacgtgtctgattttctatccatacgcaacaaagttatatgtatgtattgagattctatattataagagacgtgcattgtatgtttgtttttttcctctaagatagtgcgacaaaatatgtcttattgtgaaatttaggtcatatagacaagcattatctttgttttttggagt

SEQ ID NO: 40760 - DNA, 561 bp, Arabidopsis thaliana columbia
cagaaatgtataatctttatatcatttcttctgcagatcatttttgtcgtgtttatgttctttttttctttctcactctttgaagactactaacaatttatggcctcttctgattttgtttgtgtctcattgtatgtaagtctctcaatgatttaagtgtatgacataaactagattaagagcaatgtcttacgaatcatttgttactcagagatcgtaagatcgtattctgcttttattttgagcaacaagcaaacttgtcttttagttttagtagatagaacttgttattctttcaactctttaagttatttgaattattgagtagtgagtttttttcttctcagaagtggcctaacttctccacaagcttgttctctatttccatcctcttcttcatcaacaaaccataggtggaagcaatgttcgcgtctcctgcttttaccttgagcttgcagttcagagatgttgtttcaattcccttcgtagagatttgagattggacaaagctccttttttgttcagagcagccatgagcactcttagtgcacgccaagtgat

SEQ ID NO: 40761 - DNA, 512 bp, Arabidopsis thaliana columbia
gaggatagcatccccaaatcttagttgatattttcttcaaaagagaatccaaattctccatgtttctcctccgttcagatcttataatctctaaatcttcactagctctatcaagaatcatagtcatgttgcagtctatacaaaaactaatcttctgctgtaatgtatccttgaaatcacaaccctgtagtatatctaccagtggagtaaccctacacaataacagaagcaaaagctagaaccataagcatctcaatagcaataagaacatctaataactataactgattcggtagcgtaccacggttcaatcatcttataaacaattcaagaagactaaaaaatttcaaaatgtctacattagaagcagaacacaaacctgttatcactaatggctgcttttcggagtttctgaaacgttgatgtagcagccgttaacgtgcttcgaacggtacagagttctctaacggtaagcaattgaccggacacagcacgctcaacgatatcagaca

SEQ ID NO: 40762 - DNA, 353 bp, Arabidopsis thaliana columbia
aaatatttgatctaaaatgtccttatttttgtaaaagccccgaaaaatatgacgaatttatgacaacaaaaaaaactgaattattacatgtttgaaaacatttggtatagtattatttatttatctcattacaattttggtattatttatgtaagtatatcaatttgtatttattttttttatatggtaaaatatagctttaaaagcagcggagtagccatggtgcactggtggtagtgatgcgcaacctaagttgtgtaagttgtaacatgtaatcgattctttgtcgttgagcattttttttttaatttgttaaaaattatgttctattaaattaaggtatagattatctc

SEQ ID NO: 40763 - DNA, 487 bp, Arabidopsis thaliana columbia
cctatggatccccgggatatgaagctagagaacgagaaggatactcaccagaagcagctcttttgtcgaccgtcctgctaccactgaccaagacttcacaacttctgcaagcgctgtgctgttaccaacattacctgttacatataaggaaaaagagttgattaagaatacctatttttattcagttaaatgttttgaatacaaattaagatttaccagggaaaacaatgtaggggacccctggatgtctactttctggacctaacttccatactggaacaccagcaagggcttgaccaatcacaagtgcacgtcgtgctttcagggctttcgttgctgtgtctgatgacgtaattccaccctaaacaatgacgttacagtgtcataaaaaaaaatcgaaaggctttggatcatagaacagttaccatttcaactggggattgacagagtgtgtcaggaagtttatgagatggaaagataaatatag

SEQ ID NO: 40764 - DNA, 275 bp, Arabidopsis thaliana columbia
cgttactaagggaatccttgttagaactatacaatacccaacttttacaaaatcagctttccctataaacgtttcttaaaaaataacgaaaagaacttgggtgaataaaataatgtactgagaacgcatgtgatagcaattatatcactctgccactcccagacgatttgatatacaccaagtgtgtacacagctatgacatttgccatagttgagcaaatgctacatgtagtggtcaatcagcctaatttgagtcactccccgttaagttcctc

SEQ ID NO: 40765 - DNA, 260 bp, Arabidopsis thaliana columbia
aataaaggattaatccggatgcaagaccaatgaatccaaacaaaaattcgatctaagccaatcacgagagataaaaaaaaaaaaacctgtttcgagaagagtagcgagtaacgaggtcttctgctactcgaaagctttaaggctgatgaaacccaggagaacgacgagcagtccagtggctgctcctccggcgagagatgcaatactgcctgtcgtcagatacccgataaatcctccgacgatcagaaggataccgtacg

SEQ ID NO: 40766 - DNA, 549 bp, Arabidopsis thaliana columbia
cctctcgaatctagtaagataaataagaaagacccatctccatttgtagcaacgaaatcgagtcaatctgacatctttttcacagaagttggagaaacagaagaagtgattagaaaagagaagaaaccgagttggtccggtggtggcagatcttttccgggagtttcagttgcggattttcagacttgagtcaacaatattcaaagtttttttaagacaaaagcagcagacttttcgcttaagcaatttccggagagttgctcaagtccataaaaatggtggtgtttcactttaagcttagatgtcaacaaaaaattcccattaaagataagaatttttaacagtaatttttggcttcacataagttatagcattccaacattatcaatcaagaaatttacaagttgacaacttgacataaagttaccaagaattttaaactaaatcaatattaatatgaataaataaacagaattctcaaatgagtttttttgttcttcgtcaaatgagttaatgttttggtccaagtaacggctcataggaaccgtt

SEQ ID NO: 40767 - DNA, 557 bp, Arabidopsis thaliana columbia
tttaatgagagatgataaaattgtcttgatctaaaccggaacgatgaattctttgattagagattttgattctggtattgaagcctttactgttaaatcggcgctgaagttttgcaagagagtgaaatcattgacggtgacggagacgaaggagttaacggcgtcaaaaccggatttgtaacttgtagggtaaaagtataagcggaggaatttccagccgggagagactggaaaactgtacgtgaaatcagatcggaaaatccgagcagtcatgtaaggcacttgaggaatccctgattcttctttgtatgatacaactgaagagaacgacgcgttgtctgaattcttcggaagaatattcttctcctcctgcgtccaagttcgaccgtggttgtcgaaggggacatcggtttctccacagttgatgagaaaaacatcgtctggcttgtatggcgctgttgcggagacggaaacgagaaaagagaaaacaaacaaaatgaaacagatcatcggaattttttttaaaaggttaatgaaggaagaagaagataagagat

SEQ ID NO: 40768 - DNA, 782 bp, Arabidopsis thaliana columbia
ccctatttactggaaacatcgaaaatgaacccaaagctctaaaagagtcgagcttttttgggtttgagtctgagggtagactaaaacaacaaatgagtcaatttgcgtcatcttttaattcttggaccttaggcaaattgaccccacggaagaaaaacttcatcgataccttcttgttttgcttgacctgaaaagtcaatggttgaccaagtgagtcactcaccacccattagtctcttatcttctcaaaattcttcaattctcttctcgtttttttttttttatcaattccaatgatctgtcacgttttagtaattttcactattctcgtttccgccgtcgtcgacgcaacggcgtcgtatgagcccactgatgtctttctcatcaattgcggcgatacctccaacaacatggactacagtggccggaactggacgacggagaatccgaaatttatgtcatcgaatgcagttgacgacgcgtcgttcacttcatctgcgtcataccaagaatcagggattcctcaagtgccgtacttgaaagctaggattttccgatatgatttcacttacagttttccagtctctcccggctggaaattcctccggttatacttttatccgacccgttacggatccgatttcgacgccgttaaatccttcttctccgtcaacgtcaaccgtttcactctcttgcataacttcagtgtaaaagcttccataccggagtcaagttctctaatcaaagagtttatcgttccggttaaccaaactcttgatctc

SEQ ID NO: 40769 - DNA, 553 bp, Arabidopsis thaliana columbia
ggcttgtttagatctctagccatttccgtgcatgtgagtcatgtgactttttagatctttcatttagacctttttcaatgacatctacaatatttatcttatagattttggatccgatcaaattttgaaggatgtaaatggatctcagataaaactcacattagttaaaaaaaatttttttttgtcaatttctacctctcaagtctcaacaacaaaatccattacatgatacatcatttttcttttttggtcgtaagtacgtaacagtgtaacacacctcatgactaaaaagttatcataactttcaatgcgtaacactcccccgcattcaaacgtttttcacattcaccagtcttccccaattctcttgactaacaagttatcataactttattaacgtcattatatcaagaaaattgacaatttgcatggggtttaatcacagacataattgctgctgaaatcattataaactaaagctactttggggtagttgttgtataattattctcttcactcatattatcaactggtccaaaatattaacaataaa

SEQ ID NO: 40770 - DNA, 535 bp, Arabidopsis thaliana columbia
ttcttgggcttccaaaaggttgggtaatgggctgtagggagagcctaagtgaaaagggctaggccaaagtgagagacatgaagctgaattaggtctagccgcctattgcttcttctcttcatcaccatcgacagcagatcggacttggggtttttggctaccaatttgcttgcttcagggaccggatctaaccaatcaaatgctggagatgaggtgcgatctacagaagttggattctccatggttgggtgcttcactagcgtcggcgccaaagcagagctccgatccaaaggggagcagggagatgctgaacttggcttcaaggagagcagatgaagcggctggatttgacggattgcgggaaggttgagggaagaactagcaccagagagcaagttcgaaagtagggtggtcgtgataatttttggatttaaggggaggaaagaggtttgaaacaggaggaaccagacaataaggaacccaaatgataaacctttgagaagagatcccgtgaggagagactctggacacggcg

SEQ ID NO: 40771 - DNA, 472 bp, Arabidopsis thaliana
tctgatatatatgaaacatttaacattgtaaatgcttagaggacgtccaagaaagcaaaagctagacacaacatttatcagtgtacattacattttgaagacaatggacaaatcataaagaccttaagggagaaataaaaggagtctcagctaatttcattaaatcaattagcctcatactaaacaaacaaaaaaaaaagtaataaattaaaaattcatttccacaaaaacctagtaaacaaaataaaagatgaaaaaggttacacatcctttgagagaccgagttaagcgaattgatctgagaaaactgatccaccatgtaaatgagaggaagaagaggagttagaagaagcagaagcatcaatggaggacaagggcaaataaggaaattctaccaagttcttgaataaacccttcgaaatctcccaaaccattcaatgaacctccagagctttcaccagcgccattatta

SEQ ID NO: 40772 - DNA, 522 bp, Arabidopsis thaliana columbia
gtcgactatcccctaagagaagtggtatgtaagtttttatgcgtgtatgtgaaacgtccctttcaaaaattgtgtacaaataatcaaagtgaaaagtgaaaaccattaaaaagttagaaacgtgtttctattgattctgtggattgtgtacgatgaaagataaaccttttaagtcacgcttaacaccaaatctcttactaatttgtaggttttgacgtgggacatatttttactcatccagttacaaaataattaatgtgaattttctcatctatattttgacgtatgattcaaatctcattcaaagaattaaactactaaaccgtgtacaattgaaagcaaatctgtcactttcagtttttatatgctaaattttcataaataatattactttacgtgtgattacatctttttctcatgcagttacaaataattaatcaatgtgactcatgtcatccatattatgacgtgtgaatcaattttattcgatgaattaaactactaaaccgtgtacaatgaaag

SEQ ID NO: 40773 - DNA, 485 bp, Arabidopsis thaliana columbia
gttctaagttagcttaaagaaggtgtaaactttgcctgagcaaaaaagcagagcagaagaggctttagcttctgtgcccacctcaaacacagacaatttgtggtggcacttgggttagactacttttttttgttgttgttgaaacgaaattttctctttagtcatttatgtttttttgttactttttacaagttaaaaaacttatgtgatagacgcttttctaatgtatgtttctaggaatttcactctttgacccaaataaacaaatttacagttttgaatacaaagcaatttattatcttcttggttccagccaatgtgaaatgtttttcgtagcatactttgcattacatgcaagcccaaatggtgaaactagagaaacctccaacagtatggtgaaagtatacaaccctcaatgtggaacgatatggttatgagtaattgatctcaactactagctaatgcagagattggtaagtgtgact

SEQ ID NO: 40774 - DNA, 1303 bp, Arabidopsis thaliana columbia
gaggatacgatccccgaactaagtgccctactcgatcacaagttcgagtaaaaccaagcaaacgacagattcaaggacaaaaatgcaataataggtaactaaacagggtgaaggcaaataataggtgaaagaaatgcaataataggtgaatgtaaataagcaaataaatctaagaagaatagaagccctaaagatggattcattgataaaagcaaatctagggtctatcaggtggttaacaagtgaaaggcaaataccctagacaaaatgttttaatacagatcaaagcagtctcgcatcaatgacctcaaacagagttaggtccagacttggtcttgtcaaaggaatctaactcagcaggcactaagcaccaacaaatcaaagccaaaaagccctccaaagagccatctctgggatagaggaaccaatctctggaattagtagatcaggcattccatgtgaacatcttttggatgaagaatgccttaggcgaattccaattgatcagaaagaaataaacattaagcccaactaatccaaaagggatctaacctaatcttaaccacctgaaaaaccctgaaattaccctaatctaatccatcctcaagaaccctaatcactactctagcaacataatcaagaacacaaacccataaattactctaaacatatcaaaatgtagatctaagctagataaacaactttactcaaagaactaaatgcaaaaatgaaattgattaagagtaattaaggttcaaagattctaaaacacaaaaataaactaaaagataaaagcttggtcctttggacaaaccccaaagtgacctatttatagtaaaatcccaaaaaccttaggacacaagaagacaaaagacttgagacggtttagtggatactcgacctttggggatcgagtgacaggatgctacaaagattgcgcctttgcctttatgctttgaatgatcgctgggtcgagtagtttcttcttcctctccttttcttatgctcagttgtctggttgagtggggaaatgaggaggatcggaaggccctttgatcgatctttaggttagatggaatccgttggctgtgatcgagtgattggtcaagtaaaggatcgagtatggggtcgagtggtgatgtatgtttatttcgcctcaggcttttacctaatagacaacaccactactgcaagagcacattatatcggagtagtattttaggatcaaatcccaaggagagaagtagtttagagaaatccttaagaagagagtgacctaggacaaaatcaagagagggggtgt

SEQ ID NO: 40775 - DNA, 468 bp, Arabidopsis thaliana columbia
ctcccctcttcaatctcagttaacgctgtttgaaaccctaatcctacatccataaaggatattgtctcttagatccgttaccaagcttttgaagattctcgatctgcaagacgtcaagtaaaaaatgcgggtgagatcaaacccaaagattcatctcttctcactttcgtttacagatggtcatacacaaccctttgcttctccaaatgtcgattttaggcactagacgatttttgtatttgattgcaatttctttgtttgggttattttcaacgaagtcttgttaatttcctgatttttatcattttcgaagtttgattgttaggataaagattctgaagattggcgaaggattgaagccttgaagagaacgcaggtggtcgtgagagagagagaggagactttgttttttttttaattgtttttttggtgtattttaattgttattctcattgtaaatataattat

SEQ ID NO: 40776 - DNA, 544 bp, Arabidopsis thaliana columbia
  unsure (1)..(544): unsure at all n locations
gatccgctaatgaaatgttattattttttgtctctatttcaacatttttcttttaaatacatatcgttaatgataacaaaagtattagaatgatgatttagacatttagcctcaggaaattttgaaatctgcaaaaaagttatattatctgctaatctcatttgaacatatccacagtccatcgtgtattcgagttacaagttttttttctctctatataaatgagagtggtttaattatgcagttacggttgttgacaattgacaattaaccggttgttaactgttaaccactgcgaattaacaaggctaactacacaattaaatctctctaatatcgtgatatctatgatgcaaattttctctctcttttttattatcatcattccgtaatcgttattgctattttagtattttttaccgttttgcgtcatcaataatataattcgagcgtaacgacagtttaccgtatacaatagctcatttggttgccanagtctaggaagaggttgatcatatttgtttgatttattgagtacatatga

SEQ ID NO: 40777 - DNA, 1654 bp, Arabidopsis thaliana columbia
tgggagtatgacttttgttatatacctcttaattacttgaaaataatcacaatttcgtataacatatccatgtgcgcattgatagtcttcctctgatagccatacttcacgtatttctccacttggacgactaacagaactaaatatattaggtactctaggaacatgatatacaggaacttcaccctcattgaatcttgttaacctgatccaaaagaggtaatacatggttatttttgcgcattgaaaaattgcttggtgctaatacgtttttaagtcaattaatcctaaagcattatcatgtcgttgtagtacttagagtgtcaatccaaatgggagtgatgaaaacagatgagatgtgatcagaagtcactaagtcaagccaagcaataacagttttggggtttctaacagtcctaagcgaacatgcagaaaacagaaacaataacagaattactaaaatcactcgaccacaacaggctgatgccagaagtaggatgtggtcgagtaacaggtcgagtaacagacaggatatgaaacacatatactcgatcgcacagtctgttgccagacacgtgggtatggtcgagtaacagacaggaaacgagacaactgtactcgactgcacagtctgttgccagacactgggtgtggtcgagtaagttggtcgagtaattgcacaaacgacgatacaggcaatgagaacgaataagcgataacgataaaacagagaaatcagatagacgagaaattcctaaggatggagcaatcgaatagagtggtatcctagcctatcggaatggttaacaagcacaatcaagctatccctagacaacaggttcaacaacagatcaattcactcccgtgatagaaatcctcaagcaaagctagcccagactaattcccatcaatggaatctaactatgcaggaaataagaacagattgataaagtcaataaacgctctaaacggccaatcccttgggatagagacgaatatctcaggaactagtcctgaagggattcaatcaattctaacacttaaccattctacagactacggattccacaactactctatcccatccttaagaattctaagtcactactcacacaacatgctcaaagacataaacgcaggtaaatgataatattgcataagtgaagagataaagaatagatgacaggtgaaatcaaatgcggaatctgaataacttggaaaaatctcgaattacaggttgtagaagcaaaagcggcgcagctagagtaaaaaagaaaataaaactgaagcaaaaactcaatgtcgactggatgtttcaggacagaaccctaagacgcccaataacctaatcgcccaataacctaatcgcccaacccatagagtgataataggccgagatgggcttcgtgatccgatggagctccaggccgcttccaaacacttattgttctcctcttctcttccttgtgctcagcttgtctggttgagtgcgaatttgagtagactccaaagatgtgatcgagtgcttggtcgagtgatggtattggtggtgagtgatgatactcgaccagggggtcgagtaatatggtggagtgaacggtcaagtgtggtcacgtggtatggcgaagtgatactcgaccagggggtcgagtgg

SEQ ID NO: 40778 - DNA, 430 bp, Arabidopsis thaliana columbia
gcaggatttgaaaatccaactttgataatatctcaataagagagaaaacggtccagaagaaaaatatgacatgcgccctcgagaaactcaccagacaaggcgcaagtaacgctccaagattatctactgccattaacgaagctcggtgagaggattcctctagggaaagcttgttatcgatgtatagttggttggactagattcctcggagggagtctgccaaatacttcccatatgacttcaaccatggtagctatcagaccagcctaaagatgtcgtttctcttctagcatggagtgcatgaccagcctcaagcgagttaaaaggtgtgacgcccgtgaactggagaatcggttagggtttgtattaaaatcatccgctttaattggtcgggttacatggaatccctagcgtgtgcctataaaagtag

SEQ ID NO: 40779 - DNA, 566 bp, Arabidopsis thaliana columbia
cgagtcattgaagtaggaacagagtccaatgagattggagatgttgaagctgaaacaacaacaagaagaatctcaacatcagatggtcactgtgcaggagaagatccacggagttgataccgaacaacagcatatgcttagtttctttgcaaagttggctaaagatcaaagatttgtagagagactggtgaagaagagaaagatgaaaatacagagagagctagaagcagctgaattcgtgaagaagctcaagttgcttcaggatcaagaaactcaaaagaacttgttagatgtagaaagagaatttatggccatggctgcaacagaacacaatcccgagcctgacattttggtgaacaatcaaagcgggaatacgagatgtcagcttaactcagaggacctacttgttgacggtggctcaatggatgtaaatgggaggatagagatagagtagagcaaaaccggtaacatagcaatagagaaggtaccaaatcgcaaggcttgagatctgaatccgtagcgctttgttgtatggtttcatgtgtatataagcgaaagggacttgt

SEQ ID NO: 40780 - DNA, 530 bp, Arabidopsis thaliana columbia
cgactctacacatctaacaatgtcaagaaaagttggtcatggtattaaatcctacacggatatataactataaacctctagtcccctctatgctgtcctgtaatgaatatctatccggaaatgtattcgcatagtcttgcgtctaataatgtttattgattttgtaggtttgattatatatgattgtaatgtgttttttactctcgagtctcgacttgattcttatttgcgtaacgtcttaattgaaaaggcttataatacagattcaagtaaagtgttagagtcgctcaaaagaagaagaaaagactaaccgaaagctaatgtcactgaaatttcacgacgacgactgagatatcgtctgagcttttccttgcaacagcctcctctgcaaggtgctttgctgcagccttcgcatcttttattcccttgattgagtcaacggcttcttggtttgacatgacctatgagattttaaataatcagcgaccatacaagtaagttgttgaaaatagatattgatagatcaaaac

SEQ ID NO: 40781 - DNA, 595 bp, Arabidopsis thaliana columbia
gcccagaaatcgaactccatctctactcgctacataagactaattacaaccaaatctcgcaattcccgataaaagcgcacgaaatcagcgaatatgaacaaggctatcactaacatcagagatttaagaggcataggttgttgcaagagaccgtacctgatgcagcgtttggagatcagaggctgggctccgtactgaagtgtgagcaatatggaataaaacaaaaccttagggcccatactcgacggactctttgctccgttagccgtcgccatgaatctccggccgtcgagaatccagaaaatccgccttcgctttgttctgatcttttggtcgagaattggtttgtgctttgaagaacgctttttcactttttctacattggacgtcgttttctcaagagatgaactacaaaacgccgtcgtatttgtttgacaagtgtaaaaacaataatccttgctaagtaaacactttttgggaaattttgcaagaatttatccatattaaatttgtcaaatctagattacaaaaaaaaaaaaaaaatccccaccaaattttgtaattataaatgtaaaaatattatgaagtattgata

SEQ ID NO: 40782 - DNA, 526 bp, Arabidopsis thaliana columbia
cattctctcgtgtgggtttggtttgaatcctacagggtcataacaaatcattaagaaacccacacaaaaaaaaaaagagtttttttcagagtacagagagaatttagagagagaaggtcgtcacatggtgatgggcaatggagcagaatagagctcggcaatggtctcgggttcatcgctggtcaagtttctcgtaaccgtagcagataacgtggaatgactataatgcccttgttggctccgtgatcattactttgcggattttggtaagttgggatgttttgatcccgtgaggtgcatgtgctttttatgtaaatgtgtcttgataagctaattgttgcttttttggattacgtttatcatttgtagtttaataatgacaagttagatgtgactttaaatacactttttataactcacttctgattacaaagttctcataatgaaagaaatgaaacttgacaaattaatgaaactaagttaattaataattcgatgggatatacaatgcaatttgcccatacgc

SEQ ID NO: 40783 - DNA, 469 bp, Arabidopsis thaliana columbia
tggatgtagtgatatcaacatatcattttacgattattagattcccttaggatggattcattgtgtggcattgtgattggtttgttgtgttgttagcgtttttgagtctttggcttttcgttttatttcgtgtctttcactaggtatcttttaggtgtcttagagttcgatttttggccattttaggtattgttagtggaaagaaacaaagtttggtgcgttgtagttactacattgtttgtgtttccattccaagggaaaaagtatgttcaaaaatgcacaatgtatcaagggattatcgataatattcgaaagcaaacattgtatatcttctaggctttgcaaagtttttgttgtcttttgtttagtgttttactgaaatacttacttgtgtttgaagcaacaacgaacaagtccgtggaaacaagcccttcaagtgcccaatctcagcccgagaatttgggcaaag

SEQ ID NO: 40784 - DNA, 596 bp, Arabidopsis thaliana columbia
acgttacgtttagaagattttagtaatgatgctattatgagacggttagaaacagttaagagagaattggttacattaacggcgttaaaaatcaggtgtattttcaatgacccgcaaaagtgtgaccagagtaaagttccgtttagtatcggcgttatttaacgacgacgttattgttcgtttgcaatataaataacgaaagacggttttcttggagcttgtgcactctctgtcactcattttccctttgtttgcacaatggcgacgtcatctctgaaactgaccagtgcttgtttcgtcttgctcttcatcttcgttggctgcgttctcacagcaacaaatctccgaaacaacgaaatctctcgatcgaggtgcacatttataattcttcgtaatgaatgtctctaatctatactcgtctctctacctaaatatatctcttttctgtttcctctagttcacattttaagctacattttcattatttcatatgttttctcagtttttcttagcattatcatgcttgatttgaaatgttgtacactcacataaacgaattttctcgcccttgaagtttcctatgtatatttacgtat

SEQ ID NO: 40785 - DNA, 566 bp, Arabidopsis thaliana columbia
ctctcaagtcaataaatattgttgttagacattctactataaggttttcaagattatgagattaaaatggtattgtttggattattaaaaaagaagaagaaaagaagaaccataattagttaggtgatctctaaggactttttccgattatgagaatgatggtgtttatggtttatgaattaatttgacagtgcgatcatgcatgaaatatctatataatattaactataagtggttgttgtttagtatacattttttttttgtcgtcaacttaactttccattaagacataaagtgttgtttagtagtatacatttagtttagtcaacgcaaaaattgacacggcaacacagatttcatttcactattggcttagtctcatttacacgcatttaacaatgtataatttggatttaagtgtaggaaaatgatataataaccaaatttggtacatatatcactttggatagaatttagtttcgattcaatttttctattaaaattctgttttaatcaaatatatcattaatgtttattttctaaatcagtttgattttgtaaaattg

SEQ ID NO: 40786 - DNA, 593 bp, Arabidopsis thaliana columbia
cgtgggtggggatgtggattaaaaaagttggttaggtcgattaactcttatagagtctttctgcactatgatattcaacaatcagatctattaaaactacgtagtatatgtttctctatactttaaattttcttagaattcgtatcgtcattttgtgaaaatgtattagttcacattattcatctcatattttcgatatgtctatcatactttccatatagttttgtatattttatgttcaaatattaccgccactcataacgaaaatagctactcaaaaaccctttttatatttattttactttttaggttatcttatttaggtcttattcttaacctttccataatgatgaggtcttacaagctgcgagttttttaatcataatattttttgtgtttcgatttttttttctgcatgtgtttaatcataattcaaactcctatatttgaactaataaaataaagataaatcgacaattgtacctaaagatgtgtatactagaaatacttcacgcttgattagcttgattaatagttactagattttaaccgcggtatacgcgggacaatattttcttttaaagttagtatat

SEQ ID NO: 40787 - DNA, 620 bp, Arabidopsis thaliana columbia
acaagaaaccaattaaaaccccatttcaaaaatcatgaaaactgttacaagaaagggttggtttaatttacctcattgacattttcatcaatcagctatgtggaaaaccctagaagattcaagaaaacaaaacataccagatttctcagaaaacaatacgttatgaaagaaagattcaaaccatatacaccaaactcatagcaaaagaagaaaaaaaaacatctttccttttttaacgcattgggtttacattcattaaaatcttcattcatctctaaggcaacaaaacagagatttttcaatcaaagaactagttctatctccttaagaaatgtattgagattaaaacaatggcatttccggtgaagaatatatttttaaagatccaaataaaacagatcagaagcattcaagatccaaaaagattctaaggagaaaccaaaattcatgatagaaagagaaagtttgctacataagaaaagtagaggatagaggaatgattaccttaatgaggaaagtatcaacagaaaatttggtagagggattgaaactgcattatatgttttcttttaggttttatatgtaaaggaaaattttagatcttgagtaggcaatgaaaa

SEQ ID NO: 40788 - DNA, 507 bp, Arabidopsis thaliana columbia
aagttactggtctaacaatgaagatgttgattggttttcaagcctggtttatggttcattttgggttggatcatattgtacagagcatagtcttaaccatgaaacagtattaaccacttttgttacatttaggtgtacttcggtgtttcaacgttattagatgctgtttcagacgagggtaaagctgacgaagaacagaaagaagtaaaacctctttagcctttcgttcactctttgtatatttccatgcaaccttcaagaagtcaatatttatttacttattatctacaggcagaactagcggtttcagagctttcaggtaatggagccgggatagtagcagccgcgaacaccatcatcagcactttcgcattggtttttgttgcggaatggggtgacaaatccttcttctcaacaattggtgagactcaaaaagttcaaatttcatgataaatcaaaacctcaggtccaaaactccaaaagtgtatataatcttctaattctttg

SEQ ID NO: 40789 - DNA, 617 bp, Arabidopsis thaliana columbia
taacttaagaagatatattatgagttttttttctcagtaataagaaatcacatacaagtattgtcaccctcttacaattatacaagttaaacattttaattaatacatttaaacttcttacaactgcggaaattaatttgagtttgaaatgataagttttcattcaaaaatgaaacaaaaaaaagatacttgaaagactacctttcatatacattctattattcataaacataaaaacaaaaaaaaagcgaattgattgcgacaaaaaggtgcatattgaataaaacacaaggatgaaattcaataagaaaaaagttataacaaaataacaaattatgcacattgattatgtttgaccagcgattagttgacatgtggagctgacgatgtaccgacacgacgctaactaggcgccacaccagacatggctcttctagtcaccaccacgtcaccttcgcccttttaagaaaagaaaaaaactacgtcactctccttttttcattggtcatgtaacttttatttttaggaaacttattgcccctacaactttatatactatatgtataaagtgtttgtcatataacagtcacatatcccagtatacattattatacata

SEQ ID NO: 40790 - DNA, 392 bp, Arabidopsis thaliana columbia
caagtagtcaacccgttttgggtgtaacctgagaatttaagacttaggaataagctctgcattataattcatgtttatagtttctttgtaaacattaatacaattaatgtctatatcttgtggacttaggaataattgccacaaagatatatactttcattatagatatacgtttatgtatctagttgataagtacaaactcttaacaggtttgaaaactcatatatttatccacattctcattctttacttcttcggtcaaagacgtgtaagcaatcatcgaaatctgatcatctgcgcattttcactctagtatgaattaacaatgagcttgtgttaagatagtacggtacgcaaatatatagtacactcctctccactatgaatgatca

SEQ ID NO: 40791 - DNA, 596 bp, Arabidopsis thaliana columbia
atatggtttaataaatcattgtctgtgctaataagagttataaatggtttcaaaaaaccctttttaaacatagattatgttgttttcctctgccattaaacttagacgcatcttaattactaactcaaaaacaaacccctctcgctctctctctttatatatatctataattatatgaccttaccgatatttacttatagtttagttactactaagtttgatatgagacaagaacatgtctcttgagatatcttcttcctagcttctactgtgatgtatctggattctcgatcaccagcatacctatctaccctgcaacaaagcagaaacaaaatccaactacttaagcacaaacctcaacaagatcaagcaatgtaatatcataacaacgttaccatatatccatgaaaatgataagtttcaattagggagatgacttcacctttttccttcaccaaaagactcctttgcatcgatcatcactgcaaatggaatacaatcgctgttacgggttttgtatcattaaagcagcagtaccattaggttacgtaaagctacatagaatgaaacttcataaatctgtaatagacctaaag

SEQ ID NO: 40792 - DNA, 862 bp, Arabidopsis thaliana columbia
cttaatccctaaactaatacaactatatatataagcataattataaagccagcccattcttctaaacgtctttctctctttctatttctctttctctttctcttgttcgtctactctgatcacaataatgggaaacacatcttcatgcgcaccattgatcatatcaacaaactcatcctcaggagtggttaaaatcttggctccattcaccggaactcttgaagttttctcaaaacccatcaaaacctccgacatcgtctctagacactccggccactttattaccgactcaactttactccaaatcagccaccgagtcaccgccgtgtctcccgacgaatatttacggccgagacgacatctctacctcctcctcccgaccgacatgctcttctctgtcttaacacaagaagaactttctctcatctccaacaaagccgcggagacactcaacaaaagccggtataaccatttgaagagaatattcccggtctgcatatttccgatgaccggagacagaagaagaaacccatcatcagttaatgaagatcgagctcatgatggtgtggaaataagagaaaccctagatgagaaggtactatacgaatcaaaacatggatcttggaggcctaaattggagacgatcgtggagagctaaatgcctaaaatctcgaggatcattaaaatactatatatatgagcaaatcaattttcaaacgtagacgagtattttgttcttttatttttcctgattttatgtccgactttaaagagaaattgaggcttatatggttttatcatgatttgaatattcgtgtagataatttagtgattcaattgtgtaattataggtttatttaat

SEQ ID NO: 40793 - DNA, 497 bp, Arabidopsis thaliana columbia
accttctctctctctctttcttcggatttgcttttttacagatttttaaagtcacgcctcttagaaaattatggattttgattagttccctaaagcatataaaaaccaatttttgactaataaaatatttagtttattctagcacaccgttagaagctaggtattctatttttctcgtacgttacatcatcttgacttataactttttaatttttacttcaaaaatagagtttggtgaaaaaccgcacagagaaatcaaaccaactgacgtaaaaatacatatgtaatgatcactaaatcacatttgtctgtattacaagaggacgagagtagcaaaactgtttagatccaccaaaataacctatcatatcaatcatcaatgcattatctgaaatgcttcttcctttgttttgttgatcatattgttgaagttgatcgagtaggcgttctgaatcgaagctcaagctgttttgggaggagcccttgtgcatatttgg

SEQ ID NO: 40794 - DNA, 453 bp, Arabidopsis thaliana columbia
tcctctccgtgtctgacgtgtcttttgcaagaatatggactcctccgtttgagacaacatagactgtgcacaagtttgacacagatgctgatatcgacgctgtaacatgataattcctggaagtagtttcaagagatatattcattcagaaaactctgtgcaatcagataatgaaaccgaaaagataatattccatgcgatacctcgaggaggcagcttgagatgagcgtccaatgataagattgctgatcaaatgctgattaacctctgtggttatcggcactgcaacactatttgattcaagcacttgaagttctactgcaacctttgtcaaagaagattcaaaacgagtttcatcgatctttagctatataacatatctgatacaggaagaccaagaatgacaaaaagttagatcccaccctttttccgctcgcacattttcttgacagg

SEQ ID NO: 40795 - DNA, 537 bp, Arabidopsis thaliana columbia
tttaaatggagggttattcggagtcgtacctgaaccgcaacgtcttcttgaagcgaattcaaatcagaatctgaagataatctccgctctgtcgaagccaaattactccggagaagatcgaaaactccaagaaacagcgaaatatactcttcgactggagaggaactttaaatacaagcataaatcacggggtaagaatccgggtagtcgggtcacccagtaactgttacggagctccgggttttgtttagagaagtatgacggagagaaagagagaaggcatttggaggaccgaccgtgagtaatttataaggtggaggaaaatatagagatattaacggcgttagattacttacgacgtgagttgacggagatactttttttctttctctttgagtaaaccttgaaatttggtctcgataagagacggcagggagggcccattggtgtttgcaggtgacggagataaaaagagagagagagagagagtctcttacgtgtgcaggaagtagcctagtggcggcttttaattggatg

SEQ ID NO: 40796 - DNA, 909 bp, Arabidopsis thaliana
gatcccgcgtagattccctacctcgacctcgacttcctgacgattttcctttaccaccaccagccatagttcaaattcgagtttacaaagaaaagaattccaaaccctagatctagaatttgactagagaacaagagggtttagagaagagaaattaagaggattgaaaggtattttggagagtattctagagagaatgagaattgaaaaccctagattgagaaaaggaaacgataaaatgagagaagtcgacaagtttatttccacttaaaataaataaagagtcgctctttggtccctcttcggtcgaactataattatgcgagaatcacttaatatattttacaaaattttaaaaacgttgcacaatcgtcgcaaatcagtcgcaactcggttacgcaaacgtcgcaaagtgtgactattttgtaactattagtaaaacgtcacaagaaaaaaaaaatccacatagtttgatccaatctattgataaatattactgaaaagcactcattttattacgtacagaactttaggtatataaatgattggtttcataacttattttagaacttgtttgaaaatatcaatcatgacaatgaaaactcatgaaacttatcatatagattatgtttttttggatgtatagtttgtaaaattcagacttgaagtgtttggttatgtttgtatatctaatatctatcaaattaaagtatcaacgtataagaaaacatataaatagaccaaaattttaaaatttcgaaatgcaaaaattgatcgttggtaatacgtaggtaattggttgtaaagtgcgactgttttctattttcgtcgcaaataagttgcaaagagcgactattttgtgacatttacaaaacggcacaagacaaactttttaaatcccatagtttg

SEQ ID NO: 40797 - DNA, 598 bp, Arabidopsis thaliana columbia
tacaaaacgccgttatctgcaacagtaactgcatccggtagcttaaatctaacgccgtccgcttcttccgttaacaattccgtcttcttcccgtcaccgcttatattcaacagtccctacccagacagaaaccaacctattaattgaaaattttcaaacttcgatttcaaaaaagtcacgaacccaaaccttgtaagcgtcagatcagatgacttcgccgtggattccgaaagcgattccgagcggtctaccaccggtgttgaccaaatcttcaacgagtgagtcattaaccgactcggcgaccttgactcgtttgacccatccatcaacgcaaccagtgtagatgaaaccagagtcttcatggtaggcgatgtcttcggggctattgagaagaccgactccgataaactcagctccggtgagaaatctttcgtttattagaggcgggattgaagcagtagaggagatgagtgagtcagcgggatgatgagctgggtcaaacgtgtcgagttggtagagagtgatagagatgagtaaggggacgatgatgcagaagaagagaaacgagaagagaggaatcaggcattgtagaaggatt

SEQ ID NO: 40798 - DNA, 1064 bp, Arabidopsis thaliana columbia
  unsure (1)..(1064): unsure at all n locations
tcaaaactcggtatgttccgggtgatccggtttattatctcattactataaatactcttaacctagttttagagaaagaaagcttttgttttggagatcaaaacttctctttaaggttctttatcttaagtttttgtatgaatgttgagttcttaagtttctatatcaagtatttcttttaaatttctcatctattctctaatgattatggctttacaaagatcaaaccaattcttttgtatgatcatgatcatgagtgagtagtctcctagagttctttggttagggttagattaggatggtttagatgttgggttatggagtttagggctagattacttaagattcttacttattggttgcttttaaggctagatcaatcttgatcatgttgatttagatactaggaatttcatgcccggaaggtgttcgatgaaattcccgaaccaaaatctttaagtgcttttcataccttacctttggaaattgttgattagggtgattgattgattgtaaagggattaatatcatggaaatgtattagtcttgtttagtgttctatggcctaaggatcattgcttgttagaagttatttgttgctccataatccatctctttatcatttctaattgattaccttaacccgagaattcgtctttacttatcactaagtcatttgttaatttcccgctttgtttactttcgaaacttgttagtcttttgtttcttgctttcttttatcttgttttgcattgtttgcttgataatgcattgttactaagattaggaacactcaaagtcaccttattagcttagattaagaaattttgtgtattcttggtgagttgattaattgtaaattgtggttcgataattaattgaaataaatgctacatcaatttggcgcagttgccggtttgcaatagttattagccattaggatttcatatttgcttgagactaagccttttactttagttactaatcctttatacttgaatctttgctcttgttttaaaggtgtatgaantacgaatcacggctgacaaacttagtagaagaga

SEQ ID NO: 40799 - DNA, 1154 bp, Arabidopsis thaliana columbia
cgaatttgtctctttttacttatgaatctcagaatttccgctgccaattacacttagagcgaattcggataggacccgaggacacttgagttatcctcggatgggaacaacctcaccggacggacagcccgggatgggacgtttcaagtctctcctgagtttaattgttgttagaatcaatttgttaagttgagtgcgtgaacaataagcttatcttaagccgattggggttgaatgattttcttttgtgggatgatatgtaggtgtggtgaatgtgtttttgggtgaattgttcaataactggttcggtatgttgtatttgtgattataccccttttctgtgcttgtgtgtatagctggtagaaggaaggatcacctcactaagtatttgtgataatacttacgcatctctttctttttggtgcagttaaagataaagtgtgatcgtggaatcatgacaaggaagagaggatgatctaggaactcgtttggtttatttttgtgttttggttattggaatccggttagggttgtgttaggattgttagtcattcttggttttgttggttgaattagtgagttagtcataaataatatttttgacttgctgtttaaatgttgcttcattggttgggctagtgaatgatttataggattatttaattatgtttaaaaaatcgggtcgggttgtttcaatatttaatcgcgaattttcgttgactaaaccaattaaggcacattgttagaaattctccaaatcacaaaccctagactcccaaaatcgatttctgattctttctctcttcttatttggattctttcatcttctttgaattcgaagtaatctcttgtctctagatcaactgatggagtcaaaaataaagaatttgtgactcaattggcttagtcaacgagaattcttgaacatagaattgaggattttaatcactaggttcagagttcatgctttaaagaaaaaaatgataaactgatgatttaaagggagatttactcaaatgttatagaaattaggtgtatttaccagaaccacagatcttttttattactatcatattttaggtatattttgtatacccatcgtgtcctactaaacgttacaggaaaaaacataattacgaggaactacattgcca

SEQ ID NO: 40800 - DNA, 966 bp, Arabidopsis thaliana columbia
caactaataccttagttttataatgcagattccgatttacattttccaaacggaaaaaagcaattgttaggaaactttactttttaatgaacggaatattaggtttaaatgatagataaattaattgaacatggactctttgcatttcaacatgcaaaaacttctagctatttaaatcaatcttcgtttttttcttcttatttggacaaaatataaccgaataatatatatataattaatattcttgtaaatctttataaatttatttaatttttttgtaaattctttaaaataatcttaaaattataatgagtcttgttttattccgttagagctaaataaacattctcaaaattacacactcaaaattacttttccctccaatagcggcgaaaaacatcagcaatatcgtcacgacggacgaagaagccaacgatacgcttgtagcctcaaccgtgatgaaatagtggcggtttatcgtcaacatacggctcaatatccaacatcctattagataacattgttaataatgttttgcatcgtttaaaagaaattcttcaattagcaaaaaggaaatctataatacaaaatgacaaatttaaatattgaaaattaacttaaaatatgttattgtctatgcatatttcactaaagttaaatctaagataatagatttatggtgattatgaatataatttaggaattatactcttttttttttgggcaaataatttagtgattagacaatatccaaatagattagattaagaaaagaagtgagtacaattgtaaattgaagtttaacttgtgaacagtttgtccaaaaaaaatttaaaaattaatcttaataaatcactattaattaataatttttctggtctcgaattaggtttttgtagtattaaaattcgataaaaaacaataaagagataataatttatttgaaaatcttatatagactatata

SEQ ID NO: 40801 - DNA, 388 bp, Arabidopsis thaliana columbia
catacgttcagatatcccatccgaggagcctactccatcagtttgctcaatcatggccaatgattcatcttcttctgttgaatccatctcatcatcattattagatgccacaggttttgcctccaaagtcttcttcgcctgtaaacaacgaagagaagttttctactcatttgaaacgtcttaaaccataaggctcatcctacgggataaaagttgaacaatgcatgcaaaagaaaaacagcctttttttctgttacaggtaattacagtacgcagcaaaaactatagtaggtgtagtcataccttatcttttgatgatttttcttttcgtaactctattgggtacctgtactccacagaaactgagagtgagtgatacaaaatgaaa

SEQ ID NO: 40802 - DNA, 573 bp, Arabidopsis thaliana columbia
aagaaaatcttaagtcaaaataaaggtaaccattggttttgaaaatggtgaatgttgttgctattaacggcgacactctttaattagctcagaagggatttagcatgtgggaatcttgtgtttcccaatcaacgatccattttttttttttgtatgaaagataatttactttaactatagaaaattcattagtattcaattttggccttccaacaacgagtgcatgaacgagagaaccttcgtggcaggtgactccacttggctgatgtaatttaatttggagattcctcaaaatctaagttactttatcctcttatttaatttttctttgtttgaaagtggctatatcattcacgatatccattcttggtaattttcgatatctatccagatttttaatataattaatagtatgatcataatttctgttggcgaagaagtaactaagggttgattttttacaaaaaaaatataactatgttttaagtaaacacatatcatgtggtacatgaaaaaactagacgtaaacaacattttttggtctatattttgtgcctgaaatagttaaaatga

SEQ ID NO: 40803 - DNA, 509 bp, Arabidopsis thaliana columbia
gtgtgtgatttatatacatttagttatgtacaagtaaatcgcatatatattgcaagttttgaaagcaaaaggcctatacgtcacctctaacatcactagaaacaaaatatattatcatatcatggttaattaatcacaatattttttgtatcatgaattgaaatacttttgtagatttgttttaaaataaatcaatcacttaatctaagagcctaagacattacgttatcggcttattcctttctcttctagatgctaaaatttaatagtactttataagttttgttttttggtcttcttttttagtcggccatcaataactatttaatttctgttttcggatataaaaagtgtttgattgagaagaagtaaaaactaaaaagtaaaacaaaagaaaaaaagatatactaatttgtttttttaataaaataatgttgggtttatgggcttggacccaaagaagatacaatttaatttctcgaaatattcatttactttgtgcctacata

SEQ ID NO: 40804 - DNA, 311 bp, Arabidopsis thaliana columbia
tttctcgcatgtgcagagctatcaaacatctgttttgattgaaagctaagtttccaattccaaaacggaagaaattgaaagtgtgtatgtcaagacaaaccaccaaactacaaaagaaacaaaacccacatcgcattgttccttaaagacccagcaataagattatctcacgcttccttctttcttcctgacatttttctcgtttttgttttctccttatttggggtttttcctgcaatgtgggtcgcatttggtcataagtgattatttctagggattgtgtgacctctctgcttttttgagttaagcat

SEQ ID NO: 40805 - DNA, 574 bp, Arabidopsis thaliana columbia
  unsure (1)..(574): unsure at all n locations
ggtctcttctcctatctaaccctggttgggcgttatgtatatgtacaagtaatttgcagattcattgcaatgttaactccttcatactctgttgaaaatgatgtgaatcattgaagattgctaattagttaaagaattacaaggatgttatattttctttctacatttgaatatgcttttgcttttgcttttgcgactgcatactatttctcaaaatgcaatgttcgggtttcatcaattaaaagatgagcactatattattttcccagtagaataggatttgcaaagggtaagtataatgtttgggtttcattggccgatgttgggatcaatgcagcttctggatcagatgggttgtgattaggatcgataaaaaaatatgaccgatatggcagaacgatgtagctactggtcggatggtttggttggctagatcggtggctctatgaccatgatggttgatcgatgcgggttatttagttggctccagggatattggatctgcatttgactgatgggcacggcacatgtggcttatgaggngttgttgaggagtctagatcagcattggtga

SEQ ID NO: 40806 - DNA, 541 bp, Arabidopsis thaliana columbia
tcataatgaagactggtggttggtggtataaagaccgacttggccgttctagaggcccttgtgagattataacccttaagacggcttatggagctggaataattgacagagatactttcatttggggcgaggacatggatgaatgggcgcctattcacatggtttacggtttggaacctgcaattgcaacttgggaaggtctgtctatgggataatttgaaatctcggatgaatctgatcattgaagaattacaattttgcctcctatatatatgacttcattgttggttttattggctcgtttctttcttgttcagtgaggcttggtgcagcggcaacggctttcctacacaaactccagaagggaattccaccgtgggttccattaaagggacgagagccaaaaacatacaagcagcttcaaaaagaagctattgagagtaagaaacgcgacatggcagtgcttgaagcaaatggtggcgtttggcctggagtcagaactcccagccacgctctgtttctctgggccagtgggtctgag

SEQ ID NO: 40807 - DNA, 487 bp, Arabidopsis thaliana columbia
tgtctttaatattggagtgtgagttgtctaactagatttattttctctactaatctcggtatggtttcggttaactcgtggacaaattggttgttggcaggagaggaatttgggcttcaataagtttgaggaggcccaagatagtagtcgaaactggttgttgagcccatgaaaatttgtgaagctaccaaaattaatattccacaagctaccaaaatcacaagaattttagtgagatattttagtgtcgccatttgcaccattcaacttcttgtcttagcaacacaaaaagattcgcgatattttagtgtcgcgattttttcttgatatggagatgaagaaatcattaagcatatgcgaaacggatgcttaataactttcatatcaaaactgttactacgttcccactcaatttcactgataaaatgagtatatgtatatatagaagtagtttaaaatcacatttattttgcggaagatcatgcca

SEQ ID NO: 40808 - DNA, 561 bp, Arabidopsis thaliana columbia
atcttaagcatacgcttaaccaatatcacacataaactgaatacattaatgtaaatatgcatgtatatattaaagttgttcttatgattttttcaacaaagttgatttcataaaacggattgatgatgtatctaagtcggagaatgcagagcggaggttttgcggtgtatcgacaggggccttgcggaagtcttacaaatatataacaaagttgagaggaaaacatctatgaatccatgtccggcgattattcgatttggaagagactatcataaccaaatatgtccacaaggtctcaagttatcaaatccgcttaatgccgggagatactttagtaatgtttccaatgactccaagatgcaaccttctcctccaaaccagtggtttaatttccctcttggtactcctctttatctctctgtctcaatccctctaatatacgtcgaataaaacaatatgtaccatgcaaggttatgatatacgtacacaccaagttgcattagataattcaattcataaactaaagtttggagaataaatggcaggggaagatgggttata

SEQ ID NO: 40809 - DNA, 674 bp, Arabidopsis thaliana columbia
cagtttaaccataatttcgatgattttaacaaaccttagttttactagcaagtataataatttaaggtggaccgtacgtatataacaatatttaatttacaattaccacaatcatatctttacgtatgtatatcgatcatcagtcgtccttacgtacgtttggtgatgttcctagtggaaacacgagaaggcgaagatgacggcgtcgtttcgagcattccaaaacggtccgtcccaaatcgtcggagatcggacgttcgaaacctactagacgagtcgccaggaagtcgcatgtaataaccggcgttagaaggagagtgatgatcgctgagcaaaaccgacgaaaagcttccttctcttttatacataacaatggctttgtacaaaaatggaatcaaaccctccattttctttttaaatctctgcaatccttaagaaactttttttttcttccttttgatgagatttttttttttgtggttttgtgatttgatcaatgcgagagagggcttctggtgtataatataagagggaagagggttgcgatagtgacgtggcgtgatgcttatgttccacgtatgcttaacgtgacggtaaataatgtcttgagaggatatgcatcgaagataaataaataaagatgtttttatgagcgatgataatatgtgaaggga

SEQ ID NO: 40810 - DNA, 538 bp, Arabidopsis thaliana columbia
gaaaatcagtaatatgatttttttgacaaatcattaattgtattcgaacaataatgactaccatatttgcgataatgcataaggataagtttaattgaaaaacataccaaaattgttgagatctaattttagcttttaaaaaaatattttcgtcatcctaaatttaaaatatgtaattcagattagtttttttcagtagagctaagattgaatccaaattaaaatctaattttgtgtacaatctatctcttaaaaatgttatgcatacattcatattgcctcacaatcaatctagaatattgattctttaaaaaagatagatagagattcatatgtaaattactttatgttctaatgatatctatctcctaattttactatccatttacgcgtattcttatggatttttctttcagggtaaacactagattacaaaaaactagccgggtgttggtcaatattataccacagataaaatgatggaattaacaatcaggatatagttatacaatctgacacaatctacactacagatata

SEQ ID NO: 40811 - DNA, 650 bp, Arabidopsis thaliana
  unsure (1)..(650): unsure at all n locations
ggcttcatggcgaccgcgcacaacagtagtggggcttcaccatttttaagcggactcaaatcattatcctcgaagccattccacagagtctgttcccacattatacgcacagttgctggctttcaggtgaacttggttctgttattcttcttgttccttaactggattgatggtctgataaacccctaacttgatgtcactacagctttgttacgctgcaaaaacgtggcatggaggttttgtgggtatgatgatctttggcgctagtgaagtgagcaggaacatggatctgggtgacgagactaccaccatgatgtgcaagtttgtggttagagcatcagaagcatcaatcacaaagcaaatagagtcggatattcagggatggtgtgatgatctaactgacgggggcgttgagtacatgccagaggacgaagtgaaggcaaccgcggccgagaagctgaagatctctatggagaggatagctttgttgaaggcagctcagccgaagaagacttcaaagatagaggaggaacagaaaacgaagaagaagaagaaggagaagaagaagatgatgatgaagaagtacaagagaanaaggagnaagaagagggaaaggacaaggaagagaagaagananagagaaggaaaag

SEQ ID NO: 40812 - DNA, 519 bp, Arabidopsis thaliana columbia
taaaactcacaaaaggcaaacatcaagtagctagagaaatggcattgagacgactttgtgagatgcagtttctgttttcgcttccaccaaaactattctgggatagttttttctaccatatgactcatatatctaattagaacccttcaggtatctatttataataactctcaccttattcatatgttttgttcataattcgtaattgtttatgttggttattagagataaggccttggcaacgagaacacatgaccattgagtcagtggatcacgaaacgagaagcatgacgcaacggtttaccgtacctgaattctttgaaggctataagatgattacatcaactacaaaagttaatgattccgccattggcttgtatagcctcgtcgatatcagtgtggagtacgataagactggccctgagatcaaagtacttgaccaagtccaattccttgtggactatatcaatgagttggtcttcgtactggtggtcactcctacgacggcttaagtaatgg

SEQ ID NO: 40813 - DNA, 499 bp, Arabidopsis thaliana columbia
tacgtaccacatattcatttttcgcacgtaattaaaaaaaaaaaacatttacgtaagtcatttcaactatatttaataatttatagtgtgttagaaattactggtatagaattaaatcatactgaacagaaatttttatttggtatttagtgtaagttcattataagattttaaaaatgtaatttaaaatataaatcatcatctggtgacctaaataaatactccaagatatcattatctttgatataatatatgaatattagttcatttcgaatcatttaattcatatgcaactgctactattgatgctcctaattaaatattaactcctgctactactactgatgttgtctacgtacaggtcttcctaattacattgataataattggtctgtccaagtattttgtaagacctcatttttaagtttgtatatcgatacacagagaacatgagtggaatgaaatgaaccgctcagaaattttctaactagaaaatata

SEQ ID NO: 40814 - DNA, 531 bp, Arabidopsis thaliana columbia
gttaattctcactataatattttagagcataacacgaagtgaatctatttttcctccatttgattttttttaaatggagaggtatcttaaatttgagaaaaccttaggttgaaattccaactatggcactcacttatttactagcttgtgggtatctctcagatcttatcctcatgttaaaaaatgataacctattaactcacaatgactctattatatagtttaaaactcacttatttactagcttgtgggtatctctcagatcttatcctcatgttaaaaaatgataacctattaactcacaatgactctattatatagtttaaaatgtactgcctggttcatatatgtaataagaaaatgctaactttcttctaaaacagctagaaccaataccagtgccaaaaatacattataaaatgttttaacttcaaagttactatccattatcaaggattatcaaggaccacagctcaaaagcataaggagtcttaagcagcttatgtttttattttttttttgagacagagt

SEQ ID NO: 40815 - DNA, 512 bp, Arabidopsis thaliana columbia
aataagttagcaacgagtaatcaaattatttacccaccaaactacaattgtttattcaaatggtatatacaactataaggacattttgtattgtgggcttaatttgattgctaaaatcatttgccaagagtttcttctactattaaacgacgatgacaagcatatcacgggtcttattgaaagtttataaccaatatacatattcatagatatcttatatcacaaactgatatatagtaatataaaagtttggtactaacactttgttaggaaaagcaaacgagtttacatcaaaatattatattcctaacttgttgaagtggccaattcaattcaaagaagcaaaatattttgattttttgatatattaagtaaaaagagaggaggagagtaaggagaaacgtgaccaatgtagcgtagagagtagctagcccccttcgtctcctagtggatatctctcattttggccgaacattttaaataatgtcaaatcacacctaactgagttgatt

SEQ ID NO: 40816 - DNA, 586 bp, Arabidopsis thaliana columbia
attattttcaaaatctcaaattgattcgttttgctggtgatcaactgatcatgatccaagcaaaactcaacagtatatattgtccatattgtttcattccaatactccagagtcaaaaccttgagctgcctacttcatcaaacttgattagcgcctaccatcaattgagctacgactacactaccaactcccatatagaagcctgtaactcgaaaaatgggttttgagttatagtttgtcacaaagctctgtgaatacattatactacatgaaaactcatcaagtcttttgatatggaatcttcagaaccaagaatagctttaatgcttttatagttgtgaagtctgttattattctattactgaatgtgtattctcctccagaaatatctaagatcttagatgagtcagtttagacgttttaaatagcaagaatgttctgcttttttatgtcattttaaaaagcttaaggttttggattgtaagcatcgtgtggttgctaatcgaacttccttccctttgcattattgagatagtgtactcgcaaaacacggtggcaatttaccaaaacatagtacaacacggtt

SEQ ID NO: 40817 - DNA, 580 bp, Arabidopsis thaliana columbia
cactttaccagccaagaaagcaaatacaaaagaacaaaaaaacaaaaaaacaaaaagtttattatgaagacaagaacaaaacccttacactcgtccaagaactaatccgatcattaagagccaaaattcgattgtttatctaaagacaaatctctcagagcggattcttcactttctcaagatgtacaaggaaacaatattctcaagctcaaaacaacctgagaaagtggtgaccagcttacatctaacattaattcaatgagatcctggttcattggtgaaacaaacttgaaactactaggaaggtttcaatcgaatgaaaacattaaattagatgtgaaccatatggcaccctatgaatccagattgtcaacaagttaactttatacacacagacaaatatgacaacgatagacagtttttactttttaataaaacagaggcaagaagatgagcatatgctagtggtggggcgtgtcattcttagattctcgggtggaacataggtttgccagcaaaatggtgagccaattattgggccagtaggttggtatgggtttaccattttcagctatataag

SEQ ID NO: 40818 - DNA, 546 bp, Arabidopsis thaliana columbia
taacggccgccagtgtgctctaaagataccaagtccggacaaattccggcggattatgcaaagcatgatcttggaacttacttaggtaaccgcaagagtcagatgaattacctcatctgacccatttgtaatgccgtgaccagtgtgtgccgaagtagcaaagcggcaggagcaattggctctgggctggctctcggcatccgtaatccacccccacgggtttctccccactcggcgtcccgggtattccgagggggtcataccacgagagtactccgcacttctactgggttcccgggggtttgtcggagtatcacgacgatgatcactttattgtggagcatggttacagtctccaaagtagtatggcaaggttttagcagcgctaacttcaaagactgctcagaaccttactagattttaagacgagggagaccccgcaccaacaccctacccaaactaaagacaaacactacgcgcggtcacgacatcaccaaaatgcgcgcccgactctcctcctcagagtcagcatcttctcagcggcac

SEQ ID NO: 40819 - DNA, 419 bp, Arabidopsis thaliana columbia
tccatagttccattgcttgcttagacgtaattgtttaagaaaaaatctccacaacatcctctttgttcttgcaaactccattacttaattccgtttatgcgtatcttttaaaatatctacaactctttagcgaaattttataatccacactatacaatttaattcgttttatatatgacatgtttagcaaaaaaaaataccaattgctttaatttgttttttatccccttttccattggttgattattatctttacaaaaaaagataaaataatgttttgctctcacatgttcacatgtggatcgaaatattagtaaaaaaaaactaatatgataagtattatttgacacatctcatgatctaaattaaattccattccttttcatttccttaattccacaatatgcaattatattttt

SEQ ID NO: 40820 - DNA, 568 bp, Arabidopsis thaliana columbia
caaacaaaacatagcaaaaagtttatatttccaaactgaatacagtttcatgtaaataaataaactgctaactctgataagattattgatgttgcaaaagaattggaacatctagacaaaataacaagaatttcgctaaatagttctttaaaatccagaataaaaaatagaattattgtatctaaaaacaattagcagagaccataaataagttgcattaatgcaattgatattttctggatcacgacattggatgtttgtttaaaacaataattttgggaaatcacaatggttatagcgccgaacaaagaatcttcttcatgcttctcccaaattttttgtttttcttgggcaaccaaaactactatagtattacgaataaacaatttgccattttattgtttaataactaaagggaatcgatattgtcagtgatccagatcaagaatcataatatcaatcaaaatcacttgttcccaaagattcgatcaaaaccaaaataagctccatttcaagccgttgattttcaacaaaaacaaagcttcttcttcaactatttacagttttg

SEQ ID NO: 40821 - DNA, 537 bp, Arabidopsis thaliana columbia
  unsure (1)..(537): unsure at all n locations
tgtcatatttttagatttcacaaactctggactaaaaatggtacaaaataaaaaatatctggttttttttcctcaaatgttaactaattctttagtttaaatatgaattagaattttaatggtgtaagtgaaaatgagaaaattgtacaaaatatattatttgaatcatttcattggattgcttttcatctcgattagattgattatttgctacggcattactcttgatcgcatatatttcttatcatcctaatatacttaatcattgtaaggaaagaaaagtctgcaacgcaacaacaagtgatgcctttctgatagggatatcataagatacactccagagataagccaatattatctttaagaccaatgcattgctgctgtaacaacaactctgatgagccaatcagaaatgaaccctccagctagaataggaaccactcctccaactattacccatgggagtgaattgagccctttgagtaaggttggtttgacttctacacctttgtccagtacagttanaacaaaataaaa

SEQ ID NO: 40822 - DNA, 534 bp, Arabidopsis thaliana columbia
agtttacttataaaaaaatgtgacaaatggaagaaatattgaaaaaaccaaaaaaagatgtggccaagggtcccttatttaaatcctatatacaatttggatctaagtaatatttttttctgaatgtgcatagaaaacaggtattgggatcaatttactgtaagtaaacgaaattctgtattatacagtctgtataaaatggggacttataaaatcaccttgccaattagacagtgacctcaacaagacaacaacaatgaagagaaccactagagttttggagctatattatttaaatcctggaataataatttgttgagaatttaattacaaagtaaacgatgacttacatataaaattcgtaaagtcttggtcaatcttaattataaagaacaagttggtcattgcttattataaaaaaaaaatgaaaatgcttgttgtcaagtaacattaactccattttttcttgcatttactcaacttcaccaaatcgtagagaagttggagaaataaatgatcagaaacacacatcaa

SEQ ID NO: 40823 - DNA, 527 bp, Arabidopsis thaliana columbia
gagaagttgaaagtgagtaaaacatgtacttctagaagataatgaaaaatccaagaatcatggacaaaaaaagaagtggtatgccgcttaatatgtaccatttgacgaagagcagactcaaacggccttctcggtgctgaaccaggtgacagtaattttgaagatctagaagttctactatttggagaaaggctagctctttttgaaactgcacgttctgagccacctacaggaatagattgtaaagaatgaagatcatcatctccggatgatgctaccgagcctttactttgagaactaaaccgatcacgctcatgactgtgagatgaactgacacttctggaagcgcttggagaaacagattttctgctgcgtgtagagactgcatccctaccatttctggatgctggcgaggacctcttacataggatgctggtcgatccccaaagaagttaggagatttggtggcgcaccaaggagaaaccaggaatgtttgactgccacacttttattttgggtgaagagag

SEQ ID NO: 40824 - DNA, 517 bp, Arabidopsis thaliana columbia
  unsure (1)..(517): unsure at all n locations
tagttaataacttaatacatatagaaacatcattcatatgtggtatatacatcatcacagttacatataaatatatatatatatatatatattactaatcccttccaccgagaaaaacagtatattctatacctacaatttcaaaaaacaaatgtttcatataactttacttaatagttttttttttttttctgttaaagaactttacacagtcaaaggacancttgtttcatagttaaaaaagaattcaatacctactcgttctttaaatattttcattgttttttgttgttttagaaagaaatgggctccaactcaacatccatgttatttataaatatatccacctctagtcttaatatttcactactcaaacaagtttctgaagatgagacagagagagaaggatagagtaaaagctaagagagagagcgagactgcgagagaatgtaagagatatcattttggtgatctagtaattaacttatactaatcatgggttttatcgatggaaagt

SEQ ID NO: 40825 - DNA, 337 bp, Arabidopsis thaliana columbia
ggtacgagctcgaattcgtagtccctgtctactatccagcgaaaccacagcttaagtcgcggggttgatttcagctggaaaagcttctcaagtgcagaaaacattggagagtttgaagatcaacccaccaagtagttttgagttggcttataatactgcttgctctttgattgaaaacaataactatgctgatgctgaacaacttttgctcactgccaggaggtatatattctctcatctgtttctgagaaatttgagcctagtattttgggatatatagatgatttcctttctctgtatccttatcaacatttcaagtacattgaccatttgacta

SEQ ID NO: 40826 - DNA, 133 bp, Arabidopsis thaliana columbia
ggccctgcacaaggctgcccagctcgaatgagttcgcattccggctgagccccatgttcggccagcccgcctccgccacgctgctcgacctggtcagcgaccccgtgctgacgctgcgggccgacctctccgc

SEQ ID NO: 40827 - DNA, 589 bp, Arabidopsis thaliana columbia
cgaatttgagtttgcaggcctgccacaacagccagttacaatacaatgagataacatagtaaaaaaaaatcggttatacaggcacaacaaagcaattaagttggacaagtgaaaacactggcaacgtaaacagagatgcaaacaataattcatatgagcaatgtatgtcccacaagcataatctcagagaatattatcctgcttatgtcaaggtcaacctaccctactttttcccaagaaattaatcaaacagcagaaaccaacataaatgacaggtctgcagtgtagagcacttcaaattaatttttagttcacaatcaattgcttatcattctatcgacggtacagctcatccgtaagaattaagcagattcaacaaaaaaaattgtaatgttaaaaacccaacagagtaagaaatttaagttcttttggaaaaatcaacgactccaaagacaatcaatcttcagatggtacgtaaagcacacacacatataaggtagatatgttcacttacaagaaaagatacaacaaggatgtatgtagctttaaaaaggtgtaaaacatgatgacttacacactattagtgaag

SEQ ID NO: 40828 - DNA, 570 bp, Arabidopsis thaliana columbia
ccccagtatggaatctctgttttatgctggtgaatcaatgtccgatacacaacaaaaactcaagcttttggttgataatggtgaattggtgattacggattcggaagaggatctagatatggagattacgagaatctgttggaattgagtatcctaaactaaatcctacaagaataacaagcttggtgagaagaagaagatgaagaacaaaggaagaagcaacggaagaagaagacgatggcggagaagagacgtcgtgaagagaggagtcaaaggaagagaagaaagtcaacaaaccaaatgggtttgtgttttgtgtgttgggtcataggtaatgagataaggcccatacgaataagtgttttgtacaagttgtctagttaaggtccaacaagaagaggttgtgacaactaaagtaaactaagagagtgaattaaggtgttggagttccacatagtagagtggatgatgtaagtcttaggacaatgatgtggtctagagtctaagtgtgtgtagtctaccaagtggagcaaaccactatatgtaagtgttgtttgtgttgtgtaagag

SEQ ID NO: 40829 - DNA, 510 bp, Arabidopsis thaliana columbia
gttatggggttggaaatctgaagttgaatcaatcttatcgtagttttactcattctcgaggcttctttctcacgtacaaaacttcccgcacgggctaaagcttgtttgtcaaataaattgtttagaaactgaggtttcgacgatgtacgaactacacaaagctacaaacaaagaaaataattaagaatttgttttgtacgtaaacatgtagacaaacccatttccacgcgtgtgagctctctgccattcatatacagctaagacttctgaaaacgacgttgattagttaaatgtgtcgtcgtggaaaacactatgtaaatacgttctctattgactcacaggataacaatatttctgcatatttctcgtttaactgtgatttataatgttttgtaaaactgtacgtaacgactatcgacgagatattattatttcacatgatgacaagcggtcaaagttgttcttaccgagttactgtcaaattgcatgctagagcttattctaatatgt

SEQ ID NO: 40830 - DNA, 509 bp, Arabidopsis thaliana columbia
aatattgctcaaaagtgtcaagtatcgagaattgtgatcgattataatcacttattggtgagctcactgtatactcatttgacttcctaatttttcaataggcgttttcgtgtgtacattttgagttaatttgtgtaatgtggctaatcgattgtttttcttgacatcatcacgtttttcagctcatttgaatccgtatgttttacgggttacgttcttttttcttagaataaattgtttacatcgacagcaactacatgctgaccagaccttgtatattatctaagtattgtttgttcaggatcagatgtggtgccaagatttattttgtctgacaaaaaagttggatgttgtaaaattgaaataattgcttgttggatgaagaggcatgcatacacaataattgacgatatttctgttaacaaatagaaaagtattcagttgcataatatttttgtgttctccttttgtcatactcataacttgtataccagtattgcgcgcttcga

SEQ ID NO: 40831 - DNA, 571 bp, Arabidopsis thaliana columbia
gatcgaaaattttattgaaatttaccaaaattttacaggaataatttctttcatagaaaaggcagagagaagtaataatcagcgttcgttcgaaatttgaatttcgaaaaagaggaaaaagtaaagtaagcttcagacagaacatatatttggggtctttaattcaagagacaaaaaggtaccacgaatcacaccactaagcagaaacgcgcaaaaacaaacgcaaaatggaaatcacgaggaaaccaattctccatagattgcgtcttccattaatggaacgtaacgcaaaagtttcaaacaaagcacaaaaattaaattacaaatattgttcacatcaaaagcattattattagaaaccgatttgcttaataaataacgtcgaattgtataattaattgcacagatttaaatcaatgcaaattttgtttatgggtttcaaaatcttaaagcaaaaaacgttaaagaaacggctaaactcggattaagaaaaataattaccagtaattccttcacgagagctgcgtttccgaaattaacggcgaggaataacgccgttacatcggttttg

SEQ ID NO: 40832 - DNA, 593 bp, Arabidopsis thaliana columbia
cgagtgagaagaaaagttagttcgttcgttagggaggagaatcaagtcaaaggcactatcgccatcaacttaaccactaactcctccctaccactcactctttctttgtcgtttgtcattattattacctttaacttaagtggcaaataggtttagagttttgactgaattttatataaattaacagaattttaacatgtacaatcaagattactcagtacaattttcatttcgatttccatctatatgtatgtcgatattttctttaaagaaaaacatatatatatatagttttttttagaaagcgcaaactatattttcagtcttaaaataatgtttaatgatagaatacatattatcatcttcgactcacctaaataccacaaaataaaatctatatatttaatcaaaatgcatatttatgcatatgtatttcgataagcacttgttttcagaaatatttacatgcacatacaaaaaagaaatgaagaactatcaaatgattatttttttcattatcagtttcatgaaacatacgttacatttgaatttctcgacgctttataaagttagtttttgaaagaaaacttgtg

SEQ ID NO: 40833 - DNA, 488 bp, Arabidopsis thaliana columbia
  unsure (1)..(488): unsure at all n locations
tagaaaattaaagtttttaaaaaaatatttgtaaaatttatgaacatagtggtcatttggtcgagaaagaagattttttttttcttttaagatgaaaaaattgtatgggtcattaatatcatcttattatttaaagatgtacaagctttagcttatctcatttaaggatgtacaagtaatatgcatacacacgcaaaaataaaaataaatcaaagtttaatatttagtttggtgagaagaatttgagtcattgacataatacatcttgacatcatgtttgacaaggagactataagctagtatcggtccctagacgaaatgatgcctcaagaacatacgaagtttattaattcccctttatttctattcattaacaaataaaacagccaaaacaaaactaattcaataccgacatgatagataaaatccattcaaaacctcaaacaaatttgttttggagttaacagaaataanatattttgaatttg

SEQ ID NO: 40834 - DNA, 359 bp, Arabidopsis thaliana columbia
tacatttggactgtgtcgaacactctacatgtagaagtgagcaatgctatatacaatattgtttctttgttcaactctattttccactaattttcttttaaaaagattaacaattaagtacttaaatgtgtcaaatcagctatataaccttgagatatttaggagcaaaaataatttatatttttacaagaccaattctcaatccatcttttttttataataaaaatgttcaaagaagagattagcgacgacataatccataaattaatacagagattagatagagagtcaagaaaaatgggtttaataaataagacgaaaaaaacagagctgagtcagagttccggacaattctgctg

SEQ ID NO: 40835 - DNA, 440 bp, Arabidopsis thaliana columbia
acatgtactaatacatttgagttttttacaaagacatgtcaccagcatgatcatggctgacgttgaggaatatatctttgacggcaactaactgtatgatataagattaatatcacatctttctacaagccaatggcatcaagaagctgagaatacgtatcttctgctcggactggatgcgccaaatctgcaccacgaactgttttcatttggacactggttgcgaaaacgataattagtggtaggctaaccctggtgaacataaaataaagaatcatctgattgcagagaagacataccactgagttgctcctctcagatggtaagtcatgcagtgagccactagacgactcaggtgcgcaagtagttgcaatgttggtaggctgctcaggcatagcagtggcaacaccatggcccgtagacatatccctctcgagaga

SEQ ID NO: 40836 - DNA, 464 bp, Arabidopsis thaliana columbia
tctgtaatgacaatatgactcggttgggtttatataatatataacaaacggaacttactccgtaattaacaggcggcattccaggcatctgctgaacaggaacatgactaggaccagggtagtagaatgaggcatctgcgattggagattgaggtggtgcagcagctgactgcaatggtttgaaactccttagcctttggatttgagttggaatccctgatcagacccaacgacccataattagtaaaaacacacacacagttaacactttatcaagtttgaacatcaaacaaaatacctttgcattcggattcagtgtggacttttctgatgaggccatagaaccaattgacgagctcggtgatagcccaggacgacttgatgttgaaggacctgggcgactttctgaacttctagaagcagactgcccgaaagagctttcagattttgttttactagaaact

SEQ ID NO: 40837 - DNA, 541 bp, Arabidopsis thaliana columbia
ctttaagaagtgggactgacagaaaaatcaacagaatatataaaagttagaagaagtatcaacaatgactaaattagggggaagttagtctttattcatttacttttgcttgacttgagcaacttgttgttgaaggaatacagtttctgaactggaactgagaagattggtcctttttggaagtttttctactcgaatctttaagagtaaccatagcatgccacggctttagagggaaattattggaggaacaaaatgcatttgaaataacatttgggtcttgttttcttggtggctgctttatatgatgagctggagaagaaatgcttgagctttgttcggaaggtgctctgcttactgtctgttcaaatatacttcgatatagagaaagcacatgatgctcgcgattcgtgacctctgcttcaagcaactcaatctccgtgataagttcatttgcctgaatcatccaaattcacatgtaaaatctaaagtctcacaatttctatttactcttaagtaaaatgcagaaatactgaagtgt

SEQ ID NO: 40838 - DNA, 471 bp, Arabidopsis thaliana columbia
acatatgaactcctctgagatagtagctaaagccaactaattcagatccatcacacaagaaacagagtgtacagattccagagacatgagcaaacagttatgaactagtgtgaagatcctggaatcaacagtcatttctatttcagattactttgacattactattaaaacaaccagctaaaatcaatccagtgctctcatactttagattcaaagctaaggcaaaatcagcaatcctataatcttttgattgctttcatacaattcacttcatcacaatgcggatcctataaatgtctcattttttcaaaagcaaagttgtacctgaaaccgtaaccgatccttgctcctcttatctccgccgctagaaaccgcatccgggactcgcaatcgccacactccggcagcaagtttcctaacagtatcaggccgtacactcctactccgttcctgacaacgcatcttattaca

SEQ ID NO: 40839 - DNA, 487 bp, Arabidopsis thaliana columbia
ctctaaatcgtgttcaaatttcgaaatgtcttacattctttcattgtttgcttagatagggcattgaattaatcaaaaacccctagaggaaaccacaacatgattttttacttaaagattattagcgtgctccactagagacagataaactatatattcgtcccaagtcaattcgttttattcagtttttatacaaaagcaaacgattcttcagattaagttgaatcccaacctttttaaaaatcttgttgtattgcttttaaccttggacaggccataaacaatcctagtatctttgagcgtaccttcggacaaagcagcaaaggaagacaactccaaggcagacggtcaatcctattatctttgatcggataatcaagttgcggagggagactactcgctggcccaagccgattttatattgtgacgttccaagatctcaaatgttgactttttagcagattcatagttgagtaccatcactttg

SEQ ID NO: 40840 - DNA, 526 bp, Arabidopsis thaliana columbia
cattatgattcctaacatataaataactaaacttagtttgtcccaaaaaaaaaaatacccaactaaacttaaggtaaaaaattggtcatagtaacatatcgacaatgtatataatatggagcctagattctgaaatgattcatagattaagaatacaagttcatatctcatacaatgtatatagactgatatcaataaaaagattcatatcataatataacatgaagataaaaaaaaagtaactcctatcaccaagaagaagaagataatccaatcagacgtgtaaagagcgaaaaaaagctatcaaatatcagaatcagattgacacgtggcgatcacgagctctctttatattacgtggacaattttgccactcttctctctgccactctcatcattttttgaatcattcatgatttcttagctctctcaaaaaaatggcgtacaaatccctaaattcaatcaccaagtctgatatcgaagctctaggaatctccggtgatgtctccgagaagcttctcagaga

SEQ ID NO: 40841 - DNA, 585 bp, Arabidopsis thaliana columbia
tctcgacatgtgaacacttctcaaccagtaaaagagctttatcgatcgtgtctttaagatcttgtagttccataccatcttgcatcgattcgatctctttgatcaccggaagcaatgactccatcgtcgatgcgagctcgttagacacagatttgaaagctaacaccttctttgcctctgaaatcaaaactttcagaccttccgagaccaaagctccagcaacagagcctaatcccaaaccaagccaatcgaccacgaccattcttgtttcctcttcagattcctttcctccaaaatttgccaaaacagagaaaaccaagaatgaaaaaatagctcacagatttgtctgtagaaactgaaaatctaacatgttgagaaagatttagacaaggaagactatatcagatgctttagatttgttgcaaacaatctcgtagttgacttcacttcacagtgcctggaaactgcaatcaaaatgtttttttttctgacgtcatctttctttacgtcattgcaatcaaaagtttcaggcccattgatacatatatttttcgttcatacggcccattttgatagacgttatat

SEQ ID NO: 40842 - DNA, 207 bp, Arabidopsis thaliana columbia
  unsure (1)..(207): unsure at all n locations
gtgtgtgagagcgtgtgtganagtgggtgcgagagagagtgtgcgagtgagtgtgtgtgggagctggtgtcgtgagcgtgtgtgatggggtgagagcgtgagtgcgtgtgtgtgtgcatggcgcgtgcgtgatgtgtgtgtgtgcgtgcgtgtgggagtganagatggntgtngntgtgtgtgagagtgtgagtgagagtgtgtgtg

SEQ ID NO: 40843 - DNA, 560 bp, Arabidopsis thaliana columbia
  unsure (1)..(560): unsure at all n locations
cggctttgtttggggtttgggattatataaggttcttggggtttctttttgtacaaaagatcagatgtttggaatgggaagtagaatatgtctctcttgtctcagagactttgaaagaaattttaattcataaccaatgatgtatttactacagttacagtttcgacttgcaaattgtgtttggatattggatcatgtcgtagtttgcatttataacaagtcttacttgatcaacacatacctcttctttgaaactaattccaacttttctgatagaaattgttagcatatattagagacattcgaacatgtgttgtataccaattactgaatgtccatttaatgtggttggatatgattttgaaggaaatttttgactcgagagatcatcgtgacttaattatttagaaggcgacttgggagatcatcgtgagactgttagagtcncctcacctaactcactcgaatgctctttttggagaataataatatttaaaagtctttagtttattatcaaagaatcaaagaatccaaccgcacaaaattaatagcttagttta

SEQ ID NO: 40844 - DNA, 450 bp, Arabidopsis thaliana
catcgaattcaccctcttggaaacggcatgctctgtattcagcctctctcttgagcatgtgggaaccgcacactggtcgtcgtttttaatgtgacaactcgaagaagagtttgaaactatgccctgactgacgacgcctccaagttgcaacttggagggtaatgcatcatccttggaaaacaacaagtcagcagcaacatgcttcttcttcatcttcttgtccttgtggagacatgcgtcttgtacgagtccctggttaggaggaaaggaggcaatcagatctaaagcggtcttagcagcagcaacggcttttgctgcagcagcggctttctcatctgcagtagctctggcggccttagcagcaatagcagcagcggcacgagtacatctcgaagcatctgcaatctcttgaggggtgagatctggattactcaaatgagaagctaaaag

SEQ ID NO: 40845 - DNA, 501 bp, Arabidopsis thaliana columbia
atttggaacttcttaaaaagaaaccaataacaagaaaaaaataaaacagtgatatatatataaagttttactgtgcatatatctattttataccttcacagtaactattattcaacatgctttaacgccaattcatttcataactataaatatttgcatgatcaactatgaaactgcttattaaaacaaaatgctacgccaaaaattaggccataaatgttttatagttttttatgggtttttagtttttggtttgtagtttttggtttctgatttttgtagtttttgatttttgatatagattttagtttttgcaaaatattgaatagtaattagtatagttttaaggtttttgacagaattataattaaaaaaacgtttttagttttgaataatttgataaatggtaaaagtaacatttaaaataatacacacgattgaaaaaaaaatgtcacgtaaatgttttttaaaacctacaaaatttggttttaggatttaatg

SEQ ID NO: 40846 - DNA, 578 bp, Arabidopsis thaliana columbia
caaaatgaacacttcaccaaagtcccatctcttaacaatcccaaaactaagatagctgaggaacaacacaaaatccaattcctaaacaagttgctttgcatcaaacgagtcaagatgatccaaatgacaaaaacaaaaaagattgaaactttcgattataaaattcaatatcttcggtacccatttctgaaatctaaccaacagatcaaatgtgacaacaaaagaagaaccctaagatttaatactaaccggacgataaagagatcaggagatgaagaaacaagatcggactctgaatcaaaaacaccttcttcgttaaacatcttcccatcttttctcttcactgatcttagctcgaagcaaaaaatgacaaaagacaaagacgagtactcgtgactaaaggttcaacatttacaagtcttacccgagaggaagaatagtattacgggtcgacccgattacccaattgcatagactccgtcaattatggttttagacaaaaagaactcactttattgattaactcgtgaagaaacaccattaatcgcagaatagtattaaagacattaaatttatgt

SEQ ID NO: 40847 - DNA, 472 bp, Arabidopsis thaliana columbia
gaattcatcgtaaaattgcgcaattatcattattaggcattcatgtggtttatatatttccaagtttctctttgctttacaccatagtaacaaacttaaaaaagaaaaaaagaaaaaaatcaaccggtcgatgattcaaggttttttatttttctaaaagcactccgaaacggttaccgggagcatcgtcggaattatcctaaattccctttctttcagccttcttaccgtaactgtcctcattgcttattctctttctagatcggattacctaacaagttttggactacaatgcatgcatatcaaaatagtttgtcttttttttttttttgatatatggacataagtttcgttgacaacaaaaagagagagaagttacaagaaaatacatgtttttggtttgttttttattatgacatccatcatgcatcatcatcaaataggcaacatcccgccttttctcaaatccata

SEQ ID NO: 40848 - DNA, 524 bp, Arabidopsis thaliana columbia
aaaattataccataatacataattaacatataaatgtttcaaagtatatatcgtacgtcatgcttcaaatcgtggaatccaatgtgtgttaagaaaaaaatcaccgatcgtacatacatgaatatgatataggcaaatagaataagaaaaaggaaatagtgtaaatcaataaagaatacggactgcaagaagtagaaaaaaagtaataatgatggaaaaagataaaacatcacgcaaaaccttaaaaagaaagaaagtcttctggttgtcgtgtgttgctctctcctcaaatagtttgccaaagttttcacgtcaaattttttaaccctcaaaaaccccaattttttcatctctctctctctccttcgtatcatactatattagtactacgagtacccacctctctctttcacctaaccctctctccctatactctccattcgctctctctctttcgctttctatctcctagaaaaaatgtcagtcaaccattactccacagaccaccaccacactctcttgtg

SEQ ID NO: 40849 - DNA, 623 bp, Arabidopsis thaliana columbia
tcaacaatgtaagttcatagattctcgaaatctttcaaatcttttagaaacaagagaagtaacatttgacattcgtctctacatttttgtgttatagggctcaagaaacagaggacctaaactctcatagctcgagtaattcatcaacggctaataagtgagttttaagcttcctagtcaatctccgtcgtccagatttgataaaagaaacgatgcttatacggtcgaaacgacgtcgttttaatatactagctatgttttctcaggttacctaacgacgacggtgcatggaatgaacacgcagttaaaaacccagaagaagtagctgcaatggtcgatatgtaagacctctctctatcctcatttgttattatacaagtatatggtttttatgcaaaaatgtaacatattttaattagcaattaatatacgttatgtacatctcactttcataataataacaacgtttcagatagtcaaacgttgtgtgattccttaaattttaatttacataggaaacacccaaaaatataattcacttgcacccataatgttccataaatgtttaattctcactcttttgatttacactctttttagacagaagtcttgtacacttgtgt

SEQ ID NO: 40850 - DNA, 483 bp, Arabidopsis thaliana
cagactacacttcttcctcttcctcctccgtcgcaacgtccgccgcacgtgactccactgaatctaactcctccactgattccacagcttctttccctctccttcaccctcctccgcttgattgttgtgactcttctcgtcctagctctgtaactgacgatgaagatttcttctttaaacctccaaagaacaaatcttcaagtggtggtttctcactttctagattctcctctgttttcaagaaagatcccaaaaccaatctccaccaccactcctcctcctcttccaccgcaacaaccgccgcagctccgtcgtcggtgaagagaatgagctcaacagctaaagaagtaatacggaaatacatgaaaaaagtcaaaccattatacgaaaaattatctccaaaacagagctccaatataaaaacagagtcatcatcatctctcaaagattccggtaacaacatccgtgggaccaccaccgtaa

SEQ ID NO: 40851 - DNA, 575 bp, Arabidopsis thaliana columbia
atgatgccaaatccatataatcggaatttcaaccaccgtatttgggctatagatcataactaaagttatggaaataaatgaataaattaaaaaatgttaagtagaaaaaataagtatcaacaagagagaaggaagaagaagacataagctaacagttgtccgaaattgattttggcaaaaggtgatctttgattttgcttaaaacatcgaatcagaacatttaatttagttgtttcctcatttctttcatctatggagtttagtatacccaataaatttgattagttacttattccagctcctattattatatttaacacacataatgtaaaacagacgcgtataatttatatagaaactgtatgtagttaaaaacgacatactaatactgatgacactttgtttacgtaaatttgtattctcaaagaaaaaaagtaactaccttttgttatggtctctaagaaaaaacaaaagtactttacagttttcttagtgccattctgtaagaatatcaaatagtgaaaaataggtaaacgagaatcttttgttctgtgtacaatattgtattagtgaag

SEQ ID NO: 40852 - DNA, 1365 bp, Arabidopsis thaliana columbia
tatcttgcgtactcagttgccctatcggttagtatgcgctaacatggtttcaaaatacaagatcaaagcattaagttcaaattcgattctagcccataagtccctatcactcggtgggtgtgcaacggttatagttctttattcagttgagttaggtcaagcattcaaccgagattttgctaaagatggaaatacctaaggtcaagtactaggtgatgttccagacatacaagcattaagattcaactcaactagaaagaatagtttaaacgatcaaacaaaaccatagaaaccgccaacctagactttcgatctactagtccccatgaattcccctttgaaaccccctcaaacccaactagagatctactcgatcatggcaaaggagctaatcaaaagtttggttgagtaaaccataactaaaatatgaataaaacttaaaaagggtttagagattacttctttaaacgtagaatacaagaggcaaagctccaccttaaagagtcttacacaaaaacgagaaaaagagagagagatggtgctcttcaagcttcaagaggtgcgacggctaggaggcagctcttggcgacggctagggttctctggtgatgaaggcacacctagggttagggctaaggacaagtatttatacttgaggcccaagaattaggtttaggggtaagaacgtcattctgctggataattaagagatcgggccgtgtagtaggcttcagggaaggagcctaatggtggtggcgcaaaaagggaaagacttgggcgtgacctagtagtcgttggtgagctactcggagctgcccggattcaagtctcatcgctcggatgtgttttggacttattatttccaaacagccggttcttgacatgtcttcactcttcgggccatatcttccagacggcttcatggattgctttgattcgacttcgacgtgaatcttgactcttatagctttccctctattccaaaaaatcttcacaccgagttcgagaataccttggccggatgctaaacttccgaagcactagaatgatcgtcttttgatacttttagcttcaaaacttttaaaaccttcttggcacctagaatacgtgtttctcctctcattggccctagaatggcaccaaatgctctctgaaacataagaaaacaatagctaaaacgggctaaaaagctgtgttatcaactccccagacttagactttgcttgtcccaagcaaacaaaagaacaactctggtggagaggtttgaaaatcgcgggaactctcctgttatcaatgaccgtatctcgaatatacctacagacacattaacaaaagttaagttagacgagcgccgatagcctatgc

SEQ ID NO: 40853 - DNA, 309 bp, Arabidopsis thaliana columbia
tgtgtacactgactaattatgcttgcatcgattatcaaataaatatgtcgaatctcaagatttatcaataatatatatactatatagtaatgttggagttttcaagatgattcttccatttggcattttgtttactcaaaaagtctatttaagccactacacatggaccaaaatcattccaagtactagtagtggtggtggtggtcttacatcattaaaaacacacattaattttgtttatagaaaaccattgtttacttaagactagttcctgaaacagtttcaaaatgttaagaagcaagttggtta

SEQ ID NO: 40854 - DNA, 346 bp, Arabidopsis thaliana columbia
aaagagtttggtcccaaccagacattcgttgttccataaagccccagaatcaaagtcatcgacactgatttaaaattcaacgacgacaagacatatatcaacaacaagaacaacaaaaataaagcatagattgaaaaatacgaacttaccaaagatacagaaggtagcaacgacgacaacgcaagaccaagggtcttcagaagtggaattgttcctgacgttctcagatgcaacaacgcttccatggcgataatcgtactcagaacgattccacggtggacgatcacgatgatcaaaaccggaatcgttgccgtgatgttcaaagcgatgaaagccggtttcttca

SEQ ID NO: 40855 - DNA, 519 bp, Arabidopsis thaliana columbia
tctagcgcgcgataactagccccaacgacaatgcggctccaagcaaggcgtggagtctcacacagtaatacttggccatgaatatcttcccattatcctgcattaaaagaatagattagcaaaactttgagtattacaaatttcaattctaaatatcttaccttgtggtgcttttcaacgtagcttgaaaccaaattcccaactggtaatgtcaggaagcacatcaactgaaacaccaacaacaaaaaggaggttttaatatatgttcttatatttcagtcatgttctcaaatctgttaacttacggtgcaaggtagtggcaaaatcctggttaaaccaagaacaagaagcattgaatatagtaaacgaatagtccatctcacaacaaaagctcctttttcagtccctaaccgaacctgtgtcaccaaaaaaaaactctaatcataaacacaatcaccatattcatattaaaccttgttgagttttttcacatttgtccagaggtgaatattccccaca

SEQ ID NO: 40856 - DNA, 489 bp, Arabidopsis thaliana columbia
cttcctaccaccttactgtgccttgaacctcactcctaataacaacattacacaagcaaaccgaaatatcggaaaacacaaataaacagaggatttgtgtacaaccatgaatcattaagagaggtagagaacgtaacacacatttgcgaactcacaaaatgaaattagatatcggtttcatcatctcacagaatccctaaaacaattttacatgacttgagccattcttttttttttactttcccccaactctctcggttccctctctctagttagcatcgttaggcatgtaaatgaaaaactacactcccttaaaagaacaaaaaaattcagaatacaaagaagaagaaaaagaaggaaagtgtcaaatccagaatgtacccatttacagaggaaaaaggctgatgaagactttgaggaaacatcattgcagcaatcaatctttcttagatcctcgtctcaaaagtgtgtgtttcccggtttgatgaa

SEQ ID NO: 40857 - DNA, 561 bp, Arabidopsis thaliana columbia
acaaacgacaactaagcgcataagatgatttcttctccagcttcgtatggtgggggcaatacattgtgcacatctgcgaacacatcttcgtctccgctctctggactcccagatatgggtgaatctaagacacagtccgggatcgccctcaagctttcttccagcaacgatccaacactctgcaatacataattcaaccactcaacaccagttacaaactttctaacgtgttaccaccaatatatcacacaccctgcactccttgaaagctgcgtctgctctccgcttccacaagctatttccattttctgaatggaaaaggtttagcagaggctgcaatcaattgaaaccatcttcagttcacacacaagacttgtattacttttctcaacacctacagctttcttgtttaaaccacacctaccttcaccaaatccctcacattaggcctcccgtttccatgtgttcctaacacagaatctccatatacttgatattgctcaagaacctgcccaacaacacgcagattttagttagcttattgataagtttgacagacaa

SEQ ID NO: 40858 - DNA, 570 bp, Arabidopsis thaliana columbia
gtctcagacactaaaactctgtggtggatagatttggcaaggataacacccagttctatcgaattagcttcattttagaccagctgaaagaaaagaaaaatctgcttatcttcttaagtttaggaattggacttcttctgttcgaccattttcacatgagctgaaaactactgaatattacaaactatacattctttcactaaatattatttatctcttgttaccgtaagttccctttaatgcactagtttatgtctatctttgaggtttgttattctatcaccaaattcttgtcaagaagtcaaattataatggtagataattttttgtagcagttagctgtgatggagatgacacagtagaggagcaagttgaggaagaagagattcctccagaatttagtgcatggagttcgatgagactccatccactactcatgaagtccatataccgcctcgatttcaaggagccaacaaaaatccagaaggcttgttttaacgttgcagcatatcagggaaaggtaggatgccagcttttgtttctatcaagaagtatattttattgatagat

SEQ ID NO: 40859 - DNA, 539 bp, Arabidopsis thaliana columbia
aacattgaaatgaaataaaataggtgattacataccatatgggagactagttcactccctttattcataaaattaaaaacaacaacgaaacttattcaagaaaccacgaaaaggtttcacttaaacttaagcattggcgtttcttggtctctgactaacaaacctcctgcagtacatgggacgtccgtagacagaaaagcaaaccttttcataaggccccagcacgaaatctggtatgaaaggagaattgaacatcaccttcccgaacaagccttgcccagcaaccttcgctgttggcgtaggcttgtgcacaaacacctccatcacactccccgggtacatcctaatcatcatcatcacacatatacacataattgaaccaattgaatcatataaaagatgtaattaaaaaaacaaattgttcgtataactaattaataactattgtatcaagaagcgtgactgtgagatgcaagtcgagatctattagtacaaactaaaccgaaattgttatcaatctatagacatcgtggatgtgt

SEQ ID NO: 40860 - DNA, 553 bp, Arabidopsis thaliana columbia
caaggcttcgttaaacaactcgcgcatgatgaagaacaaggattcactatgttatcgcgtcaaggttcttgctgctactgtatgatttatgtgtcacaaagcttaaacatgttttttttttttttgctaatatcatttttatttggaatgcatgttctcttttggtgtatgcaactatgtaaagaacacatcaaaatactcattggtccttgctaaaggtttagagacgttccaatggctctttgttttagggaatgcaaggtgatcacgtatacatatgtgaaataagagttaaaacgagtaatgtatcttgttcttgtttcacacaaatactaagtcattggaacagagcattctccgtacgtctttagtacatttaattaagggtttgtttgacaagtctttagtacattgatttttctagctagtaaagtctatacgattatggaaacgttttgaagtcactataatattcaaaacaaaacgttcccatagtcacaaagtttaggacgggtgatgattagtaggcatgtccattttaagacgggttgaa

SEQ ID NO: 40861 - DNA, 593 bp, Arabidopsis thaliana columbia
  unsure (1)..(593): unsure at all n locations
ttgagtttactgagagagattagcagttaattaattgtctaatcaaattgacaaacaaatctcgatgaaatgtttgctctctatgtaatctaaacattgacattgacgagagacaaagctagagagagtcaaaaaaccaaaaccaaaacaaagcaacgatacgtgaccttgagcttgtttttgattgctagctgaagcactcgaatcttccggtttcacagttcccacctgaagaaaatcatatcaaatcaacacacaaccaaacattccttattgttgaaatcatcaattcctttaatctgaatacacataagaaatggatctaagagacgtacacgacgagcaacagcagcgcaagagagctcgagcttgctcttaagaatcgcatgatactgattaggatcaacaacaacaggagctgaagaatcaaccggatcagacgacggagcacgattccgattcttcccttgatcatcaacagggagccgtcgatgattctgcggtttctgaatctcaacaacatcttcggtttcgtaacggtttcttctaatctcgaaagagactgaactggtggaggtgatnctcgattgtgt

SEQ ID NO: 40862 - DNA, 532 bp, Arabidopsis thaliana columbia
  unsure (1)..(532): unsure at all n locations
ctttaaatcatcatacaatgagaatacattttcaaagcgttaagcaaaaagaatttacgagcagaggaatagacaatgattcatatgtaacatcagtcgatggcatgctaagtcagtctctgtattcacaaaaacgaagaactaatttgatctaagagaatctctactctcgactgaacccaataccaatccaaaaatactcaacacccagttctcttttaaacacatcctatgcagaccagctgagctcgcacaccactcatatgcatttgtactagattcacggcaacaagctttaataaaagagccaagacactgcacaaactctactattcaagactctgattccaaattccctctttctatatatagtcaagctaaacggttaaagatgttcaaaacaagctacatctatgaaacttttctcattccaaagcacaaaaattgaaaatggaaaaaggttttacacatgccatttcagattatattgcaatctaagaaccatagtgattangaacggaccttgaatgag

SEQ ID NO: 40863 - DNA, 579 bp, Arabidopsis thaliana columbia
taaactagtgtggttgagtgatccaaattttaatgagaccccactagctcaaatctaggcgggtttttaaaactaaaattactgttaatgggttttgcgggtggatccaacatgaccatatttatagaactgacaaaagaaaagaaattaaatatgtgatttttatttttgatatagtttaatatgtgaatgaagcggttggtaagttctattaaactcgtgacgtgatatatacgaggttaaaaattttggagagtttgacatataagtttttttagttctttatttttagttcgagagatccaaaagggagtcacttcgaagtcaaagtcacaagagttttctctggaattttgaattatatctgaagttttttggcaaaaggttcggttactgtttgaagataatgtattatctcggctttcattgttcatacaacatgaaatatacgtagaaggtgttcatcaactagatacaagttttgagaacatattattcttgattgtttacataaaataacgaatgagcgagtgatgattcgcatatataattaaagaaatagatagattcatagatata

SEQ ID NO: 40864 - DNA, 498 bp, Arabidopsis thaliana columbia
tagatttgtattgtgcggtggtgagaaaagatgtagagaaccatgaaatcattgccagagaagatcgatgtcgcggtggcttaatagaatatttctgcgaacctaaaaggtggagaagaagaacgaagacaaggagaagaaggaggaataaggaagaattagaaggttaaaagataaaaatgggttagagatgaggagaaataaaggtgttcgtgaagaggagagtttagaaaacaaagaagatgaagtgatagatctaggatttttctgttttaaaaggtatctccccaatccgaacaaaaccgatcggttttgatgaaccgaaccgaaaaacccgaaaaccgaaatcaatttaaaattctaccgaacgatttacaacagaaaatcggtttgaaaccgaaaaccgaaatcgtcggtttgttcggttcggtttaaacgggttatgccgaacttccaggcctaatttttacagtgtaatactgaagttggtaaaatatg

SEQ ID NO: 40865 - DNA, 333 bp, Arabidopsis thaliana columbia
  unsure (1)..(333): unsure at all n locations
tcgagtcttttcgggtacttaaaagaaagagacaagaatggagattataaggcattttgagcaaaagctgaagaaactaagctgaaggacgaatttagttccagatcgagtcgagagtgttgatcgacacactcatggtgtcgattgacaccacttgcagcccagcaaaactccaagacggtttagagtttgaagaattggaagtttgcccataagattattttttatttaaattattaattcctacacgtttttggagacttaaactttattctaagcttttaatcgttggagactaagctattaatacacttgaagaccctgtntttagag

SEQ ID NO: 40866 - DNA, 560 bp, Arabidopsis thaliana columbia
tatatataaaatataatcacacaaggaaaatttcatcaatatgtgcccgccaatctctcatgtatctcattataatccgaagtgatccctattatataatttttagatttcatttattttccaaaacaaatattatattgtgttccttttattcacataacccattgattttcgaaatttgtttcctttctcgtgctactttttagatttattaattattagataagattttttatatctggttctgccatttttaattatatgtttccattttcatttttccttaataaattagaaacaaatctagttaattattgtgaaatttcatatttaagaaaattcaaactgtactttgcattgtttaagaagaaaaaaaaaaacatgaacactcgaaaaacaatcattcttcttctgtttatgcttatcgccatctccttaacgatcatcttcacgttgatgcttcagccacaaactatgtttctaggagaagaattcgacgtgcgtgtgatcaacagcttcagagacaactcttctctccctctagttatctggtgcacttc

SEQ ID NO: 40867 - DNA, 492 bp, Arabidopsis thaliana columbia
ctgagatcttggatatctcttactactttgtagagtataattaaagaattgattggtagcaaatccatagcacagactaaatactttgattatgcttttcttatctttgatatacacctgcaactgatagtgcaattttgtctgttagaatatatctgacgaggggattggtcatatagctaaatgcaacaagttagagtctctcaacttgacatggtaagataagtcctccactaattataaagaaaatgagcaagaagctgtgtcttcatatctaaatgctttaacgcaattgcttcttaaacatggcaggtgtgtgcgtatcacagatgcaggtgtgaataccattgctaatagttgtacctccctcgaatttctcaggtacttgatccatttctagaactatttgcttggttttgtcaatgaatctttttgctgacaccgttcaatgaaaacataaaactccagcttgtttgggatagttggggtgac

SEQ ID NO: 40868 - DNA, 575 bp, Arabidopsis thaliana columbia
tattcatatccaatgccattaatgtttttatataatacattttaaagatttttctaacttacttaaaaggataaaaaataaaaaagattacacatatagacacaatctagctactgcaaaaaagatttttttaaaaagcataaatctactttatttactaattataaatttaatttgtttcacttttattagtgataacaagattaattgttttgtttacacaaacaatattgttttatgatttcacttatatgaacattattatcaagagttataaagtttgcaaaagaaataggtttttattgactgaagaattgagaaattttctcatcacctttaaaattaatattgggcctagcgatgaaccgggccaacgcccattaaacatatccgataatagtttaaacccggagagactcaaagtagagaaaaccctaattgtatataaactaaaaatacttccttaattcttcacttcttcatcgccgtctgcacaaaaccctaatctcacaatctcctacgagatctatcagtctccacggtaaacgacactaatccatttcaatttctccatc

SEQ ID NO: 40869 - DNA, 605 bp, Arabidopsis thaliana columbia
  unsure (1)..(605): unsure at all n locations
gttttccgtcgtgtcctctgtcttttttggcccgcgagtgtagcgacgtgatttatggtcccctcatctctctcttaatttttttccttcattaccggctatttccggttgattggtttatgctaaccggttttatcctctgtcgccgttaaatagagggaagctagttcggtaataattgtgattagcttctcactaatttatactatggttaagcagaatttttaatgcggttgatacataacaaacgaaattaatattgttgatgcatctaggttattaggttcgattcttataacataatttagtttttcatgtaaaattatttttagtggttaactaaaaccttgagttgtctaccaaaaaagacagaaaaagttaagcataagtgtatcaccttaagtcatggacttattatgggtatgtggaggggaacgtagtttctaacattgttcatcagatattgcatatattgatttgttagttataaacggatagtatttcagtgatgatataggagagaaaaacaagtacagatttttgggaaatgcataagaccacaaatgggtattagtgtatgcaancataaaaaggttagagaggga

SEQ ID NO: 40870 - DNA, 563 bp, Arabidopsis thaliana columbia
gtattcaatcaatatatcaatttaaacacacatttttgcttactacaaataataatatcttttcttaaaaatacattttgaatgcgatttcgctactaaacaaccccttttgaaaccataagaaaatgtgcttcttaaccattgactatcaaaatgtaaaatccggaactccttaaaactaagagaatctgaatctcttggatttgttacgttatttgatagtgatacttgtctaataaattttaacaaaaaaaaagatacttgtctactaaatagatactagatatatatcatatacactaattttttttaaaaaatgttttttaaacttttatactcgcatctaaaatatggtaatggcctttaaaagtcaacccgacctatttggaccgacagaagattgccaaaatagcctctgttctcagacacgtgtacatattattcctctgccatttacgtgtgtatgacatggcgatctttggttggatattgtacgtgatttggagtggtgtaggttggccacaacgtttcttcataacgaaaagcgtcagtggttagttttt

SEQ ID NO: 40871 - DNA, 546 bp, Arabidopsis thaliana columbia
ctaaattgcccaccagataatctctctctaagctgcgatttttcgtatgaattgatcaaaatctccataaacttcaatcaaatgtactcgatagaaagagagagataacgaacgaaccgcatcgaggaaattggaaggtttaggtcgtttcgatggagctgaagaacctccatgttgttggtttttggtatctctttgattctttttctcgttttgattcttcggtgtcgtctcgataggttcttctttagaaggtttagggtttctctgtctcttcctcttcctatttctgcttgttttattttcctcagtcgtcattgcttctcgccgtcgccgtctccgtcgtcttcaacacactctgcgttttaggttagtttcagaagtagaacggatacgtttgttatattttgggccataaacttaaaagtccattgggcttttatgtattgacctaataagccggtttactcaaaaatttaataaaaattcttcgaacccaggtttaagttacgagaacaagtgaacaagacacactaaacagaccaa

SEQ ID NO: 40872 - DNA, 394 bp, Arabidopsis thaliana columbia
tagaggatagaggatccctttttctagagaattaaaccacaatttgtgcagaatttttcatgattcaaattgagtaatataatagggtgtaaaattaattcaaatttacatgtaaaaaaatttatatgaactattattttcagcaaacatttataaatgtattaaaaataatatatatatatctacacatgttgtagatgatatatagtttgaataagctaaaataataactcatagttcactaatgtggtaagtgtatcccgtgtattacatggttgggaagagaactatgagcggttgtgtagagcatatgttttgcagaaggttgatctacggaagtatgtagatgctaaagtactacgtggtggtcaggttgataaaaaagtttggtata

SEQ ID NO: 40873 - DNA, 845 bp, Arabidopsis thaliana columbia
tgaaaagtttttggaagtgttttgatctttgttgtattacttttaaaaataattgttttaattggtaattcataagaatgtaattaaaagtagaaattctttctaattaatatcataactaaaagttaataattaatgagaagtaaacataaaacatctaatgattttgaaaaattaaaaaattctattaaaaagttgtgatgaaagatattatgttaatacgtgccgtgccaagattttaattaactttatagatgttgtaattcagtaattaactttgaagatatataaacgcatatgtgataagtgcttgtcgatagtggctcgtgggtagcctttaagcatgggccagtgtgcttgtgcctacgagctcgagtgatcgagcacacacattccaaactaaacacaaaacacaaaggaaaaaaagtaaataataaaggcatatatatatgctccattagaaagcaatatatatagaaggcagatagagtttgaaccaaagaaaaaaagagagagagagagagagagagacaacgaggaagatggggtggtttattaaggaaagaagaggaggttcatggaagcgaggatggttagaggaaacactcctaacatcatcagctcctcctcttacactactagctctccttgccatcatatctttactactcttcctctcttcatatccgcgttacaagtacgaggttgagaaaaccgctgctaatctcaagctcttcatgctattcctcccaattctctttgtattcgtcctcgtctctctaagcttcgtccatcgacttctcttcaaatcctcttactccgttagagcaaaccaggctaagtcc

SEQ ID NO: 40874 - DNA, 868 bp, Arabidopsis thaliana columbia
tgcgtgtcccctttgttcgttcctcgaggcgctttatataggaccttggtaacccgcctctcgcgatattcctcggaagatttccagttatctccgggtcggcgataggggatattttctatatggaaatcttccttattctttgggagtttcggaaaacttccatattcgataatatcccaaagattttttgatatgcttcaccggatttttcggaaatgatatcttgacccttcactgaatttgtataagtatcctcctcgggtggatattctaccttgggctcgaaccgaagcgatccccgagatatagttgagctcggctcaggtgtgttttctggaataacacccgagccaagtatcgtttatctaaggtgttcccctgggtcacaatgtttcatcgcacccggcttagggtgtgtttccttgagtaacacccgaaccggaacaacaccaagcctagctcccgaagtgctgatggtatccatttgaccggctcaggtacttgggtgaaatccgaccccaacaaaacataaaaacatttagcgcttacaaacattttacgactgttagagtttagagcaatctctagttactttagttcttgtgatttgtcatgtgttctagagtttaaaaagttagcattaaaggtaaactagttactgctagagatggatgaattcttgtctttatagagactagttatcttctatgtttctgctagagatgcatctttttcttgtctttatagagactagttctcttctctgtttttgctagagatgcatctttttcttgtctttacagagattagttctcttctctgtttttttacaggtttaacaggcataaaggtaaactatctaggg

SEQ ID NO: 40875 - DNA, 589 bp, Arabidopsis thaliana columbia
  unsure (1)..(589): unsure at all n locations
cccccagtttggccaagacttcaaatatgcaacactaacctgacatcatatgttactattgaaatatgcaacaactcatgatggtgacagaaacataatgccaatttgctttagacttaccagttgaggtgcatctcacaccaaagctaaccgatatagaggctaatctcactcaatcaagtttactaagaaatgaaatgaaaaaaagtatcccaaaatggcaactttggagactcttgaggcaaaatacaagtttagaaaacccagcatcgtgactgagcaaaagagagactacttcttccctaactatttatgctgtgaagccttgtagcatgataggcaatatctaactaatcaactaacataacgcaagaaatgcatcaaatgaaagctttataactagtctcgaaagatcattgttttatatacaggctacagaaagtgacattgcgtttttcctgacctcaacgttttactcgcgaacaggacaggcgcagtctatgttactggggaggactaaacgctgcaaatttagcctgtcaaccaaaacgtggagagataaggtttntcagacaagtattagtgagag

SEQ ID NO: 40876 - DNA, 554 bp, Arabidopsis thaliana columbia
tcaaattggaattttgaataagatttcttcttagcccagtggtatcatcactaaataattcagatctgaacatattgtaatgcgattttataataagatatgtggattgaatattgtcacaaaattatagtttattcatcagtatttcagtctgaacggctgtttagtttatttactagaacagaaaaatgacgatttatgtttttgtaatgatcgcaacctttgaataatgttcactgccatgtttcgtaaatctcctcgctataccatatataatatctatacttgattaattatgactgatctctaacttcttctttttgtatataatgataggattttttttccaatggataagtctattccaatcaaggcaataccggttgcatgtgtcagaccagatttggtagatgacgtgaccaaaaacacatcaacgattcctacaatggtttcacagttctaaccaatatgccatctgcaacatctcctcttctaatggtcccactcttcgaacaatctggccatccaacaaggaatggtacgatggagatgct

SEQ ID NO: 40877 - DNA, 268 bp, Arabidopsis thaliana columbia
gttaattaacactttattatagacagggttagttattaatttaaatctaaatggtcttgtaaaggcttccacttaattttctaatcaccatctgccgaccaaactactttatcaagtcacagcttttgtgcgaaaatttccgttaattcatgagcttttctatttgttcaccatcaagtaatcattcccttaaattttgcggctaatgttagaattatcgtacgacaactgatcacacgctacatgttctctagcttaactttgcaac

SEQ ID NO: 40878 - DNA, 573 bp, Arabidopsis thaliana columbia
tgattaaattctttttatgatataatatatgtggctttttgttcagttaaaaatgtttttttgttttgtttaatttagaaacatagaagaatgtggcttttgttcagtgttttttttttgtcaacatggctttggttcagtttagtatggattataaataatgctacaatgttttaatatggattataaataatgttggtctagttttataagcccaatttggtttgataggttcacatgccaagtaacctttgattgaatgctctcctcatgtgaatataacagggtttggaggaggagttgggggattgatagcaggagcggcaacagcggcacgtcctgcaatgggaggtcaccatgcgggtcatcacggaggctacgggcaccacggccacggaaaatacaaaagagggtttttcggaggaggaaagtacaagcgaggaaagcatagtatgtttggtggagggaagtcaagcgtggcaagcacggtatgttcggaggcaaaagaagcaagcatggcatgttcggagggaaacgaggcaaaggcatgttcggacgaaagaagtggaaatg

SEQ ID NO: 40879 - DNA, 523 bp, Arabidopsis thaliana columbia
tttgccagtcctgttgcttctttgtccgagtctgagaactcatattgttggtaatcaattcgcgtggctcttttacttcgtctcaggcctggccgaaaatcatttgatcttgatcttaacttagtttctctccgtggcattttcttagccctccggggttcatcactatcctcttcgcttgcacttagggaatccttctcttcttcctcttcttcttcttcctcatactcagcattgtcttcatcccatttgtattcttcatctcccttttcttcatcatcctcagaaccgctagagagctttttctgtttacgcttcttcagatattcttcatcataaactgcttccccataaatgtcatcgtcactttgaaattctacctcattgtctgaaacagtttcaacaaagtccgtagctgaatatcgttgaggtcgttgtctgcgcctgttacctgcacaacattatacttgttaattaagctaaaggtttgcatagttccagaggggagatttaaggagagaag

SEQ ID NO: 40880 - DNA, 592 bp, Arabidopsis thaliana columbia
gctatataagtatataggtgtatgtaaaggaagaaaacattatttgtgactgtaaatatgttaatattgtctacgtataaagatggtgcagtgcacacttcacacatataaaaaaaaaacgttacctcaacaatagaaacaagacacataacaaattctatccgatttgttccgatcaattgcacagttatatatgttcttctgtcttttctgccacttcatgtctctctctcatcttctccttttgtctccattatctctcactcatgcctctctctctctctattgacattcataagtacaatgtacatatacagacattaactacaacgagattttatgaagaatttaatccaatgtaataaaagaacaccacagttttgataaacatggcggtttatgattattcaagtctatgactctgtaaaggaacaagaacacgaagaccacagtgtacaacacaaataatattgtgattctccttgtgaacacttattatatacgtatttttactatattgaatattatgtatacaactgttatgtaactattctgcaattaaatttactaatcacaaaaaagaaaaaaaaaa

SEQ ID NO: 40881 - DNA, 657 bp, Arabidopsis thaliana columbia
  unsure (1)..(657): unsure at all n locations
cattttctcaaaagtagttttgttaccatttgtattttgtagcaatggtaattgatggttgcctgcttaaagatactttaattattacatctacacatacataatccaactatacacccttaaatataaccatcccttggctttagtcattaaaaagaaaaaaaagaaaaaaaagcctaaagccttttcagcatctatttaacataaagcaagagcttccggagacaaatcaccaaactcaaagaagacaaaagtaatacaaaaaaacagatctgttcacgacgaaaataagagaagatatggttcttagaagctcaatctccaacacaagaaaactcttccaaaaaactatcgacaacttcaagtcattcttcttcaacaacggtacttatcacaaactaccaaaaacacctaacaacacctctaccaatattaataatgatcatccaaactccaacatcatcacatcatcatcatcatccatacacaagcaatttcaacctaaacccaaagactatgtgactacaaacaaagcttcgagtctacaaccgagaataggagacagagacgagacactcttttcccaccaaaggttaatctagttcggtacaaactanaggagatggagaaatgatgaatgatgatataataagtgat

SEQ ID NO: 40882 - DNA, 328 bp, Arabidopsis thaliana columbia
attaaccaaaggccattgttatagacttatagttttgaattaaactcacggtatattgttttagggtcatacactttaaaagcttacgaagcttttgactctacacgtgttaaacattaataattacagtatatcaaaaccaacaaacatttgaaattttgaaacagaacagaacagaaccatataacatttgtctaacctaataatttgtagctggcatgacggctaatctgttcgttttattgttgttacttgtcgtcgttgtcgatgccaaaatcatgttttttttgtgcgtagtcaatggttcaacgatatattttagtaatga

SEQ ID NO: 40883 - DNA, 489 bp, Arabidopsis thaliana columbia
tgagaaaaaagcggggttcttcttatcaataaacaaactttgtgagagaatttagcgaagaacgaggaaatcgggagaaagtgatactatcactgtgatagtgaaaggagctttgcttgtgaagagagaagaaatggcagaaacagagattcttgagccctatcaactgtcgttctcggatcttcttttgtcctctcgtaatcgctctcaatggatctcgaaaaatgtgatggacgctcttggccccaccggtcctggtctcctttgtatcaccggcgttcttggctccgcctttctccgccgtaaactccttcctatggctcggaagctggctctgctcgatccggacaagcggaaactcattctcatggtaacccccggcaatttttcaagatttccattaatccaagttgtatatctggtgctttgtctcaagattgaaactttgagtagtgttagttggttcatgagtgttactgattcggtgtg

SEQ ID NO: 40884 - DNA, 523 bp, Arabidopsis thaliana columbia
caaaaataatattgttaatttttaaattcagtcaaatttaattgaatcccttccttccataatcccctaaacccctgaattctgttcactaataggcctaattaaaaagcccatttatatgagtttgacgatttgttaggaagtttggaactaaaaggagaaactggattgggcttatttcgatgagtaaacccggagcttttgaggccatatataataaacccacactagttgcaaactggtgctgactattattaatctatgtaaaagtttcaatttaaataattttttatattggaaaaaaaaagcaattagtaaagaaatagatttactgcagaaatcttaaatctttttaaaaaaatatgaaattatgaatcaactttttaatttagagcaagagaaaggaaaacaaaagtttagtggaaaaagaaaaagtagaggaattgcatggggggagagtaaatcataaaacttaaacaatagcagacagctattgtaattggtaacatgtgtagtagtaaag

SEQ ID NO: 40885 - DNA, 524 bp, Arabidopsis thaliana columbia
ttttaaatgttaattaattcaatggttactttcaagtttagaccaatattaaatatttactttaaccttcatccaaacgtcacaaacaacgtgttggaatgttacttcactaagtcggcgttcaagtagtggagaagctcgtaacgagaatttagctttttacatatctcataaattagtttgagattcgtctccgtgcaatgatctatcttggtaccaaaagaaattcttacaataattaatgaagattaagcttactatacataagaaacaaaatctgacatatccatttgtgagtattcgggtgaaaaatacttaataaagaaaacacctgtcatgcaccaaaaacgtcatattgatacacaaaaacgatactatttcatttgaccaaaatttaaatttattaaataaaccattattgtccccctctatcacaatccccccaaatcaaatcatgctatatataatctcatttccttgacattatttgtcattcagaatacttttatctcatattcccaaca

SEQ ID NO: 40886 - DNA, 545 bp, Arabidopsis thaliana columbia
ttttgataccgtatcaaactaagcgacaagagtatcatcaattcgtcaaatgcacactaacctatacatataatatccaaacctactcccacaacataattggtttttaaacaatccccattaactacttcaagacgtcttaactaacccgaaagctttgtaaccaatgatcaatccccattggttataaatttgtaaccaatgatctattttggcattacaaagcttttcagtattcttgtgatcttgtcttgacgaaaaaatggacgatgtgaccgtgatttcttcgagcattgttcaacccggaaacgccaggcattcgggtcgggaaaagatccatctcactccatccgatcttagccttctctatcttaattaccctcaaagaagtctcctcttccccaaaccctacccggaaacccggttcatctctcggttaaagtcctctctctctacgtctctagagatctacttccccttagctggtcgtcttgtcaaagtcaacaaccatgaagacaatacggtgtcgttttacatcgctgtga

SEQ ID NO: 40887 - DNA, 117 bp, Arabidopsis thaliana columbia
ccggccgcgacgtgacgccggaccgctcgcccccctgttcgtcaagaccatcgacggcttttcggtgatcttccacctcgtcagctatcagagcgtcggcctctccactctgcagtc

SEQ ID NO: 40888 - DNA, 319 bp, Arabidopsis thaliana columbia
  unsure (1)..(319): unsure at all n locations
aattcaacaaaacgaaacaaagagttatttaaaacgtaatagtggtgaagaaaagtaacaaaacttgagaagtcaagcgatcatccgtgtgacgtggtcggagggagacattactggctgctggtgcgtggagattccgatcccaccctattgcatgaagatagttcatagttggtggtattcgatgcaagcatgggtggtatagggattatcaaacgggtaagcaaaggaatttgatgaatgannanaagtgagtgtcataatgatgaaattaccaatgattgggggtcaaaaccagggtggttgagcgcacgatact

SEQ ID NO: 40889 - DNA, 262 bp, Arabidopsis thaliana columbia
acatacgaatatggtttggaataataacatgctgacgtggaatcgtgatacttcaagctgtctctgcaatctggatgtggctactgccgcagcagtagcatcttcaactgatttgtcactggcttcagtaggaactgcatagagtctcacctgttagatgatgcaccagagccctcggtagcgttatggttcagtactggcttcggattccattcctgactggaaccagcacctcgaaactcgtatcattgacattcagatg

SEQ ID NO: 40890 - DNA, 553 bp, Arabidopsis thaliana columbia
tgaatacaaacaaaaaaatagacaaaccaacctttctttttctggtgaataatcaatctcttcttgtgctttttttatatatgattaattaatattaaggtcacctgtggggagtggtccattgcataacattcacgggactcatttactaacactcttgtttaatgaatggtacaacaaccaaccttccccccatcttcttctctatctatcttacatccacgtctccctaattgctcttcaccttttttccttttttttggttaatcttctcttcctgcaatgacatgccaaatgacttttttacattgcgatacaaatctcttccatatccatatcacactataaccaaatttactcctctcatcagactacctacctaccactggttagctgttttgaatgggtttagatcccaacgcgacacgttgttggtccgctgctgccctgtgttatcccatcattgataacctcggcatttggcacttcaaggacttgagaggctctttcaatgtacctgtactagactcatcctgatcaaaagatggcgacg

SEQ ID NO: 40891 - DNA, 621 bp, Arabidopsis thaliana columbia
ttttctatttgaattattgtgtagtgaaataactatggttttgctaattgtggtcgacgttgtatttgtgcatgctaagacgaaaacataattattcgctcttttgaaacagcattactgtgtttcgggttacgcacatgcatgtgttgttgccctttgatttgtactatcatcgcttagccgcttacgatgatagcttatgctttatattttagtaaatatttcataaaaaataggttttcttttcctatgaattgtaatgttatcctgttaacgtttgtgaatatttctcaaattaaaattgtcacgtcttcgtatcggctttttactttatgttcatgttggtgtagacgttggccttctgacggttcatgaaattgttaagcatgtaatgtgactttttaaattgctttcagaaagaaaaataaaaattaaagacttgaagcatgctatatttcacgctataataattgaggtccgatagtcatgtgaggtctacctaataccttatagtagaaagagccttttttaaaaagtttcaaaaaatattataatctgatttgggcaatactttgcattacatatggatgacctaataagagagaaggtttttaattagta

SEQ ID NO: 40892 - DNA, 463 bp, Arabidopsis thaliana columbia
caacaggcgacaagctggaaacttgaggaagctattcagctcttttacattggaaatgaaggtggtatgcttcagtctggtacacacactcagccagcgtccaacgatgatgcggctgcacagtcttgggggtaggataatgttataatttggtcactgtaaagtattattcattttggtttgttcaacctgatggttttctgttatatttcatagggcggctacaggcacaggtaatgaaatgatactgcccaacgatgtcgatgaagtccgtgctcctttacctgttgtgagggagactctttatggtgaatcaatgtattatgggttagtgtctttttcggtcactttatttattttttcttaaatccggaatgtgtctctaggttgaagatttatcctcagaggccagaagctgcctctttagtttcttgactctcatgggttggttgatgtctctgct

SEQ ID NO: 40893 - DNA, 585 bp, Arabidopsis thaliana columbia
tgaaaggatctatctccagcaataaagattgaactaacaaaatgagacagcaagttaggtttcgatcccaatcacggtcccctcagccagggtttcccatgaaaaagcaaaatggtccctcgaccattcaattcatctaactaaccccaagggattaagatacaagttatccatgcttcaacaaatccaattcgcctaataaactaaataccacaaacgtcttattttcttagagacaataccaaaaaatggagacagaccaaaaaaaaaacacgattcgccattgtaacaaatttcaatgtctacttaacagaagaaataatttcatagattcgccatgatatatttctacttaacagaagaattaagctaaattaaaagcccaaatctcaggagaaaaagtattcctagaaatttggtgagtaaagtaagagaagagagatatgcacaaagaataaaaaaagtaagagaagagagaaacctcaagtagaaaccagagaggagagccgtcgaagaaagctcctggagttagtcggcgatcggagaagaaagactactactaagagcgagagtgagaaggaggag

SEQ ID NO: 40894 - DNA, 630 bp, Arabidopsis thaliana columbia
tcaaaagtgttcaacttcgaatcaattgaagaattgcaggaatgtataagttcctgcactgctgaaaacaattttatcactaatccataaacccttaaaaaacgatttttttgcctaacgatagatatgcgtaaactaagtaaaaccctaatgtgaaatcagtatagagcattgtacgcattcgcgagaattttaaaacccgaccttagtgccagttttactggatgtagaatgcagacgcatgcggaaatctccggaattggttcgattaaagggtaatttgggttttacgaagaggaatttgcgattgagaggtgaaggatggagaaaaaaaaggcggtgagagacgacggtggaagaagacaaaggagaagccattgatgggaagcttgcaagttacagagacaaggatagggagaataaacgatgagctttcttctttggcgcgcctcatctccgaaacgcttacgtggaggtatttgaatggatacacgtgccctactctgaagttaagagaaacggcgtggtgttctactttgtacagtcgacacgcattgcatcttgcaaaacaactcaacgttttgagaattcgcttgtgcatgctttgccgggtgtttacagacaaaaatg

SEQ ID NO: 40895 - DNA, 1442 bp, Arabidopsis thaliana columbia
ataataatgcatgcatattttcaaatcaacgtaagaataaacaatctagttaagagttgtaacatgaggttttaatgtatgagcccataagtttgaatgtattgagattattataaattataaataatgtgtttcttgtttcgatggctatatataaagttgtagttatgtatgtgatcgtcgctatgttatgtatacttctttttttttggatcttgtgaaaaattatttattattagttatgtatatagctctgttaataatttcgcaatttaaagtgaatgtaattcaaaacaacataagatttcttctctcttctctctctttcatctttcaaagagaaagaagctttttcgttcacgatttgccggcgattattctccactgttgttggttccgcttgaggcaaaattctcgtcttcctgcatcagctttctcagtggtgtaggttagctttgcttccaacgtaaatggcttttttagcatcttcgtccggctttgtttctggtattggtggttttgtcaacaccggtggtcgactctgtttctagcgatctcaccgcttatctcgctagcgggtattggctagcttttgctcaggagcgtttgctctaactttttttttttattttctttaggctcttttgatttccaattagttttggtttcctttcgctctcgctagctttatctctttctattgatctaagtttgtaattcttcaatccttctttgtttaaagggcttgattcgttcttcatgctttctagattttaaaattttaagaacgaagttatattgttggattgatgtttctcttcgttaatagttcatgttgaagtaattgggggctgaaattatataccgatactttggattcgattgaattttcgtttttaggtttgatgacctgcaattgaagattgaaagcttgtctattgaagaagaagaagaagaagaaaattcaaagattctcatcaaagctaaaattggaatctcgccatgatttctttgggcgaagtttgagacttgtcgatagatcaagttctctggtgattttggtcggattgaagattcccgacgacacacaattctgccagtgaacggaaactcctatctcttccacttcccacgtgtctagaagtctggttaccattggatacgtgtttcatgtgctgtctacaacaagctttccttcaatttagggtttttagttgggcttttcttttaatttagtgttatgacctgttaattttggctctgtattatttggccttatataaataaataaaacacagttgttacacaaaaaaaaaaaaaatttaaaaagttcaaaaaaaataaggtcaaaactatatttataaaatagtccagattttaactttaaaaaaaaaattataaaacaaaattgatgtacaaaaaggtccaaaaaatgatgaagc

SEQ ID NO: 40896 - DNA, 937 bp, Arabidopsis thaliana columbia
atctaaatatgagcatattcgatccctaaaactgcacattcgatcatatactgcctaatcgctcgaagattgaataatttattctcttaaatctaatactaaccataaccaactcttcaatattcaccatttatctaaatatagtcaatcattcaattatattccaaattcgaatatatattgttcatggtatctttggatttactaatctacatatacatttttgcagccactttgtgaaataaatcctcaagttgagacttatttacagtggctgccactgacatttaataattatttttgataattagaaagtaaatctttaaattaaatatttgacatttaactatcttcccaaagactctctacattaactacacgattagttactaaaataaaacttccaaaatatttaacattatttaaaaattacaaaattatcatttttgatattgcttttttgcatgactataacaattccattatacgcatcaacccacagagatatttgatagcagttaattattacaaaattacaaaatatttagacaatgatttataaacatatcataaataagatcaacattaataaaataaatagttttttttacttaataacaattgtaaactataaaataaaaatattttatagatagatataatttgtaaacttttatatatactaacttaaaacacaaaaaattgtccttgcggtatacccgggttaaaaatctagtaatgtcacataattgcaacacattccctcatttctttcataaatcttctatataacgcctaccagtaaaaatgtaaaagcaaactgatatagaatttagaatacaattggattaattgactttgttattcggttttaggaggttctcatttatctttcttctcacatttggtcgacagactcaactcaaatcacctctct

SEQ ID NO: 40897 - DNA, 595 bp, Arabidopsis thaliana columbia
tatgctaactaaaaacttacttttttactcgttaagagcattccaagattattcccggatttgacaacatataatctttatgaatataggttttcaaaaagaaaaaaaaaatcttatgtatatattatcttaacttggatgcactaaacacttttgtaaggtatgatatccagattaactatattttttctgaactttctggatataccttatatttagagtgattgataattgaaacaacccgactcattttttaaaaatataattaaatattcccataaatatctaattaaaccaaccaataaaataacaattaaaccgcaagtcaaaaatactattttatgaataaataaataattcgaccagcaaaaccaagaataactaacaatcctaaccgggttccaataaccaaaaacacaaaaataaaacgaccgagttcctaaatcatcctttcttccttgccatgattccacgatcacactttatctttacctgcatcaacaacacaaagagatgcgtaagtattatcacaaatacttagtgagacgatcccccatctacgagctatacacacaagcatataaaagggtataat

SEQ ID NO: 40898 - DNA, 177 bp, Arabidopsis thaliana columbia
  unsure (1)..(177): unsure at all n locations
tgcgtgtgggagagtgagagagtgcgagagtgagcgggtgagtgtgtgtgagcgcgagagtgcgagtgtgagggggaggcgtgcgtgcggtgcgtgctgagcgtgtgagtggtgtgtgtgtgagagtgtgagagagagtgtgtgtgcnggagtgagagagtgtgagagcgagagtga

SEQ ID NO: 40899 - DNA, 655 bp, Arabidopsis thaliana columbia
agttcttaaactcatttgatgttttagattttgataaagacttcacaatgccgctttaaaaaataaatcgaatactgagtgagacacccaatattagttctgtgaattcacgatgttttattagtttatttctgtcattggtgatctcctactatatttgttacggtattagatatttagttgaattttaaaaatttagtcacttcattattattgtttgcttatatatatatatatttggtgcaaatgatttaatattttattaaatataatctgattttatattttataaacatgatatgattattttgtttttaaatgtataagaactctaaaaactctaaaatctctattaatattaaatttattaaataaatttcaattaattgatccatggtccaacctggttgacccgatgacccagtgacccagaaggtagtccggttcactgtctgggtcgggtttaaaaacattggtgaaatgatagaactaggtacaatacgtttgaacgagtagacaatccttactcaagctcagctctgttaagttaagaaaaaagataacaagcgattctgtgtggacgcaaagcattgaatagagtacagtactgacaagcttcctgttttaatgatagatctgtgctagatgagtttat

SEQ ID NO: 40900 - DNA, 492 bp, Arabidopsis thaliana columbia
tgaagaatctgatcttctctatctaacccaaaaaaaaaaatgaaacgtgaaatttaatctagggtttatatgaaaaaactcggaaaataaaaattaaaaaatctctgtttccagactcatatgtgtattttggaataatataatatatgcccctctactctatagacgaaactactatgaccactgtatatttatactccaaaagtcaaaagtttcttaccataaagagataatacccttttccttgtgattttaaaacaattataggttggactttacatactttttcacaaatgatagtagtacgagcacatttgaaattttcacatattttttatgaataatatttgtcgtctaatacatcattattatagaatatttaaaaatttaaacccccacgcataatttggtatattagtagggcagacaaccatgaagaatttgccattgttagttcaaaagtatatatattgggtgttcatgtgacattat

SEQ ID NO: 40901 - DNA, 511 bp, Arabidopsis thaliana columbia
tgaatataaacccagtaaacatatttgggctttctctcgggtataaacttgctcaccaaatatgctgaagtgattgattgtttcgaagaatgctaaggcatcacctcaaactcttggtttgtttcatggagaaaagttgcttctccttgttctacttgtcagttgttaggaagaattagtcaatttctcttcaatgaatccctacaagttagactattgtgttgaataagtaaaggagttctgcatgagtttatctcttttgttcctccgatactttttacttcctctgagtaaaaaaagagaagtaaatttttactgtctctaagtgggttggtctagtaaatttttgttgggcccaaaatttaaaaaatcaacaagaagacaaaaaaagcccaaagatccgagttggagttaaactgacaaaatccgaagcaccaattaacattgttacactaaaccatggcgacgcttcgccgacctcctctcctccctctgattcaaacctaattct

SEQ ID NO: 40902 - DNA, 616 bp, Arabidopsis thaliana columbia
ggctggatcttgccgccatagctgcacatgagcttcaccttgtagttctgctgctgctggtcctcccatggcgacggattttcaaattcgacatcgcgagatcttggcgacgattcagctgaatctggatacgaattgtacgagaacttgtccattgtatcgcgatattttcgaaattatcgtcctcttctttgctcaatccatgaaaaataatatcttcgagttggttcggatggatgttgagtagagaaatggagaggactgttttatcacggtggtggttttgggaagtgctaacgtgacacgatagtgtttgtggtttttggcgtgaactcattggttatattacacgtggaagtaaagtattggttggatgtgacagcattagggtgacgggggtgtgaggttagctgaaagtcatgaactagatggacttttgcggcagtttggtggggaccagttagtgtttaaaagcgtgtttaattaacattattgatactatgtgagacaaggccatggttttgactaatgactattaattaatcaattaccactgcaatcatataatgtctgaagaatatatccattttttctgaaagatcccaaatattggaga

SEQ ID NO: 40903 - DNA, 574 bp, Arabidopsis thaliana columbia
agattgggtcaaaaatagtataaaaccttgaatttaaggactaaaaaaaaacaatttcaaaacggagagatcaaacaaatgtcgagaaagttggacccgcccggatccagccaaaaagctcgtggactctgccgatggcacaaattagtaattaccaactttaggacaagttcaggtcccatggtcgaagagagtctgtctctgtcttcctcaaaatatctttttttccaaattcatcattgatcagtgattccagtattagctcagttacgaacaaaaggcttaaacataaaaacaaatgttgtaattaaccaaatttcttaattcttaatggacggggggagctcatagtcatagtatcttgttacagcaacaaaattcgaacttctaccgttatctcttgtcatctacaattgctctgcattgtttagaacctgctaattaattttgttaacgtgttctaaagattttgacaacaatcgaataattgaaatctaggtagttaggctgtggttagaatagaaggttagtgaattggaatgacagaaagggttgcacattatgttaatttttt

SEQ ID NO: 40904 - DNA, 486 bp, Arabidopsis thaliana columbia
  unsure (1)..(486): unsure at all n locations
tagagtattccccatatttaatagtcttacaaaagacaccaaaattgtcaattggattaagaaattggtaggggcaattactcacttcaaaaactagcaggggttgtttcgtatttcctgaaaataaattccggttgcttcccgttctcaatttaaggcgggtatcatacgtggcaaatttgatgcaatcccacgtatctccaccaataagattttagcaaacacgagcgatcgttgtttatttgcgttcaccgccgttaagatcacgcgcgattattaatttgggcttatttattataggcccaataatctgtagttagcccaaaacgaaagtctccggttgggtgatcggaatccgatcagagcgacggtaagtatttcttttttcttcgactgttaaaaaaaaaagaggaaatcattttcactagtgacattgttacgtntcaagagcttaagagaagttgaaagatggaggaagatgaagac

SEQ ID NO: 40905 - DNA, 528 bp, Arabidopsis thaliana columbia
tacgtttatatgactcagaacgatggtgactgattagacaaagcgaataaaacaaataaaaagtaggattaagtgattttttttttttttcaagtattattgtttagttgttagttgttacgaagattaaaatgatattttctcataaatggtcagcactttaaaacaagataaatgctcagctctttcatatcttttaattttatttactaaattgaagaaaatgatgataattttattggtatactaaaactcattatgcatgtattggtgcacaaaattttaaaatgcgagaatttgtcatttcaaattaaaacctatgaacttgtgcatattatgcaaaaaagacttctcaccatatcacattccacagttacactctctctacatattctgagttctgacataaccattcggttaaaatcataatgtaccgtattttcataaattttcgtcattatgtatcattgttctaaaaactcatcaccgtgtctccacataactctactaagaccaaaatgacaaata

SEQ ID NO: 40906 - DNA, 588 bp, Arabidopsis thaliana columbia
gactcctattatggagaacattattcgtttatctccagatgtgatagacaaagggctgtgtggcctgtgagaccgatggccacttaattattggttttttgtcaatggttgtgtatgcatagaaattcccacaaccgtttgtggcttaacacaatttaccaggggtttaagtggttaaattgatacatgtagatctaaagttttatgctaatataaattagttttaattatataaattttaactacgctcatgacacgtaaatggtagaccaatatgtggtgctctattaactaaggggtcttcattattaattcataaagactttctttactatacaagacttgtcaaaaggaaaagtagtattttcgtactacgtctacccctctcacggatatgtgtggtcgagcagtcattatcataatgtggaattttgaattgagcgaggtttcaaagttcaaaactatcacaactagtcttgatcaattctatataagatctgtgatcttggttgaagaaaagaatcgtcgtaggttgatatttaacaaggaatggcaaaggaagggggcttgggagagaacccagatgga

SEQ ID NO: 40907 - DNA, 544 bp, Arabidopsis thaliana columbia
ttttaattcgtttgtttatcttttttgctcttgtacttcctttactgtgcaatcctatttctgatagtgtgatcactcatcaatgaaatgcatccgtgctattactgtttaaagaattctagcaaaactccacgtaatatggaagatgattacaatgaaaatccaagtatcagttcgggtggtgtatattgaccaaagaggtgtttttcgtagtgcaattttttgaaagcttgctccatttccggaaacgctgatagtagcaacaactccaaaatgtcaaacgccaattgcttcaaacacactgatgactgaaacaagaataattttaacaatgaaatcatcaaatgcatgtaagcatcgcacaaacctgaaatcaagtggaatgtttacctgaaggaaaaagtaaagatcttctgcacattgttcatactccttttgtcctataagactcactatagtagctggggctttttctgtgagttgagggtttattcaaacatttatgttagttcaattaagcttcgcaatcattgatgcagaaaaa

SEQ ID NO: 40908 - DNA, 519 bp, Arabidopsis thaliana columbia
agttattctagagcgagcagcttgctctatctcttatggcattgatgaaaactttttaactaagcaaccattatataaaattacgaatagaggtcacaaatgattcatatgcaattaaacatgttgaccaaggggaaataaataaagattagaatttaattagagaagaatgtgtcagaaagagatgcgtttttcatgagcgtcaacaccaaataagctcttttcacgccttccttaggcatttcgtttaataaataacatagagacgaaatttaattaacaataatatgccgttataaagaaaataacagtttttattgacaatgtaaaagcacaacgattattaatttattatctttcaatttatatcttaaaatggaaaaacaaaacccaatattaatctatcaattattcatcttaccaaaaaaatctatcaattattcaaaagtagtgattagtgaatgaatatatttcatccttcatttgaagtgtggtgcaagacgcgcgaaccagagaaat

SEQ ID NO: 40909 - DNA, 406 bp, Arabidopsis thaliana columbia
tattattaataaaaattcaactttaaagtttggcaaaaaaaaaaaactttaaatcttatatgttttgtatattgaattaaagtgctatatactgtattaaagatatttcacatattttgaaaatgttctattttgttctagggtttttctgttattcaatcttaaactgtccatgttttcttttgctgtagagcgaaatgaaagaaaaaatttgtaagaattctgaagtcgattataatcaaatcaacaactttgatatatcatggaaacatatctcacattgatggtaaaaaaactagtgtgcatttatatatgcttttatcatttaaggacacaaaatgttatagtatgaatttttcttaaatcacattaattaccatatatagtaatcttgttgattcagtat

SEQ ID NO: 40910 - DNA, 883 bp, Arabidopsis thaliana columbia
gcagtggtggagcaggcggagtgaggaggcgaataggaagacgcaggatgctcggtgctgctattgatggagagactatcaaaggctgagacaggacctgtttcatcaatagggcccaatccgtttggtttacttaaaccgagtcgtcctttctctttgttcttgtcaaccacccacgcgctcaggagtggaggtcttcctgagacagtgccttcttcgagatgcaaatgttgtggatccgtgtccttaagaccttgcgtaaagctgaaactttcagacccaatgagtgataaggtacgtcttaggctgtcattggatgtagttgtttgatttcctgaagttgtgcaatcagagctaagtggctttgctgcaatgccagaagaatatattggagcagattgacaccttacgagcggcttgagaagaatgacttcttcctcttctacaggaacagatctttcattctccaaaggaatgatttcaactggtccaatagtaacgcattttctgtttctaccctctccatttccatgaaagagctctccgttgctttgcaattcacccgaagttgtgtagaaatgagtccgttgattgtcaaagaatagccacttttgagaacccttcttctgcctagttgtgatatcaattgctgaactaataatccgttgaagacgaagctccttccctctatcaaaactctctctaagatccatattacttgagaaatccaaaagtgcatgtatgggagccagaggagccaaggacttcagttcatgatcttcccagagagctaacaacgttttagcagggcagtttttgtctttcacctttaactggttcaagatatcaacgagtttgccaaagaagtaagatattgcactct

SEQ ID NO: 40911 - DNA, 440 bp, Arabidopsis thaliana columbia
tgcagattcaatttttatctacatacatagttactaaaacttgttaaagaaattctaatatattggttgtgaacatatatttgtctctgcattgtgggttttctcaaatcaaagttccaaaaagaaaaagggtaatatctagaacttaattttttttggtatatatagactagtatcgtaaaatactaacgttggccaatgtctatatgtaggtgttttttttatagaataattattggtcttcaaatgtacctataaaatggatgattctatacttgttcaaaggaaagaagaaatatattagaccatggggaagagttgacccatagcctttatgtacgcatatgatatggggaccgatcaataagtgagagaggtaatataatagaagccgcttcatcattggaactcccatgtgacctcctctcaagtgttgagca

SEQ ID NO: 40912 - DNA, 459 bp, Arabidopsis thaliana columbia
tttcttatatttaatgttttcaatatcatttcaatcttctatagttccaataaaataaaataaaagatgagtataatccattcttcttaaatttgctttttcattttaaaaacaacatagcttcgagaaatcaaagactaggctttttttctcaacaaacgtcgacgtatttgaaaaagctcattttaacattagccgttacacgaaccatgtgcaaaagaaatggtccccactcccaacaaatacaagtctgcgcatcttggccgtttccttcacggaaccgcgttgccgtgactgttaaaaaaaaaatagacagctcatcaaattcttcacgcgccaacacaacagaccgttgtgcctttttatctcagcgagttagatccacgcccctcgttgagcgtcccaaaaaaactcccgaataaatatcctcaaacggcgccgtaacggagaaagatgacc

SEQ ID NO: 40913 - DNA, 510 bp, Arabidopsis thaliana columbia
caaatgattagaatttggtcataaacaatgaaatagactaataccagaatgttgaccacttataaatcttcttcatgattccattaacgttgtcctctgttttcttgtccccctcaatgatttggtttgtactttgtaattcaactgataattcacaaatactctgcacttgggctgcttagtgttaaaacagagcatataagaaaagattgttcaagaagataatagtctcttcttgcagccaaacaagagaaacgatctctttattcagatactctgcctgatttaataccccaaacatatagcgtaattgtcaaagcaaatatgatttgcttgatctctcaagcaacaatcccaggcaagatcaataaccaaaattgttcacaagaaacaatctttactcagatactctgcctcatttaccccaaacagatattgcaattgtcaaagcaaatattatttgcttgatctctcaagcaacaacccaaggcaagatcaataaccaattat

SEQ ID NO: 40914 - DNA, 591 bp, Arabidopsis thaliana columbia
ttttaggacggtttgggggtgttacaagagtggtaccaaaagacgacgaatatattgactcatatcttttatatcttagcatagtttgctttttcacttttaatgtgagaattctaacatgcacatttgagataatgaatcattttcactcatcgttttggatcgaacctcgttttgtttttggtttggtcataactttttaacttgaaaaccacttgagagtgagtcgactgatttatatactccttatattttactttatatcccatatttttttatgatgtaagattcttaacatagtcaagtactcataatgatctagtagttgaatgatttacgatgattcgaatcattctacttcgattgagggtgtacactaattagatcctattatatatgatataaactgatatatataagaattattatataactcaaaacatgatcataagacggacggtgtatatttattttgaatataatacaaaattatcatatgtccaactccagattcgtgtgcatgtctctacgtatctccggatacgatcatgctataagagtcaagcccctacacgatatgacaaacgagta

SEQ ID NO: 40915 - DNA, 892 bp, Arabidopsis thaliana columbia
cgccagtgtgctctaaagcatgatttggtgaggtatactacgagattatttttgtctatataaatttcttaaaatcaagctgattcgatatatttaataatagtggtgttaaaaataataaaatgagggtttaatccatattgaagcgatgaattaataatattttaaaaatttattaatgttaattcaactcatcccgctatatagtccatccttgcaatataatccgttttgtgctattttctattaatatgttcaaatttaataatttaaaaaatattgattttattctgcctcgtattgaagcggcgaattaatgatattttaaattttttattaatgttgattcaaactctgtccttccatgccaccataaaaactagttccgcaatttcatctgtctcggttttttttatatgttcagatgtttataatattataaattttttattgcttttgaatatattaattattatatttccagtgaaatgaaacatttttactaaaaacagaattagcacatattgaaatttttaaatttggatgcttgttgagttaaggtccctagtcattcggatttggattcattttgattttatttacagtgtgattatgaattattttctaaatattttagctaatgtgtgatgttaaacatatactttttcaataattggataatatatgttcgttttcaaaatttgaatcaaaatatatgaaaaaaaattgtttaactttatgtattatacgattatccaaaaaaattaaaaaaaattaaataaagatgaaaagagaatcatagatttaaattattaccaaatattctaactatatgtattatttaatatagagacataattagtagatatgatctaattttggtaatatttgt

SEQ ID NO: 40916 - DNA, 1294 bp, Arabidopsis thaliana columbia
accataaggccgagtaaactcgataggtactaacaatgagtaggttcaaagctgaaaaacaccaccaactcagacacagttagttttcgtgtatactctcgaaggtctatctagtctagctagttggattagtccatatgattagtaaattcgtcatatgtttagacttatttctattcatgtgtgggattgttggaaatttttgacataatatttttccgatgactttccggccaaacggctgaacggaattgttgggtcgttagtgcattggaaagctggtaaagagtactacaaggtggtatactcatacgtcaaaaatgaagttgtattgaatgagaaataaaggtgtaaagtgggaaactttggccaaaccaaaccgaactgaaccgggcatgtgtcgggctgcggattgtagggttgtcacgacgctaacttgaaggctatcgggcttgtggaccgtcatgcgtgtgagttattctgcttgttgagttgaatcttatggaaatattcaatattctcaaaatatgtcatattctcaaaatatgtcatattctcaaaatatagtatattctaaaaatatgcaatatcttgagaatattctcgaaatatgccatattctaaaaatatgccatatcctgagaatattctctaaaaatcctatctccctctactatataaagaaacatagcctctcattatttttcaagatcggaaacacaaaacactctaagttctaaagtctatgctctctcttgcttcttaaaagtaagttcttagtttagtagtttcgagattatatcgtagatcaagtttgcttgagtctaatactcgtgtgctcgggtattagtttgtgatcggatgtatcctgacattcataaatcgtgattatccaaaaagcagttacggtcgatttattgaattaaagaaaaatatatcatatcttttctccgtgttttactttttgtctttatttactgttgttctaatttattattgttatcgttgtttcaaataaatttgtacttgtttctcaattcggtttttgagctcttacaatctcaattcaataaaaagtcagtttttagcttattgctctagacggattgagaattttttgaatttattttaaaaaaaattctaaatcttctaaaaatagttttgctattatctttgggtgcttacgcggaaggtgtatcgaagaacgtttttacttctttctttctcctctttctaactgatttgcaaatgctacgtagcgattgttgtggacagtgtcttatacaaacatctc

SEQ ID NO: 40917 - DNA, 1285 bp, Arabidopsis thaliana
aagaagaagaagaagaagaagaagaagaagaagaagaagaagaagaagaagaagaagaagaagaagaagaagaagaagaagaagaagaagaagaagaagaagaagaagaagaagaagcagaagaagaagaagaagaagaagaagacgaagaagacgaagaagaagaagaagaagaagacgaagaagcagaagaagaagaagcagaagaagaagaagaagaagaagaagaagaagaagaagaagaagaagaattagaattatggcatccagatcattcttcccatgggaaggtgggtccttcatcttaccataagatctctttcttctctcacacgtcttggtctccgattactccggtgagatgagtgaccatggctgtagtattcttgagcgtttgggtcaattaggtccttcctagggtccttgattcgactatccatctcctttcaagattgctctccttccgagatgataacttgttcaccgggtgctttccctttcgccctaagctgatcattaattggcttaagtttggcatcaattattttctccatttgtaaggtgatagcatcgatgatggcttggttattaacactcttctttgagcttgattcggttgtcaccattttctgccaacaaacaacacaaaccagtcactagttcaaggagaatactaaacgttttactaaaaacagaggcagaagatcgaacataataaattattaaatcatgctcaaaaattccaaaaataattttataagatactacactcgtcctagattcagatccaattgattttgtaattttatcgcaagctaattatttataaaaattaaatcaagatgacagcgaagatgaaaagacagatgagaagatgaatgggcaaaatgaaatgatgaatagaatggaacgaaatgatgaagtgatgaaaggatggagtactcaacttcagaatgtgctctgataccatttaatatgacttccctaagatcgacactcttgaagttgagtaggggatagactttgcatctaagagatcatgagatcactcaaaccaaaggatgtggagcgaatggtcacacaaaggatgcggatggcctttgatttacctttgatctagcttaaaagagtttgagattaaaaagatatatgagtttataatgaggaaatacaagagtttaaatagagaagaagagaaaaggaagagttagtcttggaacaagttccaaggcaactcagaaaaggagaaatcataaatgaaaatttgaacaaaaatagacccatg

SEQ ID NO: 40918 - DNA, 473 bp, Arabidopsis thaliana columbia
tcccccgcaaaaatgccttctttctcaacagttttaacctgagagacgatattatcatcaacccaaagaatagaaatcggaatcctctttccccatttgtcccagagcgcagtcatcccacacttaaccgcgatgatcccagtcctcttggatctactagacatctcaccttgtttcgcctcaatgattcgggtctgagccccgataatatcagatccaccaccgtccatcaacccagtatcggagctgaatcgtcggatgagaaagaagctactacaatgaggaagagattcagaggatgaaggagttatagaccgtattgatagaaactgattgattcgagaaaggaggcctctcggtacggccgccatgatttcgaatcgaagcgaccttcaatggctaaagtctaaacgaagaaggagagagatgcagaaaccagaactctcaaggcttttgcgtagggttttagatgg

SEQ ID NO: 40919 - DNA, 125 bp, Arabidopsis thaliana columbia
gctagacagaagaattcccagtaacttccttgtgttgtgtacattcaactcacagagttgaacgttcccttagacagagcagatttgaaacactctttttgtgcaattggcaaatggagatttca

SEQ ID NO: 40920 - DNA, 508 bp, Arabidopsis thaliana columbia
atactcagtttgctagtgatgctagctccattccactggaactggagaagaaaaccaagcaaatggtagggttgttaagcaggaccccaaatcaacagctgcttgtaacaattattaagcgtgccctggccctggatttttttcctcaagcagctaaagctgctggtattaacccagttgctcttgcatcagtacgcaggcgctgcgagctgatgtgcaagtgcttactggaaaaaatattacaggtcaacactaatgcttcacgactgcattgatgatgggttggtcgagaaccaataacaaacatcttttattccctcaggtagaagaaatgagccgtgaagaaggagaggtgcaagtacttccttatgtacttgttttgcatgctttctgtctggtggatcctgggctgtgtacaccggcttcagaccctactaagtttgtcatcacctacagccatatctgaagagtcaggttggtcacaattcttttaagtttctaggaatga

SEQ ID NO: 40921 - DNA, 548 bp, Arabidopsis thaliana columbia
tcatccatcagcaatggcacgatccggtaaaagcttacttgagccataagcaaactaatattctccatttctatctttctctgtaagagaaacgaaattcggagattttcatttgaaaatttgattctaattacaaacatgttcttgtaaacttaaagcttggtacaattgttgttattgattgatgttgtgagaaacattcagctttttaaaattgggcccagacgcaaagcaaccacacaacttacgatttcaaatcttttatggtactagttgaggttttgtgaaggttgatgtttttcttaattttttaatattctagttctcgtgtttaaaaatagtcgcatcattctttttttctggcggttcgtaattgtgttcccttgtaatactgtatagggttgtatacaatcgaacgtttgaagtgatcatgtaattcaatcataaatttaaatctttggttattgaaaacattttaagcattctatttttattgacctttaagagattttggcattttattggcttgagtcactgagcgttccaag

SEQ ID NO: 40922 - DNA, 145 bp, Arabidopsis thaliana columbia
gtcaatcatgtcatccaccattatggctactttccctttaacatccccaattaagttcatcacctacatgaaacgggttgttaaatgtcaaaatccagacttggttaaaatgtattttccaaaggtttttctacctctgcaacat

SEQ ID NO: 40923 - DNA, 412 bp, Arabidopsis thaliana columbia
ttcaagttgcctctgtctactattccaaccattcctccctaagtttgaccttgaattccgttcctctagtatgcggttacccgttcaaggatcatgtcagtccgttcattaggcacatatcctctccgagctattctttcaaccatctcatatgcatcttcggcatggttcattacaatcattctcaacagcatattgtacgtgtacatatcaagaggatagcatttctctataacttcatctaaccgcttcagttctacttccatatctattcgtcctgagaataatcctatcaactcaccaagtgacttcatctcagggatcttatcttctatgattctcatccgtgtccatgcttcatacaggcctttgctctgcaatgcgttatgcaaaaggtcattacctatgaaag

SEQ ID NO: 40924 - DNA, 515 bp, Arabidopsis thaliana columbia
tataattataatatagatttgcattgtatgacaaattgacaatgaagaaaatggaaataagttaataatgactaaatgccaatagaattttataattagaagattaggttctcccctttaccctttacttacttgtcagcttcttctttttttctttcatctattttttatgtttatgagaattctttttaattaaaaaattatggtgatagagttaaaaaataataattattatggtgatttttctctgcttttttttttttatctcatccgcaaaaaggctaaagtaaccctaatatagttaattcttgtttttttcatgagtatattttaaataggatgaagtcacatattttaaaagcttaagccaacaaaactaagtttttacaaaataaattttatttctgttcaccggttctttttcgatattaaaaattgatctcgatggaaaccaccacaattcttactaaaaatctctagtcttcacgtctttgtttaatggttgatacttgata

SEQ ID NO: 40925 - DNA, 555 bp, Arabidopsis thaliana columbia
tggcatttcttattttgttatggactatatcctctgtttatttatttaattaattatttatttagtcggctatatttcataactgctttttaagatgtatattaacttgagaattcttcttacacttaaggtctcagaacagaacagtgggtcaaaaatataaacgaacatggatgagcataagagtaaagacatgtgacaaacaaaaggttcagctacagctactaatgaagcccaaataccttattgaaaagaaatagcatttgtgattgtgatattataagagagcatatccagaaacttttgtccgatttaccattcgataacatcaatgacaatcgtccatcgatcgttgtagtagtagcatctctagaagaaccacaacttttgatttctttgaagaaatcaacggaagtgggttacattacatcacaatcgtgaggataggcctaggattagcgatttaccgttttttaatgtacatttcttctataaacactatcttctaataaatagtccaagtttgctaaatatgccaagttggacatgtgttat

SEQ ID NO: 40926 - DNA, 542 bp, Arabidopsis thaliana columbia
tgtgataagaaaaagtgtttggaggagcgagagatgtatcctatttcatgctaggactggacaacaaacatcaaatattaacagtatcttagcaccttagacaaatgtagactgatttctaatgccttacgcttttctgcagtcgcttcttagaggaagattcttgcggaacgagcgacctacagttccagagagaactccatcaatggcttcaagggaactgcttcagctaagagaaagacaaactgtctctggcttaaggtaagatttccctccaattccattttaatggataaaacaattttttcatacagttttctgtcactttcttgttcaactcaataggaacagattcattgcatcataataatataactacactacaaacccgtaaaggactttagaaatatgaattttgatatccttgcatctcatgttctctcccctgctcactgaagataacataaaaatttcggcttgttctctttctgatctttttgttgtgtcgcattttgcctttcacttatctattaattgcaagt

SEQ ID NO: 40927 - DNA, 605 bp, Arabidopsis thaliana columbia
gatgacggtttatgtacgtttaccgatatacgtatgtgttttgtctacactttcgtatgttttgtgtaacttgtacaagtcatacgcacacgtgtcttccttccacttgatagtctctctgttgataattagttgttttatgcgtatgtttaaatttaaaaatggtattatattattttttattttgtttactactatatattgatttcaaatgcaacgccgtagatagtattagtcaaacaaacaattaaattaaagtaaacgttttgatgtagtcatacgaaattgccaaaaacattaaaaaaattttggtttttgccttgaatgacccaacagaccaacatgatgctctttcctcctcggccaccagaaacgtttgggcggctctcaacgtcagcgatccctacctttcttcatgtgtggaccttctccgatccttcttatattgttatacataaatttaaatattataaacgatatgcctatgtgatttagtgtgattagatttagggtttataatatgagttcttataaatattgagaagagtactgcatttctgttttcacacaagactatgtgcgattaaacgatgtgctagctggag

SEQ ID NO: 40928 - DNA, 611 bp, Arabidopsis thaliana columbia
cagcatagcaggtttttgaaagctaagatataaataggtactaataaggaaaatgggaaaactaatgcaaaattacagattgtattagtcctgattgtataataatgaatcataaataaaggaccataaacattccagaattatccagtgagcccagaagttgaagccatgctgatagaataattttttgagtcctgggttttaaaaaatatactgactttttaattaaaaaaaaactttgaaattttttttgctgttaagtaaaacctgaaacttggtagagaaagatgtaattggggcttctaccttttgaggatcatggaaactgtattcaaattattacaattctggattagcatccctagatgagaaggtttgatattatataataactcactgtgacagggcagagtctggcataggtgggcccattgtgtgcatccaaatgcatttaattactgcaggatgagcccataggttttatatcatatgcctgttgcaactgatgggaaggtagcacttcttagaatgttggttgagaaggattctgaagctccatctgggctcaacattatggtaccatgattaattaatgattgattagtgaagtg

SEQ ID NO: 40929 - DNA, 499 bp, Arabidopsis thaliana columbia
catccgaatttctaatgagacgacacgtgacatattttaattggtgcttttaaatgaaggtaccttaggtgaaacaacaataaatgacttaataattaagatttgatccatgaaaaaaacttaataattaagaatggaagaagtgtcatgacttttaataatcttttttaaaaaacttaataattaaagctttgatacacgaaaaaataaacttaataattaagaatggaagaagtgtcatgacttattaattagacacaggacttaattaatctgatccaaaagaagaaggaatattatgtcatagagtatcactgatgattgcaggttgcaacttgtatgttgcatcaagtcatccgtcttggttccattcagtcttctgtgatgaaagagtcatttccccgggttgaatcggatatctccttgttatatggctctgatagtgtgtataggttatccaggttagtagcttatagtggcatagtgtgtggagatttgt

SEQ ID NO: 40930 - DNA, 542 bp, Arabidopsis thaliana columbia
ccctatctttacagtttttctcatatgttcccgacaacaaattttgaagaatgaagagtttttaaacagttattcgtttcatattctaacagatgcacaaggtcataataccgtattttcttgctttatccatcactccaagtactcacagtcttgaaggcaccttactggtaaatcatacttttgtgtctcagtacatttctggatcacctgcaaacctaatctagaagaactaagactgttgtatatgaaatgaaggctggaagagatcttagatatatcagcttgtcaatgactggatgcttagcggtcgctgggcttctacttatggtactcactcctcttatcatcaatctccatcactctcttgaattctaaaatagattttgtaactctttccttttcgcattgtttaccaatttactaatagcttctgagcaatggaggatttggtttgagaggctgctggtatgctctcgtgggattccaatgggtaaaaattgctacgcctttactaagccacattacccagaacttcatat

SEQ ID NO: 40931 - DNA, 432 bp, Arabidopsis thaliana columbia
ttccccacttccatttcttataaacaacataatttgagtataatcttcattttaattatatatcaaacaatagaaccttaagtttttgattataatctctgcctaatcggcagctaaactcatataacccattgtttagcccagttatataactttggaagttgcataatcagcttaactattttctactacaaaaaactaaacatttttctttttgagctcatcaaattcaactaaaattgtctctcagcttcttttttcccttttcctttatagtgagtggcgttttacaactaaaagcaaacggatcaagatagagtcatccgcgatcaaagcaaaaccataagcaaacaaacaccaagccgctaaaagaataccgcacacaacttcgatctatcacatgaatctccttttaacaaataaaataataat

SEQ ID NO: 40932 - DNA, 605 bp, Arabidopsis thaliana columbia
atgtaattttatcaagggaaagaacagaagttgttgttgttgaacccacttctgtctacaaagttctctctttcttctccctcttcctaaattaagcaacacatcactatctattaatcttccaataattgattcttatctatcttcattctccttattataattattatctgaaataatcacttatagaaaaaaatgaaaaacctgaacttgtgcatgtgtgggaactacagaattatccaatagtgaaggaaagataggagtagttgttggcattgcattggtaaaagacgttcctacttctggagaacccatctgtccatcaagaaaatatctacttaagatccataaccggcttttcgggatacatgacttggttttatcggtaaccggattaagagacattgtgtaaatgaaatacctcagattgaagtatgaggccatcaaggtcggagccaaagtcatagaccaccggacttatagaagttagcttcattgagagaaactaatgaaacagaaaaaaaagttatgaattagaaacattagttttaacataaaatggttcaagagtaaacaaaataattaagaaaatgccctcaacttga

SEQ ID NO: 40933 - DNA, 540 bp, Arabidopsis thaliana columbia
cgttttatcatatattgtaactcctttttttgtgtgtgtgttttcagtattacatataacattaacaaaacaacttcagattacagaacagcttgaatctcaagacgaagaagtaagcccactcactttgggttaagtttcggtttatatttgattatctaaacttatgcgttcggttgattgagactctgattttctatgttggcagcgaagaaaaggatgctgtttctgaagctcttggtcataactaaacggacaaaaagacaattatatacgtagacctttggttttattttggtctattgtaaagtttgtttaaatttccgagtgaggaacaaacatcgcggtttatgtttgaaagttgaaactctctaatttactagtaccaagagcttacataattatgaaataaagttggaataatgtacatgttggttagctacttgtttacattcagttacaactcgtagttaacaatattactgaaatgttcgacgtaaacaatgaaaaaaaagaaaaaaccacggctccgaattgttg

SEQ ID NO: 40934 - DNA, 379 bp, Arabidopsis thaliana columbia
tctagtaacggccgattttcctcattcatgattcttatcttccaaagttaaaatcctataaaaatccacaatgcggttttaaaaatgtaaatttgctgtcaaatcatcagaagtcttacatttttggcgggccaaacttgatagatcctttgtcgttcaagattctgagaagacataacgttttcctccgggaattgaactccggaatggtaatcgccttggttccagtctcagaatccgcggctagacacgtcctacagctccatatccaagtttcctcaattcacagccaagcgaatgaaaccggcgatatccaaatcgtgccgccgattgtgcggattttgttctcctttcgtcttctgattatggtttctgtttg

SEQ ID NO: 40935 - DNA, 523 bp, Arabidopsis thaliana columbia
acacgtaactacgttttatttccatttcaaaccgagaaatttagacattttgactcccggttcactctgatctcgtttctaaaccggaatcgaatccattacacttgattttggaaaacgtgaatgctcattttaacttagaatgaatgatttaacatagttaatgctctttttataaatttggaaagataagttggcgaacgagtcattttctagtaagcgtaactaactatttcatcaattaattatgaattttcttcttcttatcaaaaaggtctttcttcaattacataagcttttgcgtttttattccgataatataaaattttgaaaaatcgaatcattaaagaaattaactaagaactggcattttgtatacaggccatgtatatatatatatatacctattcacacaatagttacaaatcgtaaaattttagtgtttgatggctaatttaagttggacctcaagtcaatggtttaaaaactatgccaaaaaaaaacttaattaagggtataatat

SEQ ID NO: 40936 - DNA, 607 bp, Arabidopsis thaliana columbia
gagaagaggagagacgtgatcatcttcttgattcggtcaatttttttttttttttttggccacggtagattttttatttgctagcaaaacttgctagttatttgaagaagaagatatactgacgaagaagacgttgtttattgtcacgcactacaaaagtgacctgaaccaacgatttacttggataaggatgatgaccaacaaaaccatatggttatgtttggtattttttaaccggtctttatgtggtttttgtttacactacgaaaagataaaagccacgaagatgactgacggatatgatgctgatccggcggtaattaatttgaattcaaccatgactactacacaagtttcttcatgaacacgaaagttcgaagagcaaccaagacttgtgatctaaaatcgatggagatacaactactaaagtattttctatcgaattgatgatataaatgtcattgatgaccctatagtgggtatgaagaccatgaagatgatttgatgattgccaatctcatatgtgttccacatatgagcttgcgggagggtattaggagactcgggaattcgagatcgcttgaaaggaaagttatattgtaaatat

SEQ ID NO: 40937 - DNA, 531 bp, Arabidopsis thaliana columbia
aggtcattgcatttgagaaattgcgggaatgctgaacggaaacagcgatcctcacaaatatgcgattactaatatcatgcaaaatcgcagaatgaatgattaagacaattctcaatttttgggactactaataaaatcactgtttttttctccaagttactattttagaagatattttctactaaataaagagtatgtatattaaaaaaataaaagcatcattccattttaaggaaatttctcggtgtgcaaaacacatcagtccattgccgtctaaatctggaaagaaagttgcactacgtgcaatgcaagcaatctttaagcttagttacacatgaaatcaagaaaataacaactcctatctatatatccacatatgtttattgttaatagtcttcaacaaaaaaatgtttatcatgatcaatatatagagtttcagaattcatctcaaccgaaccaaactaaaacaaatccgtagattagtttccaagatcaagatcaaagaacaagaatcattaacctaaataaaga

SEQ ID NO: 40938 - DNA, 531 bp, Arabidopsis thaliana columbia
atttaatgttacataggttacatgaaaagaaagatcccaccagaccaaaaagaaaacgaatcatctctatgctaaagagagtaaaatgataacttaattctaagagaaaaacactgattaagcctaaaacactagcgaggtaatgttattattacctacttctactgcatccaaaattttgctgattgaattaaagcactatgccctactgtcacaacataagtacacaaacgaatttggatgccattacgagctaatcctataatccatcccaagaaagcttgcgagttaccagtaatcttaaaacccaaaatcgcattgagcagatgcccatcagggtaatatgtacctcacaagaagaaaagtaactaggtccaagctgatgatcatctcgacattaatagacctgtcaaatgctgtccatctgaagagccaaaagtatcttccatgaacttacagttctcacaatccaaagatctttcactagagaaaccatcattcaagctaggatcgtgtggacagcaactgaca

SEQ ID NO: 40939 - DNA, 554 bp, Arabidopsis thaliana columbia
tcgactcataccctacgaatcatcgcagagtcgtaccattttcattttcgccactatttcgtttcgtgccatttgatccaaataattctaagacataaattaaactaaattattggatagagacatggtaacgtttcttggacgcaatcatcgtaactcgtgaattcacacatcgtattcatcgttctaatttcgtcgtttatagaattaatataggatataattttaaaaatccattttagtgggggtattttattttgtctagacatgcactgcacatgacatgatccgaatatgaaatatttattacacgacaactataatgactatgaactgaaaatgtcgttgagacaatcgaattcagactatttctttttcttttatcataatttattttagtttcgatagcgaagtatgattcttctggttgaatatagttgcggggttggaaagataaaggatacttccaaattgcaatagtatataccatagaccatttttatacctttttcaatttatatcgacgctatgataatctttaaaaggtggtagat

SEQ ID NO: 40940 - DNA, 543 bp, Arabidopsis thaliana columbia
tattatggtattgaactctatatattttcttcaactttcaattgagataaagaaaaaagataatgattataaaagaatctcaacaaactaaatatacacatcccagaatctagatattatcaactaatgttaaaagtttcaatttatgataactgatataattaatgcttttttagttcttacttgataagataaattttatatattctataaaaacccaaatgatcaaggcaagcgtttaatctaaattgaccttaaccaaatgagcaaatattgaccaaaggaaatcttttctatttttttgcgtttatcctaaaggaaatgtttgtttcatggcttcaaaagggaatataatttgagcaaaacaagtaaaaaagtaacaaattaccgttacagcaaaaacaactttaatagataatgacagagcatatggtagcaactttattacccaattcaaatgcagaacataataaaccgtggtcaaatatttgtatgaattatatgagatagcacggaacaatttattgatgggatttagtagtt

SEQ ID NO: 40941 - DNA, 466 bp, Arabidopsis thaliana columbia
ttttgggtgctaagaaacttgttcgggaatgtattaatcaaaaatgttacaatttgttagttttctctgctttggtaatacttatctaaatgatgcaaatggttgcagctctgtgtcttgtatttgtgtttatgtgtggttattatcaagctattaatgattcctgattatttaggaagatcatgctttacgttcttgaatgacttttctcctaacgtttggtcttatgtttgtgaattttagcaagtgggctggaacaaagcgagatcgatgcaatccaggagttggaacagactagtagaaatgatacccttctcaagtatcatgatatctgcatagatgaaggagtgagtgctcttccaactagttgatacaataaggaagctagtggaatcttataacatattcctgtggtttaattggtttacaacaacaatttcgattataagctataacattttactaa

SEQ ID NO: 40942 - DNA, 868 bp, Arabidopsis thaliana columbia
tgaagaagtttcaatatgtaatctctattattatacatatagcctatagagaagaaagacaatattcttcttggaaatcttaagataataatttagctctctcccaggcaccattttcgagacaccatcgttggccatgttttccgacgccggtggagttttaactcgccggcgtcgggaatgtctcgtccttctcttagcttccttttcaagacctgctcattttagttctgttttctttcaatttttgcgaatttggatctatttctctttttggcctcttcccatggcgtctccgagatatgtgacagagaaagaatgtgtgttccggcgagtctccttcttccatatcctctgttcacaacgttggtttcgaagtcgtcaaaagaggaatcccttgattccaactgtttttcatctttgaaatatgagatttgtctcactgtttctctcggatccaatggatctagatctctctcgggtctccccgaagaactttctcaccgaatatcgtcgacaatacttctacctcctcgcgttttaatgaagacttctccaagcatcatctgcattttgtttcgagaagccatgttgttctggagttcatgctcgtcgtccgtaccggtgaagattctgccggcaagcaacttaaacctaattcttccaatggtctcctttcatgggcttgatctacaattctgctggcagtcctttggcccatattgcatctcatctcggcccatttatgtggattttggcccaatttctttttcaacttggcccaggtctgttcctttcaacctatattacaacctcattaatcatgcctccaagttgcatcatttcttcaaatgtcttaagcttaatg

SEQ ID NO: 40943 - DNA, 525 bp, Arabidopsis thaliana columbia
tgaattactaaaacagatgcagcagttttaacttgtagcaagctaaaactggtcaggactcagaagctagctaaatctcttcatacaaacaatctatctacctgagcatcacaaagttcatctagtcaagaccaaaatgaaaactcacactctctggaaaattacagcaacagggagaaatagaaaaaacctacaataaacatgacagtaagcacagaatgcactaactctaaatctattgcagctaatagtgcaggacaaaaggtccaaacaattccccccctgatgccatcatgttcttcctccacctaagagctttaatttagaactgctcatcaatgtttggattctaacctcacagagagaaaaatacttcaaaaacgaccataaaacctagaaaaagcttactatactgtaaatttagtagaatcgaattggtataacgatggctcactcttgagcataagtttaagttatgacctagcccactagcttatgccccaatttcactaagtgacatcccaa

SEQ ID NO: 40944 - DNA, 450 bp, Arabidopsis thaliana columbia
taaatgtaagtttcaatgatattttgtcatttttgttgtgtgttctccaagagatatatatttgtctcaagtaccactaattaaggttgtatatgtgatgatatattcaccagtctaattatccctctctacttttttcattcatctcttcagctttggtatttacatactcacacatatctatgagtgtatcataattggattgctcttttgatgtgaaagtgactaaaaaccacacatatagaaagcatttgagttagatcactagaacctagttcctagagcaacagaggactaaagagataatcacaggtcatctggttataagctaagcagaggcaaccctagatgatctagttaaattgactaatcacctttttcattgtgctccgggaatcactttaccttgctgaatttgaaccagacttggagcataactgctgagaagtg

SEQ ID NO: 40945 - DNA, 409 bp, Arabidopsis thaliana columbia
tagtaacggccgcctacttcttctccagctacctcctccatgttccctgacagaaaattaccaagatttcctcaaattatgccaagaactcgaagccactttccacggaagtaggaaactgtcttactttagaaaatactacataacatgagaagtcacattttaatgttatctccagacattactcaacgtgtatatatatctctgtatgtatgtatacacgagggtctctgaaattgcgctaaatgtcataagctctggtcatctcataaacgtgtcaatgcgtggcttcacttcgtcttcgaatcatttgtaaattatccccaaaacactaaatcttaccatagctgagaaacaacgaagagatcgatgaaagctaagatggtgctgatgacgctaatggatctga

SEQ ID NO: 40946 - DNA, 616 bp, Arabidopsis thaliana columbia
  unsure (1)..(616): unsure at all n locations
taaaattcgcccaaatcacaattctgtttgcacttagaatggcggatcattcgtgggataaaactgtggaagaagcagtgaatgtgcttgaatccaggcaaattcttcgatctttgaggcccatttgcatgtctaggcaaaacgaagaagaaatagtgaaaagcagagccaatggaggagacgggtacgaggtgttcgacggtttgtgtcaatgggatcggacttcagttgaggtgtctgtctcgattcctacatttcagaaatggcttcacgatgaacccagcaacggtacgtttcatttctttcctgatatttttttttgccgagagtttcggagtttccaaagtttggtgtttttttcttcctttgaactcaaatgcgatttcgttttcatactttagacagtgaattatggctttatgcaaagtgtaattgatggttataatttgggtttagtgaagaagctgaattgattaggcaaaagactgggtttttatgttgtatcagtttcacgttgacaggagaagagatttttagtggagatgcattagctgagtgtagaaaagggagattcaagaagctgcttttgttctctgggaatgatntattgggtttg

SEQ ID NO: 40947 - DNA, 471 bp, Arabidopsis thaliana columbia
ccgggtccgaggattagttatcatattcctctttctctctcagattactggcagctctagcgcggtttttaaatcagatcatcccgccatgacctcacaagcttgtctcttcagaatcagctcaaaggtatacacaaaaccacacgaatctttaacaaatctgtttgttgttgttctttgttattaaattcgatttgttttcggatttgttcagatctttattattagcatcatgtcgatggattctctctgctagtctttttttctgatatattgtccgttatttctgatatatctctgaatctgtttaagtagttatgatgtgaaggggctagatttggatttacttcctgtgagtgatttatatccacgtacttaactgttcttgtgaattttattgtcttatgttctaacgtttgtagttttggtcatatgcttttgtgcggttcagcagacaggaaagaggcgtta

SEQ ID NO: 40948 - DNA, 432 bp, Arabidopsis thaliana columbia
ctcatcccccatgccgcactgataataagaagaaaaaaaaacaatagtcaagattttcatattttttgaacatcttatatgtgattggtatatcatgtcaatagttgaataacaaaatactcaactaagaaaaatattttaactgaattaagttctttttgtagaaaaaaaaaatggtaacgtaatttatttgatttatcagagttttattttctttttacgcatcaacaatatccaacacaatttttctcaaatacatggaaacataacctcatggtttctcttcaatttctatattaagtaaataaataacttaattaagaaaaaaaactcaaaaccgggaatttttaaagtatatatatatatatatatacacatctccgtttgtcgttgacacgtataacaccagcggatcgaagttgatcggcttgg

SEQ ID NO: 40949 - DNA, 719 bp, Arabidopsis thaliana columbia
atgtatttctttgtttcatcaaaataggtttttacttttttggaaatttaagtctatatcataaattcgagcatagacataaatcgattctctacattgatctcgatattgagtggcacacgttgaagtaacaatcgtaagagcaaaactataaacgaacttttggaataacaaaaaggacaatgagtattataaatatgagtatcatcatgaatatatatacttatgcctcccaattacatatattgcaattaatttttgagattgaaagtgaaaaaaaccgcacaaaatttacagtcactccataactatgatcaaacttatagatatcttagttatagctaaacaaaatccggagatagatataatttaatatcatgtataaaatcactcatggatatcgtcgggattaagagttcctcgccggagaagcaaccggaaaaagaggaagaagcagtggctgagagtctctaggagttgagactggagatggatgaagataaaagcccataacagcaatggctattgatcttcttacgatagagttccctaatgacaaaggtgatgacttgatgaaggggtcatcgatgattctcagtggcgtcacgggacagtttagccctagcttcggaaaatccagcatgcttggagacagaagaatattttcatgatgatgaaatgtttcttggagagaatctcgggcatttgaagatgactgc

SEQ ID NO: 40950 - DNA, 461 bp, Arabidopsis thaliana columbia
ctgaaatttctcccatctactatcactctctctgttttggtttttcatagggagaaattgatttattaatggaacagtgaagggcgtaagatgatggcgccaccaccacctatactcatgtgcacacagtgtgcatgttgtgcaccggctccacccggttcttgctgccgttgtggctgttctggtggtccctgaagactctgacttatgctatccaatgtgctatccaaggtccttaattccttataatatgtctgaacacgtaaacacaaagtgtagctccgtgttttggatcttaacacctttgggttctgctcagtacttatatgtttatcagttagttttgatgtcctccttggagagttgatgcactactggtcaacattaacaatgtcgaaatccgagagttcacgacaatgtcgaagttaatctgtcgggttatgaatgtacaccatgtttac

SEQ ID NO: 40951 - DNA, 630 bp, Arabidopsis thaliana columbia
ctaagaaaacttacatattactttaaaactaagtaataaaccagtaacgctaacaatcgtatgccacatctagacaagtgtaaacaaaattggtggatatagaattataaccctatcagcatatcaactttatgggttgaggaactcaatttcggttgtcaaatatatattgtgtgacaaattttaacttatcaaattttattctcattccttaatcaagcattaaagttttctcaattgaccaatctctaagaattgaaaaaataatcttcatctagttaatgcatatctattgaatttggaaaatttaaaagtttttttttattaattttgtttttgggaaaatcataaaagacaccctcccctcaatagaagatgaaacgcggcgtttcataaataaaaacgagaaaatcaaaatcgtcgctctctgtttgctggcgtaacttagccttgttcttcttcttcatcgcgatatctccggtgtcttcttcgtctccatcagaagaagaagctctctgtatccatccatatcgaaaaagtatgaactttatccgaatttcttctcaattttatggatttattagtcagactcatgttagggtttcgtcgattcatgaatttaggggtgaa

SEQ ID NO: 40952 - DNA, 609 bp, Arabidopsis thaliana columbia
ctatatataggtcagtcgttttcctttaaattcaaacctcttatgagattttttaaagaaatatcgtaagaaagaaaattttcaatcatgaagtctataaaagttgtatatgccaaacataaaaagtttgaagacaaagggtttgaaaaccgagattgaatgtagaaggcgggacacataacaaaaaaagtttgtaagagtcattaagagagtagtaagtatatcaagttatcaatatagatcgatatcaataccttttttaaaaaaataaaaataaagttacaacatttgggaaaagtaaaatttaggtgagtgctgtgtcgaaaaagtcaaaaactgtcactttaataaaagtactataccttatacatataagttcatttgaatttttgtaaaacacatccgtttaacaattcgaatttagacagtccataacctttcactttattttgactagtaatcaatagtattgctttatcgaagttcaaattttagaattgttagatgtgatggacaaatggacatgagtcgttatgacgtaacaaaatcctaaaaatacagatgtttgttctttgttttttttacgcaatggaactatacatttttttg

SEQ ID NO: 40953 - DNA, 460 bp, Arabidopsis thaliana columbia
tgatgattaatccattgatgttccatacaaggcctcaggatatgattggtccttgggcggcggctgcgtttagaacgccttttgtcccacaaaacctaacacaaccatcatcatcatcatctggttctttgatgatgccattgatgggacagtactttggtcgctctagttttcagccgcagttaatagggaatgataacccggatggggtggcaggtccaagctcgagtttaagagtcattgatcctcccagacgaccccattccggcatttggtttctccttcaagcttctcaaaaccagtaagtacccttaattttaatttgctagagaccatgttatgtaaggtccatatacaatcggttttaatcataattaaggtgttctgtcaagatcttatatatattttcaaagcgttacagtttttgaaattttatttggtggacgttttaggacagtag

SEQ ID NO: 40954 - DNA, 600 bp, Arabidopsis thaliana columbia
  unsure (1)..(600): unsure at all n locations
tttggttgacctgatatttcatcggtttggaaagtcaacttctcttttatagtcgctcactggtttgatttgattgatatttacatcacgcaagaaaactggatatagcttaagatgacttgtagcgaatgaacacatgacatgtgttaattccacgaaggctgggtcagtcgtttgtttacttagtaccgcagctcaaacatgtaattcccgtgagagattgttttgccggagatagtagttttcgcgtctccaaaaacccttcgacctttgccggagatagtagttcctcactctctttaatccgattcatcgagccggagagctcaccttccgccgcgtaaaatggcggctctagaaagcctactgccgggaacgtcgactgcgatgaggaatgctttcggcaacgttttattagtcctgatcctcgtcctcattggtgtcctcgctttctcgatccgactcttctctgtgagttcactgatgtttctgcttggttgattcatttcagtgttcttcaatttgttaggctttagatccgatctgantagtttagatcgactaatctagatccgatctcatgatttgagattgattggt

SEQ ID NO: 40955 - DNA, 334 bp, Arabidopsis thaliana columbia
ttatattttattgtttacaactattattaagtaatagtatatcatgagtctacgggacaattgttaatactaaggatttctcactatatatagattcagaaaacatagtcattttgtaatcactatatatagattcagaaaacagagccatctcggatggagacgaacatatagtattcattcgagatattccattttttcaaagacaaacgttcaaactttacattattagacatattttagttgtaactaaatagtgacgtcgagaaatacacatatacagcgggtaatctgatatccagactcgagctgggcttttagtcacgcgggtaag

SEQ ID NO: 40956 - DNA, 501 bp, Arabidopsis thaliana columbia
gttaaaaaattgcataaatgcatcattaaataaaaccaaaattatgaatgtttgcattatcaaataacatgaaatagtggttcatgatactttcattactgtgtgaccttccacatttcgtaatttgtataatgcatggtgttattttacaaaaaatcactaaaagttagatcaactatttaaatttgaatcaagagctttaattagtgttcactgtaaacaagagaaaatattacgtatgaaaatgttatgtatacagtatttaatacttaaaggtatcttaaataaatttaaaagaaaaaggttagctaatgattttctgttagcaacctccaaattaaaaatctagcgactttacgggttttttaattcagaaaccagtggtttgaaaaatgcagaaaccgacaagcatagagtgaaaaagaaagcgcgtgaaaaacttgtaagaccaaaagttgcaaaacaatatccctttccgtaattccttcctttgccccattt

SEQ ID NO: 40957 - DNA, 700 bp, Arabidopsis thaliana columbia
tttcctctggacctacttccaacattgtttgcttcttaacttccttctgatctatgagaactactccccgcgccttacactagaattagaattatgtctactttgttgttcacctcttccaacaggattacaaaatgtgtcacaagtgaactcattcgtaagatgtgtatcatcatctacgataaatttcttcattttcttcagtcttgagaacatgagtctcaggcatgtcaccaccatccgagtaaccataaatggcatcatcagctcgtctctggttcatttgctcttctcgtctttggcatgaagaatgttgtgattgggaagaaacatcatgcaatctaaaccatcgtggcatcgcatcccaaaactctggtggctgtcgtttgatcttattagttattttataatatatgtatatgttaacattagtagcattaatagaatggtcataagtaattactaattcatgacccttccaccacacgttagatgtagaaatcatggatgattcagaatttctatttttatatgctttttgaactcatcaaaaattttcttaaaaacccaataatatttattcatgttaaatgctaggttaaaattttcaaccatgtactctcgaccaagaggggtaggatctttaagagtgtaattattcatgaaaattgcatgagacaaacaactcaatcaaagttgt

SEQ ID NO: 40958 - DNA, 223 bp, Arabidopsis thaliana columbia
ttaaatccaaaatttgcaacacaaaacttacttcttcaaccaccctgcaccagaacaaagccattctcctgggtgttgtaaaacttccaattacttcagctagcttaacaacaaaactactagggggagcagcatgaagatcttttgcaaaagatgatctgttggtcggagactccaaatcagagacaatctttctgctgagaaagccactatctggaaaaaa

SEQ ID NO: 40959 - DNA, 647 bp, Arabidopsis thaliana columbia
tattttcctctgcttcgatatgaagaggatctttagtaattgcagggtcatggctgaagttctcataattgttactaacacggactgatgatcccattgcggtttctttctgacaatctccaaaagatagggtctcgcttctatcatcctcgcgcctgatttgatcattgctttgacctgctctctcttggctagaaaccataaatgtcatctcaccgccttccgtaaatgaggactgtcccgctgacaacgcattggcattttcattgtgatagttagattcggtcatgaaatcgtattcaggtacttgttcacaagagagaagaggcataaagttctcctgtcccttattataggaggaactcactgagaagatattacaatcagccttttgaagagactgacccatcgatagaaagttttctactcctttctccaacggatgaaatgttgacaggacattttcatctcctttgtcataataatcaccaatcggtacgacaccaacaccttcattattgaagtttcgaatgaaatttccatctgttttgctagcgaactgccctggcaagatgaagctcctgtcagtattactgaaggtttggccaaaggatagcgtagtactctcttgaccactattaaaagat

SEQ ID NO: 40960 - DNA, 691 bp, Arabidopsis thaliana columbia
gatacaacagcagaccaaatatctttttgtggcgagatgcaacttatggagatcggattagagccaggtgcaaggttgttgcttatctttatggtgaagactggagccgccaaagataaccaagaggtcgttaaggctaaggagaccaggaagaggctatatgctttggtggatatcatcttttgtttgtatcaatatttgtgtgaattaatcatttatataagaaacttatttgactcccatatatagtaatgatctaattaccatacataattatcaaaaagatagaaaaagagtcaaaatcaataaattagtaactaaattaaaaactgattcttaaagagtactctaattaattagagagaaatttacaaactagtgtttggtagactattaaaaataaaataaaatgaatcaacaccatttttcattctcttcaagaatcccattaaaagtcaaaaccatgtttgggctaggaaaaatatgtttgggctttagtaggcccaactacccaaaataaccacataaagtaaacggttatcattaatgggcggttactaatacttaataaatataaatatagttaaattaaaatcattactagagcttatcctaatttctctccctttcgaaaatcgaaacaaatcggtgcgattactccgttttgaatttcacggcgacgatggctttg

SEQ ID NO: 40961 - DNA, 632 bp, Arabidopsis thaliana columbia
aagtgagcttcgaacccgtcctccaatcgtgaaagggacttttttcagacatttttaccaaagtttggggataataaatcgtggacgtttcattgcatatttctttgtggtggagatgccatgtaaaggagtgtgtttctaagtttgttgtggaaacttaataaacttaagatgtttgttgtctgagttcttttatgggctcttttattatatatctctctctaccagttttcagctacatgctgactattgctaaatacctacatatatttatacatacgagtgtgttttgtagagcttatacagtacaatacaaaagcttagtacggacaaacgagtgtctgacatgcataatgtttggtcgttgtgtactcttgatgctttcaggtgaatacacttttcagtctcatctattgttactcttaaccttacatattgtgaaaaagtaattttgatcatacttatacttttgatgtttttactaaagatagaattttttccatcgattaattgcagactactacacaaatggtttagagtttagccataagtcatacataatggctttgacagggaagaacaaattaagatggtatacattatagttgctggaaaacaaattcatgtataag

SEQ ID NO: 40962 - DNA, 571 bp, Arabidopsis thaliana columbia
  unsure (1)..(571): unsure at all n locations
caagtccgcatatatgaccctgtttagatgatccagcagcctagaatgaaagaccatatatattagtaaaaacaaaaaacactactagttatctaaaacgatagtttagactacacacatcacatgaacaaataaatgtaaaaccagagactaacaagcctaaagtgaatgtaaaaccagcctaatgtttagaattattaccttgagtgttcgtcaagagtttcagctgtcagattctcttcccaagaagattcaagttgacccaagcgttcttgtatatgctttttataagtgtctgcaaccaaccgtgctcgttgatcaacgtacgagccatcaagcttctgatgtgttttcttcatcacaccaataaaagagaagtcttcattgtttgcttcctataaaagaaacaataaacaaaagtgaaatagcagaaatttttttacgagaaattaacacgaaagaaaatatataattaccaaaacatttttaactttgagaaaggagcgtttttatacactataacganatagtaacgtntttatgagcanataaatatgtcacagttttgtat

SEQ ID NO: 40963 - DNA, 812 bp, Arabidopsis thaliana columbia
cacagcaaaatctacattttcggggaccatgaagattgcaatcttaccaaaatcttaggcagaacacgtttagttctatatctcaacgaaatctacattgttacacgcatattcctttataatcttctgtatattcgattacgattgttagaatctttaatcatataatcattctcctcaataatcagtataaaatccacataaacggcatattcgtttcttctacctacacattgacgataatacattccatcaattacaaaaatcatgtaaacttatatgattaaatctagaaataaccataatcaactaaacaatattaaccacttatctatatatggccaatcattatgaactaaacaattttcgaatcattagtcattatcccatattttcgaatcattagtcattatcccatctttgatttgcaacttatactccaagatactgacgaatatctttgaaatattagatccagcaaccctagcatcctttctcactataaatatcaaagccattctcatcacaatccatcactcaaataccgcatttactagcaactaaataaaaacaatggctcaaccaattgcttaccttgatgacatcaagccctacaaaacgtattggagagttcaagtccgtgttcttcatacctggaaaacgttcacaatgcagtttggtgagactttcgacatggttctgtcagatgtgagagtaagtattcattttatttctatataaattgtccatattcccaaatgaaaacgtctattctatactaatattttgtgcttttaaatgaaagggaaaga

SEQ ID NO: 40964 - DNA, 526 bp, Arabidopsis thaliana columbia
aaaactccagccgccgcctgtatttagggttaccggttccggtggctttctcagcaccggaaccggggtcttttgttttgctcttattctacctttgttttattttctctttagacacatctgagagattttcttccaacggttttgaatctgaattttcagatctagatatataaagtctaaaacttttcctttctaggtttttgctgcttgtcttttgtctttttcaagagcagagtcagatatggccaatctatccaaggcagagacgtttctatccgaattttcgcctcagacttctgaaatttcacctgaagatcccgatctcgttctctcctttataaggctctcactccttcgggtctttgaatgttggttttatctcacacccatgcgtgtttaggtagagtaaagggatcagatgtggtgtaattcgttggatcgggtttttttccttgtttcattttaatatgtgtttagtcccgggaggttccatgtactctccgacttagcctctggaagagta

SEQ ID NO: 40965 - DNA, 516 bp, Arabidopsis thaliana columbia
cgacttagaggtctagaggatcaccgaatcaatataaaaagaatacattttccaacttatctcttttttttaaaaagtttttttatcataaaaactttatatttaaaatctggataatgacactattactacaattttgctaagatatttgtttcctttttacgatgattacaattagactataatattggataaacgaattctcaaatattgaattcataattaatgttgaacataaaacataagaaaagtaattaaaaaaagagtcaactcagaataatcaattcgagtctatcactttattccactcacattaattaccaaaaatgttatgaaaatctagatagcgtttcacatattcacagggtcaaaaaaggaaataacaaaaagaagaaaaaagagaaacttctggaaaaagaaaaggaagccacatacgctcttctagcgcattcctatactctttccttctttgtggtcccttttcacttttttaaattccaactttacccttgttct

SEQ ID NO: 40966 - DNA, 587 bp, Arabidopsis thaliana columbia
tattatttggattttctttcactcatatttttggatttcaacttaacaaaacatagggcgtgtctatttgactccacctacccaccctactggagttcgatcccactaaatcgcgttatcccgcatagtagggattgactatggatcggactttgtcgatccaaagatatctaagaaattcagaaaagattgtataaaattcagaaacgattttacgaaattcatgaaaaatgagaaatacatgttttttttaatttacgtcggcattaaaaacgttggaccggctctgtgtttcaccaaagaaattgtttcagtttatgcatgatcttcaacttccatattcttgttttcaattctggaaatccctaacagatcggagctctcctcattcagtgagttggaagattgcatgattatataattactcttcacatccacatatattacattatattcccctataatttcatacaaccctagaaaagaatcttcaagtaatctaatcgtgtcgatgactccactcatttgctagaaaagaaaaaacaaacagacttcatttagctgaaatcaatcatgtctggggtgtg

SEQ ID NO: 40967 - DNA, 833 bp, Arabidopsis thaliana columbia
aaacgaaatatacaaagtctaaaacaacaatgataaactgatagatctgagactagaagcctcacttaactcaacctaaacacgaatgggcgatgagataaaaccatcatccagagacccaaaggagtgagagcctcatgaaggagagaacgagatcgggatcttcaggtggaatttcagaagtctgaggcgaaaatttggatagaaacgcttctgccttggatggatcggccagatctgactctgttcttgaaaaagacaaaagacaaacagcaaaaacctaaaaagaaaaagttttagactttaaatatctagatctgaaaattcagattcacaaccgttggaaaaaaatctctcagatgtgtctaaagaaaaaagatagaataagagcaaaacaaaagacttcggttccggtgctgagaaagccaccggaaccggtaaccctaaacgcaggcggcggctgaagttttagagataagggagagtaaaattttaagagtgagaaaatgacgagatgtgagcttgtaaatactttttgtaatataagtaactataagtaatattttttttgtaatacctcaaattttatttttaatgatatttacaagtttaacaaaacaaaaacaaaaaacaaaatattattctagtcatagcaagtgagaatttttgaaaagggaataaatgtgtgtaattaattcaacggtccaacagtggcttggacctaacactaatgacatttgttcttcttgtaatttttatgtggctgtcttcttgtaccaagtacgtagacaatagtttgattctatttggaatcaaaactcaaattacattta

SEQ ID NO: 40968 - DNA, 504 bp, Arabidopsis thaliana columbia
tattcattgactggtattggtctacattttaacatgtacatgctttcccttaattaatacttaatatataacctctaataaatttctgattcaattcaaattttattcttagataatattctctcttttttgtgtgtgcatatcagcctcagccatattcattgacttattcttgttctatgtaaatatgctatgggacctcccactcatatatatttaggttgaccatttattttacatgcatgcaattgaatttaggggttaatctaaatcgttgcgtatatgaattatatatgattttagtttgtatattgaaaaatgcatcgtcgttctatacataagctagtttagtagctaatagggcaatattaacaaagttgattttctggtttgtagtgtccatacaagtaatttagttaattatctcgtttgttcacctttttgtttcttttttcttttgctagctagttaattgcggatgtaaactacatcttttactaatcg

SEQ ID NO: 40969 - DNA, 587 bp, Arabidopsis thaliana columbia
actggtcaaatatatcaaatagactgttgcatcatactcctaatttgacattgcttcacttaaatgtttagacaagtgaagagtagggtcttggactcttgggagtccctagtctttgtagttcatttgatgataaattcatctacaatcttacaaaaaaaatctttcgattacatgaacaacaatataccaatctttatagttcagtagttctaaaatatctcatttatcttttcaacctaatataccagtacaagctgattttttgtattatcagttctatcaatattgatccctagaattacatccactagcccttatatctttcatttcaaactttccactaagcatattttttgtttgattgttcatgtctttattgcttccaaacttatagcattactaggatatgaccataacatgagtttacatcttaacaagttgcacttgcacacacatttaaacaaaaagcgaaagtagtacaccgttacaaatataattcactcatcgcaaagaacgtaaaacgtaaaagtagtacccattacaaatataatcacacatcgcaaaaccaatgacaaacatatatg

SEQ ID NO: 40970 - DNA, 543 bp, Arabidopsis thaliana columbia
ttagccatttagattttaattttgtttgttttcattatttatgtctgttttaattgaatataattatgagaattgaaaagaataaatatttaattatgtggatattgtagacctattacatctaaacataattacgaccacatataaaacctaattttgagagagccgattaagggcggcaaaaggagaagcgatttccgacgacgacttgagaggcggtatccggcgacgattgttgtttaaatccgacaacgagaggagaagcgagtacggaggaagacaggagagtcgagctgattaattaagggcgactttatgagccgaagctaggagcgatggactcttgaaaggaggttagttattaacaactaagttttggtaatattagtgttaaggaaccgaaatgcatttatgttgtcggcttttgtgtatatgaaagttgtcggaaaatgacggacataatgtcttcttattttaagttgatgacacaatcttatgtatgtcaaaaatgcgattgacggattcttgaatatgttgtttgag

SEQ ID NO: 40971 - DNA, 1362 bp, Arabidopsis thaliana columbia
tgaatttttcagtttagttgatattgttttgttcaggtgatataagcctaaaaattatcaagcagaagatgtgcttagttgcatctgatgctgttcacgtttaaatacttccaactagtatttcaaaccattcgtctaacatatatatatatttaacacatctgtagtctaaattttcttcatttttccagtttggactccgagaaggttgcagcactaaaatctctttttggccttccaagtgagtttagtggtacagacacttttagagaggaaaacattggtttgattgaacagatggtgacactgttgagttcaatgacatcggggtctgatagttccgcaacagctgagatgaaaccctatttgcatgaggtacggactacctcatacctgctttttcttgcatcatcctcttcttttgttgttttcctcttaacactgactttcatattctttttgtggatttgaaggcatctcagtcgttgctgtcgttgctaaaagacgggaatattgatgatattatctcctgcaaaggtgtttttgtttctcctgggaatcttgatatggatgatttggtttctagaaacattgaagatgatctctatcaaagaggacttgaagacaagttctggtgggaatgtccagaaacattacctgagcgtctgccccagtcatctctccctgcgaaaaggaaactaccaactttggagagctctagcaggcgtgctaaaggcgaaaactcttctgttgacatacctacccaaaattcaattcaacggggaatgggttctgtatcccttcctcctgctcctacacgtagagatgcctttaggcagcgcaagccgaataccagcaggcctccctctatgcatgtagatgattatgttgctagggaaagaagtgttgatacagctggtaattctaatgcaataaccatttcacgagcaggatctagcagtggtagacctccatctattcatgttgatgagtttatggccagacagagagaacgaggccaaaatccctccaccattgtggttggagaggctgttgtgcaagtgaaaaatcctactcctgctagagatactgaaaaagttgcaggtaaacctaaacaattcaaagccgatcctgatgatgatctacaaggaatagatatagtttttgatggtgaggaatgtgaaggacctgatgacaagttgccctttcttcagcccgatgagaaccttatgcagcctgctcctgtcatggttgaacaaaactctcctcactctattgttgaagaaactgagagtgatgcaaatggaagtagtcaattctctcacatgggcacaccagtggcatctaatgttgacgaaaacg

SEQ ID NO: 40972 - DNA, 628 bp, Arabidopsis thaliana columbia
caatatctagtgcatacgacaatcatttatatataaatggatataaaacaatccatagatgatgacaacatactgtatatgtataattcaatagatcgttacatccactttgcaaagtgcaagcttcggttgtatgacatgagccacttgagttgaaatgctcaaacttttattcctaataataaattgcacaaataaataatatatgatggaattccgatggatcaatatccgatgcattataatttgatttctaaagttattctgaagttattttgttcctcaaaaattgcgttagaaatagttcacgggatgcgaacaaagaaaaaatcatgaaagagtgcatccgcatattaaccaagtatatattaaataattaaagcttatgctgataacattagtgatagtttttactatgattaaccaagaatatcaaaaattgacattttaataaaagctcttctcaaaaatatcaaacttaagttttgtttttttcaaaaataccatcatttgtttaatgttccacaaataacatttaagttttggtttttcaaaaataccacaaaagataaaataaaactttcaactttcaaaactagaccataaacctaaatactaaaccttatct

SEQ ID NO: 40973 - DNA, 1077 bp, Arabidopsis thaliana columbia
  unsure (1)..(1077): unsure at all n locations
acagctgaattcccgagagatagaccgagtatttcgaaattactacagaacccacaaatttcacatgtttaattccgaataattgaaccccgatcaatatgatatttccagaacatgccgatccccagaaaaaaaagaaaaaaaaaaaagaagaagaagcaacagacctcgaatgcttgaaccttaaacccagaacgaagaagcgaagaagctaattcgaagctgaaagaatcaagaccaacaaacccaaccacgccactcattttctccgatcactacaattctccgatgtaatttacagtcaacaaaccaatttcatatgcatctctctgtctctctctatatatatatatatgatactataattccccacattgagattaatgtaacgttacatcgtgtaggctcttacgtggaagtccatatccaacagccttttagcctttaacttatctgccaaaagcaaaacttttttgatcaaaaagaaatagtaatcgtacattatacatatttattaaaaaaaaatgataagaagttgtattgtgttaggtgagaaaacatatatgatatcattccatttaaggtaccatatcattacactttctatatgaacaaacatctaaactcttaaaattggcaactcctgtaataataaatgtaacgattttctaattaatccagagcttagtcttcgtttccaatgcataatgataggatcagaaactgattatctcgaaaaatcaggctggtgagctggattaaattcaaaaaccaaaaattataaccaccttgtgtacatatataaaccacacgcatgttttacaactttcacatcttcacaaccaactaaagatagaaagaacataatacaaagagatatttaacgttttgaaatggaggctgttagattcgccgtcgccgtcgttcttgtattttgctacgttacgtcgtctaatgctcagatgacttcaccaccgagcggcggtgcaggaggagacgcacactcactgccgtgtattcagaaactgatgccgtgtcagccgtatcttcacttagcgacntcccgccggcgacgtg

SEQ ID NO: 40974 - DNA, 1091 bp, Arabidopsis thaliana columbia
atccacatatggagcttgattctacttatatctactcaattgcaagtcgcgaggattttgataaaagaaaagagcgagatgttgatggcgcagtctggcgaggaaagaagatgacccatacagtagaagaggtggggatgaagggtctagaaaaagggatcgtgaagatgatccaggctttaggcagaggggtaaaatgcgcgagaatgaaatacgcagcaaagatgatcaggttccttccagaaaacatatggatgatgctggtatgagaaatatttatgaaccggatgatcacattaacaagaggaggaaggaatgaagaatacttgagaagaagccggcctgaaaaaaatgaaatctcatatggtcaaagggaatcaatgagccgcgtgaaacgagaacgtgatgataggttggagcatcaaaagagagatgtccaacataagatcagagatgattttgacgaccacggttctctcaggcagagagatgatatctatatgcagagggatggaaacgagaggttgagggagcgtgatgttttggataaattgaagctgcctcacgaggatggtatatcagcacgaggaagagagaggcaggtggcagtaaggggccacagaggttccgaagatcgatcatcaaggatgaaggatgagtataaagcttctgacaaagagcatgtcacgaaagatacattaaggcatgctaaacagacaaagagaagggactaccctggtgaagaaagttcttcccatcatagaggacatgaagacttctctgcacggacagacaacatagttaacaatgagaaaaaaccaaggcaggagaggacaggtgctaaaattgataagtttattgatactttggatggccagcgattgcaagacagaaaacataaagattctagacgaaagattatagaacagcgagagggcacagaatcacttagcaagcaaggggagcataatggcagttccgtagtgacagtatgctccatcagcctatgatcacacaatgtatctcatccaagttttgcgaactgcacacagcatgtttatcgtgaatgccatactatccgcaaagtctca

SEQ ID NO: 40975 - DNA, 628 bp, Arabidopsis thaliana columbia
ttcttactattttgcagttctacaatattactaattggaatattatgtgagatttcattggctatatacttttgttatataatttgcaccgggttaatacggtactactactattcgatcaataaagcaagtagtttaccaattatgatactatatctagttgatttagtattctttgttgatgtataaatattacgttaccactatttatcgggtctctccaccttagttttctctcgctccggtgatagtgtggttggattccggcgagcttctcttgtggaggcaaatcacgagatctttttggctctctggtttgttctttgcggttagaagtgttgtggtttgttattggtggtcaacatctctcctccattggtgggctgtagagggtggcagcttcctcagccatggttatggttttcccgtgaccatttttcttcgtcccttcgcctcgtttttggttgcttttaggtagatttttgttgtctttggtgttgttggtgtcggttctttttatgtatgcgagaatatgggtgcattgataaggttaatagagtgttgaatgtatggcagcaaataggtctaagtggcatcgtacgtcattgaattagtgaaaaagtcatga

SEQ ID NO: 40976 - DNA, 528 bp, Arabidopsis thaliana columbia
gggaataaataaacggaaggtaatatgaaatttcaagagccacaataaaggataagctgaacataattataatcacaaaaaaattgatgtagagaagcataacttgcctgaaataatactctacttgttttaagactctatcccttaagtcgagtttttctggagatagtattggaggaccctggtttacagggtatggagcaaagcgtggaggataaggacctcttatagctccagggggtggacccggcaagtagtatacaggccctgtgtcaaatgaagaaacaaaaacagcactcatgcatcaaaaaccgacagttatcctttatcctaatgctaaatatattcaagagcaacagaattaaatttttatcaactactctcagccagtccctttaaacacattgacaaagaatcaatatcttaccaggaaagcctggacctggaccaaccaggaacccaggagctggacccataaatggaggtctccgaaatttcttggtccagaccttgtggcatgtttctggg

SEQ ID NO: 40977 - DNA, 443 bp, Arabidopsis thaliana columbia
catagctgtttccgggataaattgttattcgtcattttaattactttcgtttttgttagctaatacatctaggattgtaaaaattaaaactatactctagggaaaaataaactagttttagattagggatagaacagataagcatcggttacgaacatgacttctctctgttaatcaaggaggaatctcttatgaataccaaatctcattgcaaatcacatagaaagtatccaagcttgattatgttggtatttaaattttactttatcaatgacataataatgacgtaaagaagttgcatctctaaagaacatgtttacgtgtggttggatgagccaaggaactattgtaacaatactgttgtttgttcctaaacattactaatacttgtttccatagagaaccaaaggaataaatttgttgaccaccatctcaaagaatta

SEQ ID NO: 40978 - DNA, 375 bp, Arabidopsis thaliana columbia
gtcgactctatctagaccacggccatgcaccaccacccatagaatcaagaaagagctctcagtctgtcaatccttactatgtctggacctggtaagtttccccgtgttgagtcaaattaagccgctagccactcctggtggtgcccttccgtcaattcctttaagtttcagccttgcgaccatactcccccgaaccaaaatttgattctcataagtgcacgagtctatacacatcgctgatcctgcgcatcttatggttaactagagtatctatgcttgagccccacttcgttcttgatatgaaaatcttgcaatgtttccattgtcgcttcataatccagattcactctgactatgaatacgaatccccgactg

SEQ ID NO: 40979 - DNA, 649 bp, Arabidopsis thaliana columbia
  unsure (1)..(649): unsure at all n locations
gaggatagaggatnngctctttattcatctatgcagcttataaagcgtatgcgcaaaagttagaacttgcaagaaatgtcataactgcttcctttttccaggacgaagaagaaaatggaagatggatcatcaacagggaaaattcaaatagcctcaagagtggagaaggaatatttcaagcctacatattcagcaagcattggggtagaacttgaagatggacttttcgatggtaagaaaaacttatgaagtcaatgatcttttgtggttatgttttgatgtagcttgcaaatgtctcagctaaaaatttattttgcattgcagattccctcgagctggctttgcagtttggaatgattatgatgtttgcttgtgccttccctcttgcttttgcccttgctgcagtggtaacgttacttctagtactattttctcaatgtcatccttagcttttggttttcttgaaaactgaatgtatgtcttacacagagcaatgtaatggaaataagaacaaatgctttaaagcttttggtgacacttcgaagcctcttcctcgtgctgctgaacaattggagcttggttaacatctggcaggtcaatggatagcagaaatacgatttatacactgttttactgagtgaatgagtga

SEQ ID NO: 40980 - DNA, 532 bp, Arabidopsis thaliana columbia
gggagttatcttcctgcgagattctctctacatcggcaggtacaaaaacaactcacacttttatttaaatagtaacgggtgagtccaagattagtttgggacttgcggttatgttagaaccatacctcaaaaaactgtggaaaatattaactagtcattctctaattctcagctcactttaactcttttggtttcctttctttgcttgaatgatgatcccagcttgatcggggcaacggtaataacaatcgggttttacacggtaatgtggggaaaagccaaggaagtggccttggtcgaagatgataacaaggctaaccacgaggaggccaatgaagctgaccttgattctccatcgggttcacagaaggctcctctcttggaaagttacaagaacgatgaacatgtatgagtatcatcaactagtgaagatcacgctatatatatatgtgtgaaaaaattcatatgtgaattgtctttgtaatttatttgatgagacaaatgtgatctttaattttaggatccaagtgtt

SEQ ID NO: 40981 - DNA, 480 bp, Arabidopsis thaliana columbia
aataaaaacacttcctttttgtctatctcccatatatgtaatggtcaacaagtcaaatttttaaaattcattatattctctgtacatgaaaacatttagtaatgtttctttttaaaaaacactgttttgatttaatgtcgttagtaaagtttattattttgatttctttttaactttccttaattatatctaaatgtgtcttctttatcgtttaaaccacactagtgtgtgcgtgtctccttcactttcaaagacagtctctttccccaaagagcggattcaggattcaccatctcgatctgtgtccaaagctcctatctttcttctttcttccctgaagaattttctggagcttctcaggtcaaatctcaaatatttttttaacttaattttgttatttctatcagaaagtttcgattttaatgctcatgcttgtgcatccgcgtacctgcatttagttttgtgtttgagccgccaagt

SEQ ID NO: 40982 - DNA, 494 bp, Arabidopsis thaliana
catcaggaggacttggcacagatggcgtaggaggagtgggagtaacatcaggaggacttggcacagatggtgtaggagttggaggcggtggtgaaactggcggagggggacttggcataggatcagtaggaactggtggagtgggacttggcacagaaggtgtaggagtcggaggtggtggtgaaactggtggggtgggacttggcacggaaggtgtaggagtcggaggtggtggtgaaactggtggagtgggacttggcacagacggtgtaggagttggaggtggtggtgaaactggtggagtgggacttggcacagatggtgtaggagttggaggcggtggtgaaactggtggagtagggcttggcacggaaggtgtaggaggtggtggtgaaactggtggaacaggagcaggaggagtgtatccaccgtcatcaccaccactgtcatcgccgccaccatcgtcgccaggggaaggaggaccacatatgggt

SEQ ID NO: 40983 - DNA, 775 bp, Arabidopsis thaliana columbia
catttttgtcttataaaaactgaatagtgtctctccattaaaccccaatctcagaacacaaaacgaaaacaaatataactctaaagaagaaacaacacatttttcgaatttttaaaacttgcttaccataaaattctggattttatttatccagtctaaaatctacaggctgatcatagtagcctgcttagggatttgatgagtagtttaaggttttttcttgtggcttcatctcctgtgaatcccagaatatctgagcttatactctacaatcaagaaaatcaaaaaccaagtctttgttaacattgtttcttccaacttgtcaaagctggtattgatagaataagaagaaaaaaaagtttacctcgacgttcttcaaagtataaaccagagtgtagattgacttctgtatgagttctgtattctcaggagtcataattgacgaattaacctttctgcaatgtaaccaaaatgaaaattatatttttgctgtctactgcaagaatataggttctcataatcacagttatcactcagttgatcatacgtatgtaagtaaacgagcttttgcatatatgtggtccaggaacatacattaagtgacagaaacagtaggctagcagaagataagtagaggcaacacaagataaattattgaaattttaagacaatagaggaaagattgaaaagcactgatgagcaaagcagttaatttaacatggaacccataagataagacacatttatgcatagatatgtatgtgttttacttttt

SEQ ID NO: 40984 - DNA, 992 bp, Arabidopsis thaliana columbia
taacatggaacccataagataagacacatttatgcatagatatgtatgtgttttaactttttaaccatcatctcttgttcagaaacttaatccacaaatagagtgttgaagccacatacgagaaattgaagctagtgtgcttatatctatcgtaaggtctgctttcatcatgatgcagaaagagttttgcatttgcactatggaattcaaaatattcataatgatatacagtcgatatgccaagattgttccactaagagctattacctcaaatcgtcagaagcttgggtaaggcttcgagtaagacactcaacttccttgagcaagccgctatcacgaaactcagagagcaaaggttgagcatcttcagccatggcttgaatctgtgacatcactacatcaaaacccaacgcataagcaggagaatacatttttttccaatcttgaaattcacctatcgattctttttgaatactgtaaacaagatctaaacaaagaccaccaaaattactcatatcacctttttgagcaatggccttgcttcctcaataaccgaagcagctctctcagcaagcgaatacgtattggcaacaccaatggcctcaacttcgcgtccaatacgagtgaaaattccaactaattcatctaaactaactccttgcactccttttattgtctgcctatcacaaacgatcagaccttccttaccacattcaggatgcagaggtcctactgaaggttctggtatcggattcctaggcataatgtcgatcatagtttccattagaagaccagactgattcacctcaaccaatgaattcctcgggataataatcttatcatcttctatctgcaaaacataacacacgaccctcatttcaaaaacaaatgtactatcaaaaccagattcaaagtaccagatcatacctcagcaacagcttcaatattcttcaaggaaggattacacggataatcgtaccacagtaccccac

SEQ ID NO: 40985 - DNA, 1262 bp, Arabidopsis thaliana columbia
gaggatgaggatcccctgcaggtttaactatatgaatgtcgttggaagtttctgactaatattcttacgacatacgagttttcgatgataatttcatcaataatttacgacaaatttctgacatagttagttttggatcagtaaactctaattaatttaattttgttagaaattagtcagagtttactttatttacgataaatttttgacatatacagttgtcgaaaatacataataccttttgtagatatttgatttcgatctatctactttcataattttttcttgacggataatttacagctaacgaatttaattttgtaggaagtgagtcggaagttttccatttgcgataaatttccgcaaaatatggattctttttgtagtaatttgatttcgatgtatctactttcttaatttttgttttaagatgatcatattattttgaatttttttatatggtcaatagagtgggtcttgggttcattggataacctaattttctcctcttgtacatctcagatccaaagaatagtaactaaagaattttaacaaatgggcagaagagtctcacctaattccttgctggattgaattgtcccatcaagaatgttttctgcccaatccgtagttttagaccaaagaaataaaaataaattttatgtagattcaactacatttttatagattatatactttgattcatgtacattttttatagattatgcataacaggatacataaaggcgaaatattcatttattatatataccattttgtatggtgagattttatctcctcttaaataactaaaatagctatacgggatgagcgaaagagaatctataaaaatgtacaatgaggtcatgaactgatgatggaggtaataataacagcattgacaaaaaaaaaattgcacgaatcaaatattttcttaatttacatgcattactatgttccaaattactttgaggttctacgtatctacagaatgggaaaagaaagtcagattttgaatatgagcaaataaaaaatcagatattttgtagaattataaatattcaaataataattaaagtcaaacaatttggatcctcttcacgtcattctaaaaccctataaataagcacatcttctcttcatttcttttcatctctctcttcaaactcaatcaataatccttaaaacactaaagaaaataccaatggcttcaaagaactcaaccgctcttgctcttttctttgccctcacaccttttttca

SEQ ID NO: 40986 - DNA, 541 bp, Arabidopsis thaliana columbia
tgtatacctcgctttcccctcagtgacaccctcaaacaagacacagaacacaacacccccctgatttactacaccccagcagttaaagggagccacttatcatttagataaaatacatttcacacacaagaatttatgtggagaaggtacatatgttagtttgagtgagtgaaaggtttgaatgttgagtttttgattgaggggaatacgaagttggggtgaagtgatgggggtgtagtttagatttgtaatttgatgtagaaggttgaaatgaaagttggatgaaatgggacaaaaaattgttgttttgagataattgcttgatgttagggaatgaggtaaattgagttgttttttgtctaaaggaagtgtggtgattggaaaatgaccaaatgcgaattgtacaaaaatgaaaacttgaagggattgtaatatttattaaataaataaataagttgtgtgaggacggaaagacgaaaatgatgtagggagtgtataaaagatggttaggtgaagacttgttgtatgaaaaaaaaaaaag

SEQ ID NO: 40987 - DNA, 575 bp, Arabidopsis thaliana columbia
tgtgtgtcttggataatttcatgggaatttctacaaggagtgaacagagagtgcagatgcgaattgccacaaacagataacttttactggttaaagttgcaacctcaagttaagttacagaaatgcaacaaagagtcctctgaaggtcatttcattaaccgatttcaaatcataaagcgatcaatatcagctgatacatatctaagataccaaaaacttaagcttccctgagttttaccttcaaagactactactactaggcagtgggaacaccaaaataatatactttcccatggttagagacagattaccctttacaaagcatcctcgtgataaagatgaagccctaatccaaatcttgcacacgcacggcgaaatgccattgcttccgccttttgcacagcatcaccatagcctttgtcatctacagatgtggtacctgttgattccctaaatatcttgacaacaccaaaaaaatgattattagcaaatgatttcagcgtacaagttacaagcaaaacaatgagaacataatatgctcaagaaagtatgcaaggaagcaaaccactagcata

SEQ ID NO: 40988 - DNA, 531 bp, Arabidopsis thaliana columbia
aggatgtttttatgagcagaaaatatctttctgcttgtacattttttgttttgtgtagaccatgtgaattcacctaaaccaaataactttcacaaagctttatatgttgaattcaataaaattaagactttgtaaaattctaacttggtcaaaattatacctgcgcaaaaaatatagtaaccaaaatatggtggtagtataagaaagatatatgaaaaagagaaaacagatagtgtatatatatatttattaatcagcattacataaaaacatgtctgaccgtaatcaaattatttttcgttttattcactttgcctgtctaaacaacacacacaaaattggacatcatagaaattgacagagacatcgatatttcttctttttttgctttaaatagaaaagcttagttcaagtagtaggcgaagagagacacaagggaagctccaaccaaagagccaagagccggaacagctacggaggctccacttgcggcgggtcctggtgcaggtgctccgactctgcagccatgac

SEQ ID NO: 40989 - DNA, 589 bp, Arabidopsis thaliana columbia
tcaagaatgatgaaatccaatagaaaagaaacaaaattgagaagaaagagagtctcaatactgaagtagaattctaaacagtaaccaaacacaaacccagaaaattaagaggtaaatatctggaaactttaccagaaaaggtacctaaagaaggcattgggagctcattcagaccaggaaaacgaaaaaggaagaaactttgaaacactcttctctgcaacaccaaccaggatgtcttgtaagattatacggaacaatacattaaggaaatatgttcctcttactgtctgagagaggcgagagtttttgcaggaatttgacagacaaggataagccacacaaaaagcaaatttcaacgaagatacttgtgtctggctttgacgcagcaaccagggaggcgatggataacgagacccggctcgctctaatgacccgacccggatcactgcatattgggctaatgggccgcgtttcatagcccaattcacacgtggtattattttctctggcctctccaacaaggcacctaacgtggcccttacttactagaccttaataactcggacaaagttggtactcttgttggtgt

SEQ ID NO: 40990 - DNA, 584 bp, Arabidopsis thaliana columbia
gctgaagatacgaataagcaaaaactactcacctggactatgcttcctgcctttgttccaaggagtgttccctctatttgccttagaaatcctcatccttctcaacttttctctgtcatccacttgttcttcgccatcatcagcacttccatttgaggatttcgaagaagcagaagacaaagaagagctccgttcgttttctttttgagccggatacttggtttcaagagtggccactgcagtaataagaacttttcctcttcggacatgactatgacccgtgtaaaatttcaaattcttggagaaacaagactgtctccatggattaggtagacttttagcatggataatactctgagcccccaatggaacaagatgagcttgaaatgaaggttggatagtagcaatatctgcaaagattaaaccaaagagtcatctccattagctagtaaacattctctagatactgtgcgaatcactagtcttttcttatacgcatttagaccaagattgcaaatgcaaataattgatactcaagaatgatgaaatccaatagaaaagaaacaaaattgagaagacagaga

SEQ ID NO: 40991 - DNA, 1031 bp, Arabidopsis thaliana columbia
tctttttttggcacagaagtgaagagacaaagcgttctttaggtttctagacaaagcgttatttatgtttctaaccaacacttttgttctgctttcccaccttcagactcggagcaacagctgccgcctacacagcagtttttagtctcttgaaagttaaaaaccgagaaccagtaagagcaatggaacagaaagaatgttcttcttttaaaaacttacagcgcaagtgattcccttagcctgtaaaaagtcagttagttttctattaaaaaccaaagcaagaaccagagcaaaacaatcgatcagtggtttactttttcaagctttccctagtgagttgtccatcttgcagaatgcgttcaagcgaatatctctctgcagtttctttttcacttcggacatgagctaaatcctcgcttatccaagctattctttagtccactcgtatccaaaagcttcagagattcataatatgtcaaagattagacacaaaatcttgaacttaattcagtaaagctataaagttatgtacatatgtataccgaaagagccaaaagcaaaagagttgcagaagtggaaactatcagccatcagcgtcattagaacaatagtgtctccaagatcgtgaatcgaatagctctgaaagtttcacaatgaggaaaggaattaatgtgagaagcatgatctgtttccacacttgcttctgcagattgaaaaataatccgaagaaggtcatatatctgcagaaaccacaaaacagaatcaccatcatgttacgtactcaccaagtctctttaatagctctgggcttggcttcgttggattctgtaggaagttacacaccagtttcatgagatcatttaaagattagaggctagaaagagagaagtcagggacagaacaagttgtgccattggaaggatgcatgggcgttgaaacacagagttacattgtcgaatatataacatggagtgacattaagttgataaatacagagaaggttgaaggggttatttataaattaatatttt

SEQ ID NO: 40992 - DNA, 612 bp, Arabidopsis thaliana columbia
tcacacaatcccaagtttttttccatatatataacacaaatatcaacgtcggaaaggttatacatttgacgagtacatgattcgaaaagtagtacatatgtatctattgtttaatggctgttgtaaactatacatctgtataaaagcttatattaatctgtaggattacatatctagtttttttttttgtggcaaagtaggatcacatatgtattcttagagctcacatgaatcagatcgaccaaacattgcatatcgattgtttgcaacattttcatacaaaaagtctctcacaaacctgcaacatgtcaaaagaaaaatgcttattaagatcaatcacatcgcggcgtttccttctgctatttaaaccttaagcgagaacttacagaggagcaaactgcaagaagaacgcaagctgtggaaatggtaagtcaatgtatttcatgatcttcaaaactgcttctgactttatgtaagacctgaaaaaacaaaatatatcactcaattgatgccctgcaaagatttttacagttacatatcaaaacataaatgttactgtcaatgtacctatcgttttcgactagtacgacactcgatatatcgtcaggagct

SEQ ID NO: 40993 - DNA, 555 bp, Arabidopsis thaliana columbia
atattcggcaccatctagctttcaactccaaaattatgttaatcttaaaaaattgttctctttttcctaatccgtagattatttagaggtgatgtgtcatagtaaaggaaaaaaatatacatattcggaggcccttaagaaaaaaacatacaatatccaaataaatgtattgttaggtattaacaaaaagaaaaaatattgtaagatcttacaagcacaagcagcaaccatatgagttgcatctaaatttgctatttatatggaaaaaagaagtttctccaaagttgtacgatatcagctatgtattttttgtttcgtcaaaaagttgtttattaaattccacaaagttgtaccaacagtgttaaaacttaagtgatcgtagtaaaagtaaaacagaaatcgtatgaaacatcatggagctaatcttgtatgacaaaatagtatagagttctcttctacctaaaatgttatgttgtttacagatagacctcagaaaaagtaaaacaacacaggagtttcagaacctatccaaaccaacagcagtcacggtttagt

SEQ ID NO: 40994 - DNA, 577 bp, Arabidopsis thaliana columbia
aattttaacttttaatccctctttcatcttcatatgaattggccatcaacgttcttatataaaatgacattttcaaaatcttgaaatacatcatacatgtattttgaggttttaattcgtaaaatagctcttttgaaaaacttaatttggcaattaacatctctttgaagctctaaaagaaagtaacaatttctagtaaacaaatcaattaacccttttattctgaaaattaaaatgacgataatagtgcataactaatatacctatatgtgtcgtcagtgaacgtttatggacatttatagacgtacattacagatcaaatatgtgtctaaacgagtcaaagcacgtcacattgcaacagtttttgcatgtgtgtttctgttaaattctacgatttttggaaagatcaaatccgtcatacactgatacacattacagaagtgacattcccatgaataaatcccaaaaatgatattggttttttttgtttggtataattaaaattgtatagtatgcaagaaaacctaaatttcggacacttcctcacttgagactatgtaaatgtgaaaacaatttg

SEQ ID NO: 40995 - DNA, 458 bp, Arabidopsis thaliana columbia
acgcgggactctgtatcagtatgttgtggtccggatttcttttcttttcacacgttctgttgcagcagagactagttagagatttttacaaaattctaaatgaagtaagcactcaagaaattccagatggtttaaagcttccagagtcttttagtcaactggtttcggatatgaagaacaaccactatgatgctaaaacatttgccctcgtatttcgagctatggtacattctctaatcttcaataaaagcttaaattgtagattgatccgaaacttatatttgatttgattactctttttgaacaggtagagaagtttgaaagggatttaagggaatccaaatttgcagaactcatgaacaagcactttgctgcaagttcaattccaaaaggaattcactgtctctctttaagactaaccgatgaatattccccaatgctcatgcccggagacagct

SEQ ID NO: 40996 - DNA, 416 bp, Arabidopsis thaliana columbia
tataatatgtaggatcagaaataatttcagattagacaaagcgtaccatggctcgcagcacaagagcaaatgtttttgcatcatagtggttattcttcatatcggaaacaagttgactaaaagaatttggaagcttcaaaccatctggaatttcttgagtgcttacttcgtttagaattttataaaagtctctagctagtctctgtagcaagagaaacatgagataaatgaattcacaatatgaatagatactgaaaattagccgacgacagaaaccactcacctctgaatcatctaccctaccaagaagacgtggacctatccgcctcgctaaacaatctgaaagtaagaagcaaagggggagaaactttaatgagagggtcactagagcactggggagatacatggcagctgat

SEQ ID NO: 40997 - DNA, 2172 bp, Arabidopsis thaliana
tgatcagttcattatggatatgatctatggctaaacacacaaactattacaaaaatgcgacaacatgtacgaaacagactcaaagcagatcaacatcaagaaaaaaacttctccggcaaagataagttcattttgaatttttgagtttacaaccgatcaagaagaaaataaaaggatctataaaccttaaacaaacttagtttggtttattgagttttatttttaaaccggaaacccccaaaatttatactaaaccaagaaaaagaaagcaaaacaaaaaaaaagccacagccaaattgatttttttatagaagaaaaaatcctcacttaagggatacttttcgaagaaaaaaaatcatgatctataatggctaaaacttaaaatgaaaccataccaaatcaaaacaagttattttgattgcaatacggtttatacaaaaaaaccgaaatatcctattaaccgaaccgatagaaaaacgttaaaaatctccccaacttcagttttgtcttatgttatcctgagtggaagtgttcaaattccaaagatcatcgtcccacacaacatcattatacaaaactccatagtttttctcaacgaactccacgtcccaacatgaaggcaaccaaacggtgttccacgtcatcagctcgtcgaccacaccatctcccgccttaagcctcatcccccacaattgctcctcctcctccatcgccgcagccgcagccaccgttgctgctgctgtcaacgcatccaccacaacaacctccacctccttctcctcctcctcctcctgtacttgtctcttcctctccttcttcatggatgtgatcaatgtatgtatgaatgaagggagagaagcgctatttaaagaggggaccggacgaagaaatgagttttgaagagaatgtgtatgtatggagacatagggttaggacatggaagagagagagagaattcagttgcttaatcacacaccatctgtctgttcatttggccctacgtgtcctccattaccttttttggctacaaaatatctttgatgagagtggttcaccagaataataagtctcgagttttttctttttaatgtgttgaaataatcaaaatgccgcccaaaaggaattgaaaatatccacaagtaagtacctattgtttgatttttccaatttaatttttcttctgttgttccttatgatgtaaaagaaaaacagattcgtttgagtgctttagaaagtgggaacggatattaaatttttagtggaaatagtggaaattcccacctggaccggaaatagaccaaacgtacatgagaaggagacaaaagtgtatagtttggttttggcagaataaaatttaaaaatttgtaatcgtggaaaggacgagttgagtttgtgtgtatccgaaggggcaagtcgtatgtggacctttttctaccacagtcacacgcacacgaccatgactccatgagttatcatcaatacattctttattttcttgtcttcactttcttttggaatacataaatgtttccatttaaggacgtatatggccggtgatgaaataacagggcttgcgtggtgcaaagtctgtattgggccaagtttcatttttaaagtagtgtgagagatatactttaggatgcttctgggaggctaaagataatcaatgagttttacatgataatgttgttttttctgcatagattttgtaaaccaacaaacttcagagttatatctgtatgtcacatttaaacatcactgtcttttgaatcaacctaaggtcacaacactcgagcataatctaccaatactctttagcatactcatttttccaaacctatgaagtaccaaagaaaacatcgttatccttctttctgtgtatgaagcaaatacagttgcttttattcacaaatgacgacgtggcaactacattaagtttaagggcttcccttctgctgctactgtgggtgtagtagccccataagagacattcactagttgcgcagcagcacgagcagctgctgttgcacgatcagcgctagctagggcagctcgagctatctccattacatcagtctgattccgtctagtatcaggaggagcttgaaaggctgaagtcagcttagatgatggcatgcttttgctcactgggttttgagcttgaagcttttg

SEQ ID NO: 40998 - DNA, 1048 bp, Arabidopsis thaliana
actctagagctccacctccgccaccctctgcatcgaatttatatcctccgccgtattacagtacttctccgccgcagcatcaatcctatccgccgcctcccggccattcgttccaccaaacgcaaccgtcacagtcgtttcacgggttcgcgccttcgtctccgcagaatcagcacgggtatggttatccgccgccgacgtcaccgggatatggatacggttgtccgactacacaagtgccgccgaagaataataataataaaccagggcttgggcttgggcttggagtgggagctgggcttctgggaggagcattgggtgggctcttaatcagtgatatagtatccgacattggttttgatttttaacctttttaataacttgtgaaaattaagaaactccttttttcctgctttttttttctttctaattgtttgtcgtgttgtcgataattaacaaaataatatctacaattttgtttaccacttaataatcatattagataataataatcactgagtaaattaatatcaatgtttacaaaatctattgtatatgttatttatcggttttattttatccctgttatgtataaaaataagattttcccatagaaacaattataatttgttgaataatagttttgctcttgcttaaacaacaaataatcatacttgttaaatcaatgaaattcagctgttaaaaaacaaataatcatatacattgttataggttattataaatagacaactcataatttgtgagattgtatattttaaaccatccatgaatttttaattattttactttgatatgtaaaaactccacttgcgtaagaggtgaagccttctggaatacaagtctgataagaagagatgagaaaaaaaaaaaaaaaaattagttttctatagtctactctaaatatgcaaatacaagcacccaaaaacatgaacaaaattttgaagaaaggagtacaatcaaatatgcaaggcatgattttttttcattcaactctaagaaacttgcattatatatgtgataaattcac

SEQ ID NO: 40999 - DNA, 914 bp, Arabidopsis thaliana columbia
cggatgaaatcatgagtctcgttgagtcttcttcaccgacaatgacgacgacggagatcgaaggaactaacttttccggcgaggggagttttagagtgaggtttatcgacgacccgtacgctatgccggtggttgttcagtcgtcttccggttacatcacgatcaatgtcaacgaagaaagctgtggtccgtccttttcagacagcgactcttccgtcatggcaagcgtcgacgctagtggtctgttcggttgctgtttcgaatacggaaacgagaaaggcggcgcgtggagtacaaacgaggtgagagcgagtgagtatgagtggaacgacgatatgttggcgaggtttctaggcgaagactgtgtttgaccgttttgtcgtattttcgagaaagcatgatatttgaaggtagtttggtcattaacttggaaggtaattatggtgaaaaaaggtgaaaatgatttacacgtttgttaataggaggaagaaaaatggaatatcagtaaatgttagtagtagagtaggtctagttagtagttaagtggtttaatgtgaccattttggtaatttcgtcacactgcggtactaatttctctaatatggttttattttagggtatattttttaaatatgaaaactactgaacccctaagtaaaatgaatgctctatttacaaatccatccttagatttttacatgtgttatcatcatcgactcatagtctaataatgtacatggattatttattgggcctacttgaaggcccaatagccataaagattagaagatcaaggcgtaaaaaggttccaacttcaagagatgattgaaacagttatttgcttgaacaaacgaaaatgttatggtaaatagaaacactcctttattctgtgaattttatttagccatagatga

SEQ ID NO: 41000 - DNA, 885 bp, Arabidopsis thaliana columbia
cgattaataaatatgtactttaattaataagactatggtgacatgtcccagtcctatggctcattaacagtttgtatacttttgaggaggcaagacgtggaaaccgctcttcttctctaccaaaaacttcttcttccttcgatgtctctctcatctgttacatatcacaatcttttgctttaaattgagatccttcttcaaagccgtatctctttctctagtgtaattctcctctgaaattcagccttagttcgtctctttcgttctgggtttctctgtaattgtagcccaattccaatcctgggcatgtatttcaaagtgtttccatcttcttttgtcaaagttgaagactttgctcgttttgaatccgtccgctagtagaatcttcttctttgaatcgattttgatatctctgctttatgggtttccacacttttgccagcaatgtctaagcttccaagaacatgcctttgactagattttcccggtaaagctttttgcttttacttcttatttcctggcacgagaaattaatgggttcagttgatgaggttgagatatctaagactagggtttcatgtcctcctgctctctcaacatctcataagattctcatcagtgaagagaaacctaggagatggtccgagagttcgttgcctgatgtctctaataggattaagcttttgaaatttggttcccttctgctagactcaagagaatggctgaggcaagagatgaagtttcacgctctgtcaacagctcaagctctagcagccacgatgtggtgtcttcccggaaaatcgagtgggcttgtttgatgaaaatgggtaagcaatggctacagaaccccgttgaacatggttatgtgtgtgtggatctatgtgg

SEQ ID NO: 41001 - DNA, 740 bp, Arabidopsis thaliana columbia
agctacttcatttgaatcacctgaatcaaatttgatatcaggacgagatgttgttgaggagggagtccaagcactagtgcttttagggccacctgctgtcccatcaggtatggcttcaatcctggctggaagagcgagcaccaaatcatttctcgcagcaagctcttcggttgtaaggcccttaacctaacaatgtatagattgttaccgagtctgaaaaagttaaatccttcaaaacaatcatataacctcaaccaagctactgatataactagaagcaatgtaaggaagctaacccgcttgacagcaagtctttgcaacttgggaacttcctctgacaatcgtgccttggtccggcggatctcagcattcattgcaacagcagcagccctgtttttctccttcgtaacaagttcagctttctgcaaatcgaaaattttcatgaacctcaaaatattctcaaactagaaactggtaaagcattcaaaaagattttcattcccatcacgaaaactcgatcacagtatacaaaatcaggactaatcgcgacctattttcaagttttttgactgaattggactcatgcatccatttaagtccggaccggaaaaatatcaaactctatgttcaacattgtgatgcaaacagaaagaagagaaataattacctcgagagcggtctcgatttgggtttcgaaagctccatagagacgagcaaaggcatcatcgcaggagatattg

SEQ ID NO: 41002 - DNA, 1047 bp, Arabidopsis thaliana columbia
gaggatcccctgaagagacacaaaggttaagttatggttttaggattcttactttaggagggtacgagggctagaatctggtttcttatgattcccatgcacttctgaatctctgtatagatcggaaggttctgcgagcagcaaggctgtaaactcgccactgccgagtctagaacctgggctacttcacttggtgggaattgcctctctgtacatttctgcattgtgtttttattcacaaaattgctgtgttaggatcacaaactatgaacaaaagaagaaccccaatacaagatgactaatgcagcaaccacagagtgagagcataaagaacagcaataagggcttaactttttctaatatctaaatctatgaagagaaaggtagagcctaataatataattgggcagatggctctcagtacgaacattactgagtgggtttaagattttaacctgaatcataagcaatgtagcgatacatcgggacacaagatcggacgggacttgcaggtcattttgatcgggttggtttaggtgggaatcattggcaggagttgagctaggtggatttggtgtagagggaagacgctgatcctggccaccttgtgtttgctggactgatgatccttctgtttgatctattgagagctgattatttacaaaatcaatggcttcttccatatttacattattattttcgtcttttctcagtaactccaatgcctgcaccagaaacagagacaaaatcattacgtagccgaaactgttgaacttagaccttgcgaagcgcaaccaatgatgagtaaattatccactcagaagctttttcatatgtgaatcccaaacatagaaacaggtgaactcgttatacacacacctgtacagctctgtataccattttccgtgcttttattctagaactttcgacgatctcagacacatggaatccattagtgtctgatgcattattgtcttcgtatgtcaactgaccatcaggttcccctgatttactcatgcgtcttattgatgaatatggtacagggga

SEQ ID NO: 41003 - DNA, 500 bp, Arabidopsis thaliana columbia
gtttttaaattatatcattttctgagatatttatattttataatttaattgttactaaaaacattatattactatatatattttattttatataatttttgtaaatcagactgatttatatgtataatattgatagtatcaaaaaataataaatttaaaacttaaactatattaaaacaatatattaatgatattttaatttttttattaatattatttttaaaattcgttccgttaaatttgtctcgataagaatttatttattttattaatattaatattaatctgaattactatttaaatattatagttaacgtaaaatattaaatacatatattttgaaattgaataatatatgttggtttcttactaggcattactagacattcatcaacgacatgggatggtggccatacacgcaagcacacataaggaggttagcttgtcgcgggattccactcgttgagcttttaatttaattttattacacgtggttaatt

SEQ ID NO: 41004 - DNA, 1185 bp, Arabidopsis thaliana columbia
tttgcaacttctagaacttgtaaaacttaaatagaactatcactaataattgtatgttaatgattgacaacattactaatatatataactgtgtgccgttgataatgttgattcctaagatctttcctactaattaattatctaacattaagacaagaatggaagtttcctaattaagcatgtgctgtaacaatttggttggagacacaaaaagtcaacattttttaaagtcaaactaatcgttctgatgactttttatttctttctcttttttgttgttttggtcaattttctcagtcgccaaaacattcaattcccaaaccaaacagagcagaagaacaacaagttttgattctaaaaaaggaagcttcccaagtatggatccgtcggagtattttgccggcggaatccttccgatcaacagaaccagaagcggcacgttcagatctgtggtcctcgtccttcacctcttagtgttcacaaagactctcacaaaatcaagaaacctccaaaacaccctgcgccgccgccaaatcgtgaccaaccgccgccgtatattcctagagagccggtggttatctacgccgtatcccccaaggttgtacacgcaaccggcgtctgagttcatgaacgtagtccagcgactcacagggatctcctctggtgttttcctcgaatctggcggcggtggagatgtttcaccggcggcgaggctagcgtccacggaaaatgctagtccaagaggaggaaaagaaccggctgcgagagatgagacggtggaaatcaacacggctatggaagaagcagctgaatttggtggttatgctccgggaatactctcgccatctccggccttgttgccaacagcttctaccgggatattctctccgatgtatcatcaaggtgggatgttttcgccggctataccactgggattattctcgccggcgggatttatgagcccgtttcgaagtcctggctttactagtttggtagcttcaccaacttttgctgatttctttagtcatatttgggatcaagattagatttttttttggtgttttgctctgtaatttttttgtattatgtattttgacatatccaatgtagtagcccaaagggtttaaaatgagcttcatgtataaaaagattaacttcaaaaattcagacagattcctagaatgt

SEQ ID NO: 41005 - DNA, 978 bp, Arabidopsis thaliana columbia
ttacacactagctacaagttgtcatagcaacttggtgacagactagacatcatataacaattggtattattactgtgctccattatcgatttgctactatggcactattgcaaaatgagtggcttttggtaatcgatttgctcctatggcattatcgcacaatgattggcttttggtaatcgatttgctactatggcactatcgcaaaatgagtggcttttggtcagggatggggcattcacaacttttgtcataattgctaccaacaaaattatgagtctccacttcgtttctatttactacagaagctattgttgcaaagtttaaatattactaataatcttagtttgttacaaaatcttgtgacgaaatataagttgtgaaaaattacaacaacgattttgatactaatttctacaaaaatataatgacataattcgtcgctaatagctacaaatagagaagctgataatagttgcaaaacattaattaatattctattcaacgggtgttacaaattctgcgacggatttgtttgtgtggaacgttgcaacaatttctttaacacatatggtaacaaatttgttaccaaaaaacagttctcgtaatttgtcgctaattttctacgtgttgtaacactttagctacatctgatattcaatcgcattctgtcactaagttgtaacttataagtaccaaaagcttgttacaaatattcagtgtcgtgaaaatagtagctatatggtcttatataagagacttcagaatacaagtatgagtaaagggttgagtgatcttctgtgttgtgacaccccgacgcggatttttctgtcttcgctccgaacataccagaacacaatcacacggggcaccccataattaccgataaaattattgacctctgctcaacttcttacaaaagctgccataaacagctagattcgctctaacaacccaatctagccattttacgtacta

SEQ ID NO: 41006 - DNA, 690 bp, Arabidopsis thaliana columbia
cctacagtattttagtgtattgtcagagttcagtttctttaaagaaaacacaatattttttttttttgtcgtcaagaaaacacaatatttatgttaaacaaaaatgcatgatatttcaatagtttgtggaaaattatagaaaatatttcattttccttcttttagtttggtattaagaaggaaaaaaccaaaaacatttttttgataatgtatacataaattaaaattaaaataatgagaaaacaaaacaaggtccaaaataccttgtgaagaaaatggcgacggcgtttgccaacacgacttcaagctccaacctttacctccatcgctgccgtaaaaaccatcctcttccatctccgtcgttcttttcaccgttccggtcgtctccacttccttctcagacccttttcctcgtccccactccaaaacctgtacgacgcatcgcggtcgctcctctcggccctccaacgccgcctagtcccgacccacctccgcctaaaaacacgactgagctcacaagttcgtctttcccttcttacccttaaaacttcaatgtttcaactctgagttctgattttgtttactgccaattctatttttcaatctttcctaattcgatgaaattgcattacggaattcgaattaggagaatgaaggtggttaactgctattgattcgtagataaagatg

SEQ ID NO: 41007 - DNA, 715 bp, Arabidopsis thaliana columbia
aaagtcaatataaaaatcgaaaatcacatatagacattattgtgttgcagaaattttagcttttgaaattcgaacaccaaattctagagggttattggcaaaaagatgtgacaaattaacaaacaagaaatgttgattttgttacgcatgttgacattttaaacaaatgacttgatttttatgtatagatttttttctttttgtaaatttaaaggatgatttagcttttattgtgaaatttagcccaaaacaagtcaaccaaacaaacacattattttataaagcgtcatcagatagaaaccgtcaaacccattcaattgaaactaaactagtgtaacggaaacatatttatattatagtattcaccaatagaaaccaatgcatgcttattttccacacaaactactcaaatatttttaaaaattactactaatgtctaaccaccagttttttttcttctaatatgcatgaatgtgtgtgtatatactgtatatcagtatatgtatatgtgcgttgagtataaatacgaagtctcatcttctaagtccaacaccaaaattatttttctctcttttaactacaagtctactacaacttccaataagagagaagagacagagcattaatggagtcaccaagccttccgatgacggccaaagactggaccaccaccagtctccaccgtgtcttcgccatgcaaggcggcgaaagatga

SEQ ID NO: 41008 - DNA, 812 bp, Arabidopsis thaliana columbia
ctctcgatgtttaagattagagagacaaaaacttgcctcagaactagctgccaatccagaacaaacttaaagtcaatttaaagattagtattaaagagaagtttgaaaaccatttccctgcattctcccaccatgcaccttctgtttctcttctatttgtttgctggaatttggatccccccagctgttttatccttcaaacttgccacgttgtccggtaacgactgccctgtgaagtcaatgacttgccattcatcatcgatggtagaggaatcctgaaaatgtatgactgccatgattagatacaagtcaagttgagaaacaaaagactctaagaatcagaacattaaacaattaccggatgttgatcagcaagaacaggtgatgactcgttttttagaggcagtggtagtggaggagacgtttcaggcgtatgtggtggttgcatttgtgttgaaaggtgttgaggttgtgggacgttagcagaatagtctgcatcctccaaacgagcaaaacagtcaagcaaatcaatcatatcaatatccactccctcctctcgctttgccaattgaagacaactgagaaaaccatcaacaacggtcgccgtacaatcatcactcttgctcagcattttggaaggcattaaaacccttgaatacgcaataacaagcccatttgtaaaaacgtgaacctgctacttattagttgactccaaaaacttaaactgaggggttcccaacactctcttcctcaaaccctgcacaaaattcatcgcgtaccgcgccataaactgtgctgtgagcttaataata

SEQ ID NO: 41009 - DNA, 670 bp, Arabidopsis thaliana columbia
caaaaaactaaccatatgtcagaaatattgggtaaataattctttttgtggtacggtatggattaagaaaaaactaattaaccttgtaaacttatagtttttacaatgatatttttattaatggtgatggagactttataaggttctgtgaaaaaagaaaagagactctgaagcttcagtaagaaaaagaaaagagactcataggtagaagtcataatcatcgtgatattattacagagtagaaagagagtcatctgatagcaaaaaaattaaagaaaaaaagaaagaaatcatgtgttttttaaaaataacatgaatcaaataaaattagcgaaattataatcatcgtgatattattaaagagtaagtagtccagaaaaggagtcatctaatggcaaaaaattaaagaagaaaataaagaaatcatgtacttattaaaaataacaggaatcaaataagaataacgaaagaaataacttggtatttgatactactaacgtggatctatactccaaggactcactttgttggttttgaattggaaatgatttagttgatggtgaataatggattgatcttaatcaaagcggcggaaagacgatgaatggggatgcgacgagatcgagtggatcagcgaaatgaaggggacaaattgtcttcgagagtgatg

SEQ ID NO: 41010 - DNA, 611 bp, Arabidopsis thaliana columbia
gaatctggagaattgatctacgtccaggagagtagacttctggacgaatattaaatatgtctgtagtataaaccgtacagttacgttcaatactatacgatgcttccacatgatccgcgatctccacaccatcttttcccacgtctactacggaaatatatccattgcaagttatgtagcttttaaacagtcggtctcacacaagattctcagggctgatacgttccacatcttctagagatacatcatctaaattatatgcttgccacacttccagtaaggaaaatcgattggctttgttgcctcccatttccaaacctgcattctcataacgttgaactagaattgcttacaaatcttttcatcgaaaagcattagagaaaatatgacttacaggttttgaaatgctaaacaagcagtgtctttctaattgtagagttgatcagccaatcaacttgcatcatgatcgattagaccttattaggaatatggcctaccttaacccaaaagctaactcaagagttaaggattgttacacctttatataatgccaaatatcttaacccaattgttgtggacatatctaataggctcctcgaaatgtgggtgag

SEQ ID NO: 41011 - DNA, 686 bp, Arabidopsis thaliana
cagtagctttaacgcaaatagaaaagaaaacaagtataagatttcaaaattgtgctcaccgaaattcttataagcagagaatcgcctacgaatagcacgaagtgtttcaaaggcatcatcttcttcatcgtcagataaaccaattggaggaagggacacatccatggacaatgacaattggctcttaatactccgaatcatctcgaaatcatcttcactctccgaatccgagagcaaggacaaacccatgggaggaccactgcttctacccgcatccttggaagatgctaattggctcttaattgtacgaagcatctcaaagtcatcttcgttttctgaatccgacggtatctctccgccaccgactccttccggttcaattgaaccggtttttgacgcgaattgatcggaattaacgtcagagaccatacatgcgcgtcttaaatcttcgaggtcttcaccgatgtcatcttcttcgtcatcgtcatcatcgtcatcagcttcgtataggctgttccgattcatcgcgatacagaaagagaaatccttctttatgaaaatgaaattgaatcaaatcgaagaatgagagaaacggctccaagccaagggtttatgcctctagaagaagaagacgatgaatgtttcctaatacttaaggttttatttatgtctgaccaatttaacat

SEQ ID NO: 41012 - DNA, 861 bp, Arabidopsis thaliana columbia
gctcaatcttcttcacccaatgcttcttcttcttcttcactcgatgctcttcttcaagattactcttttagagccttgcttcgtcctcgtaccggcattctctacgaggctactactgttccttccaatttgactgggatcaaactcgctgctatgagactcagaagcggaacttgtagaaaacgtggagtcactccttttaatgagttctcaattcccagcggcgttatcgtcaagccgtatgtgacaaggcttgttttggtttatcaaaacctagctaatttctctcacttgtattaccctttgtctggttatgattatgtcgctcctgtcttgggtcttctcgcttacgatgctaagaatctctctgcgcttaatttgcctcagcttgatttaagggtgtctaatgatcctatcagaatcgatttctctgatctggaacgaatcccgcaagggtctagtgctaagtgtgttagattcgattctaaaggtgaagcgagtttcagcgattcgattcagcctggaaacacatgcgagactgagcatcagggacatttctctgtggtggtgaaatctgtggcttctgctccgagtctagctcctcctgggattgagagtaagaagaagaagaagagctctgattccaattccaagacttggatcattgttgggtcggtggttggtggattgatactgttggggcttttactgtttctggttttgagatgtcgaaattacaagaagcaagagaaaatgagggagatggagagagctggagagacaggggaagctctgaggatgactcaggttggtgaaacaagagcactactgctactacgactcgtacacaaccaatgcttg

SEQ ID NO: 41013 - DNA, 974 bp, Arabidopsis thaliana columbia
ctcttgggcagactttggatatacagagaggagctacattgtttaatagagcttgtatcgggtgtcatgatacaggtggaaacattattcaacctgtgagctaaaaaccattcttgattctcttctcatgtcatctttcattaccttcgagtcaattagctcatatctttccacttttccagggtgcaacgcttttcacaaaagacctcgaaaggtaatataacttatgctggacactcaaagaactgtgtgctgtgtgcatctataatattctgacaggaaaaatcggttacacagatcgttatctcttaagatttgcaatggtttatttacttttctacagaaatggagttgatactgaggaagaaatatatcgtgttacctactttggaaagggaagaatgccggtgagatctccttgaagaaattccttgtataaaactgagaattgtcttccacttagctagatgatctgaagtatgtctgatgatttacttcagggatttggtgagaaatgcacaccgagaggacaatgtacctttggaccgcggttgcaggacgaagaaatcaagcttctcgctgaatttgtaaagtttcaagctgaccaaggctggccaactgtatctacggactagcgactaggcattcttcgtcttgtgagcgtttttgtaatccaattaatccatagggctgtatctacttacacttataacaattccttctgggaggtttcattgcaattgcttatgctcccagatgttcttaaggtacaacaaaattataggtgttcataaaatcaccaacacatatatgctcataacgtttgactatcccttggcattagccattacaaatatgctattctgaatatctttcctctggagaaaaaatgcagtggaaaaataatagtgatgttactattgactcctctggtatgttatgaagtctcatgagcataaccatcaattgattcg

SEQ ID NO: 41014 - DNA, 987 bp, Arabidopsis thaliana columbia
gctcttctcatcgtcatatatctttctgtttctttttttcagttctcgattaatatgttatcaagcaatccaatgacctggaaactctcccacatggtggttccaggtaaaaactccactatttcgccggattatttcacggctagtcaaacaagtcctttagatatgatgaaattcccgtcgcctggaagttcgaagaggtacgataatggcggtgggattggtttaggtatcgtcgctgcgcttgagaaatccagcatcgggatcaatccggtttgccataccggtgccggttccaaaggatttgacctggctcgatattccaagagattccaattcgcggcggggattgatctatctgactctgaggaatacacttgcgtcacgactcgtgatggcctgaccaaagtctattacaaggaagaagagtttgaatttggtcataatctattgaacggtgatcagagatggagaaaaccgatagaaatcgccgaggagtcaccggcgaaggagaggcgggtattgagagattgtccagattttctaacttcttgttgcttgtgtaagaagaaacttcaaggcaaagacatttacatgtacaagtaagctcctccaatgtacccttttttataattcgtatgacaaatatttggattacaacatctccaaagagagtgaatttgattagagtttctatatgtgtgcagaggagatgaaggattttgtagtaaagagtgtagatcgttgaagataatggaggatagcttacaagagcagcatcaattgacaagtgttgaggttctaaccggagaagagattgcctccccggaatattccttatatgaatttgtgagtggtctggttgattctatcaatggccacaggatttttctagtgttgtatatcttggcacatagccattatttgttaaggcttcgttttgagtttctatgacgagaaaaaaaatatagtgtggataaacagaat

SEQ ID NO: 41015 - DNA, 575 bp, Arabidopsis thaliana columbia
gcttaacgattagtgcatcaaacgaagaagtttgattgaatagtagaggaaagtaactccatttttaagtgccacggaactagttttgccgcaggttcgaagctaaatctggcctgttgtgcctgtaatctgaggctttgttccttatagtagcatcgatggttctgaagtttggaaaagcagtttgtcttgagttggtgaactagtctgttgcaaagtatgcatggtatatataagtcgacgcacttcgattgctaacacaaaagcaaaaattatataaattttttgcatgcttaaggggattgtaattaataggggattgaaaccagctagtctttgcgtgggctcttatggggctttttaccaacacactctgtatttttttcatcttgtatagttgtattggaataaaattttacaataaacagtttgttcttgtaattgttgtacatgcacacttattactatacaattacttcaaagaccatcacgaattccgatcttacccaaattaccacttgattaaggataagctaatttgtgcaaaccataaatttaaatttacccgttctgtt

SEQ ID NO: 41016 - DNA, 528 bp, Arabidopsis thaliana columbia
tattttaatattagtttttttgcgcctctttgtttgtgatcatttattctctcaattggatagtatagtgaagtaaataatgtagctatgactttacctgtagcatttacctgtagcatcttaaaaatatgaattaaaaatgatttagctaatttgggcttatgtttataagcatagaagtttatactacaagttcgtttagatttttccagtatcaactcaaacatagtttttactcaagcatagtttttactcaagcatagtttttactcacactaaaacccacatgtagtgtgcaaaagtaagtacccccccacctctgttcctcacggtttttctgcaaaggacccaccctccttgaacttcagcgtccatcacaatgtccccatcatcatcaaacctgtacaagccagtggcgatcctaacattgtagaagttgatagcatttttgcaagtggagggagcacttgtgtttctccacgtattgctgtcttgattaaagcggttgtcaactctgtaaagtccctc

SEQ ID NO: 41017 - DNA, 548 bp, Arabidopsis thaliana columbia
aacagagttaaaaaacagagaatagtaaaacgagacaatgctggatcacagaaacagatttgatgccaaatctatatgctaaagagagacttgtggagaattataatcatttttacctaagcaataagattcttatgaattgtttgtctgataaacaggggatacaaaagagattgattgattggttcaaaagtcaaagttccatataaatatgcaacttaacagatactgatataaggcaaatctataggaacatggaaagataacaaaagttcaaagaacaagtcataacccagaaacagaaaaccctaaaaatattgcaatcttccccaaaaaggaaaaaaatgataacaagaagaagaagaggaaaataaaaattatacctttttcagagatttctcacaagatttaatctgatttcacaaactctagtttccttctagatcctgcatatatatattaggaaaacaaaaatcatcatcaactaaaagaaagaaatacgtttttatatagccataattattatttttgtagaacgaagaaaaaga

SEQ ID NO: 41018 - DNA, 739 bp, Arabidopsis thaliana columbia
tcatccaaccaactccaggtgctcttagagttcctcttagcataccatacctgttgagaaaaaaacagagcgatcaagagaggaaagtttttatcttcttcttttctcaatgaaaagatgtcaacggacctcgacaccatggaagaatcacggccaaatacaatagggagaggtccagcccatgtaggtgcgacacgagcaatagctgatggttttagtagcccacgttgggtagcacggagctgagctgttgccgcatgccctcctccaatgatcactaaatcatcattacctgtttcggagttacatggactatgtcaagatattgcttgtttctttagttagttgagaaagcaaataaggaggatcaatggaaacccgattcaagcgtataagcagtcagagccatagagaagacatacattcagaatgagctaagtgtaagggactctaagcattgcaagggatcatatcatgtatagctaaaattattcgccaaagtaaatatagatattaccaactacgaatcagttttcatatcgaactataaggaaccgggaactaaagccatggagagtatgtgtagctttttgttaccataattttgccaacacaaatagaaaaagcagtggttcacactaacctgactggctcattgggctttcaggtgagttcatgaagtcgaccacaaacttctccatgacatctgtgtcataatccatcttcggcctagcagagt

SEQ ID NO: 41019 - DNA, 631 bp, Arabidopsis thaliana columbia
  unsure (1)..(631): unsure at all n locations
tccagaaatgagctcaccctaatcacacctccatgtcccttgtagttataacctccatggttgttcttcaatatcggtttcggaaaactaccgttaaaagaagaagaagaagaagacgaaacctgactcttgatagaattcgaaccggtcgagttataaggaagtaatggcaactttacctcatattcttggtctccaatttcttctatttcaagaaccggttcaaaatcttcgattggaattatctcaggtctgggtaaaccggttttatatttatctgttttactacgatatatgggttccgggatctttttcatttctatagggaggattttgccgtcgttgaagaactcttccgcggaccaggagctctcgccggagattgcaccgcggggtattgaaaactccaaaggaaagccccaatagaagttggagatatcatacggagattgtgatgtacgctgctcgattggtatggactcgtggtggcaaaaatcgttagaaaatgagattcttggactttcattagcgttttcgggcattgttattaatgttctcgagaaaatattagagggnttgaagaaaatggtgatggtaaactcttttttatacgtgaagattatgtataggg

SEQ ID NO: 41020 - DNA, 600 bp, Arabidopsis thaliana columbia
tagtaacggacgccagtgtgctctaaaggatgcgattccgaagcgacatgccatgatctctgcttgacttgccctctataatacgcaaactgagactggtgtcaggcattgattggcttttgacgaaacctaacgttgagagtccgtactataataacagccggtaccgacgaagctccacaaaacgctcacatggtgctggaatgtcttggaaagatgcggacgctgggccctgcccgtcctcacagaagaggattaggggtctggtatgtctgactcgaagagtctctgactggccgagccggggcttggctttttctagtgcgaacctcggtctccagctccaggcctttccctggagctgctctaatttagctttgtctactctgtactgcgtacgatttttgctttggtggctcgcttctcttatctgtcctcgtgatttgaccgacgagcggcagtttcatccgaatatccatcgtgcgacgcgtacgaatacggtcgaagaggccgcataatctccgcacctcgttcaagcctttgctattattatatctaccttgcgatgaggagacgagtctggaggcattatcacaggtg

SEQ ID NO: 41021 - DNA, 535 bp, Arabidopsis thaliana columbia
  unsure (1)..(535): unsure at all n locations
tgtttgagacaattcccactttctcttgtttattgtaggtttgtgatgatcaagtagatcataactctcatacttaactttttttttcaaagtctactttttatctgtatgcttttgaaatattttggattgaatacagctacgggagcttaattattgccatgtttttttttaaaaaattatactttcaaatcttcaaaaattctaaaagaaaagaaatgcaattaaaaagcgaacaagaaaaacagaataacgacatacggtgcgttttggaccttgaaagtgttgttcattaaaaaggaaaacgcagcgtttttggatttcttgaaagtcttattttcttggtagacagaaaaaaataatctattttgatgtcttatccaaatccaaccaatgaacaagcagatataaattgcaatgctactacaacactatcccactctatcttctattagtgtgtntacaatttttgtacatctcttgcttttacattttcttgaattagccatggtggcacattcactcgttcctctct

SEQ ID NO: 41022 - DNA, 520 bp, Arabidopsis thaliana columbia
ttttcttagtatatagtacacgttcgaagaagaccgttcgtgtgcaaaaacatgaggtgtagagcacttaacattcgtagaagaaagagagtaatggttaatgtgagctcaaggaagctcatgacccgtctacggcgaatggttgctccggagacgagtttttccggcgaggttgacggtgctacactttatcgactcacggctgatcacattttcttacttcaagcaagaatccaacttcttcgtcgtatttcttctgtttgtggtctctagatcgaagatacacgtggctaaaaaaagacgaagaaatggtataattatggataaaacgtctgttttctctatatatagtctcttaagcaatcaacttataagttcgtcgtaatgccgacgctataatttgaacgtatttatgtgaatttatgtttgtaatgttgttagttgtgaacagttttttacatgcatgcagctttgaccgcgtttatatgtagcgttgacaccagagtactacgacacgcct

SEQ ID NO: 41023 - DNA, 752 bp, Arabidopsis thaliana columbia
  unsure (1)..(752): unsure at all n locations
tctttcaacgattgataacattgataatcgttgaaagatttcatcgttaaaagaatataagaaagataaaaaataattattaacattgaacaaattgttgaaataattagatttaatcgttgtaaaaacacattggtgtttaagaaaaattcgaataaattctcgtaaaactaaacttatacattatattcttttatataactatataaaggatgatattaatctaactattttaatataaaataaacataaatataaataataccctccagaccaattanccctcgcttaaactttaatattaataatattagaccatcatttttgctatgctgcaattttatttttttataatatatttttatatatataaatccgacatatttaatcatccactcatttaatgagtactacttttagtcgcacagctttttttaataatattctcaataatgtatcattcacaatttttaaataatcatttgttagttttgaattataaacgcgtcataaactaattttgtagatgttaccgttagaattataggcagcctcctcctctttgccaagtgttgctctgatctcggcaaactacgtctcgcgtacacaaaaccaaaaatcgcaccaagataaacaacgctttactcaaaaacagacttagaatggtaaaaatcaacaaacctatcagctcagatctgacaactgaatgacaaagggctaccaaagaaagtgtcaattgtgtggcgtgtttg

SEQ ID NO: 41024 - DNA, 571 bp, Arabidopsis thaliana columbia
gatccctgaagaaaaaagtatttaaaaactattgttataatcattgtatcatagagttaattatcaagaaaatggcgaaaaaaagaatcaagaaaattgtataccgtttttcttctaaagagatactttaattcgacaatgacccacgatttgagtttgatctggttaattcagtttaaatcaaagtagcaaccctaaataaattatatttgacttttattaagagattataattttataataaaatagtcaaaggcagcatttaagcgagaaaggtgataacaacaagtgccctaaagaaatatcaaagaggcaaagactaaagtgacaaatgcaagttgacaaagtctcatggaagatactaaactgaaagttgaaaacctccgttacatttgcaaagtcttaaaagtgttgcagttttaaagaaagacagtgacaagtttggacctaagtgaaggtcattgacacaagatactatcaataatgatcacaagaggatggttgatcatttccttcctaggcttatcattcttcatatcaatgcaaggcggcaaaatcaaccagctttttg

SEQ ID NO: 41025 - DNA, 1585 bp, Arabidopsis thaliana columbia
aagtttattaataatattgcattttaatatggaaaaataaataccaaaataatgttatatgagtcagattttactatgttatatcattatgtaagattaagagagagatggagatgtcccagacttggtggaatcccgtggttggtcggattggttatggcgtggctgtggcaggcttcagtggtggtggagggcaaagttggccaaaagaacaaaaaagaggaaacaaacgaaataaaaggtagtgtggaggaggcaactttggaggctcttcgacaccagatatgacgtatttactccaaggttaaagtacataaatgttcattagcatcccagtaatccatagcaactatcggatcttgaatcagatttatattcaaggagttatgtttattgcgttcaggccaagtaactgtagaatttgtcaaaccctaagaagctgttccgagatgggttattcgaggcgccatttggatgtcaaaatgttgtctgatatgcatggctgaacctttgtggagttactgatgatactaatagctaaagattcaacggtggaattctgttttgaacggttagttattgttttattcttatgtttctgagacagtttattatcgagtaaatggtgacaagttctattgttttatttggaaatgaggtttgtggatgtcggattcacatactcaagtatttatttgtttgtggaaaaaaatattcttgaaaacaaaaatcaaatgtaaaaagcctagaattgatattgaaatgactatagtatatttgctgaaaaaattgtgtgtgtcttacatggtacaaaaccttctttatttatacaaaaacctagtaattaatcctaattatatgccataattcccctttaatgcttctgtttcggtcttcgggttcaacattctaacgttcgaatttgaattaactttgatccttcatgcggtttgctactcgacccacaacacctaaactgaattgctctcaactcggcttagcctccacctcgtgatatggtcacctcgcgatacctctcaactcgacttcgggactccttccaggctgtacttcctgcgggtcccttttttacttacgtggtaatcttttgttggtcttggactactggtgcaagatccgacaccaacaaaagaaaggaaacaaaagaattaaaagtagtgtggaggaggcaactttggaggctcgttgacaccagatatgacgtatttactccaaggttaaagtacataaatgttcattaacatcctagtatccataataatatagagcttcagctcagtccaacctttggaggctcgttgaacggttagttatttttttattcttatgtttttgagacatttaattattgagtaaatagggacaagttctaatgttttctttgaatacgaggttggactgagctgaagctctatattattgttccttcatggtttgtgatgtatgcttgatggagaaccacgctgaagttccgataggttagactgtagcatctttaacaagttataagactgtcttagttacttagtttaagattaagctgagcaagctatatattacatta

SEQ ID NO: 41026 - DNA, 966 bp, Arabidopsis thaliana columbia
tccgacgattctgttatagtcggcgaggagctctcctacagctgaagatcttaatcagttctctatttactcaacctcgaggatatagattgtctcaatgagcctctagatcgaatcaagtttgagaatctggatctattctacgttgagcgtttagatcgaatcagcctccagaattgaatcttcaacctccaacgtcgattcaacctccaagctcgaatcaaccacgaccatctcctcaacttcgagcctctatatcgcatcacatttctcaagcgcaaaaatcacatgtggaaaaagatgaggaagctgaatctaagggactcaactctctcggaagatgagctcgctcctttataagagatatcctcaatcatgcccgtgagcaatataccaccgtcatctctcccagatcggagtctggaaccacttgttaagtatcttctcttaccatcttataaattgtatagatgctaggaatgtctgtgtaggaactaggaagataggttatatagattatcaagaaatctctgtataggaattaagaagatagattgtgtaggaatctttgtcttaacttaaaatgtggttcgattaaatctcattaattatgttttgattgaatcttatagattgtggttaaagtttgaatatgtgtacgattaaaatttatgtttcaagatcgtttgtagtttgattgaacctttgtagtcttaaaattgtgattttttcaatctttgaaaatgctcttttattgtctaattttccatttagcttgtagtggttccaagattacattcattgttcttttattgtatgtttctaattgcatgcatttttttattttgtgtttgtaggtatgataagaacaagttaaagcttaccggatgattacaaaggtttttacaaaaagttcatgggtcatattcaagaagtcattaaaagaaagaaaaggcactaagttgg

SEQ ID NO: 41027 - DNA, 576 bp, Arabidopsis thaliana columbia
cgatgatggtttagatgtcggtttagatgatggtttagatttcggtttagttgatgatggattagttgtaggtttatttgatgttttcgtaggcactggtttatcttgggaaatacctccacccggaaaacttccacctgatgcatctccactaggtataggttcatttggtgtaggtccacacggtgcaagtccattcattgcatctccatccggtgaaggccacttagtgaagacctgctcggtatacgtagttttggtataagtcctctaagtatacgtcctctcggtattagtcctctcggtataagtccacccaatattgaaccatccaaggcagatgcatctgatgctgatccatctaatgcaggcccactcggtataagtccactaagtattgatccacctgttgctggtgcatccgatgaaggtccacttggaaaactaccacctgatttatctccaccaggtaaaggttcatctggtgaaggtcactcgttgaatctccccaagtgaaggtcacttggtgtggaccacttggtgcaggcagtcttggtataagcctcttggaaaaag

SEQ ID NO: 41028 - DNA, 985 bp, Arabidopsis thaliana
gcgggttttcctaccggcttttttgtcagtttagatgttggttttgttgccgactttgtaattggctttgctaccggcattggtgttggttttgaagtcgattttgctactgactttgatacttgttttgccaccggttttgctgtcagttttgatgttggctttgctggcggtttttctatcggttttgctgctgattttgcaaacggttttacagtcggttttgatggtggatttgatgcaagttttttcgtcggtttagatgttggttttgttgtcggttttgtaactagctttgctgcgggcttagatgttggttttgccatcgattttgctaccggctttgatactggttttgccttcggtttggcttttggttttgatgttggcttcgctgccggttttgctgtcggttttgctactggttttacagtcgtttttgatgttggctttgcttctgacttttttgtcggtttagatgtcggttttctaactggctttgctaccgactttgatattggttttgttgttgactttgatattggttttgccactggttttgttgtcggttttgatgatggctcaattgttggccttgttgttggtttacctgcttctttggatgatggtttagctattgattttgttgttggtttagatatcggttttgttacaggtttattcgttggtttagttgatggtttaactaccgatttagatgttggtttagttgatggtttagatgacggtttagatgatggtttagatgtcgatttagttgttgttggctttgttgttggttaacctgcttctttcgatgatggtttagctatggtttttgttcttggtttggatgttggtttatttatcggtttggttattggtttagtagatgggttggctgttgatttagatgtcggtttaggtgttggttaactgttggttttgttgatggtttagatgttggtttcgatgatggtttaga

SEQ ID NO: 41029 - DNA, 602 bp, Arabidopsis thaliana columbia
agctacgatgtagcataacgaagcaacatttgtttaagataaaatagactaaagtcaaacagtgttttgggtttcatgttaacgtgtttatcaatttaatttgtggttctggaatgtgttacgaaagcaacagttgttacaatagttttttaaggaaccgtcgtgtacagcattttgtccggttctcaatcggacggtcaagattttgcgagaggcagagtctggcccgtggttgctggccggcttttaaagttatagtacacttcaagtgggtctctactctaatagtattcattttagttaacagtctcaccggtcaaaaccgaatattagccgacaacttattcaatgaactagttatatatacactcgtgagtcgtgatgattgttttttcataactagaactcatgtacccgaaaccaaaccgatttgagatctaactgtcgttcgattcatgcagtggccaaacatgtatcatatcgaatttcatcaaatgaaacaagttgaccaatggaattgagaaagtaagtttttggattagcgaaatggaagccataatttacattatcaacaactttttgattgatcaaaatatcttctg

SEQ ID NO: 41030 - DNA, 659 bp, Arabidopsis thaliana columbia
aaaagagaataaatcactaacgaaaatccacaagccgacaaatttattagagtttcaatttcaaaatatttgggcgggatttccaaaaaaaaaactcaaaatttttggagatcgcgaatgttcaaaaagtcgattgattaacgaaacgcagcgtttaggtaaatttattaaacacgtgatagcaacaaatgcagaacgcgacattttgaaacacgtggcagtgtagaaatagcgacacgaattttgttaactaaaacgctgcgtttttaataaaatatacagtaacagttgaatagttgattgcgacacgaaacgatgcgtttagggtatgctgtttttaaaacacgtggcagcaacaaataaaccgaaacgcagcgttttgaggtggttattaacgtgaaaggtctcgccagtttttgtgtttcatgcattagtacacgaaacgttgtcttctacttctcggggaaacgacacaaccgtagatttgatgtctgaatctgtgtatatataacttctccaattagagacactaacacagaattgatcactactcctatcgaaaagtagacgaaaatggcgaatgagtatggattcgggatgggttcggttttggcgattgttgtcgttgcactaatgttactgtttgtccgatgatgatg

SEQ ID NO: 41031 - DNA, 484 bp, Arabidopsis thaliana columbia
ggatcggatataaatctcgtgagacgccgacatattatatatatttattttgaagataaaagaaatataaaatttgagaagaaaagatttgaaaacgaaatttgaagaagaatgtttaatattgaagaagagagattgtgatgttccttactcatcccaacgtgactttatataggcatacaaatctatttgcgacgaatttttgcgactatattgcgaggaattgtaaactagttaggtagcacattttaaaacgtttatcacctaccatatatattcgtctcaaatatgtctcacaattgtgtcaaatttttacacgcaaattccacaccaaatgtgcatgtactttgcgatgaattggattggctgttgacttcgactcacattcgtcgctaattagacgcttatccgcctcgaattagcgacgaattatttccaagcatatttgcgacgaagttgagttgaattcactattccaccttat

SEQ ID NO: 41032 - DNA, 531 bp, Arabidopsis thaliana columbia
agaggattttgaagctcaggcatgttagcttccatgtcgagagagatttcatcaccggaagctttttgcttgttgagaaattgatttataagcttcgacggtggatctggctcctccgatttctcactactccgccgcatgaaatcaaagcttccgtcgtcttcttcacctccgggtggtttagagctcttatcattatgccagaagttaatgcttgactctctccaaaacttttctgagtcaccattgtcttcaccgtcgatccttacaacaaaatctcgccgttgatcagttgaatcaacggccatgttagaaggaatgaaactttctatagtaaaatctcgccgagatttttgtttttcttcaaagtaaaacgttcgtttatatatttttttgagaaagaggaaaaagaaaagttggttcttgatttctagatgtaatggtaatgttgatttttctaaatatttaaatctttttgattgattttgttttatttatctttggtaatgttgaccatgtgagattgtgatg

SEQ ID NO: 41033 - DNA, 1290 bp, Arabidopsis thaliana columbia
attctgcagaagacgcgtcttctttcttcttcggtaaacttcaaatcagaagcgaagaagagatcaaatcaatctgatcgtagatgggttgtttcagttgcttcgacggaacccaaaaggaacagcgtaaggaagaagagagacaagcctccgccgaagctcgtgccaaagccgccgaagctgcccagcgacggtttttatctcttttctcttcgcctctattgaaaaattgatccttcagggttttagaatcttaaattcctttgaaatcctaaactttgaaattgtagatatatggatgttaatttttggtttggtaacgcaggaaagagcagtttgataagtctgcagctggaagagctgcacaagctcaattacaacaaatggctaaacaatctgcaaatactaacaaaggagagcctgttcttaaggtttttaaaactactttcctcaatttatgtatcatcatcaagttaaaagtttgcttattcagctttatctttgctatgaattgcagtggcaaatgacgtagtgatgagtcctggtttcaaaaggaatcaatttgtgcgatttggttctttgtaaattgtgtgttcttcaatgtttgcaatactttggttatgtgaattgaagcttattttcttccttattcatctgattatcttttgacttttgtaaaacataaaagaaataacagagtacaatgttaagatcatctctctgttttactgtgagctctggacttactattcactgtatccaataaataagttgtttagagcgatgttagaatcaaatgagctgatagctttagtttctgcggcatgagcctaagattcatttatgcatgtgtgatttatggcaatgttttttagttcaatggtgggtctttgtgtttttagtgtctgacagtgacagatagaaaggaaattgatacctcagattgagcaagtgtgagtagagtttcagcatcatcgagttagtgcattgtcttggtttctctaaagatttcatatacaaatcctataaacagtagagaaaatgaatccaattatttgatttgatataactcacattcaattaaagcagactcacccatttaaagacaaacaaagatgtaccaattatatatggacatcaagagttgtttactacacattttctccccaatatttaagatcaatcaatattacatgacaaaaaccaggagacttgttattctgtgagacttgactcttctgcagaatcattttctgctctttccttctgaagaaacttatggcacatgat

SEQ ID NO: 41034 - DNA, 567 bp, Arabidopsis thaliana columbia
atactaacatggttttttaagtttccaccgttagtttaatgctttattgttaagtttctttgttataacaaaaaaaaaaatctctttcacatttttctttgcgctcgtttattcgcataacattggattatcctctgctttgtgaagaaaagttggacaccagaaatcaagtgatcaatgatataaacttatgttcatgtacaatgccttctttaggtatttgaacctacattgtttccactaatacttaagtccttaaggtgtcttctattcccaccaactcccatgaactgattattacaatgtataatgaatgcaatttaccactcccatgaaatgattattatatcttacctataccaatcagcgagactacatacattccttgcaataaaaaactatgcaatgcgccacactacattctctttttggtgagtgtttaattaggtatagatatatgcaattaacgttccagtcggttgaatctttaacttgatggatgttcggttgaagtacatataagctacttctggaggaatgcaggtttggtattgactacatatctag

SEQ ID NO: 41035 - DNA, 1222 bp, Arabidopsis thaliana columbia
  unsure (1)..(1222): unsure at all n locations
aatcagttcaataagcaataaagcatgacacgaattgtatgtataaggatgagaagaggcattacaatcccagaaggtcgattgaaatcgtgcgatttccccgcatgaaagtaataggggtttcttcgttgttggaggcaagacctcgacctctgatcaaccgatcacgctgtgccaaaaccttgaagtactccaaacttcccttttccggcactagatcgtcaagtccaagactttgcttgaccctatcagagaacatatggtgaacttcaaagctaaacttcccagaagcctcacatctctccaatccccaacacacaactaacagagacaataacacaaacacttggcgtgcaacgaccatgacttcaatctcggagcttttccgagaaaacaaaaacacctccgggataaaaagacgtttaatttctcagataaagacataatcctcgaagaataacgtatatgtaaggaaattgaagaattggaaaagtcaacagattgactcgttcgcattgttccagagaagctgatttgattattggccctaataatatttaagctaatactagtttaatcggagtagtagccattattttgcgtcttcgtcttcttccctgaagctgaaaggttgacaaaggcagagtttttttatccggagggagacgactttttaaatcagccgttattataagtctgttagtcatctctttctttttgcataaaagcccctctacgcttcttatttcgtacttaactccttttatagtttatactatttatattcaacgaacaatttattttcctttttttggtgaaataatttcctagtcaaatcaatcattcgctcataattgttgctgatttaattatgccgcattagagtatctcaatactaaactcaaattcgaattatatgcaacaagttgagaaaaagattagctcttttagaaaagtcaacatacgatgagggcattatgaattaagtgaatcacaaatagacaatttgaatcattgctttacggatacatgtcctcctttgcttcaatcacttttgacacatccgaaacattttacataacaaaaacatacattgtaacaagggagataaaataagattcaacaatctcaaaccaatgaacattgtgttttgctcatcaaacgatgtntattattaaatgaacacaacaatggttaacccacacaaaacgaacttttgtga

SEQ ID NO: 41036 - DNA, 289 bp, Arabidopsis thaliana columbia
aaagctttcaatatatatacttaccctaatctaacaaagtattaagctttaccctaatctaacaaagcagtagagaaacaaaataagatacggaagaaactaacaaagcagcaaatgaaaaaagcacacacatttgactatggatctttcatgacaaccataaacaaacttcactaagacctattcaatcaaacactagacaaaacacagctgaatctaaatctgttaagtatcaacataaaggaaagaacttttacctgcttgagaaggaggagccggcttggttggg

SEQ ID NO: 41037 - DNA, 626 bp, Arabidopsis thaliana columbia
tctagtaacgtgccgccagtgtgctctaaagctttagaatatcagattgaactcgatcagttccggccccagctcctacgtaagaagttcccgacgcccacgctctgtacccaccatcaagaaaattgcctgcggattacgactccaactagagatcaagcccgagtccgtgcctaagaccgcgcgcccagccctgctaaaccgctgaagaagcaaatctcaactgccaaaatacactactcagcttcctccagcgactcgtccagtcacaggtcttggacatttttcgacagtctgagtattatttccattgtttctccatttttcgtcggtggcttgcgatctttgtgttcataccatacaggatatcctgctccctaacacggaatatgacatcgtctgatcccatcgtgggtggttcctacgagtagttcctacgaactttcagtttaccgagtgcccagggaagcaaacgaccacttcgcggtattccttgtggcatatttctagaggcaaggtctctacggtctgaaccgacatgcatcgataattctctgtaacttcaatgcagataccaggattttgactgcgatttgcatacatacagtccttggactcggtaaaga

SEQ ID NO: 41038 - DNA, 336 bp, Arabidopsis thaliana columbia
catccgttagtatatgcaatgcaatcgtatatattcttttttgaagacttgatgaaccattcgccgtgggtcccacgcgatatgtagggatatcctaaccagtctcatcgagctttgctgcatgaaataattcgccgaccatgcttgcacacgtcatactgggtccgtgctatagctcaaatcactaaaatgcccgatgaagtacttaacggtcaaaatttggggtcggcacaacgtccgcgtaccacttccattgtcctgcgtcgccacgtccgagggctatccgggcgcctcccgaaaaggtaccgcatgccatgtttggcctcacggtcgaaa

SEQ ID NO: 41039 - DNA, 606 bp, Arabidopsis thaliana columbia
gaggatcccctttttccatgtaatagagaatatatatcatcagtttttgaagcatggggatgtggtgtactactttgtttatggtttcttgtgtttccatctgtttaattctaagccatgttcaaggtattatattaaactcttttttattgactgtttgcaatttgcaatcaccaaaagaattgttgcaaacaaagaagaaaagcagctctagaacatgtcgacgcaattaaaaactatatggtattactaattttcttatatctataaactaacaatttgttttggttgatgacaaattagaggtagaagctggagcacctccccaagactgttggaatctcgtcactttccctgctaaatgcggcattcacggaaagaagaaatgcttcaaagaaatggaatcaaagtatcaacaacgttttcttcagtgcacatgtaaaaacttaaaaccggaacccaaatcacccaaggacgaacatgactgcacttgtcaaagagctaatccttatgaatgtaattcctaatcttataactttttagaaatttcagccatcaatactaacatattatttattaattaataataagaccccctatggtgta

SEQ ID NO: 41040 - DNA, 563 bp, Arabidopsis thaliana columbia
ggagagtgataaaattgttaaagaagaatcatcagagagttctcaagacccaattctggtcggccagaaggatgttaaggcaaatgttaaacccgtcgagacgaatcaagtcgctcttgttgcgtggagtgattcgtccatggaagatggcttttttcaaaagctaaaaagactgtggtatggttcacctgagatggaattagagcatctcccagaaatgaagagcgtttctggaagtggagacacacatagagaggataatgacttaaagtcatcaagtcagggaagtggaaacaaacataaagaggataaggacttaaagtcatcgagtcagggaactgtgcccatgtctcaaatctcaccttctttcgttgctgagtcggtcgatgaggtaaaagttggagctgatgacgtagacagtaaagataaagatgcaagtccaggctttttaggtcgccttttgaagagtttcaagttctggggaaagaatacaaagtctagcaaagactctagtgggaattaggagcttgtcaatgttgatctcaagtcaagacatatttgca

SEQ ID NO: 41041 - DNA, 551 bp, Arabidopsis thaliana columbia
taatttccacgtaagtctattgcttgtagtgtgtattgagttcgggatttgcatatctgttactggatctatgttttctgattaggttattgggtcactactactgctagggtttttaattttgctgggattttaatttggttctttactcgctcgctgtgttcttcacgattagggtttaagcttttttcgaagttcaaagacattgttgagtcaactttggttcggattttatactggaatttgtttgtagtgatttttttgttaattactcagagcagagattctcctatggttttctctgagtatagatattaatttgtttgctctctggattgaacctttgtacggtttgaatagtattattgccttctatactcataccattactttgttcagtagcttttacttttgcttagaattgtgctggatgtgattctatttgactactgttttgtcgctgatactggtgtatgtctttattgtgcagagagaagaatggctatggagatccacagttccttctggctgcccagtcagccgatgcaaga

SEQ ID NO: 41042 - DNA, 508 bp, Arabidopsis thaliana columbia
actctagtctagaggacacttgtctgctattgccatttctgattttagttttatttcatttttgttattgcatactaggactgttagaaccaaccaactttctgcttggcttgactttgagctttctgatcatatctcatctatttgcatcacaccggattggattgacatcctaaaatactacaacgacaggatagtgttttaggattaattgagaaaaatcctactatcatctttgctatcataaacctgattaatatgaaacctgattaataaacttgatgctaatcatatcattaaaacactaatcaagcaaacaatatcatcttacataagtaaacatctactcatacataaagattatcatcctacataagtttcaacaacagcaagaagtgttagataaagtagctgaagaggaggcaactgcagtggctggttgggtgcttgtggtggttggaatggtgcctggagctatggtggttgggtagatgattgggtcaggttt

SEQ ID NO: 41043 - DNA, 587 bp, Arabidopsis thaliana columbia
ttcacaaaacaaacattgtttcatatttgacgttcaagaaccacaacgcgcgttttgtgatttttaattctctctaattaggcaaccaacatcgtcattttgtttgacgcgcctttaggatgaaaatatgtgtatttgtttttgcagtttaggttgtagcttctaaaagtagaagattctctaagtttcttgttataaagaaaaataaattcttaattaagatttctttaatatatataactcggataatttggaccgaagcccaactaatatcgaggtgtacaaacttattgggtacaagcgcaccctggaaacactcagagggaagcccaaagctaattagcatatatataggacatgttttgtagtggaccaatcatgattagcataaggattttttacctaattaagttgaatggataacattttagctgaagcgccgagctaattagccaatacacacatttcatagtaaccaagtaggattacatttttagccgataagcgtgttttgtagctgaactgattaggataggttactctggattctttgctaattttgatgcatacctgagatttctttatat

SEQ ID NO: 41044 - DNA, 446 bp, Arabidopsis thaliana columbia
ttttcttgactcagcaaatctttctggaccatctactacagttttatctcaggttagaatctgaaaacattactatctcttatcttccataagatcaaagtacaacattaatattcctaaatttttgttctggtgtgtgaaaagctgcaaattcttcactcaaacttgatattttctctatttcctagctagtttgctaaaaatatggtttcttgtctgaaaaatgtttcagagttaattcttgtcatttatttctctgcagacatttcttgtctggcaaattcttttctccattatatttctcgggaggagatatagaataaatcaaatattgggatgtactcttgtagcatttggtgtaatcgtcagtgtagcaaggttcgccagcttaattaacttgcttgatactatttaagtgacttgggttcttctttccttttgttaga

SEQ ID NO: 41045 - DNA, 513 bp, Arabidopsis thaliana columbia
cttccatcattttttcgcaattcacaaacaattattttatcaatacattttatcaaatataactaaagatatatataactatttatttcttctaaaacatgaatatgcggatttgaattaagtggtgaacttgtgatgcaacaaaaacattaacagaacattagtcttaatttctatttttaatgataataagttaattgataaatcctcaacaatggcacacacaccttgggcaagagactttgttattttagtcataaatagttcaaaatatattagtgctcggttgaattttaacatttaaaaactacagaaacggagtagatccatgaacatgtgatatgaatatgatctcttctggtcatcatcacaagacactccatttggaagtacaacgtgcatcttgttgcttggtcatcactcatcttcgacgattactgctaggagacaatcagcaaatctggtatagataactgcgtgtcattcaacgctagcagctacacataggtgata

SEQ ID NO: 41046 - DNA, 375 bp, Arabidopsis thaliana columbia
ttttagaataagtaacaagatctcacatcgagaaagccatatctttctagacatatagcattaagaacactatcagcaagaaaaatattccgatagacaatctggtatctacactttttggttaccaaaaaagttctatcaaatgaaaagttatgtcactaaggtcaccatcaccatccccatctcagtgcattaatgagatgatgcagtcactatatacccctagcaaccgtattcccacataaaccagctctaacatccatagatattatcaagttttggcgtggcaaaaagcagtacctgcaaaacccatgcctctgcaaaggactcgcaagaccccagcaaatgagagtttcacagaatgagctggaagct

SEQ ID NO: 41047 - DNA, 476 bp, Arabidopsis thaliana columbia
ccggcacaggggtttctctgccaaacagtgtatatcggtcttcttcaacagagaacgcatttcaagtcgcattatatgttaagtgtgcctttccaacatcgtaaagcaatagaagaatattgtaccaacgaaggactgtgcctttccaatttgtcactctgttcagtccagtctaaaattcacttcactgagttcagtggcgtttcaacattacggagagcctttgttctttcagctttctcgaagtccttccttgttcgtttgttggcatctatatctatactgatgagtagagaggtacaatcaaatccacaggcggaaatacttcactatgcatcgacatattctgtgatcctctccatcgcactgagaatttccaggtttcactggttgtgagctaagcaatgagaaaatgttatagatcaacagacatctgcactagattgaagatacggtatacattgaacggaccagtt

SEQ ID NO: 41048 - DNA, 187 bp, Arabidopsis thaliana columbia
cttagtataaaaacatgtttaacaaacaatagtttgtaagaatgagatatagcttaataataaaaactgtttcagcatttgcatcacaattaaactaaccgtgttggcagtagtttgcataaacagcgttgttcacaacaccaaattggtcgaattcataatcacgaactttaagttcaatctcatg

SEQ ID NO: 41049 - DNA, 480 bp, Arabidopsis thaliana columbia
tgttggtttataccaaaccgaacaaaaggtgttttggttcattggttggttcgaaaaaataacattcatctcgaatattgattgtaataatataattataatttaaaattgtcaaacttttgttctctgttaaaaataaaaattgatttcaacaaatataggcataggtctggccattcggatttcggatcggaatcagatcgaatttttttgaattcgcatgatttggatgaagaagtttattatccgttcggattatatgactatacagtttggtttcggtttggatgatattggattcagatcggtttcgcaacagtttttgagaaagaaaagactagaaattgtttaattgtaataataaatcggttactgttactaaaatttggtttaagtttgcaaactttgtataattataacaaatataactatcacacaattggatatcagagttatttcagatacgtgtgttatttatta

SEQ ID NO: 41050 - DNA, 312 bp, Arabidopsis thaliana columbia
ggattgatctgcgagttaggttatagacatggacatacattgtattttgttcttaatattctatattacaatcgcaaactttatgcttcagcaatatcttggcacaaaaacaaaaacaatatttagacgaaccatagagtgactaggtacaaaagatggttttccaatttcgaaaactgcgttctcacaagtccacgaatggatgacataacggcacttggattcatcgtgaacccaacgaatgcatctctcttgctttttgttcacaattcttctcattgccgttctttgtgactccattaaacactcaga

SEQ ID NO: 41051 - DNA, 353 bp, Arabidopsis thaliana columbia
ttttatgtttatcctttttttttttggttaaaactttatgactccataacttttagaccgtgaggccaaacttggcatgtgataccttttcggaaagcccaaagacagccctccgacgaaagaagcaggacaatggaattttccaatggatttttgtcgagcccaaatttttgcccttaagtaacttttcgggcaatttcgtgaattgggccaaaatacgggccccaaattaactggtccagcaatggtttcggattttttcaaggatccaagcgcggtaaaaattgatggggtaaccctcatagcgggttggaccacggcgaatgggtcaaccagtcctccaaaaaggattt

SEQ ID NO: 41052 - DNA, 571 bp, Arabidopsis thaliana columbia
tatgcttattcactgttggtgtcttgttgttttaaaggttatttgtttgataggtttcttttggaattctgcaggtcactgcacttctcgctcttgcagccgcgtgttcctctgcaggagttactgttttattcactaaagacactgagttttgcaggcagcaacccgctctctcttgcgataggtttcagatttctgttggtttatctttctttaattggtttttagctgctatatcgtctcataccatgttttggatcttgatatgatatcaaacaaaacccatctcaatgattttacaaaaatccatttctatgaattgtttttctccaatccataaccggaaacagggcaagggtacaagtcattttggtaattttctaagacagctatgtctcagtaacctcttgtgacagaatattgatgatgtattcaatctcatcagcaacctctttcatcgaaggtcggttttgtctccgttcgttaaggcacgcagatgctaaattcccgagctgctgtatcgtctgcatgtcaatcttgttagctgtcttcttcagcagtggatcgatgc

SEQ ID NO: 41053 - DNA, 581 bp, Arabidopsis thaliana columbia
cgatacgtctacacatatattaaaaattttattcattgttacatggtacatacgtttatgaaagtgttcaagagtagaaatgaaaaagacactgccataaatagtaccataaggctacaataaacccaagtcaacagattcggagaggtaatttttcactcttcaagatttcaaattagatcgcaataaatgtttttaaaatgtcggtaaacattttgatttaaggaaccacagccaccaccatagtcggctgcggctgagattgcgtcgccggcgttactttcccgatgtgttccatctcatttgattaagcctctatataggtcgagtcatatctgtgtactcaatttatattattaaatttccaggtcaacaatatgaataagtttacaatgtcaaaagtcaaaaccatccaacaaccaatattaaccgtagagttgacttataacataattcagaagtataaaacatggtaatgagaaaagatcatccaatatgaatcccgtttaagtactatacatgtgaggtttgacaataagtatcacactaccatggactggctgtgatctagttgacaaatt

SEQ ID NO: 41054 - DNA, 476 bp, Arabidopsis thaliana columbia
tgaaagttcctcagtacagacatcttttgagtttgagaaacccaaacgcagtttccggaaagtttcaagccagtcgatagagccacccgctgtcgaagatcctcagattgaacttgaaaaggttaaacgtagcttgaggaaggtacataatcctgtagttgagagctctatccaacctcaacgatcccctcgtaaggaagtcgagaagccaaagcttggcgttgagaagacaagggaatcatcatatccgctggttcatgaaactgcagaagaacctgtgaatgtttgtgatgaaaagaaaaagcaagaaatttccgaacagcctgaggaggaggtacatgctcttgagatggaagtacatactcctggaccattagaaactaatgaagcacttgattcctcactggtcaaccaaattgacagcaatgaaaaagccatggttgaggaaaaccctcaatggaaaaggatacaaagaa

SEQ ID NO: 41055 - DNA, 536 bp, Arabidopsis thaliana columbia
gagaatacagataaaaataaaagtctgaatatggcttacgtaattgtactatgatcacgacatacttacttaaaaatctctatgactacgacagactaacatcaaaccatgcatgggagagttataagttataacattgttttactattagttacacaaaaatagtcaaatagcaacatatttttcagcacgggatatgtgactattcgtgaataacatacaaatattggccgcaaactacatctgtgactgtaaccatgacaacaaaaaccggctggtaaatttggcccattcaatcacgaactacaaactcgtggccatggtcactatatcatcaatatgtgaattttgctgcaaaaataattgaattcttttttttctaactaaatgttatttgaggagcaaaaaaagattgatgggctattaattttatctattttcaaaattttattatatgagataacgttttatattgacatcaaattatgtaaggaaattctatcctatcttaaaaagatattactttttgaaagaat

SEQ ID NO: 41056 - DNA, 520 bp, Arabidopsis thaliana columbia
atgaattccaaattgcagaattaagccagtgcagaaagttaatgttgcggttgttaaagaagtgagttgtgatttattagataaggatatgtacaagtaaaatgaatgaaacactaaacacggattatattattttacaatcaacactactttaacataaatcttgtattcttcatgtctgttgctttggagtttgcagcagcatgtcgtcggccatcagcgtgcgtgtcagatgacctcaaagccgcacggaaattgctgacgcatgagtctgtacttgacaatatcaccaagaagacagtatgactatcaacacaaatgcatataatcttctgactagccacgaagactgagagatgcagacataatgtttcaacttcagcctgtcttttcatgttaattctcgtgaggggactccaaccggaagatagacaacgccaacatccttgaatagcaaaccagttatttgtaacttaagcataaagtttcagagaatgaataaaccaaacacgataataaa

SEQ ID NO: 41057 - DNA, 552 bp, Arabidopsis thaliana columbia
gtcttctaagactgaaacaattcgagcgggcacaagaaagatgcaaaaagactagcaattggattaaaagaaacagagtgaggacattataactaacttggttttgctttgaatctttcggagaaactcaaagattgaaactttgaagaagattagattaataagaagagtctttaataattagaatatccagtcttgagattccccctcaatgatataaaaaagtcaagactttgctcgtcaacggccaatttacattgcactggagtagaagaattcacatcaagttttgattagcggaattttaaattgcttaaatttagtgaactcgagattttttaatgtctgaatgagaaaaagattactcaagaatttaacataaacaagattaatacattggatccatatgacattcatgtaaaaatccttcttctaaggcgtgctatacatgatctctaatccaaagtgtcaatgcttttgggatatcatatgggccatccaatgagagaagaataataagtcctttgttgttgttaggccgttttgcatgaa

SEQ ID NO: 41058 - DNA, 2027 bp, Arabidopsis thaliana
ctaacgtccgccagtgtgctttaaatgaaggattctcattccatttctatttgtttgtaaaaggaaacttgaatcattgtttgttgttctattcaacaagtgttttttttgttcattttggtataggtaagcatatattttccctttatatcttgttcaactttttgacaatttttagtttataggaaaagtagatttcatttgtgtaggattataagataaggttgaattgataaatttttatgtttgattaccaaaagtggcaaaagaaaacattagttgactagtgtgacacacaacacacacaaaaaagtaataatatatataatagcagagttttctctcctctaaaagtgtccacgtcactacatctttttaatgtggagcccacatgtttttactcgccttcacatttttttctatacgtgaaatagatttagtgatgtttatggggccacgatttggtcaaaaagcccatgagccaaagaaccaaatagacttagtgatgtgtatcgggccaagatttagtcaaaaaacctatgaaccgaaaggacctaagaaaacccagttaaaattgcaaacccttgatttcattttctcctattcgatcgacgcaattcagaggacgacgaaagagaaaaagagtgtttcagtcactgccctgttgatgcacgaatttcaacaaagtatatttgtaagttctttgataagggaaaaacattctcatcgcgttgaaggtcgggagttaggtcgttcttgcgataaacataagagtttattagttttatagctgcaccttgtaaaaggctgcctacgtacccttagaaaagggatcaagccatacgtagttcatattataataagtgagctaggtcatcgttggaggtaggtcgtatattgagataggcagtttagagatgaggtggcaggttggtgacgagctggcagctaggcgacgagctggacgaacttagttacgaggcgaactggttgatagacaacgagttagacgaactgagtatttgagtgacgagctggtagccaggggccaagctagacgaaatgtagtagagagacgagccggacaaatcgagttctggtgaaagtatagacgagctgggagacgagataggcggattgtgtagtcaatggacgaactggcagctaggtgaggagatagatttatgcacttgagggacgagctaacgactaagtgaggaattggacgagctgactagctgacagctaggcgaggagatggtcgttgagtggtggagcttgaagacgagctgaacttaaagacgagctggagagcttaaagacgagctgaggagcttgaggaccagttgaggagcttgaggaccagcagaggagcttgagggcgagctgaagtgcttgaggacaagcagaggagctagaggacgagcagaggagcttgagaacgagctgagaagcttgaagacgagctgaggagcttgagagcgagcggataagcttgaggacgagcagaggagctagagaacgagctgaggagcttgaagacgttttaatatggatttcttcctccttttttccttgagatgcctctctatttatagaaaaactaagctggtgatatggaccaacttttatgggctttttgggattgatgttgattagtttattcttgatttgggccgaactaaaatgaggggtgcaaataacaaagatattccccttttaatcaaagatcagtaaaaaaaatcgaagttataattacatactaacaaaaccaaaaacaaaccaccccgtgcaacgcgcgggtctcctccctaatgaaaataattacttacatatatattgcattattgtgtatacttttcaaagtcattcatattattgccgacacagcaatatataacaaaggattctggaatatgagaatataatgtagtggccgaccatatttagcatttattcatagttcactacacgacaaatcatacgcgcgcatttacgttaacggtttttttttttacagggtacga

SEQ ID NO: 41059 - DNA, 663 bp, Arabidopsis thaliana columbia
gtaacgggtgccagtgtgctctaaagccttaaggtaggaatacatcctctatatatcttggcgcattgtgcgtgttaccgatggttacttatgtgctgccacacatccctccttcagaatatctttctgccggaatctatgacattcctaccgtgtcttcaccgaagaggattcgtgatactctcaaacacacggatgaacggtgcaacatccgtggcaggaaccgataatgacagttccggggatgtcgcataccacctgtaagaccagaaacccgttcaggctacctctcctacaacactggtaaaagcgtccttagacaaggggacgcaattgcctttcttggacttagcactgggccagtggtcataacagtttcaatagaatgccggtggtccgcttttcggtttgcttgatgaagatgtgtcagcagctgtacctggagatattggttggtgcctacaagttgaaactcgaagtcatttgcagaaccagctcttctggtggcgacgtcggcaaagaatgttcacctaggcctttagataattcggatgccactgacattcgatgtttcatgctgttgctgctaggagaggcaaataactttccaggccggactgtctcagagagttggactgtattttactcagacttcttgttgtg

SEQ ID NO: 41060 - DNA, 592 bp, Arabidopsis thaliana columbia
ttatttgactattaaaaaatctatatttgactacttgtggacccagctaaaatccggtttacatacggttaagcttgattaaatcgttcaatcctgattggacacgtgtaagcttcttctcattcgtgccgggtcctgtcctcctttgtagatcgtctctctcaatctttcaaaacgagaacccggttttttagcggttaagcctaatttggtctggtttgtttttccttaaaccgtgagtctcgaatccaatcatgattggacacgtgtaagcttctttctcattcgtgccaggtcctctccagtgtatgtagatcaatctctctcttccatctctcaatctctcaaaaacaccaattccaatcctgtttccttggatcagagatacgaatctgaatcacaatctcgagatcttcagtgtttccaacggtgattgatgttcacgtggaagaagaaagcagtggaggcgatgggtctgagattgatgaggagtttggcggagatgattcaacgacgtcattgtcgcgatgggtgttcgatgagaaagatgattatgaggttaatgaagattacgacgatgatggatatgatg

SEQ ID NO: 41061 - DNA, 548 bp, Arabidopsis thaliana columbia
atgcctacactcactcctctcgcacatcttctaattttcgccgccgttaccgtctttggaattttttttggtttaccacactaatgttacatttttcgttagagatgattttgttttttgattacaacctcctacgacgtttgagttattgagattacttttataaatttccttactctgtttctttgggtcaacaattcaaacaatgatggtaatggagtgatcaattgacaaaaaaaaaacacgaatcaaacaatgatcgattatataaagctgttatggtctaataactgaataataaaatcatcataagtaaggaaccaaattcgaatactcgcaataaaccaataatagtaatttagtggataaaataatagttatgggttcggtgtcttacagatttgagtttgatcatcgtaattcgtaaacctttgaaacattttctgttttttcacaaacttttgggaatatttgttttggcttgacaaactctccaaatagctctttcgtcgtttaaaatctcttagttacaaaacaatgtattgagg

SEQ ID NO: 41062 - DNA, 494 bp, Arabidopsis thaliana columbia
ctggtcgatcagatctatagacgcctttcgggttagtagcaacgaaccctttctcgctatttcactgaccgactcttttcactagcctcatgtgccaaagagttgcaaccttcgtctttccagctcaagctgcgataaaagcaaaattgcattactatcacacccaaggcttgatcaacgttacacgattgaatgcaaatgactaatataacaccagaggcttaattggcattacacaatgaactgaaagtgacgcttaccactttcttgactcggttgttggcagcatcagttcctccaaagacacaatctgaaagatacgggctacgaacgcgtacctctttcatcaccaggatgtctgagttttccattgcacaggaagcctaaaaggaccataattcacatgtgattcattcgaaagagaaaaagcatattcaaacaaagagagtttaaggatttatgtagtctaaaactatgtatctagacagcttctt

SEQ ID NO: 41063 - DNA, 456 bp, Arabidopsis thaliana columbia
tggcctgaaagtttttataaattatgggcctttttgactaattcttccttttggtggctctcttcttcggcggggtaatattgttctattcttacagaattgggcctaaacaggctctaatgggctttacttgtagttgagttacgtggcactttcacgtgataatgtttagtttcatgataattagagctggtcccattgacattgatttgtgccaggtcaaaggtgatgtggcattaacaaacgattagtttaattaatcaactttttcagattatcaccgcaccaaaaatcatctagaaatattcagtagcgataactatttcatttaaataattttacagcatatatccttaacattataatatttggatacgtccccaaaatcatgaataaatcttgttattattagttacatctacgtttttaaattgacatttaagcaacgttgtatgt

SEQ ID NO: 41064 - DNA, 449 bp, Arabidopsis thaliana columbia
atttatacatatatattctttcctttttcgttcgtttaaattgtacaatggtagatgaagttgaatatagtagtaagctaaaggaccacccaaagtaataagtctatctatgaccactggacatatacaaccactaacaattttataatttcaatttgattaaaacagttcttacgtgcttacagtatttcttccattaatttcgttaatataacattcattcccattaatttcgtttaaattccatggcaaacaagaaaaatataaaaaaaattgttgacataatttttgtttcagcatctatttttatacagacaaataattacaacaaaatattcttcaatattttgtcgccacaaaaaatcaatattcagtgtttattattacatgcgatattttctagaaaaatctataagtcttagaaaaggttaagagataattatgtttga

SEQ ID NO: 41065 - DNA, 553 bp, Arabidopsis thaliana columbia
taaattcatcactaaaccatgcgagtggtcaccatcttagttatcgttttcgtttttttctttttcaagttaactattatgctgagtttagagaagatttagcgaatatgaatttgggagttgcagaagataaatccgtcttaaaaataaagtggcaacgttattactaatgaagatgattaaacaagaattgaatgatccgaagatgtgtaaacggacaaaaataggacgcgatgaatcgagtgaagctggtcccaaatagtaggattggatccaatgccaacattctcattgatctctccaatcttgtgttactcaaaactcaagcgaccctttgcgtggaagctaaggaatgaaatttcactagagaatttataatattattggataataaaataaattgggttggaaaaacctaacttgaaaacgtcaattatttcttgggatgaacaacaaaaacgttaagcaatagttataaacttcattttaagttcctaaacgaaaacttcaagtctctgattttcaatcttataatgacgcattagatgtgaga

SEQ ID NO: 41066 - DNA, 581 bp, Arabidopsis thaliana columbia
taaatatttgacatttcattgtaattatccaatgtgttcatcacattaattgtttacaaaatatttcttaccctttttatagataatgagaatgatctagttttgttgtaatttcgtttctttccttcttcactcgttaaattttcgtttaatcagacatcgatctcaaaagctctcatcttcaatctcattgagaatggatcatgatctcgagatcttccctttactctcctacgtcctccaccattccgatcccgcttctcacgcgccaccgtctctagcgattcagcaatctcttgcgaatcgttatccccttctcaccaatccttatgtaatctcctcgttgattgaatcaattcccagtacaatcacgcagacccttttcgtatttggctctcttgggccacgacctgatcctttagctgtctcttctgctcggtctaagatccgagagatcaaagagaatgattctttatcgccggaagatgcggctaaggaagagcaggtttacgctgcggttgtgagtttagaggaagttcatgaaggatatgagaagcagttaagagatttggaggaggaga

SEQ ID NO: 41067 - DNA, 904 bp, Arabidopsis thaliana columbia
agctcgaattcgtaacatagcttattcagaatttaagacatatctttcaatagagtgcaattggttgtttagggtttaatgaatgatacactatttgcattcaatataaaaactttccctatttgatgaattcatgtatatactagtactacatagatttccttaaataaatgaatgattaacaaaatcagaaacaatatattcatctagatacagatattaatgttttttttaataactcatcctatattttaaaactcgatcgttttctctttatatatacctttcttaagttaccttatatacataatttaatcatagaatttattaagaaattgattagacgtatcaattatatcttgaagtgattttgattgtttgaaaacgaaatctaatctaattaatttgcaggtgatattgtacttaagttaacaataaaagaaactaattatttgttttcaatggtgaggaggactacttaaattcaaaagcgaacgcaatcataaacagacatctgtactgagagagatctcgaggacccagcgagaatgctgacgtgacagtcaagtcaacgctccgcgtacagaccgcgtgaacgtgtgatccgtttaattgtccactctggcgttttataagagaaaagaaatcattgatgatagcattaacgcaattacagtcataatccgaggttataacagagatttttccaaacccggtacgggttaaaaaaaaaagcttttaaagtcccgggtcggagcaaaagtcgttaatagcttcgtacccgataaatacggttgctctctcgttttttccagcagagacactttttctaattttctcttcttcttcttctttctcgttttgagagaaaacaaaaaaattctgaatctacaggtttcacgaa

SEQ ID NO: 41068 - DNA, 639 bp, Arabidopsis thaliana columbia
ttttagctaccaaaacagttctctaacttgaggccctaacagtgatatgccacagaatcaaaactagtgtgttgtttcaagtggttacgagcctaagattctaggttttgagctgtcaaaaaggaggttctaggttttttctattaatgagggaaataccaaggacaatgagtgggacaaacagcagcttgattcaagaaaactctaacactgggtccatatcagatgcatattgtgaaaatataccacatttcctgtacatgcttagagttccaatcaagaaaagactagctgtgtaatctattaggcactgaaaccttccacgacctgtgacaattaggacaggacaatagactgtgatgtctgcaaaacgcactctaaactatataccacgattctatcagcacaaatgaactactatgctattgctcacacacgtgcattattagtttctgagcaggaaggaataaactatcaccaaattcacttcacatcatttcctctttttctatctgttgaaacatctctacagatatattcaattacatactcttcttctgatgacaatacgttgcagtgcctgttatagttagaaccaatgggattatcagctaccaacccaatgttgaaacacgttag

SEQ ID NO: 41069 - DNA, 559 bp, Arabidopsis thaliana columbia
ccgaaatgccaaaaaaaatagcccgaataaaaaaaaaaggtcgtttttgtttataagcacttaatttgattttctctttaggtcttatttctcgagttgaaaatcgtcctaatgaaagggaaagttaaatcacctcacattatctaagaccatatatctaattatatcgggccgtcggttaagtcatcgcatattaagatatacaaatctccactaattatccataacaaagagatcagatatatgaatgattatatagactgattccataaaagatattaatcaataactagttagttggagagcgacgtgatcacaacatggtatcaccatgatgcaagtatacatcaccaactgcttaaattattaatcacatttacgacaatatcattgtataattgcgttgacctacaatggtaataccacatcaaggtcttgttaaagttgactcattagagataagtttgatctcgtattgattttagtcatttttacgaaagatatgtggagcttcggttctacaaatcttaaattttaatacagaaatgtccatatatat

SEQ ID NO: 41070 - DNA, 482 bp, Arabidopsis thaliana columbia
ctcggtagctgtttcctaaacataccgttaacttccttcgctcgccgaacattgtctctgtcattgagtagcgatcaaagaggcatttcgtcgaacacttggcgagcatagagcgcgatgatgaaaggaagcaaggcgaatctctctgccttagcggagaaatgcaaagtaattactctcatcttaatctttttttccagaaactgaatctctttctttgttttgatttaatttttttttgctaatttcttctctttgtgcagactgtaatcgtttcgaactggcaagggtacctaaataccgtcaaacctgaagataaagctaggtaatttcagattcttctatgaaataagcttttttattcgttgatttcattcattctcgatcatgggactctggaaaattgtatattgaatttgagtgtttttggctggtttgcttagtataatcatactttcaagattaagtatgtgatgagaaga

SEQ ID NO: 41071 - DNA, 327 bp, Arabidopsis thaliana columbia
tttaaatatatgaaaccattcttcaatgacatttatgtacagtagtcaatagaataacagtgattgaacagggtgattataatcgcacaattcaactgactatgatcgacgatgctgcaacgagtaataacgtctcttctacggcatcattggaaccagagaacagaagagttcttagcaatttagagaagatagagtgctcgctagaaagagctctagccaccattaaagccgcttcgatggatgatcccgttgacgacccggactatgttcctcttggtcctacgtagaggagcgctaaggtcgttcatcggtaagtgaaatgaa

SEQ ID NO: 41072 - DNA, 635 bp, Arabidopsis thaliana columbia
tcacttgaaaagttgtgtcttttttagtgttcgaactcagttccgtagtcaccaatttgaagcatgtctctttggatttgaattaaagtcctagtaattattgttcaattgagttctctttgcctcattgtgcaaattctatagtcagaagtcaagaaaagttgagatctttaagtggattcgtgtgccggacttcaatcttcagacagacttaacttgtagtagaggaactaggagtttgtaaagtgaaaatattctcctttggctatgaattgagttttgatacttagttatatgacgtacattgttttgaattttgatcatcaaactatatgtgaaattgaagagaggaataaagattgttgattcctctcagcaattgtcagagtatgtaactgagtgagttctagacggttaaagaatgtgaggccttgtatgttaggttttaagtattgctttctttgtctgtataaatcttaagtcttttgcttatagctaaaggatcaggcagagaagggggtaggtttctgaaagacaaactttattcgtgacaaaatttggtgtgtatagaatagcaaatagggactggtgcaacatagatatgaaaaacgagaatctagaactgatgacatatg

SEQ ID NO: 41073 - DNA, 523 bp, Arabidopsis thaliana columbia
tttttgctgaaactcttcatcaaacacactttagatcacttggcttaaaaatctacaatagagtgtttagaccaagtgttgcactatggtgagcagagcacattgccgtttcacctgaatccaatctaaagggaaattttaaaattccaataatgcggtatactataccgtactctttagaagctacattcccattgctatggcagcaaacagagcatttgacaacaactccagcatcaaccgccacaaaacagataccattgtgctttcattttcacatatcaaacttaaactcttgtcatcccaattcaattactacttgcagaaattaatgagacccaaaaggaaaaaagcgattatagagaagcaacatagatgacaatgacgagagctataaactatacagttgagacctttaaactcaaaaacagaggagaaaggttgaagctttataaatcgcagatttggtccattcattcaccaatcgaacacaaacaaacccaacaacaaacatcagaaaact

SEQ ID NO: 41074 - DNA, 627 bp, Arabidopsis thaliana columbia
tgacgcaggaataccagccttctcaacaagcttggcaggtttcataatcacaatcggggattgatatacctggttagatgaagaagactgaactctcgttctggatgacattgcatggttggaagttgcagaattttctctttcataatctctttgaactgcaaagtttgtggattgttgttgtttctcagtatctaggaaaccttttgactgcatagactctaatatttgtttaagggctcgcagatcttttccagaatgtttgaactcaagatcattcaatctccgctccatttcactgtacacagtaggaggaaaattaggtgcttcatacggcttcgctttcacaggcatgctagcttgcttttgcaaaactcggtttctatcagcgtgtttccatggagctggttcaacggggaatcttgtatttgatagaggtttcataacaaaatcagagtttctccatcttggagaagccgggtccttcccaagcttctcggtgagctaggagaaaaacggattgcacggttcagatttttctcctcaatgatcttgagaatggatcgtcattttggtcagagatgttggttttgttcagaccaactgatgaatgtcctaccaatggag

SEQ ID NO: 41075 - DNA, 1471 bp, Arabidopsis thaliana columbia
gtgtgtgcgtgagtgtgcgtgagtgtgctgtgtgccaggtagacattttcttggttgtatactgcagctgctgtgtgctgcggattcgttcataactcttcaaacatcttatcccttgaatctgctacagtgatgcattgatggcagcctgattccgactggacatcacctactggtggttgagcttatccatcagcgggtgcatcctcaacacggttaaccctttggttcgcaacacgtcctcttttccttaagggcgccattctgaccaaacaaacatcaatatcagaacaatcacaacaattctgattaacaaaactaaatctcaagtcttacttcttatactaaaaactctttattcttaaaacatttcgttaaaatctatcttttaagaaaactcttcgacttaaccttccgggtcagcagtggcttgactttaacctccgctctgataccatttgtcacgcccgtctccctcaacattgagacggcgtgctttcactttatttatatctttcctctattcaactttcttaattcaaatacaaaattgtcttaaaaaaataatcgtaaatcattgaaaactctttaataaatcgtataagaaaataacaatagtagaaataaaaccgaggttcccaaaatacaccataagccagacggacttgagcgactacacacgattctcaccgtgacctggggaaaaagggaaaagaaaggggtgcgtaaagaattactcagtgagaggatcctttccgcccactggaaatacgatacacgattctacctttaaaccacaatcaacaatcacatagaaaatagacacaacactcttatagtctgcatctctatacaaaactataacacacaactcattcttgcttaagcatgatctccacatcattttcaggttcgatcatcttcctgacctttgaacctatctaattcgactggactcctcagtcttttattgagctactaagaatccatcaattcaatgtagaccatttccactgttccacttttcatcatcttaaaattgcactttcgcatataacacatataattacttgttatcacaagtacaataattcaatcatcctataatagtagaacaatcatcatatcatcaatcttaaataacaattcattattactaagcacataaatctattcatgtgcaatgaatcaagaagcataaaaatagaaacatgtattcgaatctccatagatcacaacatcacctgaatttgggatgatataaagaggttgaaactccttgacaatatctgaaacttgcagcacaagaaaacagcacaaagataaattagggtttctacagttttgacaaaacaggtgattcttgtccaacaaggaatcaacgtggcaggtagggtatatctttcctagtgacgacgaagggtcccatggcttctccaacatttcctctgaccaacaactttcctttttt

SEQ ID NO: 41076 - DNA, 594 bp, Arabidopsis thaliana columbia
tattgataatcttttgtgtgcgataatcagccatttttatttattttttgacatatttgcaagtcgaaaagtattttaaaagatcttaagtaataatcagtcttgaaagattttgtagtagtaaacctaaaatttaggcttaaaagtcttggagaacggtcgatatagataaacaaaaatcatgtggaactagtctatttttcttgtatcctaatagtaacattatgttataatgatttttaggattataaaactgtcggcgatgtatgtttttgttcataaatctaacttttagatgtattttcatgacaatattcgaatgagattaaaaaatatatatgtagtcaacgtgtgtttcggataattttcttcttaaactgcttgtaaaaacactaaatgattacacctcataaaactcttcgagtgaggaaaataaatcttgctgaattaaaagaggaaagaaagtgaaattggcatatggatcagacagctctgcctgtcaaccgattgaagcactttctctgttctgacagccaacagtttgaagtacatgcaaggtttttaaaaaagtacaatttttagtgaccgtgagta

SEQ ID NO: 41077 - DNA, 452 bp, Arabidopsis thaliana columbia
caattgaaaaaatctcaaacttgtttttcttttatcatgtaataaagttgtagttccacttgagaatatgttttttttttcctgatatatgcttcgcaaattacatatatatcattttttaaaaatgttacatatcacttattaatttttttaaaaacaattaacgatttattaatttaatcgatttatgtcatttttaacattgtttcaatttgaaatcgattttattttattaaattataaaaatgattaatttattgagtattaatttatagagattttattctatataacattaggtggagaattacatttatattcttcttaccttcatattaggtggaggattacatttatattcttcttacataagataagtagaagaacatgtgaactactgaacacgtgaacgcgtgatccaccaccggttcgttctgcaataccgtctcaag

SEQ ID NO: 41078 - DNA, 582 bp, Arabidopsis thaliana columbia
aaactaggaacacactgatactgcggacgtttttgaagtttattcctgtttataaatctggctgattttattctttgacagtcaagtcaacgttattattgtgcagtgaccattggagaggattctgtaatctcagcttacaggttggtaatatcttcattgatgttttccataggctgctttcatggtgttcttttgttggtcaaagaaatcttttatgatcacttttgttaattagagttattatgttatgtttctttggaaggctctcagaagatagagggagatcacttgttggagcgattctatcaaaagttgtgcctgcagctgcttcaacgatagcttctttctctaaactgatctggagaagtaatgatcaatcaccaaagcgaaagctagaagccaagactcagtcattcgctcgaggtaggtttcatgggtctttaatccctacaatttttgaacatccatctgtggtgcttaactttgttaaaaatgttggtacagcatcgtccttgacatgtataaaggactacccaaggaaaggagagaagctcacgttatccccgagtgggacattag

SEQ ID NO: 41079 - DNA, 594 bp, Arabidopsis thaliana columbia
ttggttgtttagtttaggtttagatattcccgagttcctcttacggctaaacgacagctcaattgtcatatatacccctacctaattaaaacaattacaccaaaacctaaacctacttctctttcattcctcgaccttaccctaacagagacggcggctacttctacttcattcctcgacatttacttcgccggagctcttcgccgtatctctcgcaggaagccactcctatctcttaccttaatccactcttccttgtttcttctcgtacgttctctctctctcactttccccttctatctctctcgttttggacaaagttagattgattgttgtggatcagtttcttcttgtgtacttcgcttttttagtagaaaatttactttctgcacgtgtttttgattggtgggtattgtcctctttgattggataagtgtttaaaatgattgtccaagtttgtattttcataagactattcacatagattaaacttatattgaacacagtagaataagcttatgatattgagccagattgtgtagaagatttgtctatgctcaatgataacctaatgatattacttgatgtgatgat

SEQ ID NO: 41080 - DNA, 512 bp, Arabidopsis thaliana columbia
tcaaagcagtttttctcttttctttttctaattttcaagatagttagatcgttgtgaagtttgtaaataacataattggtttagaagctgtttacttttcacatgggtctgctctgaaatcaaaggaacaaaagggtagttactagttaggcaactaaacccatttgaactctttttttcttctttttaatcaaatcctcttgtttgacttttcgacgtttatgcttttactcatgtattaggaaggagttagtgacaaatattattgacttatacggcttttaaaatatatatgagaaaaattggacgattttatatcttttgtttgattgaaaaagagtcgtattgaaagaaaattaggacgctttcttaaatgattttatctcaattgattataaagtttcgccgataatgtttttttatatgttagtcttacactgaaagtaaagcggcagaggggaataattgttctagtacacgagcatgcccttgtataattataacatctatat

SEQ ID NO: 41081 - DNA, 508 bp, Arabidopsis thaliana columbia
  unsure (1)..(508): unsure at all n locations
nnnnnnnnnnnnnnnnnnnnnnctaaaggacgtcctgtagaccttctctggcttcgtccatttgcatcttccagaggtattcctgatacatacttgtccttgcactaagagtaaaccgattgcgtttgcctagaacggtttcgtatccagcaaccacctccttcttgaatttgtaccctaactcccactccgcaatagtttccccccctacgttgtaaaaatcgccgagacgaactaatgggagataaggtagtatagcgctgcgcgccagttttttccagctcatctctcagcccttggtgagccactaaaaagtagtcttccaagggaacactaggtctcagaataggcttcagcttcgccgagtgccattgttggagcgtcgccgcacagagacctgagcagttggggtgctcaatttcagcaaatcggccatcgcctcagaccacgcgacgaacgcgttttccctgaggaatttggacagcagctcgaggataatggggcctgg

SEQ ID NO: 41082 - DNA, 815 bp, Arabidopsis thaliana columbia
tctctacttctttactttcttcttctctttcacgatctgctccttttttctcaatatgacagcgagaggaaaagctcacaacaattgattctcttcatttatctctctcatcaccaaatgcaactagggtttatcaatcttaacgaggaaggacatgcttacatatatagatgtggtcacaactactagaccttgtcgctttgtggtttttcattcacttgggccttaaatgggctgaatcataatgttaaaacaaaatgctccaagaagatgggagtgggatgttacatgattgacgtgaatttagaagttttgtaggttcaaatcggatggacaaggacaagaaaggtgtaggcgatagtgctgatgttctaacgcaagttttgctttatgtggtctgcagattatagttcaaagtacggtcactgataataagaggggtcctatgattttcaaacctttccacttgatttactctattgtttgcttcaggaaaagcaagtctatgtctgggggagttgaataacatcgtattttcttacctatattagctatttttttcttatattttatgaaacatttggattaatttcaaggtctaagagatgataatcaagtatttaagaagcgaagaaggttttatgaggcaagcaaaatgcgttttctaacaaattcaaagctttgagggttttacaccattggagaacttctcgtgcaccaaattgagagtttttggattctatggaaagctagaagagttagtaacacataaagtaactcatatgatcacatttgttttcatgccagtagagtga

SEQ ID NO: 41083 - DNA, 407 bp, Arabidopsis thaliana columbia
tgttcaaaagcaccagcttctctgtgttcttcaacattgccatgtaagcatttcctcatcttttcaagaacacagtagctagagcattacaaatattcgtggattctggtattatgaagcctaaaaatatggagtctttttgtgacctatggttattgtcgtgtaggataacatctggactggccttgtctctgtttctctggccaaccattacagaacaacttcacttgacccgtaatgtgtaccgacacttagtaacgagttgccccacggctaagaccggtctgcttggtggaggtgcctttgtgtctttggactcgtgccttatctggttggttgctctgatgctcgctgataacgctcgtgtagaccattcagatgaagttgagagcagaagcatcgatggg

SEQ ID NO: 41084 - DNA, 973 bp, Arabidopsis thaliana columbia
ttaccttttcgttctaccaataatataaatattctcttttttcacctaatgacgtcgaagataccatcgtcacgtgacatccgcacaccatatgtattgacattggtattagtgttgaaaattagaaggggtgtcaatgggccgtgcttgaagaatatagtccgaatcaatctcagagtttaggcccatttcaatctcttagcggtataatccatcattgtactagcgtttaggcccatttaataaaattgggatatataatacggattacaccaaactataaagttttgaatcccagagcatatgcactgggttcatatgagaactgacaatacaacctcacacaatcaaacccttccagaaaatttcttgttccatatcgaaatttgttaagttttaggaaaactggttttcagaacataagaagatcacgaacatcaaataaaacagactgctacagtcactctcatatgccaaaaagccaaattgtgtcaaaataccaacaaaaaagacaagaagaaaatgcaacttcaactacaaccaatctcgcaggattcgaacagacaagaaacatgggttctctgctttaatctaattgttatctttctcaaaaaaagaccattccttaacgaccttcatgcatcaaaggcggataaagcctagcgtgcaccagcagtgagttttagttactgtctgaaaccgccattttccactaaccctatatgcttcaaagaacctgttacattcgagattcaactgtcttaagcaaggcaatatatgattcagaatggaaatagcagaacatggctgagaattgcgattcttaccctccagaatttgcattttttgagaatatgaaagaggtgtgaccgctcaaaattggcctcttggtggcatagcatcagcctctgagactcttatttgtcttccatcgaatcctttaggaaagtacacatgagttagatatttgata

SEQ ID NO: 41085 - DNA, 557 bp, Arabidopsis thaliana columbia
atcacatttattcactatttaatccaactccattcaatatgattctctattcaattattcaactcttcgttcattttccctactcgcatgcatctctgtctttttgacttagaaccaacctattggggttcctattttatcaaatcatagctttttgatcaagtatcgaattatactattttctccattttagcatcacaaaaacttgcaattttctttgctgtgatatatgaactaatgattcttaagacactaattaacaagtcaagaaatgagcctatcatttaggttgagccattctcttagagaactcacaactaaaaattacgtttaactacacatgagactatattaccgtacataaaataaagtttcgtgtatttatagtctcaaaatcactagtttctcactatactggttcatgttaatcttatagcgtgccacatgggcgcggttaactccgatcaacccgtggacctttgaacctggcccacttaaactaagaagtaagaaccatgggtgttagataatctgggaggttgttcacaaaaaggttg

SEQ ID NO: 41086 - DNA, 280 bp, Arabidopsis thaliana columbia
tctcttaagttttctttgttataaagctgacgctgtactgttttatacaatttggttatcaggagaatgaattccttcatgatgtatttagtttcactccaaagaagattggtggaggaaagttgtctaatgacgagtaggtatgtgtccggtatcttcattcactgtctcgcatcttatcccattgcaaaaaccttgtgaacaaaactggattatgcgattagctgatgcagaggtagtcgagatcagctcactcagcgctgatgccagcaaagcagca

SEQ ID NO: 41087 - DNA, 512 bp, Arabidopsis thaliana columbia
aatagcaacgtacaattgcgtcaagactaatcagcaagaattgcgtcaggattattcataacctaaagtaataaatgtttaaataggtcaaatatatactttttgaaaatacgttacgggagtacataacaccatatattctagcgcatgtaatttctgagtcgaaaagttggagagttgcccaagaactagaacatgacattgatgcggaggaagaacctgaagtagttgaagcttgtgagtatgcgcacgttcaaagaggagaagctatgtgccaaattgacgcttcgtggactggtattaaccagaatgttagtttggggttcatgttgactagctcaacgaccaagctgtttggtcaaagtagccagaattgttatcgcaatgccctctacgcagaactcggagctcttctttggacaatggagtgcactttacaacaaagtatccaatctatacattttgaaaccgattgcttaagcttacttaagatccttgatgaaagtaaagat

SEQ ID NO: 41088 - DNA, 494 bp, Arabidopsis thaliana columbia
aaaaacatacaaagaccaagctagtgatccttatatattctgtgtttcctgccccaaagagtttggttggcaaaaatgattatgaaactaattttaaggtcttattatcaatatcattactagttgtctgaggaaaactagtcgtcaacatttttgatttttgatgatcgatggaacctaattttgtatagagaatgggtcatacatttaatcataatcaaatacatgttaacacttatattaaactgttttcttgatcaaaaccaacaatattcttaggtttgctgagacatagtttggctataaatatacaccctttttccttccaaaatctgttcactcccatgtttttatggctactagattgttgcttacatgtggacttgagtttaagcttacttgactggatctagagtaaaagtctgttgtctgaaaaaagtgttgggagttggctagtagtatagcttcaaggtgctacaaagggagagtgatta

SEQ ID NO: 41089 - DNA, 513 bp, Arabidopsis thaliana columbia
agtggctttcacgtcctttgctgttatctcccgcgtaaacatttccaaattaccctctctctctcaacttctcctgatatcaaatctcatctatgcccacatcttttaatttgtatactcctatacattagaagaaataatcccacatttttcaataagaaattgacataaatctgcagatatagatccaaaatttatggaattgagggacaacatgaaaacggagaaccctaaaaattgttcggctcaaaaccctagaaatcgaacacaataattgatcataccaacacaaatatatcatgatcaaattcgcataagatccggtaaacaaaaaatgagaggaagaggttgttacatgttccaggagctgggtaaacgagagaggaggaggagaagaagaagagtgcgttgaattttaaaagaaacaagaaattttaaaaatgaagaagaagaagaattctgttttgtttctttatttgtttgtgttgagaaaacaattgtttggcaaatttg

SEQ ID NO: 41090 - DNA, 1366 bp, Arabidopsis thaliana columbia
aacttccactttgaaccatgttttttgcataaaaatatttgaatccggttctctatgtaggtcaaattagtcatgcaagaaagttagacatggttcacaatgttccctcgcacattccttttttggactgtgtcgtgccaaagttaatagaggctaaagaaaaattccaaagatgtggtctcgtacattctatttttgagagaataaattattttagaatgtaaaaaacgaggaaattgttgctcaattaaaataaatttcaatgaaaacgagatttagtagttaatgtaaagaaaaaacaaacaaaaatttcataaaaattaatgatatgagttttgttacaaaaaaaagaggtcctaaaacactgtataaacatattattttttgcctaatttagcaaatattgtggccttttatttgtatattttttggtggctaggcaaatgactttttcttcttctatatgaagcacggcagtgactaacaattagcgaccaaatcttatttgtttcataatcgttgattcatcgacaaaataaaaacaattagttctttgtcgttggcaactgcaaacagaaaataaaacgtagtactagttaacaatgttaatcattatgattatatatccactgcgagacgaactcatgaacatgtcaacatcaatatatttcaaggttcaaacttctttggtttgcaacatgcacggtgtagaataaggtattgaactgacttgattttattgattcacaaactatggtatttatatacaatgatctctatcaagagataaacataaatccctaaaatataggttagaaactctatcatcaaagatattgtactaatcctaatcggataacatatatccccaatactcccccgcacgacaaacgtggtacgcaaaacacaaactttgcaatcacaaagcggaacacgtatgtcgtggacaatatgtcgaggacggacaaatcatgtaaataaacatcttagggtataaacttcattcttggggtggaacttcatcatgtcttcggtcttggtaaaagggaatacatcccgtgtacgcaaattatgctgctccacaaacaatcatctttatcttggacggtctataactcgggactaaacatgacctaaaaacatgaatgttccacaaactctactaatggctaaaccataaccaaactcccccgtaacggtaaaactattaccaaactctcttactaagaacacaaaaactctgaaaatttcttaactcaagaataattccagtaacataaaaagaaaaagaaaaaccaaaaccaatcctactaaaaacatagaaaaccaacgacttaaagttttggaaaaataatacccatgtgat

SEQ ID NO: 41091 - DNA, 1054 bp, Arabidopsis thaliana columbia
tcaaaagatgataattcaaaaccaaatcgaaaccaaaacttctaactttttatattattaaatatgaaatatccacttcataattttggatatattatgatctgatccaaaaagaaattgtgaagtatatttggtaacgggtcggttaccaaaaatctagaatgatattttaagccatcctgtacaaaatgtatttcaaacatactagtattgatgtttttttagcagtttttatagatgaaagttgatcttgcaatattttttaactaattaatatgagtgttatgtgcaatgtgcataattaaggagtcaacaacaaagaattaaacttcgaacaaaccataaagaaaatttcacaactagctaaagtttgtagctttatcctacttttgagttatcattataatactaacttaaggtgtaaaacagcttttataccataaaggacagagaatcagaacatagaaaacgacagatagaggaaactctgtgaaaacaagcgtggctttggtcatcgagccatttgtccacaaaccaaacacattccaagaacactccaaacaaaacataaatgttttaaagacaaaaaaatccccaaaaattacaataaaccctaccacgacggtgaagtatacggcgaaccagacgagtttgattcactagcagaagtttccacattttttagtgaaacagagcatgccttttcaggtagatccttcattggagttaatgttggcgttgaaacttcgattatatgatcgttatcttcttcgccggaagaagaggatgatgactcaccggtctcaagacgtgacggtgaagactcaggggtttcaaatggtgtggttggtttacttgtagcgtcgttcgagtacattgggtttgatatgtagatgaagttgtctacagaatcgttaacaatggtttcttgaatcagatcaagagaagcttgtaaatatggttcatggttataatgggttttggttggagtttgaataacgcctgtgtagagaggattaggagaagaagaattgatgttagatggtgaagtgtt

SEQ ID NO: 41092 - DNA, 507 bp, Arabidopsis thaliana columbia
agagattattgggccgcgcactcaaagagggagaggcccacacaataaaccccctgtcactctggccatctcataacgggttaagaggcattgcatacgacacagatcctcctcttcgtaacatgaatccgcagcaccagcgttctcactttcctcatctgctggtagttccatagcgtgcactcacggaagtatcatgtcagagatgtaatcagttcaaggtgacgaagaccactcaatgctgctttgtaagttggagccagaagaacctgtgattttgaggttcttctgggcgaaaagaatcatccccttcttcgtgtatctcaatatcttcttctcccaagtcctcggggtcaccatccaggctgcaatcgccgaatagataagttgtctatgggtttggtccatgagacattgtgcaggtgtagtcctcagagagagccatctcacgctcagagagggagcgagagtacgcggagatgatatccataggggacgatgagcttg

SEQ ID NO: 41093 - DNA, 456 bp, Arabidopsis thaliana columbia
aatattttgaattttccatttcataattttgtttgacttcaaccacacgattaaatcgtatatgtaacattcaaaagtttcgtcgtgtattactctgatagtcaatttctaagatttctcaagtgactatcatgtattagatcattcgtgaacaaataatatattaaacaacctcgacattagtggtccatattttcgatcaggcccaataactgatgatgtgcataaacaggcctacaagcatctctgcaacttgtaaattttagaaagaaaaaagcccaacaaaggcatacaaagtgccacgctcaacaacgtgaagcaattagtggcaataaggtccttaaagctagcggtgacggcggatcgaagatcttccttagcgttgcagccgagctcaaattacatcaccatacaagctttctgcagcagaaaccgaggctaaccagaatggtatat

SEQ ID NO: 41094 - DNA, 524 bp, Arabidopsis thaliana columbia
ctttcagaaaccctgatataacgacttcgtaatatatatatcaagatacacttctttttgtcaacaaacgtaaaactatacgacattaattctaactaaagtctacggtgttttcgaataaccaggccataaactattacacgcacgtagtaattttatgaattcaaactgactgaagagatcccccaaaacagtccaataaaattggaaaggaaattgtgtatgtataaacttgatatataattacttaaatcaaggctgtcatcttagtccaagaaaacgggacgaaaaatattaaaactaaacgactctcaacagatgttattagtactgtcatgtaggtatgctactttgccttatgtcttgtaagatacacggtagaaaatgtattttcattcaataaataaaaagctttggtttgttatatctgcgttggcaatataatggccacataacaacgcaattcggaatttagcagttattaatgctataattttatgtgtctcatgtgtgtttgtatgggg

SEQ ID NO: 41095 - DNA, 598 bp, Arabidopsis thaliana columbia
ctacattatactgttattacgttaagcttaattcgctgcaataatgtaaaacatttatgagaaataagtaagtacctaactagtcaaaaagtgaaccaaataatttcaatatgaattaacacacatgtgaaaactgatgataacaaagggaaaatttcacggttaaaacgctatacacactatgaattatttataacttttgaatagacacattaacctttttgctacattgtatttaaacttatgtatgaagttgtgttattttatttttataaaacatagaatccatgctatttataaactatcatacttacgaaatgccttataagacacattaacctttttgctgttttggtaagttagtgtttaaataatcttgtaacatacgaaatgccttaggctgattttgcaaataaaaataaaaatacagttatttcttgatcgaactgaaaaatacaagaacagttatttaatgttattacttttaaattcttaattacatagcgactcatccaattgttgtatttttttaaatggtttactgttccattcaaaatcatacacaacataacacagcagtacaatgccagcgagtaga

SEQ ID NO: 41096 - DNA, 344 bp, Arabidopsis thaliana columbia
taatcaattttttctaaaatattaattaaaaaaaaaaactaattcatgaattcttgctaaagattttttggtattaattacctttttataacacatatttagttgagtaatttatcattaaattcattgtcttttcttgtatgaaaatatgattaagattttatcttttattttagtttttaaataattttgaaatagataaattaatgaaaatacaaaactttaaaacgaagaaatgcaataaagtgtggatattttatttgaaaatgctttggaaaatttgtctttggaaaatttgttatgtcacgtatagtacttgatatgagatatatttctttttaata

SEQ ID NO: 41097 - DNA, 638 bp, Arabidopsis thaliana columbia
tctgcacatttggccacaactataatgatatgtggccttcgtctatgcgtctatgtaacagcccaatttcaagcctcctctgtctgttcacacgagcgatcagatcatcagccctctggtttaatgaatccatctccaacggactaagcttacatatcttgccttctccgagcctcggtcgatcaatattccccttccaaaaatcgttgatatcccatttccaccctcacattttcattagaccacaaaccataagaatggcttctcagtaatgcgctacgtggaagagaagatcttggtctagaaatccttgattctccgatgaggatgatcacgataacatttgtgagaatgaataaaaccttagggtttaagatgtaattaataactctagggatggtgaataagaaaaaactattagaaaattgaagccaaattggactaaaaactacaataacgcagaaaacaactacgataaatgacaaggagaggcggtcaagaaaattaagaaatggcttcttgtaggttcttggtccgttgttactttgggcctcttgcatggcgattacgggaccatttatactataggtaaataaggtttggtgacaataacatgggatatatcttgatgtatagta

SEQ ID NO: 41098 - DNA, 522 bp, Arabidopsis thaliana columbia
tcttatttctctgatttcacgttttactccaacggttagcaactctcacaatcttccattataagaacatacctacgatacagaaaacaatgcaggggaaaagaagaaaggactgacctttattataactcgatctgccacagcaaatgggaaatggttacttttgtttcttgaacgacctgaatgattcgtgacaccaaatgcgcgtctctcctgtgtatatggaaaaggaacctcttgtttgaaacataaacaaatgtgagaggtcatatgtatagtagtattgaatttacttgatcaaatccttctcgttttctcttagatggatggtttgactgtgaattctcttctcggcagaatgcttgtaccgcaactcgtaaagctgcgaaaacatcgagagaaaataatgacaaggagttctctcagacaataccaaatacaaaaatcaagaacacaagtaattcactgactgagatttggggttacgagtcttctgagactggttgtgacatgtgcacaagc

SEQ ID NO: 41099 - DNA, 424 bp, Arabidopsis thaliana columbia
taatctcaactattaaaaaaatgcgtcttttacgagtgctaatttatatttaaacaccgaaaattttcaaaaaatctatttgaatttttgatatagtacatagttataagttaatataaatattagtcaatgctaatgattactgagtcatatgactcatgaatattaacgtgacatattttttaactaaatcgatgccgtttagttattttgaatttaattttcttttttaaaattagcaaaaattgaattcaaaatagcaaaataacgttggtttagttgaagaatataccacgtcaatacacatgtatcatttgactcaacaatcgttagaattgactaacatttgttaacgttaactcataattacgcaatacgtcaacagtttaggtaggttttttgaaaattttacatgtttaggtat

SEQ ID NO: 41100 - DNA, 294 bp, Arabidopsis thaliana columbia
ttccatggtaacaacagttgcgtgtgtgaggcacttttcagagatgaggcacttgtccttctatttaaacaaaaattagacttttttaccccttaactgaacgatcaaaaacatttattatcttaattatttaagataatttataatgagacgctcctcgcttactccggataagagcgtgtgattgcgaaactattctaagtatatcgtctctcttccatgttcttatgtggttcatcaatttcgcgccctcttgcaaaatcatcaatccaggtcgttccctcacttccgatt

SEQ ID NO: 41101 - DNA, 592 bp, Arabidopsis thaliana columbia
atagcatttgatgactagccaaaattagaacatcagtttctgaaccttgagaacctctatttcctctaacaaaattatacaaggacgatgcaatatctagtcactgacctgaggatggtcagcattgaagggcggaatccccacaaggaattcgtacaaaatgatgccaacagaccaccaatccgcaagttgcacctgaacagtaatggaaatatatctgcctttatggttttggtatgtgatgacgagaattgaatatttaaaactatagtcagagaggcagcagagcaacaatttagtatgaacctaaagctgctaataagctacatattcaagctttttacttacaccacaagataagtagaactgtaatcaacttgatataccacacatcttgttattcagataaacagtctcaacccaggaccaatcatttttctatcaacccagcaccaatttctatgtaagatttgaaataatagagagaagtgaaaaacaagatgagaaagaaatgcgtatgcccatgtcctgtcccaaaaggattctggcgctaagtagcaggagtgccccgcagacgcttatggtcaatgtt

SEQ ID NO: 41102 - DNA, 861 bp, Arabidopsis thaliana columbia
aaattaaaacactattgatgcatatggaggtataaagtcattgattaattatgtgttttttttttctggtatcaagattaattatgtgttatactaatgatatctaacatgtattcaaggaagaattgtggatacagaaaactgaagtatataatttgcgtgggggaatttatattgggcacacttgaacagcatttgtgaaaattcttgacgttaaaggaaaatgaaaaatgtgtgtgttcgtttacataaatacaaaaaataaaggtgctctatatcctaatacaaaacctagggggtagaagctgaggtggatcgcaatagaagaagatggtcggctctcactctcgagatcggacggctgagaagagaagagaagagaagagaaggagaggatgcgtttcttacggggagagagaaataaggccaaacaggtagagcccacaagatgactaatctccaccgtccaactcaaaaacaacatcaacaacaacacatcacaccaaatattattcggtttctctcttcaggtccgactcaatactgtcatacaccacatccactactctactactacagactttttggtgctcttccccctgtggagtccaaatcctttgacacgtgtcgttttctcaagagattcactgtcccactctctgcgtgattcccccccacatctgacggctgcagttcgccgccggtctactcatccgtcaaacgccggttactgctcagactttggtttgatcaaaataaatgaaaaaagatcaacggctggaagaggaagtagaggttgaatctggagccttagatttatatatactagaaaaaggtatttgggtcttcatgtcagtagag

SEQ ID NO: 41103 - DNA, 583 bp, Arabidopsis thaliana columbia
tgacttgaaggaagtcagtgaagaggttgctaagtacaaggtttgtttctttggctcaattgatgttattgttgttgttaagctttagtagagttcaaatatggattgatagcttggaaagtgaaagtttgtatttttgagtttgaaatgaaatcatatgtgttcttgcttaaaatgcagccacattctaattgagattattatgattcgttgagctttgaggagattacattttcattgattggtttattacttagtttggttagttttatgctgtatctgattatctctaagtaagcaagaatgcaaggtgttgtattattcgattttaaacacaaatgcaaactttcactttccaagcaaatagggttgattagattatagtactagttattttggttcattgaggtttgaggagacgacatttgtagtttctgttttgtgttttgattgattggtttatttttagcttctactgttacttgatgatttagtcagtttatgatcatcctttaacctatggctttacgttataacttgtaaggtggataggtgataaagtttgcattttggtttaaattgg

SEQ ID NO: 41104 - DNA, 748 bp, Arabidopsis thaliana columbia
caccattgctcatctcatgttactccattcacttcacaatacaaaatacaaattacaaatctcttttgtaacatttcaattcaaacgttactatagaccaacattctcttttaatgcaccctcgtaaatacactatccttttctgtatttttaaaacttgaatctcataagttcatgacaattacatttatacatacactacgggtgtttctattacgcttattttcaagattttaactccagcatggatatcacaaaaagggttttgctaaatatcttacgtgatgatgcttttaagagtcaaatcaataaataaaatctctatgttattaatgttaatacatgaattatccgagcatgatatttaatgagtcttacagtttatgttagtgtagtagtccttgtgtaaccatcgaaaattcgtaataccaaattttatttggggaaaaaaaatgtaaggtccaatatttgtgacaaaaaaatttttaatatggatgccaaaggagctacatgcctacatctaatgagaaaggctatataatatgcctgcaaaaaaaatgagaaattataattctatgtcctgtaacacctagagaagaagtagaaagtaaagagcttaaatctgaagaagtatcacagaatttattcttatgtatatttccttttaaaatggggctgttataaaaaattctctgaatctgttggcataaacttcgctgagtgtcatgaatcttgggggaaaaatagt

SEQ ID NO: 41105 - DNA, 556 bp, Arabidopsis thaliana columbia
gatatcaccgattggtgtatgttgtaatcatacattaacattaacaaacaaagatactttttcaaggattattctaattggcagttttagaaataatggaattatcctttactaatcatacagaaataatgtaaatatgtttagcatgtgtgaaatgactgttggtcgatttttaactttaataaataaaaaagcaataagaacgtggttttatttcgccactcccacttgcatcgtcatcatcaaagaaaaacactaatgtctagaccaaagatttaaaacatctaccccatatatatatgatgaacaagatagcaagtaaatttaaatgtaaaattaaattttagtttgctaagattaatatacaaaagaagtattatcaatttatcagttattaatcaaatcaagttttaagtgcaactcaaaagtttccatgcttatatagttatttgtatactactatactgtatgtgcaagaaaagcatttatactcttcgccatatatttcaaacttcacaaaatttaattaaatttttatacgatttatgtacctata

SEQ ID NO: 41106 - DNA, 866 bp, Arabidopsis thaliana columbia
tcctcggtggcacgggaaggtgtcgtcgtcgtggccgcccagtcggtgaacgcaccggaatccgacgtcggtagattatgcctcctcgttgtagccacagctgattataccaaaaccctaatcccaaaaataaaataaaataaaaaaatttaatagaaaaaaataaaagtcacagcacaaagctccaatgtacataacccataaatctacacaaatctgagctttgatagagaaagatgaagatggatcctaattgctataaaaccaaaaacaaaaacaaatccaaaatagattttttcgaaatcttctgtcactatctctgctcacacgcagtggaaaaagaacactgcgactctttttcttcgcttcctctctctatctaacaatctgacccgtttcctactttccttctcttaacaactgatcttttcttgttgctgtctgattttctttggtttcttcttgatcttttttacctttttaaaaacagaagtggtgtatgttttggtttcttgttctagattgtttcgtcttgttcctgtctctctctaattatcatcatggacaactgcagaaagatagaataaggcaagtgaatttttgttggtttaattttattttttattttatagttttattttattttataataatagctcaaagaaatggcacatgataccttcttctccttttcttggattttagctgaagtttataataatttatgtattttctattgatctttatcagatgacgaagttcacacccacccccggctcgtgcgcgtggctccacttgcgcttggcttcggttttctccagaaccggctccaccggttcattcttttaggtagatggttcggtaga

SEQ ID NO: 41107 - DNA, 496 bp, Arabidopsis thaliana columbia
aaataaaaaatcataataatgtatcaagcactactttcattctactctacttattttatgaataatctttaatccataatggctataaatttacttgtgttgtagtttagatgtttgctacctaacctcatattaatttattaattttactcgaatattttcttattattatgttttgtgatgatgatctaccatatgattttttctttttatttttgtacgttcttataacttggtaacattgacatacaattttttcacgtaagggtcattccagacgttagacatacaaaaaaaacttacgagactctacatggctgtatacaagggaagagatctaaagtattgacttaaatttctagcatatcaggatgtgattggtgtaataaatgacgagagaatatacaaaataaagaattgtttgttatcattaagttagacaagttttaaatacatacataatataactacatacatttatcaatatatcatatat

SEQ ID NO: 41108 - DNA, 390 bp, Arabidopsis thaliana columbia
  unsure (1)..(390): unsure at all n locations
gtattccttgaagggagcgctttcgatttaacttgctgatttatcatgaacgttaggttaggtatccttaatggtgattgagtctggactggttgaccttgaccgtctacgttgaggtcgaattcgctttggctatagaaatcgttgctctagggataatttatttaagatgtccccgacctctaaantgcggaaatgacagtaatgcattagaccatacccctgaattctttatctaattgatttcttcgtctaatgtattgttgtctgatgcacatctcttagtcgttgattagtttccgcatttttctaatgcctaccagcaaacgatactcgagtacccagctgtttcgaaaccgaatctggaattgcgtatacctgttatatttt

SEQ ID NO: 41109 - DNA, 1188 bp, Arabidopsis thaliana columbia
ttcaattattaacagtaaaagagatgaatgaaattgcaatgctttatcatataatcactaaggctgaatagtatcaataattacctcatccaacgataagtctagagcaaaaaattcaacgacctaagaaattaaaaatacattcccaaatgatattaaatacatttggcgtaacatttctgatgtcgaagatgttataaaataccgatattggtcggaacttaccgataaaaaaaattcacaaggttcctaaaaaaccctaaaaaagttaaaagctaatatcaaactaaaaagtatgtaactaacatcctttcaatacgaatcatcatagttgctacttatcgttagagaaaagtcgtaaagaatgaaacattaatgaacacatcaaaataataaaatatattatagtaccccagtttcaggaatatgctggcgcatgcagagaggtttaaaataattgatttggccacctatgtcacaaaagtgcacttatcttttcggtcaaaagtcctgagagaactccaaagttaagtgtgcttgggttagagtagtttcaagatgagtgacctacccggaagtgattgtcggaaccatgcgagtaagggtaaagcatgggaaaagatcatgtggtgatttgtagggccggtaacaagtctttaaagcttcccggacgtggtgtactgattgtcgaacatgggtgggctcatgggcccgagagaggacgtgaagcccactggtaggggcgattggagcgtgccacagataccgaaaaaaggaaatactccatgctcaaacaggataccctagcagatgaaagcatacaaaccatatatatattcagacgaacaataacaatcaaaagtgaccaataaggaaagtgaaacaacccaacccataaaaacttaattcaatcaaccaataaagcaatatttaaaccacaagtcaaaaataataatttatgaataaataaataagtcgaccaacaaaactaagaatgactaacaatcctaacacaactctaacaggattccaataatcaaaatataaatttaatccaaacgagttccttgatcatcctctcttccttgccatgattccacgatcatactttctctttacctgcacctatatatatagatgtttaagtattattatttttatttattgatgcgatcctcccatctcctt

SEQ ID NO: 41110 - DNA, 541 bp, Arabidopsis thaliana columbia
tattaattagccaatgacaaaaacagtaatactgagcaatagtcacaacccacaaattgattacactaggattatgagaacagtgcagcgagaagaacaaagctcgtattgttacaatgagcttaacctaaagtttcaattttttcaatcgattaggtcaccattacacaaacattacttttaactaactaacaagttattggaaaacaagataaccaatatcaaaaacagtaatcaatgaaaaaaaacatatgaatcgaggaagaacaaaaacaaaaaaatgatcttgacccttgtgctaaatcagaaggaaacaatcgaatatcttggaaatgaaatgagtgaacgatttgctgaagtgggcttaccttgttaatcgatttctagggttcttcgttggtcgaagggtataagaagaagataagggaagagagaacagaggagagagagatcaagcggcgctggagggttttgcctttaagtaaatgcgatgtgtaatgtagccaatctaagctttaacactatacaattattatattaa

SEQ ID NO: 41111 - DNA, 431 bp, Arabidopsis thaliana columbia
agagttttgagacaacttctcccaaccggacttctccatgagacaaaatttcccaaacttggagtcggagttgaaatgagagacgaagcattgagagattagtttttgagactctgtaagactgttaacgaaaatattcgacctttgaaagacatctaacacgattcaacctttaagcaaagacccattgttggagagaaccaacaaaagttccaacctttccaaactgagctagcaagaacaatagaacatgcataacaataagaacgtggagagtttagaacattgttaccatgttatcagacgaaacatctactctctggactgtggacgtccttggagaagctcggtctatttcgcaaaataacttccagaaaaaaaaggagagagctcagaatggggcaatatcaactgatattcagtagaatgca

SEQ ID NO: 41112 - DNA, 492 bp, Arabidopsis thaliana columbia
tatataaacatagtgtttcctcggatacacacttttgggttaggtaaacttttctccaaggttttgatgttaaataacccggatcgttttatttaccttttcgtttttggattctttgcaatatttcaggtgtattctgtaatcactacttcctgcaaatgcttgcaaatatatcctgtggccagcacgaatcagtttataatacaggtgaaactttgactctgtttggtgaattaaaggaaaaagttaacatctgtaatatagtttcttaaacaatgttcttcttctttgatgtccagatcacattgaggaaagaatggacaaactgtttacaaaggctttatccagcattcttgttaatatagcaattgagccccttcagagtctagatgaagttgaggtgtgcctctatgcttgcttgacttttctgggatttctgtaccttccgattctgtgaagttgatgcctaaaactgaaactgttacctgtgac

SEQ ID NO: 41113 - DNA, 472 bp, Arabidopsis thaliana columbia
ttctacctgttcttattaaacactcggtcgttgaactagttgtcccgcacggtggatgcttacaagtaaacgataaatttcgtgtattcgtaacattcgtttctctttagtatatactgattgattttcttcatgtaggctatacttcctagtgatcttgaagaatatcagaggttacggtgtagagttgctttccacggtttacaatttaggaaagaggttcaagaactttccactaaagtattacaaaggctagtttctttaagacccgcccgtgtttatcgtttgttttctttctttacggtcttgtgactcttcatgtgtttatggtacaggctgagaccgttaggacgacctttcatagcttatgatccagggatgacaagagaagctttggcctatcatggttgtgctgaactgttccaggtactttaaagtttatagtattgtctagttttggaaagaaatgatt

SEQ ID NO: 41114 - DNA, 425 bp, Arabidopsis thaliana columbia
aaacagatcatttattgtctctaactttgtccctcatgttccctatcgcttttttcttgttgatacatttattacattctatattttgatttttgaatcattggacatttatatatagacacgtaggcacataaattaagagtacgggatttcatgtgtcgcataaaatgggtgataactgatagctatatatgtgggaatcaacgtgaaacacttggataaaaaaggatcacttccactttactacattttcctaaactataattgtatatatggtgaattatgttgagaatctaagttacgacacaatctctttagatataatattctgtcaacgcactctcatatattaaaatattctcaaccacttaaaaagtaaaaagtatattttcaaaaaccctatatatatatatatatatatatat

SEQ ID NO: 41115 - DNA, 559 bp, Arabidopsis thaliana columbia
tattttaatataattttaagtacaactatagatatatgcttgtcaaaagtgatattctagatacaacaatagatatatgcttgtcaaaagtaatattctagatttaaaaaatatgcatatgttaaaccatcaacagttatatatgtaaggggtgacttagagttcgtctttcatacatattttaatttgattacataatggtttttgtataaatgatcgattttttttttttgtcggccaacattttgattcatagagcccaaagggcaaagtacataagggtgaaagccaagaggattacaacaaacggtccaatctaaatcataactaaacaaagaaagataattgcaatttgcacatatgatttagcatagacacgtggagaagatgtgttcttccaaagaccacgcgtcaggtcttcatgcactactgtcgaaattcgtcagacaccgccaaaaatttcgattagccgccgccgatcagcaaagtagcggtgagaatcctctcccttatgctgatcccaatccaatgtaaaaagacccgaaatgttttggatttg

SEQ ID NO: 41116 - DNA, 484 bp, Arabidopsis thaliana columbia
tgtgttccgcaagtaaggatgcagattcaagcggatgagatgaagatgacgaggcttcttcttgatccctggttctaagttttgtgaggaagagaacgaattgaaatttgaatttgagtccaatctaacgagtgcaagtatggaaagaaacatacaaaatgtaacaaaaatctaagaaacataccaccaaacgtgagatttggagcatgcctagggtatccaacagctccaagagcactagagtacttcccaccactggatctcaaaccacgagcgacacgagctctaaaaacaggcaacatcatcgcaaaattagagatttctcgataatcgtaatttcggtgaaatgggccagcatattttactctcttatactattaaacctagcccaataattttctattgaagtaaatagcctacgaatcaaaacatatgtttaagtgaatgagcctgcactatattctaggatcctagatattattaa

SEQ ID NO: 41117 - DNA, 570 bp, Arabidopsis thaliana columbia
gagaaaggctacgaagaagataatattcttcattgagctcttcattattgtttctaatagggaagtacacacatatatatatatatatatatcttcgagattagctgaaacgtacgtttaagacttgaaacttgtttgatatcattttcgttttatttatgaatgtttgactttaaagatgtttcatcggtttctttagtaccattcaaatgagattcagtactagtgtcggaatcatctgagagagctgaggtaatctttaagcatatcaatgatgggagttgctaaagaatctcggccaagttgctgaaacatgattccgtccatacgagcttgaactccctcggtgattgttaattcgtcgagcagtccttttaatgttctgtcaactccaatcaccgagcttcctataccgcttaagatatctggtagtgatgtagaaggtcttgaaagctcaacaagagttacctgtatttaccacaagcaaagccaaaatcatatacatctacttaatgcctctcaagtttaaagatttgtacaaagatgagtcactgaggtaaagagagttga

SEQ ID NO: 41118 - DNA, 499 bp, Arabidopsis thaliana columbia
ccaaaaggtgtgtcagcatcatttatagcgcacaattctgtattatcgaatatatcaatgcatgtcacaaatctattcataaaagataacaagaagaatcattaatcaaatcaaagttggatcaacactgaagagtgaccaaataaatcaacattcgactcaatttccagtaatttcaattcataagttcaattcaattcaaattgaaaccaaatgtggccaaaataaaaaaagaagaagaagacatacccgactttaacggcgagactagagcggctctcattcttggtttggagttccggcgaacatagtagatgagaccattatcgagtcttccataatcagccccgaatggctcaagctcgttaccgagttcttgttccatgtccacactcatcagtttcagcgacctgaaaccttgtttcctcaacaccttcgagctctctcccgctatcaaatccatctctcactctctctctctctctctctgcctcactct

SEQ ID NO: 41119 - DNA, 177 bp, Arabidopsis thaliana columbia
ccataaccttagaatacatttgtagatataaaataaaggatatacacattatacattttgccacatactcccaactgctctcttaagaagtgccagattttactacacagagtccttttcctgtactcgatttccaacgtagacattattatatttttctcctttttcaataaaatg

SEQ ID NO: 41120 - DNA, 995 bp, Arabidopsis thaliana columbia
cttccaacattcaactgagttttccaagattgctgtgattaaaatcagaaagaaacacggattagaacaaaattagtttagccataaaactgaaaaagtaactcaaatcaaatgaatacaagtatataccttctatagagctacactctcagatctaggagtgcaaataagagtttctctcttagttttggtagttttctcagcaatagatattgaaacgatattcttaacaaggtaacggccagtagacacgactagctcagcttcagtgctgctcactggtacttgcactgaagcaggtgataagcgcttgacaaaaagtacagagtgtgatgatacttcctctttgtcctccttaactgcagatattaaaactgtgtctcgctcaattttctcttcacgttgtccttccataagttcagaattcaactctttagtgcttattatttgagaaactatcaactggtttttccagtgtagaatccagaacattctcataatcataacagatcctgcacctttggtttctgaggaaataaggtgaatcatcaatcattccttatggcttatccttaatgcactcttgattcattttcttcaactactattggagcctcaaatgaattatgtctcgaagagttccttgtcaatctaacatttagcttcttgaatcttgacattttcaacagaggctccatttcgttcacagtcaatactggaacaacttttctgtgaattactcattgcttccagtattcaaaatgtatatctcagagaaggacaaatcacgtcgcaacgtaataattttttgcaaataatctaaattaatctaagagtcatttttgaggataaaatcgagttactgacatcttgtgtgtctgtccttcataccaaattatccggtcaaaaagccaccacaccggaaaatattattttcttatcatcgccatgttttgattttccacgtttacacttttaatctaaaaatcaatatt

SEQ ID NO: 41121 - DNA, 603 bp, Arabidopsis thaliana columbia
cataatggcgagcgagagaataaatggcgttgagagtagtagcaccatacccgatccgtttgccatctggatcaagaacgaccaaagtcgatagtggagctagctattcgtcccatacgtttagcttgccggagctgccactcgtaaagcttcgcctattcagaactagttgctagtcgggaacctagtgggatggcacaccgagagccttaagtggtaccatgacttgcgaaaaacggtggctaatacagtttttttcctctgcttagacatcttcttgctaagaagacgaagaaatgtgagaaattgaaatctggaggttacgttaacagaggaagaggaagaagtcaaataccaatgcaataacaaatacatcgcagtcttgatactaaaaatctcaaaacagatcaatttgcttacattcttcacctcaaaaattagaactttgcacaatattccaaaattttatcgattgttttaaatacagaaactcttgagctctgagacagaaagaaccagagtacatagaggaactacaaactttgtaatggtaaaacaaactcaaagaagattgcaaaattagcgggtacagagaaggtgatg

SEQ ID NO: 41122 - DNA, 431 bp, Arabidopsis thaliana columbia
ggctacgattccgtcctgggtatatggagatctcgtttcttacctcgaaccgggctgctgatgcggtgtatgcaaagcacgctgatgcgatgagaaggcaccatgtgaatgcggtggctaatcggaatcttgatccgatcttgaacccaaaccccattgctctattgaacatttctgttttggtttttgaggttttatacaaacgggagtgtttgtttaacaacaacagaaaaacggtagtggttttggacgttttgttcgttgagctttcttttcccttttttcgtttttagttttagtaaaaagtttaacaaataatattcggtttggtttcaaacagttttatattgattgaaaaaatctagtaaattgaaattgaatgttaaatttgtatatcttttctctttgcgatatttactatttggtttgga

SEQ ID NO: 41123 - DNA, 409 bp, Arabidopsis thaliana columbia
acaagtagacagagctccgaccttttcataccctcttttgtcccaatttcaactcagcagcaacatatcgcagcaccaccgtctcagttcctccaccgacaaatctccgccgttaatttcacttcaccgaccaaagcgaccgaccaagcaatgtccttggctaggcagcagagtgagctacagcaaccagttttcaaaccatcttcattgcatttacatagtcaagtcgctaattacacgcgagatttgaaatcaggagccaaaacggtcttgactctgtttccaactcgagacgattgagtttttattaaacgtcaacaatccgagttctgcgttttttttctggtcctgctgttgtgactagatctttaatggttctaatgttccacgatcttgaggaacatttggt

SEQ ID NO: 41124 - DNA, 370 bp, Arabidopsis thaliana columbia
aaaagaaccttattacctcaagggttttgagcttctttccgtgcacctcaaccattatttcatacaaaaaaagaaccacaaattcctgcaccaacacacatatttgaagacctttaattttgagtggaaaaagatagtccaatagtttggctacacctatcttggactatatatattaaacacatttcgcaatcatccaaagactccatctcatacaactagacactacataaaaacgggtattctagcactcggaaaatgctatctaataataaagtaatgttgcaaatctataaagttgagcaagtagatatcacatgatcagtctaatttccatctcccataatttccttcatttgttgaataattc

SEQ ID NO: 41125 - DNA, 384 bp, Arabidopsis thaliana columbia
cggtctgatggaaatgtggaaattttgtggcaaaatattcaatgaaattacagcaaacgatgatatggtcgaagggtataaaatcagaaaagtgtactttcaatgtggtcttgtagaacctccgactatatatatatgaccaaattgagaggaattttgttttttttcaatcgagaggactaagtgtataatcatcttttttctatatgagtgtgtaatcatcttcaagaagcgctagagacgtttgaggaaatgacgaatgtaataatttgtgtggagaaagagacggattaaagaacttgtcaatgagtatagaatccatcgaagaccaacatatgaaatatgtcatgaaaatttggcagcgttagtaactgatataatagc

SEQ ID NO: 41126 - DNA, 542 bp, Arabidopsis thaliana columbia
cagagacaatgcaacttggttatatatggattcgttgattagccatccaaaagcaaaataatgcagaccgaagagttgttaaggggagtgttcctccatggaggacgtggagaagaaaagttggttgctgcacgaggttgagcaagagaaaggttcgttgcaggacgaggtaaagcaagagggaggctcaatttaggacgagaaagagatttgtcatgagatacataaaattgcagagaaaaactcgtttctagtgtatcttataataataataataataatcttataataataacaagtctatcaaagatttttaaaaagaaatacgccaattatataaataaaaaaattgaaatgtgcaccataaaaaatgctaatatatagtattcattcatagtactccatacaaaaagcttttttaaaaaaaaacttatcattaaatcttattatcttttacgggtgttttcattaaagtaaaataaaaataaataagaacagtacaaacctatagcttacgtatctgaatagtcctccaaatgacg

SEQ ID NO: 41127 - DNA, 594 bp, Arabidopsis thaliana
tagtaacgaccgccagtgtgctctaaaggcggcttagctcgaccctagggtcggacgctgtgtcgagctctcggggattggcggcggcggcggaaacggccgagcacctgcagagctagcactgtcactatccgggctgatcgagccggctcccgacgcaacgctagcgcccgacgaatggaaaacgcttgccgaagcggacgctggaccgacgctgctcagtgtagggtttgaattgttgtcgaaaaagaaggacgagaacgtagactgacggcgggcgcggatggcctcggcggtgttacgcgggttcggttgcgaggtgaaatcttctttgatatcgtcgagggcgcgggagaagcggaggaagcggcgaggccgttcggcaatcgagggctcgcgttcttcgaggccgtagatattcagcggtgttgagtcggggtggtcttggtctagcggcgttgagtagaagcgtgggaatttgggcagctctctgcggcgtggcatggacgggacgggagccgggaaccaggcatgttgctgaggcggatactggctgatggggctgtcgaaagaggactgcgacgagttcgatga

SEQ ID NO: 41128 - DNA, 550 bp, Arabidopsis thaliana columbia
taaaccttctgtttcgttcagctggatttacgggagagaagttgaactctaaacgacaatggttgttgcgtttcactgtattagactcttaaacgttatgggccttactaatgtaatatgggaagtaaatgtaataaagaaacgctaaaagatcttgcgttttagtgaaacactgggttataactaccatatggcccatgggcttgaaaattaagcaaagaaaatatctgagtggcatagacgtaattaaaagagtagctgagggatattgtagagaagaaaaaagttgtatattaatgtccccttggctcgatcatcacgcccaaagtttcttcttcaccttgtctcttttcacagtctcacacagcatagaaataatcgaaagatttctttttaaaatctgggatttgttttttttgttcattgatcattttcgattgttagagaagaatcaaatggcgatggctatggatcggatcgtcttctccccttcatcttacgtctatcgtccttgtcaagctaggggatcagatcttccagagtttccatg

SEQ ID NO: 41129 - DNA, 743 bp, Arabidopsis thaliana columbia
tacattaacatgggctccatgttcgtctgggagagcgacgaatttagggcatgtattaagggattcgaacgtgcgcaccgaaacattggggggccgagtacggttcctgatcaagatcaacgggtgtcctcgcagtcgccacactccccgccactccaccacaataaccacgggtttgagccccgatcaaaaagaggtcaagttggaagacgaattgccaccgtatatccgattgacctcatggattcagcaccaacagtctatctatacacaccgcgccctcaaggcctttgtccaccatggaggcggcaactcgttcaacgaagctgtgcatttcgccattccacagctggtactttcgcaatggctcgacacgcatgagtacggattatatgctgaaaaattcgggcttggcttgcgcagcaggaacccgccgcgcatcgaggccgatgatatccgcctcaagattgagacgttactcgggccaaagtgggatgaatataagagcaactgtagggcctgggcattccggagtcagattgccggtggaccagcagcggcacgaaagattgtcctgtttcatgctgagaatgaacagaagattccaaccaagagggtgtcgaatgcgactgactctgggatggagatggagttgacgcccctctgtcacccgtcttgggagagaagaatggtacgggctcaggggcagtcaaggagattgtgatatgatgtgaactgtgata

SEQ ID NO: 41130 - DNA, 522 bp, Arabidopsis thaliana columbia
tgcaacagccttcaaaattcccaaaaacacccttcgtcgtcttgaagtataactctctggaatgaggagagtttagacaaatcataacgttgagtcagagaaaaatataacatagatatttgctaatggataagcatatccgataacatcaatcattgtcttcaacttaattcattttaggcccatgggaagaaaagtcttctgcgttaataatttctagatctttccacaacattcatacgcaactcccttaaatcttgaaacgaccaatttcttcaaaacaatagtttgtttgcgatggcgacagaacaagaagctgaagttggaacagagacatcctctgtttccggaaggtttttgaggaacagagatttatatctcttcttgccttttctcttaggcttctctgatcaagaatcatcaaacggagatgatgatgatgttgcttcatcgcgtgagagaatcactttagtcaaccttttacacaaggaatgattgtgctcgaaggctcatcaggaatga

SEQ ID NO: 41131 - DNA, 183 bp, Arabidopsis thaliana columbia
gacacagacatagatagatatagatatatacatagacacatagatacacacacagacacagacatagatagatacagacatatacatagatacacatacacagacaacatacatacaacacatagatacacacagacacatagagatacatacatagcaacagagaacacacaagagagacaa

SEQ ID NO: 41132 - DNA, 629 bp, Arabidopsis thaliana columbia
caaagaagagaaaatgagtggaaggaatagtcaacaagtagaagaagttgttgttgtacagccaagaacaactcataggttactgcaggtgtgtatttgcttattttattgtgttttgctttgggggttactgttgttggatatctataatgtgtagattgttttaggttcttgcaggaacggcgaaacgaaagaaattgctttctcttaagggaatggatgtgagacctatgatggaagttgttaaaggagcagcttttggaattctccaggtaagagtaactaattttaggagcttctgcgtttgttggtgtctgagttaacatgattcttctcattatttaggctgctggtggttgtccaacgtctctgcgtcctggtaggtggttggatttgtatagtggtacagggtctgttgggattgaagcaatcagtcgaggatgttctgaggtagcaaagaaataaagaactgtgattgtatgatctttgttggattctcttttactttaagtgactcactaaacatgtgtttccatcttggacttgaattatttctcacaggcacattttgttgagatggatcttgggttgtttcaatgtctacaccaacttggacacctgggtttgtg

SEQ ID NO: 41133 - DNA, 608 bp, Arabidopsis thaliana columbia
ttcaattcatgagctttcattagaaagcctacttctcttggaatatatcttaaatgagaatgtcgtgtttctaggatcgagcgattggagttgtttgacgaatttgaagagtggcacatgatgcaggcaagtctgtctatacctcattaactagatgttgcacctctatgtatgtatgggaaagcataaaaagaccaaaagatgattggtgttgaatatcaacggtatccattatatatttttgatgatgcatgcgtcagatcttgttctagtgtgtaggagttgagcattatttaaccgtttatattcaacaggaacattactgtgtcacatatgctgtcaatgatgcaatggtacgtacatgagtctctacaagtcattgtactttttagattctggaatgtttttttgattaaaaaaatgcagggaatatttggtgatttcggtttcacaagagaagggggcggtgaaagaatgagctcatcagcgtcatcaccttgaaaaggaggagggtttgtattgcattgaatcccggaacttgcaactggtacgttagttaatacagttggaggaaaaccctggtggtgggtagaactgatagtgcttgg

SEQ ID NO: 41134 - DNA, 472 bp, Arabidopsis thaliana columbia
tgaactaagggtaaacaaatcggaagccctaattatacgagaagaaaaaacctaacgcaaaggatccagacgaacaaaaatcgaaatcgagagggctcttagtctcaattcgcaaacattatacagaaatcaaatccttggagagagcttacatgagaatctgggaattggggagagagacagagagattggaagaaaaaaaaaaagacgttatttttttccggcggatacgaaaagggaaagggacaatgcgtttattgatgtgatcgacattgcaaagtgtaataataacggaatagttatcaactttgttaattaactagatatattaatcacggtacatagacttatatttttactaaaaaaaagtaattaaatttttatttttaagataatttacaaaaatatgctatcatttagtttaatcaaatatatggtacacacgagagggtatagagatcgctcagatatg

SEQ ID NO: 41135 - DNA, 498 bp, Arabidopsis thaliana columbia
tgagatatttgtatgttctataatgtatattagtatatacatatgtaaacataaacctatacttaataatatatctctaaaatgcatagaaaagaataagataaatataataagaatatataaatttaaatatatgtatatataacgctagaaaattaaagttttaaataaaatatctggttttcattatttaacacgatatgaaacaaatttatatatagattttagaccgatgtccctaaattgtaaagtccatatattttagttgatggttgaggggatccttctcccttttgattactaatcagactaattgtctggtggttagtgtacttatttgtaacactaaacttctaaaagctaattatgcaaggcctcttgttgtaacaataaacaacctttaacaataagaatctcagaagacgctaaagacaacaagaagtccatatatttatttagtccatatatttcatacatattgaatcatgattctatagt

SEQ ID NO: 41136 - DNA, 475 bp, Arabidopsis thaliana columbia
tattatcactagcaaagtccaattagtaagtgcaaagacttgtaataaacttcataagaatcagagagacccactaccaaaccttccgaataaagccaagtaaaatggtaggccctttataaaccaactttaatccattttaacttttatatattagaaaagggccttgataggctttgaaaccaatcataaacccattatcactagtactcaaccacaaccactaacttttgtgtctcctttcctttttttcattctttcacattttctctttctttctctcacaaccaagatcaccacttctcaatgtcgtcttccaccaccacaacaaccaccgtccacggcgagcctgaacgacgaacttactggtgtcatgaatgcgatatgagtttatcctcctctcctcctccgattccgattccgattcctcgcctctgttatgtcccaatgccgtgtcgatttcctcgaacgtatg

SEQ ID NO: 41137 - DNA, 560 bp, Arabidopsis thaliana columbia
tatatatactaattaatgctgatacattttcactgtcccaacattagatacctgatattttatctttatccagtggagactaacttataacagtaaggtatcacaagattataaggaaatggtaaacttgtcacatgtatatactggtaattagtatttagtcaatttttggaaatccaaattcagacattttggattttgtagccttggtcatatcttggtcttatcaatacattcaattgtataataacaaattcagtaacctacaaaaaactactatactaagaaacaaaactttacctctatgtttgacctgccctgtccaatagttgtatccaccaatatttcctagctaagttaaaagaaaaaaccttccaatattttctctttatatgagataaaatacactcagcaaaacaaacactgcataacaaaaagaaaatgaatatcacaagaattctcggtgtagtcccaccgtcgtcattctctactccgtgcaagtcacagcacaatttttcggagacgttcaacaggcaatgagatgcgtcgaaaactaatgc

SEQ ID NO: 41138 - DNA, 356 bp, Arabidopsis thaliana columbia
tccgttactacatgcaatgcaatcgtatatattctttagtgaagactatatgctcgatttgccgtgggtcccaccagctatgtaggaataccctatcttgtttataagagattcgatacatgccaaatattcaaaaacaatgtccgaacatataatatgcgcaccgtaatatagcaaagatcacggaaaggcccgagaaagtacgttaaggtcaacagttggagtagaattagacacaatagaagaattccatatgccttcctcatgcatcggagagctctctttgcggcttcccgaaaaggtatcgcatgccacgtctggcctcatggtctacaagtgtcagagtcatacattgt

SEQ ID NO: 41139 - DNA, 708 bp, Arabidopsis thaliana columbia
aattcagtaattgagtttagaaggggggagagaatatgagcctggattcggcggaatcgatttgaaaaaatgtacggtccaacacacctcatctctcatttgaatggctctgtgtttccccttaatcgatagaaaaaaaccagctactcggcttccaaaccacgtctgctaaactggattgatttcccaaaccccaaaaatcactaggagtatcacataaatcagatcagatcagatcaaaattctcgaagtaaaaatctgcatcttgcttttcattttgcagggtggcctttgtctttcgtggatttgtggatttggtcttcgttgtatggtcgacccaaatggttatgtttggctttgaccttttctttttcttttctggcaaaaacaggtattggcttttataatagtgtttacttctttgtttatcaatagttctttttgtatatatgaaaatttattagtaatatgtttcagtattaagaaattgttttagttgattaataggaattttttaacaaaaatatataagacaaacatcgaaaagcctaaacatgtacatattttgataatttaagctgcaataatttctaaatataatgatgtataatattattaatatgttttacaccagaatttatattaaaatttctgtcttacttattaaaacaaaattttagattaaaaaacacttacgtaaaaagaagg

SEQ ID NO: 41140 - DNA, 535 bp, Arabidopsis thaliana columbia
tgtatattatagtttgcaaaatattttgaaaatgctatatgtgtttgttcctttttttttatattctttttaattctggtttgccaagttcaccgaaaaaaacaaaaaaaatatggtttgattcgaagccaatgccaagcttcttagacaatgacttgtttggtcctttatctattgtaacccgaaaaagtaacaattttcaaatcataaaatttcggtcaaaataggcttagatattttgattttcttccatagatacaagagagtatcacgtggttgtgaagctttttgtattaaatttgtcttagtcgaatagagaaatatatttgttttctttgcaatttgatcatatttgagtttcttttttgtcaactttgtatattttagtttgtgttcacataattctgtgtatttatatcattaagtatatatgcatgacatcctcctcctgcatttgctccctatattcctcattattattagtcatgggaagagagaagacgttatgcaagtcgtggagcgacatgaagaaaca

SEQ ID NO: 41141 - DNA, 454 bp, Arabidopsis thaliana columbia
ctcactgcatgtattagattaatatattgtttatgaatttctcaaagacattcgagcaagaaccgatcgacttgcttatataactccttggaacattttgatcgtcttacatgtttgaaagaaagtcaacattttgatcaattcccttacacatgcagaacgacacaccatgctaacattattgggtcggtcactttattagaccggtatagcaacaagcccaattaaatattaaatggtgtggtttctcgtagcaaggtcagtttattggacattagcaaaactatggtgttggtttcgtctatgctaagtctaacgtctgagtttgaaaacaggcccaactatggtaattataattcgtacttgcgtaggattggaagaatctcagtcgctttcgctttgtgaacgaagaatataaaccactttgttacatagtttcaaatgattcaaaagt

SEQ ID NO: 41142 - DNA, 423 bp, Arabidopsis thaliana columbia
ctaaaataattagaagagactttttagagaataaatttggtatttagagagcgaacgaatcagaatctgagaaataggtggcatgtcgtgggtcctgcaagtatggggggagaaagagatcttagccgttagatttgttaaggatgtcctttcgaactgttcaaaagtcttaaaaactgacccaacaggatctgatctccaccgtatctataaaacacacacataaaagtgaccaaataattcttctataagtaattatcacaattatttttagtattgtttatatgaaaaagttttgctgattaaatgttcctggaccgactttttttcaacaataaaattttattatctcgttgagtttgcatgttatgtcaaatttaaattaatacaaggcatggcgttagagttggccgttttgtgttg

SEQ ID NO: 41143 - DNA, 523 bp, Arabidopsis thaliana columbia
tttctttttttcttgccactcagtgagcagagaataaaccgacagaaataagccgaaagtggaggatagtggctgtacgtggcactcttctaggacacgtggcggttaaaggatttatagttgaacccacgcactggcgggaattctaccctcatcattttctgtctaaaacatctattttttaattcattaaaaacttagaaaaaagtttgtttacacgaagttaaaattgaccttactgttttcttctttgtcttacaattgcagagaaatccatatcaaaagacatgtaaaagtttaatagatattgaagtacaacattggttcatgatttttagtataaacttgtgttcaagtgtcatgaaatatcatctcactcttgtgaattctctacattgccgaggacatacaaattagaaaggtaagatcaattttttttttttttttttgaatttagtgttaaaaggtaagatcagttttgctccatatacatttagcaaactaggagcaagcaaggttgtac

SEQ ID NO: 41144 - DNA, 351 bp, Arabidopsis thaliana columbia
atccccctcctctaggaacttacccacctctcatccatagctctctccagttgcccgttcgggcattcaaaatctctttcaaccaacctgcccgggcagggagcggagccggcgcatgctgtgcatcgctgtggccacgtagctcgcctttcggtctcacacctccacccagactttcacgccttcaaccctcaccgcataagtctctttcatcttgcttcgcccatagtcgccatatgtttgcaactgagctgccagcgcaacatcgcaagcgcggcgaccaataggtgattgcctagtgcgattaatcagcttcatcatcactgcacctccaaagtggctacgacatca

SEQ ID NO: 41145 - DNA, 562 bp, Arabidopsis thaliana columbia
atccaagaaaccgcgaaaaacctctattcatgtttcgagagaacactgaacatgtctctttcagacgagtagaaactcaagcagtactctcataagaacaatacacagcccaatggctctctctctttctctctgtccctctctactacacaccaaaattagaacaatgcagacaaagattagtgaccagaagcagctaacttgggaggatttttgccttccaactcttttggttaacttagtaagtatcagcctttagtttttgttagactccctttggaaccaaatccacatcaaaaagcagatggttggggacttgggatgatgcaggttcttccacgaggaagacgggcttttgctctgcgtttttgtccagggttgtaagactcatagttattatgatgaaacttcctgaaatgctaggttgagttcgagcacagacttggccaccaaacctcctcttctacacaaattccatcacataatcatttgagccacatagattcttacacaattaatgagaattatggattcttcagacgtttaccttgctagagaggga

SEQ ID NO: 41146 - DNA, 433 bp, Arabidopsis thaliana columbia
aacaagtgaatgtaatagttttgcaatgtttggtcattgaatttctaacaaatatgtacgtgtaagatactagattaaatatgaatgttgcaagtaatagatcgtttatatttgtcaagtgataaattgtcgtatagaagaacaactataccgaagaattactaatccggttcaacttagttaaccagaaattgaaagggtaaacgccggtgaagcgcgtgtaggatgatgatatatatacagtgaagcaaacttttcaggatatatatgtaactgttatttatgttctttgtagaacaaaagtgtgtgtaattggcagaaagagagatcaaaacctaacaaactgaaatacaacaaatatctagatattcataaatatctaaaaccaagttccacttcatgcaactttgcatatatacacacgaagttcata

SEQ ID NO: 41147 - DNA, 523 bp, Arabidopsis thaliana columbia
gtgtatatacatgcaggagtgatatcaggtgctctgctttatatcagagatgatttcaagtctgttgacagaaatacttggttacaggttctgttttacttggaattaattatgtcattatgtatgagttttttggttaattttaaggttttttatataataaatgtttgatgtagtaatgacatctcagaagcaagaaagagatcatggccacaaattaaatcatgactttgagaacttcaaaacttgttagagaaaaactgttctgtctctaaaaactatggtattagttgtaacagtttgtcaaagcatatatataaaagaaagatcatcagggtttggattctgttttagagtatgattagcaccaaacatcatgtcgcttttttgcattccctttgtacacatcaatgccgtttagtatttaccgttaagaagcgcctaaagcaagttccatgaacatacaaagatacaagcaaacacctaacttgagataacacaatggaacaggagatgatagtga

SEQ ID NO: 41148 - DNA, 1008 bp, Arabidopsis thaliana columbia
tgaaccatttagttttgaccataaggtggtttcttaaactggatcatatgatttttcagtgaagaagagtcgatgaaattatcttcggagatagaagtaacaaaatcattttcatatcccaacacatttgcttttaaactccaagataaaaagggacgaatgcatagatttatgtgtggtacgttaaatcataactcttgagaaacaggacacctattatgccaatgctgcttagtccattaaccttttgtttttacttttcaataacagaaacacagagtttgacaactctgataacagcaatcctacaaagaatgggggatgacattgagcctgataacttgcctcagataatggtacatatttattcgaaaacttattaaacgagaagataggaaaaattttcttcttttgttgacatattttgtgttgtgtagtacgaagatgaagacaatgacaaagttgttttagcatcagataatgatcttggagctgctgtagaacatgcaaaatcaataggctggaaggtaataaattgtacatccatacttattgtcaattagtgtaaagaactaggatgaaatgataccttaaatccgcggtctcgttttggttaatgtggattttgggctaaagaagagtatatttgggttggggattccaaatggtgcagggtttaaaattgcatttggactacacagaagaaagagggcacaggagaggtctaagttcagaggatatggactacgaccagtcaaactcatgggcagccgcttacaaaaccggttgcagccggggctgctcttgctgctggacttggagttttggtgtaccttaagcgcaactcaaactaacagattcattttggggagatacaaaagtgaatgcttttgcaaaccaatttttaaacctaagcttgtgaagtgtatacctcttcattgattcgtgtttttttttttttttttatcttgttgcttatttgtttctcaaccttacacatgaattgta

SEQ ID NO: 41149 - DNA, 463 bp, Arabidopsis thaliana columbia
ctctttttttttttgctacatatatatatatatatgattatcttcagtgtatatataacatgtatagatattaaaaataaataaaagataagtcgtgtgtagtccacatatcttgaacatcaaaatgacaaaactcttaaaatccgcggcaaaatctcttatccagtgacatgttacttatcaaccaatcacaacacgccacctcatcaccccaagaccacttctcttatcttcctctccctccactaatcccctcaagaatctaaagctcctcccataagtcttctctccacacttcacccaaaactccagaaccctagaattcgaaatctccaaagaacccgacaaagcgccatgtcgctcactatcccggcgaatctcgttctcaacccgagatctaacaaatctctcactcaatccgtacctagatcctccgcaagattcgtctgctccgatgacaaat

SEQ ID NO: 41150 - DNA, 540 bp, Arabidopsis thaliana columbia
gttacgaatcttcaactcgggactttaatgcgcagtttaagtcgcgatccttccgtttctgtattaatgtcggatcaccctttaagcggccaggctcatactgggctatgaattgggcccaattcatcttgaagcccatagaatgcggattgggccgaagtgggccgaatccgacatccacagttactacttaatggtcaaattctacaaacctcttttactcacaaggtaagtttaaattttgaaattaagctaaatcaagtcattgtaaattaaaagacaaaaaatcaaattaaattgacgtaaaattcagataattaaaatatcaggtttagagaattctcaagaaatagtcaaatagtagatctatgagttacttaaaattgttattgcaccgttctagaactgcaaatctcaattctataatcaatcaactctcgttgcattgacttactatgttcaatagtatttacccaccttatatgtagattcttagaattaagcaaacattaatatctggtttggtaagtttacttacgt

SEQ ID NO: 41151 - DNA, 550 bp, Arabidopsis thaliana columbia
ggaaggtttcggatcagttgcaaaggcgggtgaaagtgaacaccgggaagaggttcctgtcacgacaagcaggtagagaaactcccaaatttgatatattttcccaaaaccgtacaagtgcttgtttcacacctttccttcctgctttttgtttttttctctagaatggcggtaccacttgttactagaagcactcttgaagttgtcttaccagaggcggttgttcctaagctcgttacgaaatcaagaaacaagcttgcacaaatcagtgaggtagaactctttttaactggaactagattggtgcaaatcatgactctaatcaaaatctttgacgctttgtcttatctctttcccacttgatcacagtggtctggagctagtgtaaccatagttgaagacagaccagaagaaacacagaatatcattcgaatttcgggtacacccgagcaagcagagagagctcagagtttgcttcaaggcttcattttgagcagtaagtttctctctttccaaacttttatatccgtattgtactgatctataagtc

SEQ ID NO: 41152 - DNA, 312 bp, Arabidopsis thaliana columbia
taataatttcttatgcgttaatatatacttaatcttttaaataaaattaaattacatacctaatttatcaaattatatgcaaaattatatattctgctgacgttagataccacatatttgatgataatgatgacatgaatgccatgttactaatgacaccgttgccatgtcatctagattattttttaacaaaaactacgttaatccaaaaatgtactcattgcttttcacctaacatttaaataaacaagaaaataaaaatagttagcacacccacgttgacatttcaattccatgaatcatcccatctcg

SEQ ID NO: 41153 - DNA, 604 bp, Arabidopsis thaliana columbia
atatctgattttcttgattcgattctcaagagcccagacgaggatccagagaagcacaagtatgttttgcaaagtggttttgatgttgtagcaccagatcaggtacatgaagattcctcaaaactcattatatcatttgtatgtacttctagaaaacagaaatcgtattaactcttaactactttacttgattgcagattgcgcaagtgtgtcaacagggctcagcagttgacatgagcaatgatgtttcagtgacgggtatccagattaagagtcgccaggcacaaccctcaggttataccaatgactatatagcgcagggaaatggtccaagaaggctgcgtctgcaaagtaactttaatggcattaacacgaagaatcctgagcttcaagctataaagagagaggtgagaataacacccaccttctgatgaattactcatccttggtttcttttagcgtgtatgtggttcacgtcgcagagtggaatcgatccatgacattaaaatgttaatgctatgcaggctgaggacacggttggagaaagtataaagaaaaggtgtggaaagctaatgagatcaaagaccgtgaccggttttgtgtt

SEQ ID NO: 41154 - DNA, 509 bp, Arabidopsis thaliana columbia
attattgttattaccaacataatatgtcatatatcgacctgaaataattaaatcatgagaaatttggcaaacggaaacttcggatggtcaacaatctacaaatatatgcatgtatataaatacacctaaagaattctaacccgtaaaacaaaatagtttccactttaagttctgtaaaagtatttgacccctctagagaccatgtatatatatggtgacaaaaattaatactttcaatatcttcattgtcttctctctctctctccctaaaaaacatggaaactacaaaaaacactaatctccaaaaccctactaaactcccaaaaccatttcaacatcacctagaagaagaaaaagaagacgcactatctctccgagatcttcccctcaaagccaagaatcctaatcccaccaccaccgaagaccacaaagaaccgtcaacggaactttttgagtttctaactcatcctcctacgacgtagctccggcagaaaatataatctttggcg

SEQ ID NO: 41155 - DNA, 559 bp, Arabidopsis thaliana columbia
cacccaaaatcgaaacccagaaatttttcactttttcttcttcttcttcctctcttcttcgatgcaaaatcgagtaaagtctcgacgaagaatcaaaaacttctcttcttctgaggtctctaatggcttaccgaatcaaaaggggttattatgatgcaactacttgtttctcgcaacatattatgattatcaaagctttgactcggaagcttttaaaaagtcattgcaatcaacggtgaagattctcgtaagaaagattttaacggatggtgatcagatgggtcgggttggttatttcggtttcgggttttttaataatcaagatacacgcatagatcacgtgggttgacgtcatagaccaattcaggcccactttcaagcccattatgtatcaattgatgaccaatgaagtaacggcctttcagcttagaaactaaagtagttttcttcataataggcctagcattcaagtttttttttggattatttttgtgaaagcaggccttaaatcaaattatccaaatatggaattggttttggtcagtgacatgcataaatg

SEQ ID NO: 41156 - DNA, 587 bp, Arabidopsis thaliana columbia
  unsure (1)..(587): unsure at all n locations
nnnnnnnnnnnnnnnnnnnnnnctaaagaatggctagcatatttggcaaaatcttaatcaggaaaagtatgctaaccattgtggtgaagtgcaggtttgctgcatgaatagttttacagcagaagctaactgctggcatggcaaaacaaagtgcgtaagtggatgactcccacaaaaagcaccacaatctcaaacccgctcaggcggttttttattatctgctttaaatatattattaaaatataacacccacttgtcactaataacatcaatcaggctacagctttaagatttgtctggaatactttgttgcaatgagggcagatcaaaagggcacctttttgtactcttgaaaaactgtgttctgactcttgggtgcagtttgggcaggaacatttaacgagataattacggcgtgattttgagtttttacgttctgacataggcttttcctgtataaatggccgtatacagtacactaaatatgaaaacatttctcgtattattattttatatatcgctttcttcaaaataattaccacatttttaatgtgtatgtttttttagcgccgttgagaacacgtgtg

SEQ ID NO: 41157 - DNA, 597 bp, Arabidopsis thaliana columbia
cccattgaagtttctgtgtatagattgtgctattaccctaaaaacaaagaagatgaaaaaactaaagatgaatgatttatttttcattttcatttgtttttactaatattttaatcctattcttataagtgacaaccaattgcactcataaaaactgacttttggcaattattgtatctttaagattatattttagttagatttcacaccgtcagccaaacaattgggaagtctgtttctcatggaacattttggcattaccacacatatcaaaaccgatttcgttgtcttctcattttttttttttgccatcataaaaacaatgaactatatgtaatcccaggcaattgaggaagattatatttttcatatcgaataagactcaaaacttatcatccaatcacacacatatatatgtatatatgaaagacgagagatagcattttaattgtttagggcctccataatgttaggaacgtatatgcactttgataatttaaagccaatagagccaagaaacctgaatatttcaaagaacaatcgaaaaaacaagtaatttgtcagtttgtccctgcaaaacaaatccatatccaattt

SEQ ID NO: 41158 - DNA, 582 bp, Arabidopsis thaliana columbia
tgcaatgttacatttacggagacaagacaaagaacagatgaacactgaccttggtatcacggatataagggccctcggatcgtgaactaaagatagatgaaagaaatccaaaacgagatctctgcggcatgagaataacagcagtgtactgtttcttgcacgggtgaggaaggattcgctgtaatgcagcttgtgctgtttgtggtgcaagtgactctctcattcgcaaacgcccttcttctaaaatctaaaaaccacagagaagtttcttcccttttcgtaagactgtgtttataaaaaatgatcaaagtattgacaaaaaatgttttctaaactgaccttgcaagaggcgcccaaatcgccagcgtaaacccttgattgatatccacgtataatcctgtctaaccagtaatagttttcctgacaagaacaaaattaaatcagttttgtttctgcagcaaattatggttttttggctgtgatggatttgtgatgattatggcaataaaaaatacctgcatgccattttcatgagctctttgttcgatttcaaggatagctgaaatgtcttcctgtgaaggg

SEQ ID NO: 41159 - DNA, 320 bp, Arabidopsis thaliana columbia
taaatataaaaaaaaaaaatcctgacgacaataatttaattgtgattcgaacaactttctaactttcaaaatatccatgataagaacagatttatgtggacactgtttttttctcaaccaacattgcatatgacattacatgattacaataaagtgatataaaaagcagtcccatattgcttggctgccaaaaaaaaaaaagcagtgtctccaatcatattgctgcttaataactcacggaatcagatatgcctgtaataatgtattaacgtaccaatttattaaatcttatctagacttgcaaattgcttggctctgat

SEQ ID NO: 41160 - DNA, 458 bp, Arabidopsis thaliana columbia
gcacttacctccttgtcgtctcttttcttttcgatccgtgccatttctttgtcatttaaattggatactctagtagtataaacttgattttaagtaaactagaacagtacattctctacaaaaaatatttgaagaagacagacagatatgcgaacgcctaaaacttctgtatatctgctgtgttagctgtctaattttttctcttgcaacggatattcgtcatattaaacgagaatgtaattgctcacgtatccttatccacatatttcatagcccaaggcccaagccaacacaaatcattttgttttaagcccacacagttctttgaccataaataaaccacacaaccacgaaatcgggagtccaattgatacttgaacaccgaaagtgaagttcacataatcaatcacttgtatataaagcttcctttttggtcaactaattactatactgagagt

SEQ ID NO: 41161 - DNA, 557 bp, Arabidopsis thaliana columbia
tattaaaaatatgttttttaatcaaaaatatttcttttattattacatatggtagtcatacatttttattgtttaaatatgttagtcatacatagtagttatgtgtatgcacacattttcagttttcacatctaacttctcgcggccgcaacaagaagtcgttgctccaaactcgttaggttgctgcaattattttactgacaagattattgtactcaacagcaactaaaacataattaaaaatgtactacttaatttaataaagaaatattatgtaggttaaagacgaactagtatcagtgatttatttacaaatctaattataaacaattcaccttcggcctgccaataagtcgttggcctcgagatgcgccacgtcagttttacatttccctacgacttaaaaaccaatttttaatacgacaagttactttagattccgcaacaacattttgtctttattcactttatttgatctctgtagatatcggcaagcaaattaaaagtgtgattctttaacttcctatagcttgatcgacaaatgtcagtgagatgaa

SEQ ID NO: 41162 - DNA, 568 bp, Arabidopsis thaliana columbia
gagagtctaaatgtctattctatgggtagtagcacatggttctatggtattttctcttgttaagttgctattatatgcatgcttgttcttctgctcgctatatattctaaacaaaagcaactttatcaccatgaactgatacaagtttgtaatctgtggtaactctttgatcagcaatcttgtgttcatgacattggttttgatctccttgactttgattttgatttgatggttcacttgatgacatgggaggcagaatcaatgagctggagcaaagcatcaatgatctaagagccgagatgggagtagaaggcactcctcctccagcctccaaatcaggcgatgaacccaaaacaccggctagttcctcttaaaaaggaatgtggtgttcattgacatgtccgaagaaaaagaaaaactatgaaatatgttaagagcagtattacttttaaaattcctgttttaagaaacgagtttgttgtttattaaagttcatcaaatagattgatgatgtggtgcattacattatcgccacctatgaattgcatttctattttggtcttgagag

SEQ ID NO: 41163 - DNA, 530 bp, Arabidopsis thaliana columbia
catggatcatttagcaaccaaaaaataagatagacagattatatgatatttattatatactttttatttttatagagaaacaaacaaaacaagtgacatagaaaaagaaactaaaaaaatatatacataaaaattacaaatatgtttgcgatgcagagttcaacaattaataaaatatattagaggttgacattgataaatgacaaatgcttggtttatattaaaatgacaaattcttatcaaaatgcttgattcattttgcactacttttctaaaaactaaagatgcaatgatttttattaaaaaaatatctttgaagatgcaataattaaaggcgtaaggtaaatttatacatgtaaccatgtcccaaaaatcatggggacactttgacctaatgattggtctaaagatacaaatgtttctttactttatatttgaggttcaaattccaagctatgaaaaagttgttgcaaatggtcgtcttcgttggttccacactagaccaagatcatatcaaattacatatgttg

SEQ ID NO: 41164 - DNA, 516 bp, Arabidopsis thaliana columbia
ccgaccacaaattttctcaatttaaaatccttgtgaaagaagcttactcacactgctacacatgaatgttattcaattaagtgtcttactattcaaccacattatgctaaataaattaatatacaaacgtatattaaaaaaacaaacaatatagttatatataaagtattcaaaagaaaaagagaacaaaatacgatcgaccttctctttttcttctatctatcatctttcccacgctttcacgctttgcctcattttattaatatttgttatttgaaatcattccttctactcctttcttcttttttgctgtttcagactcaccaaaaaaacttctccttgtcagaaaaaaaaaaaaaaactactgaatctctctgtttttttttcctttcacaacatctcaatggagacattgaagaagaatccatcagtgagaagaaaaagcaagttagcgagaacattccagaaagtatgtaacctaagaacaacgtcgacgaaggtctcctccaacaacgg

SEQ ID NO: 41165 - DNA, 550 bp, Arabidopsis thaliana columbia
ccagtaattggctctttatcaacacaaataatttcgagttggttgagacttgagaggctcgtgcactagggactttggggtagaaaaaaaaattcttattccagcagttgacagggtgataatcttgattttttttatggtctttcatgcccaaatgcaagtgccccacgaaacttcgcatacatatggtttacctcgttatcttcgttaaaaattactatctctgttcttttttgtttgattttctagaaaaaatatttgtttcaaaaagattatttttttaaattttttatgcaatatttattagttattgttaataaattgtaaattttaataaaaataattgaatatcattggtttaaaattatagaaaattgtaaaatacaaaaaataatacattttaaaattaactttaatatatattttaatataaacttttcctaaaaaataacaagaataagaaacatagggcgtattaagtaacatccatgcatcctcaaccacataataattggcaagtcgtaataaaaacgtgtcacgtggatcttgt

SEQ ID NO: 41166 - DNA, 501 bp, Arabidopsis thaliana columbia
tgttttttaaataaaaaaaaaaatcttttcaaacacagcattcaatgatgcacattcaaatccaacatgatttactcggcttcttctctgtcggtttaatttttgaaattccatattgatgatttaaaaagaatatctatgacctaaaaaaaaaaaaactagaactagaaggcataaaaaggtgaaagccgtgagttattattatgaagtaactattaggcaatcatacctttagtcccttggtactaactcgggtttgaaaaagcatctactagttaagaaagcatattgaaaattttgaaatgcatgtgattcttaattaatatttgtcttgttaatacctttatgttgcatgtatttcaataattttgtaattattagacttgtgaaaacattttccccatacggaacacctcataccaaatcgataatgtgtgttatctcaaggatagtaatcaatcatttggattctatttaatctttatgaaactcataataact

SEQ ID NO: 41167 - DNA, 605 bp, Arabidopsis thaliana columbia
gaagacgaagatggaaaggtcaagaagggtacagtttcctcaagagtagcttctaagaaggctccggtgactccaagagcgtcgctttctccaagattatcagtaagactagctggaagttcaagtttgagaaagagtcagagcttaaaggctgcatcttcctcttctcgacaaaatcagaaaccgagacccgtgaatcgcactgatgaatttaataaacagttggatgattatccagtcgaggagaaaacattgcacgttgttgaaatggaaacaactaacaatgtcgtctctgagaatgatcagaatcagcaaggatttgttgaaccttttcttcctcctcttccaccgacccaatcaactccaaaagatgatgagtgtagtgtttcagaaacagaggagtacgaatacacttcaggaagcaacgaagctgagagcgaagaagaagagattggattgtccaatggagagaagaaaccaagagcggcgagaaaggagggtgatctgcagatgaagctcacggaagttacgtttcagaagaggacaattgtggatctgatactgtaggtgagaaacaaggaactcaagtttaacgaggaaggggc

SEQ ID NO: 41168 - DNA, 509 bp, Arabidopsis thaliana columbia
tttctctaagtttcacgtttctgggtattacaatgaagtttggttccagaatcactaagcactagactaattgtctacgactcgcttgttcactgattaagcttctgtctcttgatcctctcaagtgcacccaatttctgggcagcaccgtcttctccagcttcttcgacgtcttcgtctctctttctagcaagtcctccaaaaacagcggcagggacttctttctgagagatctccacatggtcatctccatcagactcatcatcactttcatcgggaagctcgatgtcttctccattccctgtcactggtttcccctcattctcaccggactgtgagatgactcctgcgcttacaaacccaactcttctcgcgccatcttttgctggctctgtgggggtagttgtagacaaaagctgcctctccagagccgccatttcgtcttcaggtaaaccggctctcttcagctcgccttttgcgtcttcacatcaagcagcttgccgttttgc

SEQ ID NO: 41169 - DNA, 431 bp, Arabidopsis thaliana columbia
gtataaacgaatgataactaaggcaaacgaatagcggaaaaaacaaacactaggggtatcacctgctatacgaatgagatgagtatggagaagggcttctgtctcttctactcctcctgctatgcctctgccttacgggagacctcgagtgctttctacgacgtgaaggtgatggagacggtgacctcgatcttgacaagtcccgaggccatctctcaaaattccgtagaacaagcagtatcttcctttataaggagaagctcagctcagctttaatctctctgaacggattggtcctgcaaattccagattcaacaactcatgttaataattgaaacagcctatcagaatctaaataggtataacaaacagatacctagcagcaactttcagattgcggacacacaatctattaaatatcttctgcataa

SEQ ID NO: 41170 - DNA, 542 bp, Arabidopsis thaliana columbia
caatgaattattcatctttttaatttcttacatttaataaatatccgaatttaacataattaaatttaataaattgtgtcaaatctcaaatatcttactttctttttcatatatgtcattgtattaaattcgtcggccttcaatggccatttcttgtgatatatatgtcctatcttttgtcttaaagacaaaacccaaaaaatcaaatcttatctttattattagaaaagtatgttttgttttttttaaaacaagaaagaatgtaaggagtaagtatataaattgtcaaataaaaaaaaatgaatgagattgacaaaacttatactcggcccaaactcgtaaacttaaggggccaatattcaaactcaaaggcccattagcattcaggaacaaaattaaaaattgaaaattgcgttcttccgccattgacgtattcgatgatgtaagcttatgggaagctccagaagattcttcttcttcttcaggtatctgaagtcactaaacacggtaatcacaaattccttttacttttcctctctgac

SEQ ID NO: 41171 - DNA, 574 bp, Arabidopsis thaliana columbia
gaagaaagaataatcgtaaaaaaatcagacctgtgtgattgatgaatctgtatctatgtgctcttgtagatccccgtttggtccacctttaaggttgcgattggtgtttcataattcggactattctaatcacagtctttgtttacaagaactatgttaatagaaagcttaaaagtacaatagagaaaaaaaaagatagtaaaatatcatcacccgtgggttgtttaccatcattaaattgaacttttaagtctttaacatatcaaatctaatctgctaaagaatatatgatctaatgatatcgaaatcaaatatcaaataaaagtagggcaacactcgattattatattagaaaattgcatcgaaatgtttgatgtgctcattaaacattcttgattactatgaagaaaagacaaaatatcaaagaccatatacgattctgtttggggctggccaattgctatttgagaaaagggcccaataagtatattactagaattccaaacttggcccaatgtcatcataacaggttacaaaatagtatgtaggaagacaaagtgagattcgaggtgtg

SEQ ID NO: 41172 - DNA, 527 bp, Arabidopsis thaliana columbia
tccattattgtgtttgtgtttagtctagcgagagagagtgatgatgctgatactaaggagattttaagtgagctaattaaagagtctctcaacaccacacaatacaactacttcacatgcattacagtgacatacaaaaaaaagaatacaaggatgtcaaaactagactcctggttttatggtctgccatagaatctcttcacacaacacaaccttttttgtattttcctcctatcgttgaaaatgttctagaattaaggcttttattgggcccagtgcaaataaagtggataatgcataaataatacttttaaaacacaaataatgggccttaggattggtccattagaaaaaccttatgatagataaataaagtggcccatcaatgtcacctccatctccatatacatatatataatcataaacagccgtcaaaacaacatcaatggcaatgcacactgttcgattgtcgccggcagctcaacttcacggcggtatctctagcaatctgtcccacccaatcgaaa

SEQ ID NO: 41173 - DNA, 359 bp, Arabidopsis thaliana columbia
ttatgaaaatggtttttttgcagtagttggtaaagtgaccaaaattgtttggccattttatcaaaactaaactacacaaaagaattatacaagttagtttaaccaaagcttccttctttagtcaaataactctatatatataactcggtttgttttttcaatttcaacatacactttcctttaaagaaaaaacaaatggctaaaacaaaatacagaatcatttattttcttggtacgtcatctgttttacacgtgtcgatatcttaaagcataatcatttcattttgtttgcaattgcttacataaatttatttttttaaaatgggattgcttgaaagttgaaacacaccaatcaacgg

SEQ ID NO: 41174 - DNA, 530 bp, Arabidopsis thaliana columbia
gggtacgatctcggatgtttacagtgaactgtaaaatgagagacgaagcccttatttacacaagaggaaatgagtatgtttcctacattacaactccactcggtagaagcgaaccagtttcatcatctgcactctctcctcctgcatcatccacattttgatctctctatttaccaccaagtttgtaacacgacaataaaaaatggatacgaggtgcaataatatttacctgaaccggaatctgttccgtctcctcagcctgctgcggaaaatgaaatccggttgagcaattcttcaatctctccggatttttaacccatgcttttctaccttcactcactttcacctggaacctccatgtctaccacatcgacatatacgttaggttcaaacccgttaagaaaaacgctatttgagtgaatcaaacacatatatacctgacacagtggaaacgtgtctctctcaatcacagctccttcgatatttatgccagtgccttggcattctggacagaacaccgaaaatatttg

SEQ ID NO: 41175 - DNA, 358 bp, Arabidopsis thaliana columbia
agtgatgcagcggcctggaccgtggcagattaatccagttagggaaacccatccacacatgaatgttttatcacatggaagctcaagctttactacatgtccagagatgatacacaacaatagcacagattcaagctgtgctctctctcttctgtcaaactcatacccaattcatcagcagcaacttcagacaccaacaaatacatggcgaccatcttctggtttcgactcgatgatctcagtctccgataaggttacaatggctcagccaccgcacatttcaacccatcagccgcccatctcaacacatcagcagtaccgtcagtcaaacttgggaagtcacgcgggcgaaaagagc

SEQ ID NO: 41176 - DNA, 396 bp, Arabidopsis thaliana columbia
ctttcatgaagtttggggttacaaaaaatgaaagcaaatccagacaggtattacgagaccatctactgttttaaggactggggtgaaatatgacctcgctcaaccaaacgtaacattagcttatctgcctcgtcaactttacctttcagaaccagtctcttgctaagcttctcacacatcttaacatcaggtatcagattgcggttaaacatccgacaagctactttatatgctgacagaggtacacctttcttaagatagccttccataagcgcataacatgtcttagcatcagatcttgaagctgtcctcagaacttttcccacaagtgtatatgctcctcgagctttccagatctcagagcttctcaatgacttgattataaattgtcctgca

SEQ ID NO: 41177 - DNA, 560 bp, Arabidopsis thaliana columbia
tgaaagttgttgaagattctagtgtgagaaatgaaagaactaaagaggttgttatcgttgctgtaggtgtttttgctttacccttgaagaagataaagtcttggtcgccgttacttaatcttaacctttttgataacatcgtcgatgcaagaggtggtggtggaggtgggagttttgtggtcattgtggttccctaatgataatcatcattgtaatgacgacgcttccggtgacatgtttgttctcttgtgtgtttgtttatgttgcttgttccagaggatctgagaaagtgagaactgataagaattaggattttgttatattgggagtgggcggggaagatgcagatcatgtttagagtatcaaatcgtttgatgctaagttgttgcaaagaatgtaatgtgtaatattattatcaatctcttttcttttttttcttcacaccaactaatcattttacatgatcataataatcaaacaaaacaaaagagtagtcactcacaagacacgacacactaattactcgatctgaagcaaatgtaaaaccgcttttaagaaga

SEQ ID NO: 41178 - DNA, 547 bp, Arabidopsis thaliana columbia
tccctgttattctcataaccttttttacaattacagctattattaattgtaaaattaatcattttttgacattttaagttaattacaaaatacaatattaatgtgatattaaattttaaataggtaatattattattagatttactactataaaagatataattttttacaactaacacccgatatatgaccccacaaaaaaagagagtaattaccttttatatatattaaagtgtgtatatatacacacacaaaaaaaggaaaagaaaaacccaaatctctacactgtcgaactaataatcacattttaagtagtcgagtttcaaatgattttttctctattccgtcgatgttgccgttccacctccgctgtgattgacgagccatcgctaggccatgactcaagtgtctcaggtgactcagttcgctcagatgtctcagttgactcaggtgtccaactgactcaggtgactcagcagccgctacacaggtggagtccgtctttacgtccgatattggaaggtgacgaaaccgagagtgacaccaa

SEQ ID NO: 41179 - DNA, 521 bp, Arabidopsis thaliana columbia
gtgacagcgatcgcgtgtcctctctattgcttacaagtagagtacatgacatgtccttcctccggcgctgacaagcttcctccaagatgcaactgttgtcttgctcccaaaaattgtactctccatctctctgattctactactatccattgtagcaaatgatatatatctagtaagaaatacctgatggtatccctccttcgaatcccatccattcctcccactcatcgatttcacccatttctgtaatctccatttcttcttcttctttcttaaacttttgcatcaaacactgaaaatgtgattaatataaggaaaatggtttcaattacgttttaccatggctaatattaaacaccacatattcaaaaagttaaagataagaaagaatcaaaatcagaaaagcaaacaaaatacgggtttgtattttttattcttaacttagaaattttttgtccaaaaccaaaaaaaaacttaaataatccaaaaaaaatcaagaaatcagaaaaacatttttttgt

SEQ ID NO: 41180 - DNA, 567 bp, Arabidopsis thaliana columbia
gattgaatgtttttttagtagaaagttaaacttcttttaaaagaagaatatgcagaaaaattgcctgattcgccttgtcgaccaaacacgccaaatttgacataacttttatatcacatttataatatgttttgatgataaaataaaatcacaaaacttagataaacaacatttttaaatgccgtcaaattaggaaacattcagcatctaaaataaacttctttgtatagtaaagtcattcatatcattcaaccttttttcttatgtacacatatcaaccaaaaatgccacgttgctactcatgcaaatattgacagattagagcacttaatataaaacatatgtcatttttgttgttttttgtctgtaattatggatattcattcaataattttctcgtgtatatttaagtattttattcatatacaaaacaagaacagtcaatttcgttctcaagtaacacacaaaaaaaggaacgttcgatagcctcctgagaacctagaacatggactcgatatgagtctctaaaacaaaactcgagcagaatgaggaacaaggattaagaat

SEQ ID NO: 41181 - DNA, 510 bp, Arabidopsis thaliana columbia
taagtcttatattataaaaccgtgaaagtattacgaaaacctttgagtgtgaataaatgaataaacaagaatatgatgccaaattttgaaacctaaagtatctgtgtagggatctgaggaataatattttgtatccacgaaaatattagaaccacacatatgatacatatatatttcaaaatagaaaagactgggacagacttattgtgcatgggtcctcgacacaccgaacttcaagaatatgatggttataatgaaagtagcaaaagcaaaccaacagttgttctgtttttgtatttttaaagatgaaggattaacggaataagcatacacatgaaaaatgagagactagtagattacttataataatagtggcaaactgggttaaaattttgttggtgaagcaatattggtggctttgcttttgcttactagtaaacactactgatattaggggtaggcaaaacaagatttgagatttagtttttaaaatatttatggtaggtggag

SEQ ID NO: 41182 - DNA, 556 bp, Arabidopsis thaliana columbia
tttaaacttcgtgctattactctttgcttgttgtgtttagttatcttgctcgacttatttacttgaccaaatttagtattatgctcggccgagtgccttactttctgtttaatatagtttcattttgaatctgatttgcatgataacatgttgcttggtttagtggaaataaaccaaacctattcacacttggcttgacttagtattctctcattgcatcatgattgttagcgagacactcatttggattgacaccttaaatactacaatgacatgatagtataaaggaattgatcttttggaaacacagtataaaccagactatcaatttgacgttattgccatatgggtgtatacttgttacatttaggatttctgagttattaagatcaagttctatttcatctttctcgaaactcacttctcttttcagttgcttgtttttatcttgtaagtactgtcatactccactagcacttcgagtgtaaggatcgaggaacttcaccaatgtatgcaactccattcttaaggttttgcaacatctgcggtatagagc

SEQ ID NO: 41183 - DNA, 570 bp, Arabidopsis thaliana columbia
gagcaagtagagagaaagaggggtggtgagatgagagagtggctacttgttctgtgtcttcttgtctcttctcaaaacccttttgaatgcttttttacatcattaaagaacttagctcgtgtagactttttttgtacgtatatttttagatttaaattaaagacacatcgtattattggtacttcaaaataatttaaaatgacttattgtaaaaggcaatttttttattttttgtgttgcaggatgagatgtgaaaaagctgattcagaaaatcttgttcatgcttgggtcagatttgaataatttgttttgcaaaaaaaagaaataacaataatttgtttactgtgtattggccattctaaattttataaaatcgacataattacagtaaaaaaaaaagtataatattttgtgtattttatttttaattgtcttgttattaattcaaaaaaattctctaccaataataataaaaaaagaataatttagtcatggtccacaactcccgcatgtaataaacataaaacgacgtcgatttcgtggacccgtatcttagcgggtcggtgtacg

SEQ ID NO: 41184 - DNA, 524 bp, Arabidopsis thaliana columbia
catgaacgtttggtaaaacaatagatacataccctaaatttttggccattgaacaatgatgaatttccctgtgatctctgctcccaaacctaaattttcaaaagtaatcaaacctaaattgattagagtttcgaaatggatcttcgtcattgagattgagttttttttttcaaatttcgatcaacaagcattattgaattctagatactccattttcggttctcacctgtgaaatagaatcttctagaccaggatcttgacgaggaatccgatcatgcgatttcgagaaatccactgagaccttttttagcatcgaaacaacaatatcggatgattaaggatactaagtcacattgtatagattcgattggagagaaacttgagacggagagaggccagaaggacatgagagaagaagctggtatcgtgaaccttcaggattcatctcttctgctagtttcgccatggaagaagctcgaacacagaaagaaaaaaatgagagaggaatgaaccattaatgggct

SEQ ID NO: 41185 - DNA, 587 bp, Arabidopsis thaliana columbia
gattatatgttgtttagtttttattgttcaaacactcgaaccactaataaaaactcatgagtatcaagttatttaaacgtttaaccgttaaaaatgacatttcagcattaaaacctcaacacccaattaaaatcaatgcaactaaaacaatcgtttatataattccaacctcgacactttcaccgattctgccattacaattcctccaactaacccaaccaacataattcacacacacatactttgttatgcttagaaactctttttatgctttaagaagtcaataatcaactaaagaagcaaaacaacagctttttgttttgtgctttgttagtctatcttttaaacctttgtaattagctaataattcaaattttaatctttctgcattaattcgagattcttcactcggtggttatcgttgtcagccagaattaaaaatagtatagttttctcttaatttttcttactaaaactaaacaaaagaacttatctttacgtatcattagtggtagttatcgtatggaccaaaaagtcataattgttaattttgggggtttgtgaaaaagagaggaatggttgttact

SEQ ID NO: 41186 - DNA, 533 bp, Arabidopsis thaliana columbia
atcctaacaatggactgaaagaatgtatttgaattttgaagcctatgaaaaggcgttgaggaaagaatcaagtttctcattggttttgcagctagttttgtatgtaaatgtagagaaacagaatttacactaagatgtgttacattgtacctaagtgtatgtttttttaaaaacaccttcctgtaaatttttaataacaatttgccatggaaacacattatttgcaagatttatgacccgagatcaaggtgtttgacacggagagaggagcttttgttcttcactagtttttttttttttttttggttcttcatactagttaatccacacttttaaagatatgtgcaaatttttctttgtggaggaaagaaattttgttgaccttttcgtagataaatgagtgccatgttatgaggcgtatggtgcggtattagaagtaggagtgcaacaaaataaaactttggttgttgtgagtttgtaattcatatatgtttatggtacacgtaggaaaattatatgagagaatagatgtg

SEQ ID NO: 41187 - DNA, 396 bp, Arabidopsis thaliana columbia
atatctctccaaattatttcacttctattttttgtatataaaaataagaaatataaaccctttaaaatttgtctttaaaaccataactcatgataatttacgtaataatatagatcgaattgtttagtccaaaacctctcgaatatagtgcaagtttctaagttgtagggataaacttattggtctgtacggcgatgctgatacaacaatctcgaaacgtagtcgaaagccattactagcccagacataaacagggataacatttgaatgtaagccgatattctaagtatttgaacgggtgaacaacgatggcgatgtagctcagatggtagagcgctcgcttagcatgcgagaggtacggggatcgataccacgcagctccattctgatcctcag

SEQ ID NO: 41188 - DNA, 589 bp, Arabidopsis thaliana columbia
ctagaggattagaggatcccccctttgaagttgtgacgtgctaaagactcggagaagagatgaagtccatatctctctctccagacacctaactggtttgctttacatcgttatgacacgtggtgacatgtgcgacacgtcagacgttgacaaggtcatacacagtcatcatatgtctgaaacttctctgttttttttttgtagcctttcaataattttgtgaatttctgtggcatcatcagtttttcaagaatttattgtggattaattctattttttttaattagagggaatgaaaatttgagggacaaaatggtaaaagaagttaaacagatgcttaatcaaatgcataatgtgtaaaaaaaaaaaaaaaatgcataatgtgacgcgtcacgtctcgtgacataaatcggactacgtggatatctttgattggatgttatgccttttctttgccagccaaatgtccacgtcacggagcggtgaaagaatgttaagtttaagcaaatttttacttttacagggtttttttttttgggtcacttttgcagtgttattgtgtacttgcgttcggtgataaagtttataa

SEQ ID NO: 41189 - DNA, 447 bp, Arabidopsis thaliana columbia
cgggtcgggtcggatcgagtcacaagatgaacttgaggcatcacttgaaaagggagatgaagggttgagggtttagggatgattgagatacttgttcgagttcagatccgggagtatttggatggataaagaaggagagattggaaaaagaagagtctgagaggaagaatgaaagaagaaaggaatgggaaaaattatctcagatctgagattaagtgtttaggttaaatgtaggagagctatttttaagcgcaaatgtaggaggccaatttttaagcgcacaatttttcgcattaactctacgataacgtcttggattaatatttgttaaatggacaaaaaaatattaatcgacaagcacaacttgtcccaagcaaaacgaatatagcgtttgttattttggaaacgttatcgacaatcgaccatagcaagaacacattagatgct

SEQ ID NO: 41190 - DNA, 539 bp, Arabidopsis thaliana columbia
gcatgtgaaaccagccacttctttagccaattgaaaccatctttgacccaactcttttttaggatactgacgttatttgcaattatcgacattgaactctctctacacatctttttttttttttttttgtcaatcgactctctctacacatctaaatagtacttttgagtaatcaaatattcacgtgaatgagcagttaaatcgtgtttttggcaattaataattaagtgataattagcaatattaatacaagtgtcggcaattgataaaattaagtgaagcaagatatctaaatatcacttgtgtaaacagcaaaaatgtttttggggttgaggtgtcatcggtcttgtccgaagaaaagaggccgtacgttaacgtggaacaattatcatacgcaactcttcaagacaaaacacataaagtataaacaaacaaaaagataaaaatgagcaaaacaaataaataaatgctctcgttgagagttgaactcaagacctcccgcttactaaacgggtgctctaccaactgagctacgagag

SEQ ID NO: 41191 - DNA, 585 bp, Arabidopsis thaliana columbia
tcatgcttatttttttgtttggttaggcgtgaagtgggcgagacacggtcacgcgccaagtcagccgagtggtcgtttctcttcgaaagagagaaaatgtaaccgaaaccacgtggcagatatcgattcgttcgtgttattgacttgggtgacagtcggtcgtagcaccaaccacattcgattttctttgtgagacgtgtgtcctcgtcaaagacgctctacgtggggttacatgctaggctcggtttccgaaccttgattccgaggctctgatttgaattttttgaacgttgaagccaacccactttggttcgtctctctatcttcaccatattttccctttttgttttagcaattgttttcttcaatttgaaattccattcattataatatcaatatgtgcataatcggactcacaaaatatcgccgtcaatgtttggtggtgtgatgatctcatttgacaccgtaggatgttgactcgttgcccatatacattgtttattatcgatcgacatggaatcaaaaccgtgattaaagatatatatgtcactaattaagtgcgtcgttatttatgagaaaaaaatg

SEQ ID NO: 41192 - DNA, 421 bp, Arabidopsis thaliana columbia
ttattctgggtaacctcataattcgtaaccgcattgcctctttaaattgttcaatctatcgatctgtcgcgaagagaagtcggagaaagatgccgcctaggacgaagaatggtggagagggtcaaagaaaatgaaagaaagaagcggcggctccaaaaagaaggtaccggcaacagagccggcgccgctctatcggcggtactggtgttgggacctccgccggctcgaacgactaagacggtggttgttgatgctacgttttatgaaagctttaaacccgattcctgatggagaagagaatgagcaaactaatgagcaagatgagaatggtagtaaacgaactgaagatagaatcagagagtagtagccaaatcttgggcgtcgattaccaatttgataacactagattttaaccatttta

SEQ ID NO: 41193 - DNA, 714 bp, Arabidopsis thaliana
ccccaaatgatcccaccactctccactaatgatgtacaaaaagaacaaagggaattttgtcgcgacggtcaaaacgacgacgttttctcactttgaccgacaagggtttccgattttctgatcaatgacctttgtatttagggctaggaagcggcaccgtcgtcggagatacagggaaccctaattgacctgacgatggcgataaaagtatgctcggtgagagtaatccgtacggagatttaggcgaacttgaacatccaaacagtggaggcgccggaatcgatgtcggcaccgtctgcgaaacagcagaggaaggaggaggaggatgtggtggtggaaaactgttatgctgcgatggtggagcgttttcctgttgttggtaccaacgaggtgagaccaaaggagctaacggagataatccagagaactctttccgattcgaatcgattgcgaacatcgagttctggagataccgcatgtacgaagagaccggtgattccgccgccgcgtgaaccggtggtaacggcgggagaggagaaagcggcgccgttggtcgaaggttaaatccaacgccagtccagttttgattcatgtgatgagaccttgagggataagtgcgtcatttagcaaaccaggaggacgattgataaccgtgaacaaaggaggaggacggatcctatgtagacgcgaactctgttgaggtttagggtgatg

SEQ ID NO: 41194 - DNA, 530 bp, Arabidopsis thaliana columbia
tgttatgaatgaaaatgaatagtcacaaaacaaaagaaaaaaaacagaatttgagtcggtacacaactgttaacgaggtgtacttggtggaatcatagacacgtgtcttgacactcttaaggcctcttcaccaccaaattacttccctaacaaaagaattattattattgtgaagccccaaaagatcgaacattctaattcaatggcctacttgctgaccaagcaaaaaggaccggctccgttttcacctaattccgagcttcacaacgtgccttccattggttgaatattcaactggtttaaccaaaccgaagttacacatacgatttgagtcggtacacaaatattacgagacgtactttgtggacagtttgacacgtgtatcgccactctttatccctcttcaccagtcaccactcaccaccaacttaaaaataaaataaaaagagcatatattgtggagcccttacatgatcgaaaattctcgttcaaaagcattcgttaagaccgtgtgttgtgtgtcgtttttt

SEQ ID NO: 41195 - DNA, 540 bp, Arabidopsis thaliana columbia
gttgcgaacactctacacctatgtctccaacatttataaccgattatgttggaagtcccttggctgatcctttaaagaggttcccttcccttcctctttcatatggttctcctccattgctgccatttcaaaggcgccatagctggagtttcgatcgttacaaggcatctccaccttctgtttcttgctcaccatcgcctacacgctcggattcacatgcattggtttcacatccttgctctcgtcatcttcctcctcacccttctgatatacccactggtcgtaggaaggaacgctaccccgaagagtattctccttgtcaagatttctcccctcctccttctccttcagcaccaaaacacgccgtcccaagaggcatcacacgtactgaaagtgctccagtcagaataccagctccaactttccagtccaaagaaaacgttgtggcaccttctgctcatctgaagttgtcgagacacgcttcgttgaagcctgtgagaaacttgggtcctggtgaatctggagcagcaatagataagg

SEQ ID NO: 41196 - DNA, 530 bp, Arabidopsis thaliana columbia
ttgtagaatcatataaatcctacgattatctctcgcttaggttgtgaacttacattactaattaacactcttgagtcatgagtcctgattggcatcataagatggttgtactaagcttttataatgtgcttagagaagattataatgtcttgttttccaaaacgaagagacctaagttactaacatacgtatagatagtcttttgacttttgagatatctcgtaaaatggcctttaaaatttgatggtatattttggtccatttcctagaacataagttcctctaaaatcgtattaaatcttgcacgtttatctcttgcttgttcaaactttgattcaaagtcttctgtgttcactaattaatatcaaaataagcacatattgatacaataccatggtaacccttattagagctagcttgatgttctcataaatcgaaatcgaatcaatacaaagatcattagggaaattcaccatgtccattggttgcaaaagaaaaaatttctaaacctacaaaataaggctttgaag

SEQ ID NO: 41197 - DNA, 386 bp, Arabidopsis thaliana columbia
gggtacgagctcgaattcgaaatcacgctatcatatgttacagtgacaaattatatttgagtttttctttttgggcgacactcgatttcagaaaatctgctataaaagtttaaagcatgcttcttgattttaaatagcttcaattggtaacccctaactctttcagctttagtctagactgactctttcaattagtactaatgaacacctagcatttatccatgtccctgtgtccagtataaggacatctcacattaggacctaatcccatgcaatataattcagagcatcctgaacttcttgcatcaatggtcgtatcttcgtgtcccgattggtgcgatcgttggatgagtgtgacgataattgtggcctgcatccacaggata

SEQ ID NO: 41198 - DNA, 422 bp, Arabidopsis thaliana columbia
  unsure (1)..(422): unsure at all n locations
tgacttttaactttcaatttataaacattaatatatgaaacttttaacaaaactaaataacgaataaaatcacatgggtccatatgctttcttccgtaccaatcaacactctcacatggattcccaagttaatgtacatcacttttggaagtatgatttatgaacatgatagttagtgtgtacgaaaatgtgcatagtttactattcttataagcatttaaaactaatggtagagtaactaactaatttgtaggttttacgcaaaacatgcgacaagggcaaagattgtcggaaagctaacagaaatttaggtgagctaggagagacgagcggtggatcgatcctcgtaagggaagcagtgaccgtcggtccatatgnaaccgataacttcccaccataactgaggcggttgctgccgacct

SEQ ID NO: 41199 - DNA, 559 bp, Arabidopsis thaliana columbia
ttgaaagctctataaacgctaacgcgattgttcataggttattttgggcttttgttttatttttgggttttacatgtcctcacttctggagcactttgttgacattgaatactcgcccacagcactttggagaggtttgcacgccaagccgcagaaaattccctgggcattgtttctgccagttcttttcttcatccgatgatcaaaaatgtacttctttgccaagtctctggaatacaatattcgcagtacaggtaagaatccgtcagagactatatctgaatattaccgttttcttttctttttgtctaataaagactctatttgcagagtcaaactgtgtgacagacctaccatatgttctgatgaattctctcaattccatcgagaagggttcatactctccctgactttggaggatggaagcattggctatggagaggttgaataatttattctttttaatttttcatcagtaaatagtacattctcttacatttgtgttacttctcccaggtcccactgagaatcatgtttagcttgtattagacttacatgt

SEQ ID NO: 41200 - DNA, 1030 bp, Arabidopsis thaliana columbia
aaaaatgtatttgcgtctaatgctgaatgctaaagttcgagtttcgtatcaaatgaagttgtaacgatttaataattaatgtgaagcttatttctttttgataatgaccaatgttatctagttttatctccgtcgatcatataacttaatttattaatttagtatttcatcaaaattgaaataaaaaaaatcgaattgaaattatttagttcttggtcacaaagccaactttggtattcaatccaaatatccgatcttgggtttttgtttggaattttatgaatagtactatccaaaataagaacattatctgttgaataattgatgcgttttgggttttttacaataatattagatcgatactttctattagaaacaaaatcattatctattcccgatcatactagagcgtcttaattaattaatattctaaagagccggtgatcatcatgatgtgtgatgatgccaagcgaagtcggtggctttgtgactttatggtacgaacgaatattttgttgaaggggatattttatttgcccacgtacacgtggttggtgatagccagatcttggacttaatctcaatatgatatgtgtgtgcctcacaaattatatgtagtcaaccgataaagtatatatataaattaatcagaaacatatatttattagttaaattaattaaaaaaaaatagatataattataaaaccccaccagtttagattagtgtatatggttgctacgtgctactgattgattcagttctctgattacaaaacattgtgtgtatagcaaaaattaattcagtttgaaattaaatggccatctttagatgttatgtttgtatactttggtttgggtcgattaaatcagctttttacgaggcatgtggctcatctgttattggaccaggattttttccattgggcgtggtctcgcaaatacccatcgacaacgattttttccataaccctttgaaacataacatggcataagctggcacagtgaaccataaaagtatcatgttgagttg

SEQ ID NO: 41201 - DNA, 522 bp, Arabidopsis thaliana columbia
tagtacgtactatatagttaaagaaagagggcaaaatggtaaataagagaagagcagctttaagaaaagaagagaagcaatattaactctctctatatatcttaaagatgtactgtaataaataaaaataaaagaagaagaagaaggagaaggggccgttaaaggagtaaccgaccagaccggctttactttttcaggctttgctcctttgattaccacatctcccgtcctcacgttatcctcccgttgactgtctacgcactccctttttttttttttttcttttccctaaatatatttactcattattatgtcatagttttacaaggtcgaggttttgtagttttgttaatgctgcaaatactactaatgtatactaatgctgcaaatactaatacttttttttgtttgttccattttttattggtatataactataaattataagaacgtatagagatgtctagcagttttggtcaaataatttgtaatattacggagtatataatatagaaatatatg

SEQ ID NO: 41202 - DNA, 487 bp, Arabidopsis thaliana columbia
cgactctagaccacttgctttgtttggaaaggttctattgcgacgctctaacatggtagaaacattcatttggaatgatgtgctatttatggtatgagatgtatctgctaaaaacacgagtgtctgtttgttctctccgtactcttacattagaaagatgtttggacatatccgcactaaagatactttgacgagacttttgtgttcacatgatgagtacgatttactgcttgatcaactcaccatgccacttactttgtttggtaagattacatcacgatattctgatgtggtagaaattttcttttagcatgatgtgcttgttaggatagacaaagacatatccgctaaaaacacgactgtttggcaatatcgtccgtcctctcggattataaatatatttggacatatctgcaccgagtaaaatttggcgaaattttcgtgtccgcatatatatattttgcatggtagttgacttgtcaattgt

SEQ ID NO: 41203 - DNA, 383 bp, Arabidopsis thaliana columbia
ttttctatttcaacaagaatgaaatctcttattaatgacccaatttgaaacatgaatgagagtgactcatgcgtcattcattttcttattttattcttcttcttgacctacaaaaaaagataaaacaagagtataataaacggtatgaaatctgtaaagggggtgtcttgaggagatctagttggggcccgtagtagattagatttgtggccagtggcaagcttgcctcacctctcaatcttttgtggcccaatctttgaccagttcgttgtgcacgatatttgggcttattagacccgctcttattactcatctatagtatttaatgtacttctaaattcagttggaatccagttactcgaaatttcaactgaaaaaatagc

SEQ ID NO: 41204 - DNA, 571 bp, Arabidopsis thaliana columbia
catcaacaccgtcgccgtcatcaacggagaatctttaccggaatcattcaccggatgggtggattgttcctatgacgcaaggacagtttggtagttacgagacgggtttggtggcgaagtcgatgctctcgaattcaacgtcgtcgacgtcatcatctttgacgtcgacgttttctttgccggagagtgttaacggaggaggaggaggaggatgtgggagtattcagggagaaagaaggtataaagaaacggcgacgtttggaggagtggtagagtcaaatccaccaacaacaccgccttatccattttctctgtttcgaggtggcttttagcgtttagcttcacatgatatatgatctttagactttattattgttatattattattattatttagctacatacctgtttgttcttaattattttatgtataaccaaaagaaagacagacaataaggacagatccatagttgagtcagtagtcatcgtttgtagacagttttgacagtatataatttctgattatatttgttaaaagttcatatgttgactttgtatccttttaaaagta

SEQ ID NO: 41205 - DNA, 496 bp, Arabidopsis thaliana columbia
  unsure (1)..(496): unsure at all n locations
cctacccacttattcttgaaattatttttgattttattcgttgcacttgaatcatgggtgaaatcatcttcaatctattaataattttgtcttatcttatttttatttttttcaaatagtaaattcataaattgcatgtggaggtttttgagggaacgtttttatctatttctttctttttttagccaattccagaaactcttttattttctttactcatctcttagttttgttaaccaaataaaacagatcatccaaatttagatttttattgggatcttacctaaaaagattgtgtaggatgtctatgcatgtatgtttttaaaaacatggtatatagttgagacattatgttgtgcacgttgagctttaaatacctccattaaatctttattaataacatatcaacccccttgcactaaattaaaatcttcacaacattaagatataaccagaattgtntgatgangctattcatatattgacgtcatgacat

SEQ ID NO: 41206 - DNA, 502 bp, Arabidopsis thaliana columbia
gtgaagaccgcatgcatgtttcaggataagatggtgaagaaaggcttctctcctgatcctgtttcatttgctgctattttacatggtttttgtgtggttgggaactcaaagcaatggaggaacatggacttctgcaatctgggtgagaagggtcttgaagtagctgttaggtaatcgcaggttttagagcaacacttacctcaaccagtgatatgcgaggcttcaactattttgcatgcaatggttgaaaaagctgacaccaaagaaccggtagaatctccgtaagataaagacagatgatttgctgctgaataaagacaagaaactgatttcagaatgtatactagtttcttgtatttccagacaggagcgtctcatcgactctcaaaatgccatagtacatgaacaaatttttgtcattacaaaagttgtgtcagctcaagaatgtggtaagagaagaaacagcattacagctcaaattcacagaagcagtcgggcaaag

SEQ ID NO: 41207 - DNA, 464 bp, Arabidopsis thaliana columbia
ctttcttgtccccaactaaaagccgtgtcctttcaagtgctttaaaaacttctgactgcaggaaacacacaaattactcatcatgtaaatacaaattagttattactagttaacaaacaaaacaaagagaacaaaaacacacctcaatacttggttccatttgtgcttcagccgaaaatccataaaatctgtaacaacaaaaattcattcattcatacgattaggaacaatgacataacatgaagaagagaagcaatccaaaaaacatacctcttaccaaaatacatgattttgagtgcaacatatctctttgagataagatgactcggtatactattcttatctccttttctaactctccttctcctaactaagctactggaatctgacaatgaccgatcatgcttcacgttcatctacaacaaaaacactgagattcttgacaatttcaaacgaaacaatgt

SEQ ID NO: 41208 - DNA, 417 bp, Arabidopsis thaliana columbia
gataatcacttttgttgttttgtaattgtagatgtctcttggttataatcaagtttccttattacaagttcttgatttttaaagccacctcaaagcactagtggaagcaggaaagaaatgctagtttttgcggtgatctacttctcgtttggcagtcattgatattcacagattatcactaatgcactattttgtggtgatctgaaatcatttacaaacacacttcaacaaaacctctcacaacataagactaaaagcagaaaacaccttccctttggaatttatcttgctgatattcaaagcttcaaaggcctcaattaatgtaaaatgtttctgcccactacagttgcatcaactttatatccatcttttaatagaacttctgaattttaacctatgctagacatatttgttgta

SEQ ID NO: 41209 - DNA, 578 bp, Arabidopsis thaliana columbia
caatacggtaatatgcacaactaatagaatgtttcaggtgacaaattttctcactaaagtcaaactttcatacttgccgatgaagtaacaaacatacagtacgttcaatacattaaggatatatataagaaacaaaagctggaaattgtgtgaatttagctaggttagattatagtataataaagttgccttgtacgattggggtaatggctaatggattccgtacgttgatgccaacttggtattggcaaggctgagtgtgactcggtgcaaaaagcaccagctgctatctaattccgcgttctaaccaatactacattttcatttattattactttttacaatccataaatctctctgctgtggagggttgatataagatccgaaacttctttgttgataaaaaaaaatctaacaatcttccaagttcaaatctcactcagggaatatgaatgactgaatatttagttagatattatcgaaattgtgattcgtgttgacagaataaaacaaatctcataagaagtggtgatgtcagtttccgttgagaagaagagaatttaagtggatatgtcaat

SEQ ID NO: 41210 - DNA, 584 bp, Arabidopsis thaliana columbia
taatgaactgtaaacttggtgttcattgtggtctatggcggctccctgcatagttcgccgcttatgttccatgctttcgtcgccgttatcttccacgtcctgaatatcttgttcaacgcccgagctgccaaatcatttccaatttttcaaaaaaaatcaaaagttaaaatttaaactcaaaaaaaaaaacccgatatttataagtcatcatcatcatcgtctctttcgaactataaggagttttttttttttttttgaaaatgaaagtaacaaaaaaagaaagggtcgatgatgatctaaaacgaaattagcaagtttggagaaccttcgtcaggatcagtagtggcagtggttcggttctgtgatcgaaccacatgaaataaaccagacatgaacacaaaccaaactaccaaggagagaattaatctcagcatcgtcgacgaccaaagatgtgagagagtcgggagggatccagagtaaaccaactagccatttttgttcttgttatgcgtataaataaatgtatattatatggttttaactttagaatttaacagcctagttacttttttttgataaataat

SEQ ID NO: 41211 - DNA, 550 bp, Arabidopsis thaliana columbia
tgcacatttgagcagtcacaggaatcaaattccctttcgttaaaaacccaggatcaaaaccatcttttttagctcatgtgtttgtataaggatgactcttttgtgttctatcatatgtacgtgtatttttaaaacgtcttctctgtttcatgttctggtaataaaaacttgtttcactggttcaaagttgtaactgagttgtatcatatccgatatatattagtatatgacttcactctcattatcagcgaaaaaaattacggtaaacagaccaaaaagtctttacaaacaatgaccaaaaaaacaatacgattttacaagctgccgaatctacaaattgcactaatctgtatcatagtttcatgtaacaacaatgatgtttttagagtttctaataagaaaatttttaattgatgtaacaaaaaaaaatgtgtagtgtgggaaattttaatatatatcagtgagtttagataaaaatttgaaagttttaactacaattactaaattaaccacgtaatagtgagtcgtaaatctcaaaggatatgcgagg

SEQ ID NO: 41212 - DNA, 514 bp, Arabidopsis thaliana columbia
tgagcaactgatgataccagatctaaataggatacaatatgatcaaagcaatatggagacgcattattggtgaccttaaataaatttaataatagttagacacttttgttcacaccctttactgaggacaggccatttttattttatgtatttagttgaggagcatttaatagacagatttattaccctcttttttatttttcaaaaataagatttattattcataaacatttgatattagccctgggacaaatatccgggatccgcgggtatccgtatctggaaccgggatccgatccaaaaaaccggatatccgtgtgaaacggttcaggatatggatagtaatatttcatatccgccggatacggatccggatccggataataataaaaaatatgaccggatatccggatccggtaatattcaatgttttatgtttatgggttttattgggccatattaaaaattaaaattatgatattttccagctcatatcttggcccatttccaaaaa

SEQ ID NO: 41213 - DNA, 595 bp, Arabidopsis thaliana columbia
tagatcggttggaatttatctgattctccaggaactatgaatcgtagcagaaccagatgcttgagaaatgatttagcataaggaaaaaagagaaatctcaagagaaatccatataaataaatagaataagattcatatcatatcaaaaaccatatcgcataactaagaaatcgtctagaaaatcacaaaaccacaaatactctaaaaagaaatagtaatatcctcatacagatatgaagattaagatagaaaacgaagaagaagagggacaaatagaaaatgagatctataagctgcttcggaatacacacgagacgacgaataatgatgaatggcctataccgcaaaaacaatctctgtacgaaatcaccatcacagtaacttagatccgaagagctgagccaaaaacaagagccgcgactgctgcaactccagctgacacgaaagacgctgagatcgcactagatccagaagtaggacttggtgctggtgcctcagattgtgccgatgcaacgacggagataatcccatcatgagacaacaatggaagcttagagatcgcattcaaagattttgttgtgagagataagagaga

SEQ ID NO: 41214 - DNA, 461 bp, Arabidopsis thaliana columbia
gtcggaagattccaattcctcctgaaattttatttcaaagagaaaatccgttgtgattttccgccttgagatcaaagtattaggctctcggaaaaatggctaaaacattctatactttaagtacctcttccagtcttttcatatactgatggatccaatcagcttgagatggttggcaagaactaagactatcttcttcttcttcatctcgcttgctcttcactcgaactaaaacttcagattcaggcacctccttaacctcttggactgatgattcagcagacacattccaatctttctttgatttcgatatcaccgccacagaacgtcctgaaaacatcaataggtacaagaatcaatgcgcgaaaaacaacgtaaatttccgggagagtattacatcaacattacctgtggaaggaaaacgagaagccccgttagaaaagttcactggcaattcatgg

SEQ ID NO: 41215 - DNA, 519 bp, Arabidopsis thaliana columbia
cggagattagcatgaacacatcacatgttatttgtctagggacaagattcaatgaaagtcagagagtgagaaccgagaaaaggttgcgtaccggtcaagatcaaattagtacctttaattgtcatattagactcccaaggtcgttaaaacgctttgtttaaataatgtcaagagaaatttgtttaatgatttggtccgactctaaaaccaagtactagtagcagtgtaagagaggatggatctcagatacgttgttgcttcctcttgtgcttccagccacagttcaacttcagccaatgaactttgattgagagagcagtcacaatggtctttgtttgtgatttgcatctggtaatggagctcacgattgttcaaggtttgcatcagtgaagccattttcttacagaccagagattgttttaggttgtttataaaggatggttcttaaacactagtgttttgtaacttcaaactgattaaggcaatcggtactatactgagatatgattttgagtgatt

SEQ ID NO: 41216 - DNA, 507 bp, Arabidopsis thaliana columbia
tctagatagtaaatttactatttattttgttaaacttttggtcggtacattaaataaggttcattagttttgaagttggtgatgctgacttgtctagtaacaaaaatgtaattagacatattaagagaattgttcctattttgagtattgcatctttgtctctcaaaaaagtgggctctattgaatttgttggttaggtcatgaacacttgttgtatgtgtgaatttattaataggatttgtgttggggactcttagccatatttgaggtgttaaagggagctttctcttcccacatgcttttgttttgtttattcttctaagttctaagcagaacgataaaatgaaatggtatccatatctatctataagccatcagtcattaatgtaccaaccctattaatctaatagccaaatcttcatttcaagttttggactatactttttaactctatttttgttgttgtttgctatagataaacgtttagcttttaaatattttatatat

SEQ ID NO: 41217 - DNA, 444 bp, Arabidopsis thaliana columbia
cacctcattacattggcgcgtgatctatacgcgcttcttcaaagtccgtacttgtctcgaaacaaagttccggtaataacctcgtatttggttcggtttctttgctttataagggtatttaagtcttcttagcattgagattctcgtgaccgctccctcctgtctcattctcagagacagacctcacccatcttcctacttcccagctgtcatatgagagtgtcactttacagcgtgtcgtgagtggcaaacttgtctcatcctcgcgagaatttatcgcgtaatcacgtggcgacctattatgcagataccccaagaaaaaagtaaattcgcgcgtgatactcacgttgatgagatgatttttctcgacctacccattactctcaatttaccgaacctagcctatataccaattttaaaatgtggttatggatcttatgataa

SEQ ID NO: 41218 - DNA, 494 bp, Arabidopsis thaliana columbia
aacaagattagagtggcagctccccctccatcttgaggaagcgtgtaaaggaaaatccaagatcacttcattactactatgatgttccgtatctctgtatatggaaaccattgtaaatgcttaaccctagtaactctcccttgtacaagtatatatatgtgtatactctttgtcaataataacatacaacacttatatgaatcgcataggattgagatgaacgaagcttagagacgacacaagatggatttgcgaagaagattgaagcagaactgaatgagaatcgaataaatttttccaagaaaattaagtgatttttcgagaaagttagggatcgagaaaagtttgatgaaatcttttagctatgataccattttactaaacaaccaaaataactttcattctcattacttagggaaaatatacatggggcggtttatatacattactcaacttgggctaaaccgaaaccccttactgaaaatagaaatgca

SEQ ID NO: 41219 - DNA, 569 bp, Arabidopsis thaliana columbia
tgagtttgttaggcatcgtcgccgattttgttatagttttttttttctgtagagtgggaaaaaagaaagattgaaacgagtatttatagagaacagagtgaagcaagaagaattataagagatagatttgataattataaagaattaaaaagcttctctaataacaaatgtcgttatagctcggtttaattctgttttttttttccagattataaaccccacttcaagtcgttttgtttaactaattagtggacgaaccatgagtcaacaatattttagaatttggctttaaccaacagacaatatttcttcaacatttgctctttcagtcatttgattggataacaatatatttgataggctacacacatggaccatttcgattacttgaaaatttaaaacgcgttctattgaccttctcattaggcattgtgaatttactagtgtataattacattgtgatatttaattgtggatcacaagaataatcacaattttagaacttctaaaaagacaccgtaaatattacatgtaccacttatttttaaaaattccttgagttttgtaag

SEQ ID NO: 41220 - DNA, 572 bp, Arabidopsis thaliana columbia
cgtacgaaatcatttaaagaatttttggaaattcagtttattttttgcctatttatttttagtatataattcaaagtctccaacacatacacttgcaaatttgaatgaagttatgatacgacgtgggtactagactactagtagtacaaaccacttgattacaagtatttattttcaactacaaattcgactttattaaataataagtaaatgtacagtcacattttatatcatctgaattagaagaactttttgcaatttttcaatagcaatgatatagcaatcatccaactaatctatatatgtaagtgtgatatatcaatctctgtgttcggaattaatgatgatgccacaaaatttggttattaaaaaaaaaaagtttctgatcaatgaatttctgtccgtactttttacagattacatacaatggatgatatgaattattgaattatcatttagaaaaagaaaaaaaacggaactataccaatattctaatttagtaattactagaactgatacaaacacttttaacgtaaccacttttggggccaatataagtacgtgtatagtgt

SEQ ID NO: 41221 - DNA, 446 bp, Arabidopsis thaliana columbia
gaaatgatcaacagaaggattcggatgatttcgtacctttctggatgtatgtagtcagccaaagtacggccatcttcgagctgctttccggcgaagatcaatctctgctgatccggaggattccttaaaggagacacaagtaaatgataagagatctgaatttcaaaaagctccacagaagaatccagattgagtgaggaagcatgataccttcgtagacctggatcatggccttgacattgtcgatggtgtcgctgcactcgacctcgagaatgatggtcttgccggatcaagggtttcacgaagatctgcatctcatgtgtctcgtcttctctcacgtagacaccctaaacaaggtggaggcgggtttagatctgtcaatgtacgcgtcaagggctgtgctaatatagggctaggttacaggccagctaccatgaaaggcccag

SEQ ID NO: 41222 - DNA, 408 bp, Arabidopsis thaliana columbia
ttttatgcattggaatatagtttctggcttgtcgccgacgtgcaaaccattatcacattaacattctttaggaggggaagatagtcttatagtttttaaatactctgctctcttctaacttctaataaaacaatcatttttcaaccccaaaaataaaataaaataaactcgtgaatgattgaatcacaagtcaattcaagttatttgaatatggaatatatatttttataacgtgttttattatgttctagcatttatatataggaatttaataaaatcaaagacgttaattcgttttactttctgaaacattggttggcaacgtaggcaagaccttagttaggtcaagcctttactatatgctgaaaatgtttgttttattttaatgcctagagtacacattttagg

SEQ ID NO: 41223 - DNA, 580 bp, Arabidopsis thaliana columbia
ctttaaaaacaagaaaaatcaaagttgttaaaaattaaatgttgtaaacctgaacctaaaaataaaaagtttatccaaaatattatttgaaaataataataaaaaacttaaaagtttaaatagtaatattaatagaaaatttatttatttaaaccgccccaggaaattaggaaaacacaaacctagggttgtggtgatgatgatcgatgaaacacaaattcgtcttcttcctccggaggcgactcgtactctaaaaccatcaaacaacgaatctgctaactgatcgtcaatttcactatcactctcttcgccgtcgaagaatcctccggtacgtgaaagcgtttcggtggcgagatcttggatcgtgtgaaataagggagacataatttgaactcgattgatataagaagatgttgtcacgagagatcgaaagcacatcagtgatcagtcgcaaagctttgatcgagacgagaaatatttgcaggtcttgaaaaggaaagaagaagacaaagatgaaagatggctttttgttttatgattgataacaaagaagaagaagaagaagaagatatgatgaggg

SEQ ID NO: 41224 - DNA, 575 bp, Arabidopsis thaliana columbia
tatactaaaaccagacaattctcctaaatttgacttagattctaagaatcatccattaaacattcaaatcaacatttgaagataagctcctaaaatgttcatatccaaaaacacatagagaaattgagataacacaaaaacacacacctcaacttctgaccaatcagaggatccaccggagctactctgagaattttttacagtctctgttaataacctgaaaatcaaatttgattccaccatagtgagcttaaagatgaagctagctacgcgaaaaatcaagagtggctttacctctcgatttcgccgtagacttgaattcctgtagactgattccgatctctgtttatatcgttctctttggagctacagaagactcttcgtgagacacgctctttgttgaaactgaatattgaaggtagagaccggcgattgtgagaaaaactacagaatcgccggcgcggagaaaaagacggtggtggtaagagggaacatgtagccataactcggagttggaggagattttggggtttttgagattttcgcgtcgagagtttatattccgtcagattttg

SEQ ID NO: 41225 - DNA, 564 bp, Arabidopsis thaliana columbia
ccactgacagcaaaatcacaatcctcatctccagctcctattagcttctcaatgcgaagtttatcgctggcagatggcatacatgtctgatatgttcgagtcaccgtcacaaagcttttctttccagaaccattgcagctacttgataagcggtagacatctgctaatcgtcttacctgagagcaatctcgattatgcatacgttggaaacagtgcatgtccacgttctccagaacaaaattctctaactgagaattaatatcagcaagatcaacaccacgctgcagcattctctcacggcgcttcaaagcaatgtattctttgcggtgtttcttgttctcaccaggaaaactacgggaattcttgctctttggtgcccgtgaaggccaagactggggaaacttagccacctctttcttcttattcttcttccccgaaagacttcttggatccttcacaaacataagatcatccattgccaatggattagtagacttccatgccccgagtagcacttcttgttgtcttcttcttaccatattccattgaagctttttgcagacg

SEQ ID NO: 41226 - DNA, 536 bp, Arabidopsis thaliana columbia
gatgtcatatgcataaaattacaaggccgcgtttataagcaaactgcatatacttaaagtcttctcgattccatgaagaaattaacacatttaaagcttagtagatgatagtgcggtaaataattaattattaggtaaattagtgaagattttgtatggcttatctgtatataaataggtaacgaaatttacttataagcaagcctataaataatactaacgatatactatacgtgtttaacacattgtattgaatttaatgatattttgggggtgaatttccgcaagcaggtaagagattaagagcgcaacgcgtttgccacggatgaaacaatccgagaaaacaattttgtgacgaatgtattgcaaccgttaacagttagtcacaaaatcgtcacaaaatttttattattacagatttattgacatagtgacgaaatattatgtctcaataaaattgattatacacacctctccaccaacaaagacgtacctcccatcctagcaaactaggtcaattaccactgtaggtgagt

SEQ ID NO: 41227 - DNA, 485 bp, Arabidopsis thaliana columbia
tagtcccgaaaacccatgcaaccgtgtacataataatatatatatttaaaaatccatgtccaatctccaaaccattttaaaacaagagaaacaatagtttgaaaatatagaaaattgcgtgtgagtgtgtcataattcataaatgcaaagacaaatgtttgatctttgattgtaatttctgaaactcacggactttcctacctctttctgatcttcccgaccccatcaacacttttttgtatctctatcacacatataaaatcgtattttgattaataccattttccagccattttgcctctgtcctctcctacttactcttctctcttatgtttccagccatcactcacgagcccatttatgaactttaaccctaaaccagtgtatatctcctccacttatataccctcacattatcattccaaactctctcaaaaaaacaaaaataattacttcaaactaaaacccaatgttcgacacaagag

SEQ ID NO: 41228 - DNA, 398 bp, Arabidopsis thaliana columbia
accgggtacgagctcgaattcgtaaacattgatttaatagcacctatatccacctctcaagtttcacaagaaggaacgaacgtaagcgttgggacacaaatgacaaaaccctttactctttaacaagaactcacatgaggcttgcgtaatgtttatgacagaacaatgatattataccgtcctagcgatatttgggtttgattgagttaccaatataacccaattggcccacaagtatccaacattctggcccatttgacgttcagtatattatcagcgtggaccatcaatctgactccgcgccacgtcttcaagcgaattaaccggattggttcgcggcttaattatgagaatgagatatacaaaacagagtcttcgatttctagagttgatttagg

SEQ ID NO: 41229 - DNA, 113 bp, Arabidopsis thaliana columbia
tatcttcttctgtcttctccctccctgaatctattttactgttgtttattgttgaatctgtgtgtcagccaggagagcgctgtctggccttgaacatgggctgggatgggaaa

SEQ ID NO: 41230 - DNA, 759 bp, Arabidopsis thaliana columbia
ttttaattgatgaagatacaacttttaacctaaattattgaaaatttcatcggattgaatgccgatgaaaccaaagcaataccattattagcatactaccaatttgattcttaagaccctaattcgagacgtgtcgatttttttacttgtgtttaaatttatatgttgtaatttttaaaaataaactttctattttttttggcgtttttcatttacattgaaaaactatgtttctctggagtatacaaataaataaatataaacgcaaacgccataactagcgtttgaaacaatcgaattcaactccgatgaaaatccatcctcgttcatgtcattggcttccatagtactaaaacatgaaaatggacaacttaacaaaatgaaccaagagggacggccacaaacagaaatgatctgtctgtcaatttaacatattaaaatagagattataatttaaacaatatgatttatatagaggactttacaaagaaaattaaattcatcatctcaaactcaaaagtccaaattgaataataacttaaaacaaattctctaaaagaagatcaagtcggtgcatttgcacttggggcaacgttgacgttcttgtaagaccataacatacatcatacaacttcgacatcccatcaccaccatctccggcgcctcttcttcatcaacccacgacgatgaacctcctccttcacttcctccgtcctcgtcaggcacgagttttgtgatgatgatgtgcgctcgatggtg

SEQ ID NO: 41231 - DNA, 434 bp, Arabidopsis thaliana columbia
tttttaaaggctgataagcatgtttttcttctttagaattctctagttaccaaatgtctggaccctaacttctctctgttaagtatgtagaaaaatatcaaagaagttgtagagaatgagggtgggtttaatgaagttagaggaaactaccttttcatacttacatatgtaactaaacttgttttgtctggtatttgtcaaatcatcggcgtaaaccgatcataaaccagaaatcaggggataaaattcagccacatttgttaaaagtcgtaactgttacattggtttaaaatctgatctacacacttgtgacttgtcacttgggagatgtgggtcgtcaaacggtcagtggggtgattaacaccttaatcacctttaagtaattacaccattaattaagccattatatattcaaagattagagaaactggaga

SEQ ID NO: 41232 - DNA, 623 bp, Arabidopsis thaliana columbia
gatccacgtttgctgttccattttgctaacgaagttgaagcgaaacatgcagaagctaagagataaacagaaactgaggtaaccttcaatacttatagctctggcaaaaggcacgcagataaaattgaggccgctccagatgctaaaagacaggtggttgaggcttcaactggctcacccaagaaatccattctccccagagtaggtgcgttatctcgggaaacatcattcaagggcttagacaggttaaggggaaagctaaatcatcaaacatcattcagtgatgacacagaaagtgcacgatctgctggttcacagctccaacctccaaaaggtaggctgcatgatgggatagctcttcctaaacgcaactctaccttatctctgttgttgtatttctggcgattttgcaggttagaataactagttttttgtttctttaggtgcatttttgaaatccagttcctttaattgttcgagctcgaaaccgaaagtgcaacttatggatgatgctattcacccaagacagaagactggcaaagaagatactgcacttgatttaaaagtggggggttttagaaatgtaggcaagtcaatgccaagtagaactacagatgcaggga

SEQ ID NO: 41233 - DNA, 1062 bp, Arabidopsis thaliana columbia
tagatcacattttctggaaatactggccctccacttcagttgtgtgatggagaccctgggaatctatctgttactgtgtggagtggctttcctgatgatatcacccttgattcgcttagtcttaccttggtagccaccaacaacactgacgaaggcggccaggtttgcctccattagacatgacttttctcgttcttttcttcaattaatttcacgttcttaagaactttgtatatggactggctttcaggctttaaagagttccgctgcaactgtgctaaaccccggaaggaatactatcacttttgctctgcctccacaaaaacccggttcctatgtcttgggagttgttactggccagattgggcgcttgagattcaggtctcatagcttttcgaagggtggtcctgcagatagtgacgacttcatgagttatgagaagccaaccagacctatcctgaaggtagaaaatcattaattacatgcatgagtagtgatactcttgtggacacttgtttccttcgttgatacggtatacattttgttcttaggttccaaaccaagagctctggttgatcttgctgcagctgtatcttctgctctgctaataaatgaagcccagtggattggtatcatagtacgtcctattgcttactcacttaaaggcgcgatcttgcacattgatactggtccagggctaaagattgaagactcgtatggaattgagatggagagatacatggacgcagattgtgatactggtgcatcaaaagctgaggtttttgttgaagatagtcctgtctcttcaaaacgggattcagaggtgcttaatctttgcgatggtaaaatagtgttctcagattgggctagcaatgtgagttctattctttgggtccctgttcgtgccttgagtgagaagcttgctagagggtcatcatcaggtttgcagcaaacaatgattttttgattattatgacatgtttgtgtcacatccactggccaatgatcatatttcttttgcgttaacagtcactccgctgaaacaagatattttagagggaa

SEQ ID NO: 41234 - DNA, 714 bp, Arabidopsis thaliana columbia
tactctaattacaaacctatgggatgaaatgtcattgcaatggccacttttataatccttaattcatggtttgatctcctactctgttattttttatttataagtttctgaaacattaatttttgtgggagaagatttgttctttggattctttgtatatgtacggctcaatttgtaaataatcaaaaagttctatgatttttgtttgagagaaatagtcccctgtaactacttacttgcgtcattcatttctttcaacacttttttttgctttaattcactagtcttgatattgattccttaacgtttgcatgttcacaatttattttcatcagctttttcagctttttattactattttctgactgacagaacagaaccatttaagcttaaactgtaattataagtaaccagttacttcttcacaatttttaatttaattttggaagaaagaatggatttagatttgatttgaatggaacaatacactgtcaaaaattgattaatcaattttgtctcacctgcttccactgtcctcctacacgtcactgtttgagtctccttctcgtgaatcttctgtagacccatttatctgagtaaagcttaacttcgtacaattattatcattactttattttttcttcttctttgtcttatagcttcaaaataatttagtaatcaatttacataacataactatgagtctaaccaata

SEQ ID NO: 41235 - DNA, 462 bp, Arabidopsis thaliana columbia
ctccatccacggttttgtagagggtaatataattttttctatggacagtaagaagtgataaaaatataatattatataaaaaaattataatgcttttattgtatgacacatgtccattttaaattacaaaaaaccatgtaaataaagaataaaatacgttataactaaaaaaactgaatgcatttcaaaaaagttaccatataatcatataagtaagcatataaatcatacaccttatcttgatgtatatgattagttataactagaaaagaaaacaaaacaaagttgaatattatatctaagaatatatattacccattaagaaataaatgaaagagagaataaaatccacagcattatataaatattgtagccctgggagttcggatatatcggtttaatcggttcggtttatttagtttttcggggtttttggattttttaatttctagccgaattgac

SEQ ID NO: 41236 - DNA, 485 bp, Arabidopsis thaliana columbia
tgatgggtcaataaaataaatacgtcttaaattggcctagcccactacatgttttacgcagttcaacatcttaaatccgcttaacttgcttctgagtaatttaataagtatataagcctcatagcttatacccttctttagttgttttagtacattataatgaaaaaaaaaatatatataccttttagagttgtgaagcatttcatggtaaacacagtttagaaaataatagttaagaaagtcttgcttcttttgctgaccacttttcaaagccaaaccttagaaacatcaaacaagcatagagacatgacgatgctccaagatatagcttctaaaagaatttgtgtagagcttaatgccatcaaaatgatattggttcaaggatagatcattttgcctttgggtgttggacatgatgttgcaaaaggttgcgagtcttgtgacttatcttcacacgatgatcggtacggtctaatatatttgga

SEQ ID NO: 41237 - DNA, 290 bp, Arabidopsis thaliana columbia
cggtaaaaaggatataagcaaagagaaggaatccgcagaaggctagggatgcgacgtaccagacaacgtcacacagtgagacatcgccagaagacggaaatctgcggccaccgtaggccattttcccaaaacatcatgaagtcacgcgatctgattactagcccgacacagatctggtagagcatgggtatctttagagtaaataactccaacgttcgaccatgagatcctactttgcaagtagcacaactgtgcatccacgatataggcccctcacaaccggagtgcaa

SEQ ID NO: 41238 - DNA, 511 bp, Arabidopsis thaliana columbia
ccctatacaatagacagcttaactcaaaagttcctctcagtgaacgccagactatcgtctgctgactcttcattgcattacagtgaaagaaggcaccacagacgagacttaaaaccggaagtaaataacagtaatgtcttcccttccatgaatggcagtttacagcccgttggttcgccattttccaaaggatcaacagctttgcctaaaatccccaagaatatgatggttaaaattcctggttccggaatgagctctcgcacaacatccccagtttcagtaaagtcaactagtccacgtcgatcttatgaagtagcagctgcagaatctaaacaattaaaagacagttttaatcaagatatggctggtctaaaggaacaggtatacatcatctattgtcagctgtaaatcacatcaaagcaaaaatgcttctagactaaaaacatgcatctatccactgaacattgtaggtagaacaacttgcttcgaaagctcacccacttgaagagga

SEQ ID NO: 41239 - DNA, 272 bp, Arabidopsis thaliana columbia
atttctaggcttacacattcaaatctaaatcctctattatatgcttgttacacaagtaatctctcatcagatatcaatgtgtgtgtttcattaagacgtgtataagcacgagttatggttgacattttgaaattatagatcaaccccaaattcatttcctcggatgtatggagaaacccagctcatcatgataaaatggatttaaagaactcaatccaggaactgcgagcatttactagggaactcgatggcaatggagaaagaactcagtc

SEQ ID NO: 41240 - DNA, 469 bp, Arabidopsis thaliana columbia
ggaatgagtaagatatggttgtttactgcatatataattaatgaagtatataggtaagggggaaaattaaaggttagtgtgttgaattgaattttgttgtggtttgaagattaatgtaaaaaggttattaagtatttgtgtacatttgatgagtgttggtacttttatgaaacggttgaataattattagtgtgtagaaggagcgaatatatatgagtttgaagtaaatggtatatattttgttagttacataataatatgattaatggatgaggtaaaaattgataagaaaaggtaataatgtagagcttgtatagaatagaagtgtgactaagtagattaggtaagtgagaagattaattagtaaaatagatctgttcttttaagaaaataaaatttttaatgattgaatgattataagttaaggataagtttgggttaactactcaataaaatattgtgaggtgta

SEQ ID NO: 41241 - DNA, 502 bp, Arabidopsis thaliana
tcatccatctccaaattcaccgataaaaattcagagtttgtcaccgtatcgaagatttgatcgagatcatcaaaatcttcattgcactcatccaagtttccaagtaaaccgttgttgttactattgtcagaaaccgctagggtttgctcttccgtgttaaacccatcgaaattcacagttacataatcttgaatgcaaacccttgcagaacacggctgatgaattagggtttgcgtttgatgatctctttgcttctccaactccttgagatctcgcaacatagtcgacattgaatccagcgcctctctcaacatctccagattctctgattttagaagactctcatcttcccaccaaaaccgttcatcacaaggacgctgattggcgagaaaagcagcgacgacattatcaacagaggagtggccaaaactgtagaaagcggcgttggagttagaagaaacaggagtcgctatgatcgcaatctctgcgtccgagagaagac

SEQ ID NO: 41242 - DNA, 347 bp, Arabidopsis thaliana columbia
cgggatggtatcggtgccgatgagtcgttctacacgaccgtctttgtaaatccggcagaaaggaagaaactcggaggcgatttcagattccattgattgaagaagaatgaagaagagtgttgttagttggagttggagttggagttggagtgagcctgttgaattattagtagtgaattgctatgtatatgaaaataattgttctttgcatcgacgcgtagaataagagtggccacgtagcttttttctgttatcggcggatcggattgccctgttaatatatgatcagatgggtaggtaaaattaaaggaataacgacaaaaagttcaggcaatggaggctttagg

SEQ ID NO: 41243 - DNA, 664 bp, Arabidopsis thaliana columbia
aatattatttggatcatacaatatgggcttaaacgaggatagtgtgtttcgtagcataaagccttttaaaagcccatgataattccgtcttcccttaagactcgaaagttgaaagttgagagtaaaagttaatacagttatcatattgcaaagttgccgatttattcgaattaaacacgaaaaggcatattataacttaagagacttcatcagatcgagacaaagctgcggcatacggcctttgttcagcgcagttcttcaatctgcgtgttacacaaggaacaacaaaacaaacgtaagacttttctttctttgcagaaaagaacagcaaaatcctgcggttactatgatatttaccttagaaacaggagggaggagtgtttacaccacatctggttagtagaggcctgactttagatggatcaatcccaaacctggagagataaggcttgtacgggcaaaggcattgtagattagcggctctgaccaatgcgcaacagtcaggtcccggaggtggcgggttgtttcaattccagtgaaagctggatgacatttgaccaagtcatttgtctcgatgttgcaaatgggaatgcttctagcttctttcaccattattgcagccgttaaaaccatcgcaagagctgcaaattgcatcaggatattg

SEQ ID NO: 41244 - DNA, 724 bp, Arabidopsis thaliana columbia
tgactacactgaccctgaagaagtatggtcctaaatcaacgatacaaaattttttttgttacagtttattcatacctgatcatcttcatttggttttaacagctcgagttgttagtcacgactctgattgaccttgatgcaatggatggtaaaagtagtgcatctctcttggctgaatgctcaagctctccagatgtcaatacaaggtaacaccagcactctattacgctccttaactactttcttcgatgagttcttcgcttaacattctcttagctgaatatttcattgtgtggtccttctctgatttgagatccctctgtttatttcttgtcttgttgtagaaaagcgttggctaatgctttagcagcggcaccatcaatgtggacactaggaaatgcaggaatgggagcattacaggtaaaagttaaaaatgcaaatcttgatgaccattcttgcaaagtgatggttttggataaaatattaaagtactctttttgcagagactcgctgaagacagtaacccggcgattgcagcagctgcttcgagagcgatcaatgcgctgaagaagcaatgggaagtagaggaaggagactcactgaggtttatgatgaacttcgagaggccgaatgatgatgatgatgtagacagtgaccttgatgagatctgaaaatgattttttcatgtaaacgaagatgaagtttgtagataatttgcaggact

SEQ ID NO: 41245 - DNA, 512 bp, Arabidopsis thaliana columbia
catataagaaagagtatttgagtgatgaggaagaagataacgagaatcttgtagcgatttcttatgcagaaaacgtcgatcatggtccgagcaaagaaaccagtctagttgtaacaatctcacagctgcatgctcgtaaggatcttttagaaatgatagctaactataaaaatgtttcgacaactagatcatcaaatggtgaaacgcatagaaataattactatagcgttatataaaagaattctgagcataaattagtagccaaagtaatgtatcaatgacataaaattctctatttcagtaatcttattaactttgaagttgaacttctttttatgtgaagtcgcagaagaagactgagcggcaaagtcgtgtttgtgaaattggcgggtttcgaacctcggagctcagaaccctaaccagcaacagtggagaaaggtttttgagtttgttgttgatgttgatcgcagacatgagatgcttcagatgcttctacactcgagcccactctc

SEQ ID NO: 41246 - DNA, 595 bp, Arabidopsis thaliana columbia
aaatcaagccaatatactaaaggtaatgttttggtaacagttgataacccttttatttcgcttccaatgttacagaaataaactcaaatacattcatgttttcagcattacaagataactagccaagagctcggaatttcctctctgggagatgccattgtttgtcgaatagctgcacgcgatgctttgtaggagtagacatcttttctttatgtcttttgtcaccaattatagttttctcctttataaacaacgttgacacttacgtttataattcagaccaatgttgggtttcttaacctctttatttactctctcctcagataggtttaactcagattttatatgagataaacatagaattgaccacaaacaaaagaatgagactactaattacatgctttcttgttcttgttcactttaaacaagccacagtgtcaatctcttcttgcacttaactccaaaaaacgccaacaagaaagagctcatttatcactggaacatatcagcaattgtatttcctgaatctgaagaatctccattcccaaaatccatcatcatcatcatattcatccactcctccatattgcaatcc

SEQ ID NO: 41247 - DNA, 486 bp, Arabidopsis thaliana columbia
agcttattttcgcaaagccatcaaaccaaacgtttattttgaggattccttcttgacctacttaactaaagtcattttatttgttatttggcgtcaaccaatttatttaattgtaatgacaaaggcgaggttttttggggtcaaattgtacgacttgcagcatgataatatatattaaaatgttatgtttgtaatttcttagaggagaatgaatttttaggaacaaaaagcagataaacgatcacatcttagggaccatagaaactttataaaaattcgtagtaattaaatgaatgaattagaatattgaattagaaaatatggcacagaggaaaaaaaaaataggtttatatctgagaaattctcctttctccccccatttttcctttctgccaagatgaagattgtagatcctctgctcgttcttccccagatccgcctgatttggtggttgttgacctttagctgagccgctctcagtcctgt

SEQ ID NO: 41248 - DNA, 1031 bp, Arabidopsis thaliana columbia
cttatgcctgagcatagtcatcatggcttacagttgaacccttatggtcttatgacctcagcattttctggtgttgttgtgaacccattaactgggctctttggttcaggtgcaactcctcaatctctttactatgctcagcaaactggatatgtgttgccgcctcaataccacccgccttattattctcagtagctagctgcatctcgacaataagatcttaatctcctcaatgtaaaatgttatctttgtagaatatttgccttgatggaaagtaaaaaaatcattctaactctatgtctgaggaatctcattctttgtttttttggtttatatagaatagtagtgaatttttctacaatattggatcatgtttcctacattatagattcttcgaagaattcgcctacccgcccgttggcgtgtcttcaaacctcatcaccttctatttctagaggtaccagtagcatatgcgcgaggaacgaggctctcgacgggcaccttaatagcatcctttctcataccaatatctgcaaatagctgaatagctttgctgccgaaaggactaagttgcgcaaccacgcagctgcactcactgagctggcttgaccgccccttcccaacacatagtcttttccgaccagcaagcttgttttacaatatattgcaaaatcttcacaattgttttccaaagcatggtaatcaccaaacccattccgcaataagaggtatttggcgcgggaaatgacttcatcgcagggatccgaaggtgctatagtgcatgtgccgcgtcgaggtttggcgataaatgcagctggagagacactgtactcgaaaagatagatgttcctccggcgagaaagcagtcaaggcaagaagagattacccttcgagattcaattgctcttcacaattagaacaaggattgtccctttatgattagggatgacactaacgacgatcttgccaagaaggcccagtccagtttctagacactcacaagtgaatgaatgcttctcatcgctatatat

SEQ ID NO: 41249 - DNA, 922 bp, Arabidopsis thaliana columbia
taatattagcaacattagccgataaagaatactactcttaagggaccaaagcttatcaatttctacacaaataaagtaatgatgttaaataataatgtcttaagaagattaatgttctctcacctttttgcatttggtatgcccattgaaccacacgcattttcagcaacaggtgaacggttgatccctttcaccgtatcatccaagttctgaggcggtgtctgagaaccataatccgaaaaggcagaagcaatagggttgttagagaagctagagtcgttctttgctcttggcgagttgggaccatatacacaagcagactccaagtccccacaagcttcagaactcaaactttcttcatcctcactttgatcaaaaccagaaaaagtagcagaaatgtctcccaaaagcacaactgagtcgctagctgagcggcgcagaggacctcctctagtgagcaacccatcagttttgtcacagagcaactcatcaagccaagcaggttgatcttcgagcctggaatcttgagtagaagacttgtattgaccaatgtatgattcaatgggtgaggaagaagagtagaatgtatctgcaactggactcaaagaaagtttctttggaatcgggcaacgaggtggaagcggagcaggccttgacatgattcgaatttacctaataaatcaacaatccaaaaaagctttcttagctaaaagtaaacttcacttatcatcaaccttaagaagctattggcttctacgcaatgaaagcttccagatattcaattctacagctcttaaagattgatttttattctcagctagcaaacacaaacctcaatcccagaaagaaagaaaaaagtatttttttagtaaaacaaatttgtgaaattccgacaaccattcttgtactaaccccacaagac

SEQ ID NO: 41250 - DNA, 497 bp, Arabidopsis thaliana columbia
ttttagacccaagtggttttagagaaaccccgttttaaatcattactatttcattaaatttacttttacatttctttcagaatcgaagttgccaagaatatgaaatcgaaatagattacgatgaacattaattacaattctactattatcgacttagctggatcaaattttcagcatatcatatacattgtaatataaattattaaatttacaacatggcaaggaatgttacaaagtcgctcgcacgcctttgcaaacgtttctaagcttaattatctaaacaaataatataacctttgactttcgcatgtattcggcatgtatatgaggtgtattaatcttttaggctctaaattatatttcgaaggttggctttatatatatatatataccttatggttgatcttaaatgactcacaaccctttccacaagaagttataaaccaatacatagaagaaaacttccaaccccaaaaaatgatgaagggtgccaagtt

SEQ ID NO: 41251 - DNA, 433 bp, Arabidopsis thaliana columbia
tcactattcatggatagataatttgacgactaaagtaatcagttatcgaacctctggagtctggatagatgactacataaggagtaatggagcaattgttgcaatgtccacatattgaggtatacttaattggttatttgtcttaatgaaaaacaaattcagaattaatagtttatactagtaaaattaaaatattgcctcaactaataagttgttatgtgcaattatatgtggttgttgtacatgtgaccttaactaatattaagtgaaacatatacatttaaagataacgcctaaaatttaaatccttgtttttttcttaagatccttcaaaacattctcaatcatatgaaagtcttgtcaatcagtaaaagtccaaaatatatattttagacccaagtggttttagagaaacccgttttaaatcattact

SEQ ID NO: 41252 - DNA, 572 bp, Arabidopsis thaliana columbia
acgttaccatttgaccacctcttctctcttctcttatctttttttttatatatttatatatcattataagccatcttcttcttcaatctcgtaattcactttttctttgtggtttgattgattctttgaagcagcaaccaaagatgatgaacagctgtggaatccaacaaaacgcttttgaagagatgaggagaaacgccgccgtttctgatcggagagacgccgtgatttgtcctaaacctcgtcgtgttggtgctcttaatcaccactcttctcgatctctccgttggcaactcaagtaagatactttttgtaataaagttcaaaacttttttgaggcaaatcacttgaagcaatcagatttattggtttttgattttgtagtcatcagatggaattatgtgaatcgaattcaggaagtgagattttggatttcatcctcacaaaggtatatatatgattcaataacaacccttttgcttgttgatgattgtttgattgaattgatatctaaagtttagatttttatttgttatgtgatgatttttacagggtggtggtggtggtggtga

SEQ ID NO: 41253 - DNA, 551 bp, Arabidopsis thaliana columbia
tatcattatgatggcagtggctgctccaaatggcctgctgctgccatcatgccatctgcagcagggaggcatggccagggctgcacactccatagagctcaggagcagcggggagccctgccccaccccaggaacagctgcagtcacctaaatggtacttcagacccaggcttcccactccacagagctggcaggagctcagcttccccccagccaaccccaaaagcagctggagccactcaaactgtggcatccctacactttgaggggccaggaagccctctgcccttgtaggctcagaagtgcctgctcctgctatctagcttctcactgctgtcagcacccatgcaaccttggaacaaagttggggccaagccttgatgccatcaatggcagcaggaggcagacaggttcctgagcagaagggggtgggtgcctggtgaggccaactttcaggccaggtatgccggaacgtgggggctgggcttccagtccactcccacagaccagagtgggaacttgtggtgccttttccaggcctgtccatggct

SEQ ID NO: 41254 - DNA, 627 bp, Arabidopsis thaliana columbia
aaatcaactttagatttttttatacaaaatcaacttagattttttaataactctaatcccgtatttttttttttggcagttattcaattttgtacgttacgtatacgtatacgtatgagatctaaagatatatattagttatttcgagatggataaaatgtgaaaggcctgcaattgtttcattttatcgtcagccatggatactctctcagcatccgtttcatccttgaacctcccttctcttcctccaccaccgcagccaccgttgagatccatctccagccgctttaaatccaccgtaaacgccaccacttctgcttcatctaccaatctttcaaaaccaacatcgtcttcaccttcttcagcatcatactcacagaacagaaaccctaatttcctcaaagcaatctcgtttcatcttccgcaaacgaaaccctcgagagttgttagcctcctcctcctccggtgcatgataaagcggcctcagggtttgctgcggcgctcgttagcgtttgtcaatcgaagaattgtcttggtcggactctagaagatgtcagaagattgatggagtttcttgtgggagaagaaaagaagaggacaaggtcttggcaatgatgttgtgagaga

SEQ ID NO: 41255 - DNA, 512 bp, Arabidopsis thaliana columbia
ccgtcccatggcagcaaagtactgaaccaaataaacaggccaagttagcgcatcgagcaagctccaatcaatgcacctgcagatggcaatgcaacaaaacccccgaattgttatccactaaaatatgggataatgggagacctaaaacaagtttcacctaaactatgaataagaggcttatattgcagtccctgtacagccataggcctttttctcccagctgttataaaaggtttgttgcatgtatgcatacataagataacaatgtatatttttactagcttgaaaaataatgtcagcagttctgcttccttgaaattcagatatccaacaaattaattttactgtttcacagaaataactcggaatatatgccagttaactagaaacatctccaagaagaaacaaagaaatatctgttgaaaactgtaaatgacaagagttgtatgtgcttacctcaagcattttgaagccacttcagacccttctgaggagagcactcaagatgacct

SEQ ID NO: 41256 - DNA, 689 bp, Arabidopsis thaliana columbia
  unsure (1)..(689): unsure at all n locations
cctcttctctacctaaacattgtgagagtcaagctaacgtttatcgttagcaatagcaagtacaaaacttatagatccaatgcaatatctgtttttctaataaataattgatcaatacaaaagttccagctataaaagtttacaaaaatgtaaatgtcaggacaaatgacgacgaatatacaatacaagtcgtagaacctaaatctaaccctagagttcgaattctacgctatattaattaactaatctgacacggacaaaaaataaaaatatgtttttcttattacgttaccattacacaatcaaataaacccgaacccactagattgttgacccgagtacccaaatccgttaaccgggtcaacactaaaaccctgattagccgagacgtccgagttattattaaaccgaggaatcccctcagtttgttgctgcgttccaccgtcaccgtaacgaatactcggaacgttatgactcagtccgagttccgggaccgagttctgtccaatcaaattcgcccaatcaaaacttggctccctggctaaaccctgaaacccggttttatgattggttaaaccggtctatgactatgaggcagcgcgtttgatgaaccggcggcaaacccaaacttctgttgtcaactcatgcaacgactcgagaacgtcgcgtattgatgagcngaagaagat

SEQ ID NO: 41257 - DNA, 470 bp, Arabidopsis thaliana columbia
aaaacaaatccaaacggttataagaaaatatgcaaaaggtggacgtaagcgatatgaagttaaaaccattttgtccttcattttatatatacgtgtcgttacaattttttttttttttttatgtcgttacaagttacattaaacatactaaagaaaatctactaacattttgttatgttatctccacaataaaatcttattagatttgagcaataaactaaacaaatattataagagaatgggtccaatctaaatatagtacggacgatttgcctcaacgattattttgaacagaataaaatttcaacacttatagataaaagctacattaagataattctacatagagtcaaaaaaaagaagaagaagataattctacataaagataaatgaatgaaaaaacctcataatatattatagttgcatatattcagaaatcagaataatatgaaacgaaatagtgaattttg

SEQ ID NO: 41258 - DNA, 641 bp, Arabidopsis thaliana columbia
cttgtccaaatcataaaattcggaatgagaagaaggtcatgtcctcccattaacgatgggtaatctactacccttttgagatcactatcccaaggtacatcagtcttcatttattcacatatcaaactgtgttctagagatcttagtctttaggtgtagcgatccccacagacatagatgagtgaagaatgttctttatatctttgttgtacaagtgttgaaatgagttaagttttgtttcagctcatcggactctgcctttgggatggatatgttcaagaggatactacacagtggccatccatcaatgctcggctaaattccattttccacttaacttagtacatatacactttgatgtttcttggtgcagcctaactccaatcaacactttcctagttacattttctgtgtaaatatattatatgttaccctctcctcgtcgatggataatgttaccttatctatgctttgttgtatataagtgatgtgttgtatataaatttcagacttgcatttcctaaacaacgtggactgttctgttttccaagatttctaaagttggaattgacattaaatagagccaaaaaaacaaacaaacaaacaaacgtttctctgatttgaagtttcgttcacaagta

SEQ ID NO: 41259 - DNA, 565 bp, Arabidopsis thaliana columbia
acgatccctgttagacgatacttggatacaatttgctgttatgcacttgatcgttttgaaaatattaaattgatcagaactattgaattgtctcgttccattttcattttccaatatacacaagtatgatacactcaaactttctaaattagtttgaagtatgatacagaactattgaagcctgtttttttttctctcggcggaaattattcaacattcatccaataaattagttaacgtgtgatgtggggtgcaaaaggacaaacaagaaagcgttaagaaaagcataatctttacaatgctctctccaaaagatgagcctataaaagtaaaaagaataataataaaattgctatcaaaaaaaaagaaaaaacgtttgaatgatttactaatagacaaaccacaaaatcgaatttttgtactttttaaacaacacctaaatacttttacttccatacctatggtaaccaaaaaggaaggatccagttttgttttcacgattgaatataactaagatagttaagtaaggctgtagacaaataaactattttatagggtgagggaa

SEQ ID NO: 41260 - DNA, 599 bp, Arabidopsis thaliana columbia
tgtaatgttttattgttatacatacatgggctataaatatatttttaatgtgccaatattatcacacatttataagaaaataatgtatagatctttgacctttgcaccactatgtacttaggacggagctgtctaaaatttgttgccataaatgaaaattgataatgtttcgccaccacaagtgacaagccacaaggacgttactattatatattgaactaacaaattagctgcatgttgtgaaattgtgggtagaaatattaacgaggaaacttactacgagaccgtagtctaatctagctttcttgccgttcagtagaagattaccggtcatgaccacgtttcttgcgagtctacctgtggataattcgggaaactttattttattaatcgattacaaattttatctatgatgtgaaaaaaaaaacagtagtataaaattgctttctgtttgtattgggatgtggaaatgaagacaaatatcagaaaaggcagctccagaaatcaattttgcatttatgaggaaattttctgcagtacttttctgccattccttgcatgcaatgaccccgaagtaacaatacatatagaattataga

SEQ ID NO: 41261 - DNA, 687 bp, Arabidopsis thaliana columbia
ttttttagtaaaagaaacacaaagttgttatttctatcgcattctttgattctttcactatgtcattcgtattctatgacggagaacgatcgaagaccataatggaagacaggaagagaataataaatttctatacccttatgtcgcgtttgaacatgacaatacgtgaaataatggaagagaatgaatatcgttttatcgacagagagacaaaatcccccatctttttaaattattatactgtacatttcactatttcataataataatatcttcactgaatatacagtagtgtacaattaattatttcatagtttatccagtttcaataatcagttttggtcatgtacataaatatagttttaaatcactatttatagggagacgaacaaaaaagatcaattatgtacaaagtagcccatattttaagccactttgtcgacaccgtagagataaatacataaattaatcatctctagggttagattattaacaataacaatgtagctattttataaaaggggcacaaagggcattaccaaagaacaagtccacaccttctagtcttcttcacttcgttttcataaagagtctttcgtaagaccaaagagccattttcgattccagggctaaaactagggtttcacagttcatgatgaagaagagacagatggtaatcaagcagag

SEQ ID NO: 41262 - DNA, 500 bp, Arabidopsis thaliana columbia
gttacaagacaaatgctgaaattggacaaaaagggacctaaattctcccgattctgtctcaaaactcctaacatgacacgatcttggccactgtccatttcatcagaccgtggcttctactaggaggacctcaacaagaaagaaaagtctccaaaatagactcatatataatggtacaagaaaatcgtagaaaacatctctttgacgatagcatcaaactttctcaaggcaaagccgcggttggttcagtgcaccatttccatactttaacttgaccagttccgtcacccgtgaaaaatatgcccccgggacctatctggatcgcccgtatctcttgctttgcaaagatttttcccctctccgtaaatctaatgaacaaacctaagctatcagaaccaataagagagaaagagatgaagaattcatacataaacgttgaaagtcttacgatggtaagtcgtagaggcgcaaggtgttgtcattgcaagcgcataacaaaa

SEQ ID NO: 41263 - DNA, 138 bp, Arabidopsis thaliana columbia
cgttccagcctttgcccgtgcggaggcctccaggcctgggagaaagccattgttgaggggaatggtgcaggctccggctgcacgccgccacccagggcccacgtgcaaggatgacggctacttttatttctcactccg

SEQ ID NO: 41264 - DNA, 1075 bp, Arabidopsis thaliana columbia
caaaatgtaggcaaattggtaatttcggagtctgaactgtttcacatgggcccacagttatttttcctttgtcttttcgacataattttttttttgagacttattcttaatattctcgctttcacttttgctaggtcagcagtttcttgaataatctgtccatttgttagattaaatattcctatctcatcataaatttagaaatgcatcacaatttaattgatagagatacaaattcataattcaaagaactttattcgagactaaacaccggcggtcaaactcgccggaattgaaggggtaggacagccaagaaacaccgatgtactttattttattttcttaaagccggaggaattagccaactggggcaaccgtcgaacctttcaaatgacgaaaataccctttaaaagaaatcatcagtaaagcatgaatctgaactgtggaaataccccagatttctcaaggatctaatcttttttcttggcaagcccttgattccttgaacaagatcaacaagaactttgaaggaagagagaggaaggagactcgatccaagtttttttttttcaaaggaaggaggtgagagtgactcaattattgagaaaataagtgcaattttgtttatatacatttgacgaagttgggtaaaatctgggccgtcggatccttgattaaaaacacatattatgaggtgtcaggttgtatactggaaaaaggaggtcataaccgtaaataataataaatgttgcgtctatccccaaacacaacaacagatgtggggaccatttccctgatatatcgtgggacccacgacagctcacttttctctgttgattaatctctaccacaatcacacgcgcagaaaaattgcgtgcgtgtcacactctctttagctgacctggttgtttctgtagtttcaaaagtatatatatagatcattctagaaggaaataaacagtaatgaaattttttcggattacagtgttttagaattcaacagagagagaatgttgtaaatctcccaagaacaagacatgactccccagaggaatcactctcttcccgacatcat

SEQ ID NO: 41265 - DNA, 539 bp, Arabidopsis thaliana columbia
acacattactctgtctagcgaatcaaagtattaagcatctgcagccttctcctccatttggtccttcaaaccaccggtcccatcctaagttcaaaggtccattggttctgccagcaccacaacatccatcagttattcagtccaaaccaacactagagtttcaaggtttaaaaagcactcacagtggcaacagaggatcgggtcctttctcgatgacagatagcagcctgcgaaccaagggaatatcaatttgatcaccaatcaacgtacaagtttcagtcaaatccagataatatacctacaggagctagcacacagttgcttgcaagcgttaaaaaaaaacataggttgagtatcccatacttactcctcacacacggttgatacaatatctgtgttctcgacctccttcaactctttctggatatagtacatgaaacagaaagagagagtaaagctatttttagtaagtgttagagctcactagtaggaacaataggcaaacacattatctgtgcaacagagaaacttgggagaag

SEQ ID NO: 41266 - DNA, 494 bp, Arabidopsis thaliana columbia
aagaatatatttgccattatcggaatggaggggcaatgaagcatgggttccaaatgcagtatcatattttttcctctaaaaaaatagtattatattttatcccactgtattatttttggttaaaggtttcatctcaagttgcactcttaatcaaatgtctctaggagcaatgatctcgtttaagagtgtttcatcccaagttgatacagttgttgaactttaaaaattgcatcaaatagttataatatacataggttgaattagaaaacttgaatacgtgatgatttgaaatagaaataggtttgcgctaacttagaacttaagatgattttataaagttagatatatatggcctgatctgataaatatgtaaatatagagctatatagagaaacctaagtctctggcttaaacattgaatttgtaattggcggcgttcctttcccatctacaagttggggcggctctcatgcgcgccgcaacatatgcacgca

SEQ ID NO: 41267 - DNA, 700 bp, Arabidopsis thaliana columbia
aatctttcttcgtcagtttcgattctttattattcttttagactcgaagaatcattggttcatttatgtaacaattctttgataagttatcaactaagagaaactccaatttcaagaaagtgatcatgatcttttaattttgtatctatgatccaaattttggtgcttataaagttataaaaattattttataagtaacactgggtactttgaaagttataatcagttaaaatagtgattgcggcaaacgagagaaaacaaactacttaataacttaattatacattaagtcaagtaaagagtttgcagaaactgaagtcttacagaaatctagagaaaaacagtaagacagcaagagcagaccataatgttttcaaaatgaaactctaaacccagcaatccggcatacaccaaatcactatacccagcattgactacattacgatctcatctccgctgtggaccaaaacgattgcagaacctagaaacactaccgacgacctacgtagccaacctacgtagtacccttttatacatactgtttcagaacaaactatgcctttcggataaccctataagacattaaacactgttaggaaacgtctttataacccagagccctaacagtcctaactttcatatgatcattctccttgaagtggcttaaggctacccctaaaccctcctcagttgcatcagt

SEQ ID NO: 41268 - DNA, 436 bp, Arabidopsis thaliana columbia
tacataatgacattttaagacaaatttttagtttttgtgattgtatttctactttattttgttttacatatacttaccgtttatttatatttcaagtggtaaactttgtagttcaattggctaaagctgtaatttaattttactagcagagtgagctacaaatacatttacaaacagaacaatgaattatatatcaaaaatattttaaaagcttattaaatttgataaagatattaactattatgtgtatagtattatactattattattacgagattcgtggtaaattggtgtaattaaaatgatataacaaaaacaaaatatactaatagcacaaaagaatagtaaagaaaaagccaaatacttttgtttggaacgtggcatgagaatccgtatgagacttttgggggcaaaatcggcgttacacatgtttggg

SEQ ID NO: 41269 - DNA, 578 bp, Arabidopsis thaliana columbia
  unsure (1)..(578): unsure at all n locations
taaaatcttcgcacactaccacttaacaagttgtaaaaaaaaatatgagactgaaaaatacatgagaaaaggatattattggtgattaagtttgatgtggctccatgtgtctaatttctgatttgcgctgaggttctctttaagaaaagaaactactggctgagagacatcagnattaatcagactgtattagctgattaaaagttaagcgcaacaaagtataagcataattaaaattggtctgctctcattattctttttgcatttccactagcagcggaataatcaaatactccacccccacttacatgtaaattataaattatgaatgcgatgtagcatcataacgattgaccaattaaaaggtctgacgtgatgagtgatgactatgccaatttatcaaaatatggacagacataaaacttttttatcaagatcgtgcgtctgacattagaccccaataaaattccaactataagctcacgtcatagatgcagaagattaaaatacaaataaaaatccatttttaaagtagaaccaaatggatgatagtgatacttgtttactaagctatatta

SEQ ID NO: 41270 - DNA, 182 bp, Arabidopsis thaliana columbia
ttctttgcatctggtacacttgggactatctattctttatattactagttttcaacaaaagaacaaaacaaatccatggcttgacaatgttcagattttcagaaacagaaatgagaaacatttggttcatgtcttaatttcaagacattctattattttagtcatcagccttgatcacactg

SEQ ID NO: 41271 - DNA, 1061 bp, Arabidopsis thaliana columbia
gggtggtggtccaagacttgtttagtttacaaacaactcttcagtatttttcttttttttcgaccagccactatggtcttgttatcgttgagtgtcaatataacctttctgaaacattacactagggtcactaagataaattggtctcttctccacttttattatttcatatacaaatttgtatgtaccaagatcttatccacaaaatttcgtttttcccaaaactattataatattattaaagaggtcaaaatggtttgtgcttgtttacaatatatttaagtttttttttgctaagtttcttacaacatttcaaaatgcatgacaatgattttacttaactcatttaagcaaataacttcgcgatacaaacaaaaatcaagttactattatataaaaatcaagatagaaactgtagaataatctatataattgttgagtacaaactttacaacttagccgaactattgattagagttcatcgggaaatgtcatatttgagtattgttggtggactcgcaaatgaacaatttagaccaccaaatagagctacattttcttatggtgaagactcaaaatcggtttgggtttagcgcatagatgggctttagtttcggcccagtgaaactctgtctcaatccttctcacctgtaaacttaaaaaaagaaacgaagaagctctttttctcccctctgaagaagaaaagcaaaatccacgagagaaacagatagaaagttgcaaaagtgcgttcgatttttgcttcttcttctgtttcggattcggatttggatttggaatctgctcctttagcagaaccagaggaaatggtgacgtacgtgagcgcgttgttctacggattcggagggatagtcgtcgccggagtggcgctgctcgtggctttccaggagaagcttgtgtacgtcccagtgcttccgggtttaagcaagtcttatccgatcactcccgctaggctcaatctcatctacgaagatatttggctcaatcatccgatggtgtaagtctccacgcttggttcatcaagatgtgccctgaatgtcgag

SEQ ID NO: 41272 - DNA, 871 bp, Arabidopsis thaliana columbia
tgatttgtgatttatataaaagataacagtagattccattaacatactagaatccataacggcaaaatttaagaatcctaacaataatatatttttatacgaaaataagaagatattaattacatattaaaaatcagttactttaaagtttaaacttatccctaattttttagttccaatcttttgaaggaaaacgtgggtataaatgctaacgaaaagcgagacatcctcttctatttatttattaaactaacgagcattattgtcaggtgtgtcgaactatgtctagtgcatattcaactgccaaactactctttctcctgcttttggtggaggcttcattgggtcgatacctacctattatacctgggttagattgtaaagaaagcctcctaagattttgcaattccgtgactatccaagcctgcttcggtactcccaattgtaattctcgattctacctgaataatattgtaatagagaattgattccagtaccatgattttacttttacatgttttgatttttttcgtttttttttggatttctcttagattggtttccagacggaaatgtgacgataaggtgggatatcatgaatgaaactcgaggtggttacacggctaacgttacaatcttcaactacttgaagtatcacgacattgaaggaccatgggtgttagattggatatgggaagaccaaatcctattgagcactgtaggtgttcaaagtagtaattttacgatatacccggacgacagaaatagggttatgattgtggagttccagcacaaactgatgataatgatgaccagctaatcataccaacttctagcaaggacggtgggattgtgagttcagagaagacat

SEQ ID NO: 41273 - DNA, 299 bp, Arabidopsis thaliana
cctatctccatatgacagtgatgaagatgatgatgatgatgatgatgatgatgatgatgactggttacttaatgttagtttcttttgttttctcttatgaaatttgtttgattttgagattaagggtttaaaagatttgtcttttctttaggatgatttcgctgaggttacagagtatgagaagaagaagcctaagtcacataagcaaaccattgctaagaaaagtttgtcttctcttgatttgaatctgcatctgcaatgaaatgatcttgctaagatgtggctttgtgtgtgaaagt

SEQ ID NO: 41274 - DNA, 1124 bp, Arabidopsis thaliana columbia
acgatccagatcccatgtgtttgcgcagccaagaattatacagtttagagcagcaacagacttatatggagtatcaccttgactcaaactctccaactggaagtatacctggtggattatgtgacagtgcaaggtcagataagctaagcgttatagctgcttcactctaaaatgcattaatatccagaccatgatactcgacttcgataaacaggttttctggttttgttctattaaatttcacaactatcttagccaaagaccctaccttaattcttgttacgaacaaagctgagaatatatagaatatttacccttaggaagagtcgaggtatacctcatccaatgtctcaaaacctttcttagagcacgccacaaccagcgggtataatgatgtaaaaggtgaaagcatttcctccacaacttctttttcagagtctgcgtatgcggattcaagttcatgaagtgaagtgaaagctttttgcagattccccaacgatgcataggcattaatctttgcaatgtaagatgcagggttggctgccttcctcccacgcagactctgtttcagaatcgtccatgatccttccactaaagatgaactacaagtcctagcagcacttgcaaggcctgctactaccaacccttcatcaacagaaaaaataaccgacggcctagccatttcgcctctagtgatccacttgaacataaattcaaacgcataaaaggccaacttgctattatcctcttgaattgcaacttctgcaatatagttacacagtatccagctagggcaaagagacttgttccgatcaacagcctgcaaaacaaaaatacacatataattgataaacgagactgcaaaagcttcaaatgtcaatagaagataacaaaaaactcatctgtaccttacacctctcgatgatggagaccagtgtatctgtcctacctttggctacacaactacgaacacattcagtaaagacactggtggataacatataaccagatttcagtgccgtgtccataactttcatggcttcgtcattcttcccaactccaaaatgcattccaataaccaaatcatatgattcatcatccggaagagagtccttccccaagag

SEQ ID NO: 41275 - DNA, 650 bp, Arabidopsis thaliana columbia
agttccgtatgatagtttctatatgtctctgacaatgtcactctttgtccataatatccaaactagtttgtaagatcagaaatttgagcccaagtttgaatctcagagtatcacactcaacgaatattaattgctaatgtctgatatctgtttccatgtgttgaatatctctactagtaaagcccaagtttattttggcaagtgttgtttacctttgacacatctagggtaaccattttcaatggttttatgaatagttgaattttactgagacactgatgtagttgtggttttgaaattgctatatggatttaatcatctctatgaagccgcggaacccttgtgctagttatgcttactaagtcttgattatgcaaatggttatctccaatcatcgtttgtttattgaatctgattctaagtgattatgaagaaggagcttggatagttaatggttgatgtttcagagttgtagcatgcctctgtgtccttttttgagacacgatttccctctaaactcagctgaaagttcagccattaaatctactggattgaaagcactaaagaggaccttaatattcttgcagtatggtatgtttcagaactgtcgattgtcaaagatatatatatatcatagctcttaacatgtg

SEQ ID NO: 41276 - DNA, 457 bp, Arabidopsis thaliana columbia
atcaataaaaaaacaaaaaagcaaaccaatagtatacagtttcaaaaccttatacaacaccaaactgcaaacgaatttgcgttcttcatcactacattgaaagctttctttcttagcaggtggcgtctgcggcgtatcattgtcaaccgataaaggaaggtaaattctatctcctacattcaaggactccttagctgccacctttcaagggtcagaaatcaacatcatcagataaaagagcagcctttcaacaaaacagttcttgttccaatcaatagataacaaaataacattacccttttaagctggcttctttgtagttcatcaccatcaacactcatagacatttctcttctaacctgaatcaattacaatgtaagaaactgacaacaattcgttgaatacaagattggaagagactaggaacctgtcttaagcggaagagtttctgaacgag

SEQ ID NO: 41277 - DNA, 877 bp, Arabidopsis thaliana columbia
tctataaatatttaattatgaaataaaatatggctaagaaaaaactacacttagcggttttggatttgggtttcctcataactaagcaataaaataagttaatgcaagaaaatatatatcagttgtaagctataaatttatggtgttgcgtgttcaagggtttctcaaggtatcatgattctcgaataatagggctagtctctcttaagtttttaatatttttgctctagttcacaactacgaaacacgaataaacgactaaccctagaatatacttaattagcaaatcgccctatattatgttacacaacttacgtatgcaacaacgtatagattaacacattaggatcgcgttcgctaagtattctaagtccttttttcaacttacgtatgcaacaacacgaatgattggtaatacgatgtctgaagtttggtttatctggttagagatccttccctcttgggttagcgtttggtgattaatcaaaacaaatgcaataaagtaaaagatgtcccaaaagaatctaagtatgaatgaaaatcggatctaacaacctaataagttttgaaccatgaaacccctttgaatcatcccataaaacccaacaaagaaaactattcgctaatgatgcaaataatatatatcataaagaataagatcataaacgaatcaataacaaaagggggttcaaaggaaacttctccaagatgtcacagaagataactcatctacccaaaagtagtataagaaaaagtataagagaagcgaagagaaagcgatgaagaacaagagagagatcttcaagggacgacttctataagctttgaggtggatagggagctcggaggctacatgctttgagctggctgtgaagga

SEQ ID NO: 41278 - DNA, 495 bp, Arabidopsis thaliana columbia
tttaaaaaaatctcaagtaaatcatataaagcaaaaacaattacgccaatgtcgtcgtgcacaatgatgagttcaccgcaaatatccagcagttacaacgttgttaatgtttaaggaaatttgatgttgagagctgcttggaccgtatctcaatacttatgtatgtgacaatagattggtaccaatggacattagctacactagattctattgggccacattggcccattccaaacatacgttttctcccacatgttaggtgctgttgcgattgattctaaaaatatatgccattggcacaagtatagactatgcatcctaaatatgtatgccattagtacaagtacaaactttataccgtacaaaaccaaatgctaaatgaatattaaaattcgacaagccagattgcaattaagagtgtacacacgtttaagatggaattgtaaagtccagtaaccaaaggtagaattgaaaataccaagagataaccaaata

SEQ ID NO: 41279 - DNA, 637 bp, Arabidopsis thaliana columbia
gttgcaacgtaattgccgccgcagcgaaggtggacagaacagaggacgttgccatttctcttagcgtcggaagttttgttgctcaagtttccggttgttattcagttttgtgttgtttggcttttggttcaaggcggatatatatgtatgcttagggtttcatctagggctggataactttagaatgtgctatattataactggtatcaaataacgttaaactttagtaacttttttcttatgttttctaaatttggccaatgtaaataattcgtggtttgtacaaatttagtcaaagacaacgtccagtatcgtcttactttgtttagaaaatggatgtcgtgactcgtgatcataactcataagtgttgagcaaaattagacaagtaaatgccctagggattactttaaaaaataactatttattagtttttagatttaaatagtacgaaaaacttattttagtcataaaatacaaattttgttagatttgatatttcctttaatcgcagtgctgctaattgcatgtaagagaagattataaattggattttggctgagctaaaagacagcatgacaatgtttaaggtagatgtcatggacgcaaatacagaatggaatatcacataatattaat

SEQ ID NO: 41280 - DNA, 479 bp, Arabidopsis thaliana columbia
agtgtgctctaaagggggtccccaaaatcaaacattgggcctctgttcaacgatcgacccgagaccggggctcggacgatacccaccacacctcacactgggaccttgaagagggtgggcatgcagggcatgaatgaagcgaatgatgggttcatgaacatgagtattgaatgaccgccttccttcgggagctggtagcgagctggtctccttgacttctgtttgtcggtattgttacataagccactgatcatcttgtttttaatgataattagaatattcttaatagcagtctatttgggccaagtcatatggagtctgtaaagtaagacctgataatttcgctgttgtagctactctcgaaatagctttccaatgcgccgtatagtcatcaccactgtccacgatatctccccatgctcttatagggcgtttgatcctgctgcctgcaccgaggggacaatcatgacgaaaataga

SEQ ID NO: 41281 - DNA, 555 bp, Arabidopsis thaliana columbia
taattatttgtattatatgattaaatcaaatattagatataacatatgataaacaaatatatttgatactagttttgtgattagagccaaaaaaaaagtcaaaacatatgtccacgtcaaacttagcacattatggtcccaatccaagcaactaaaaagtcttaatatacagcttggttgctttctattgtcgccaacaagacggtaactagacacagagttcccaaaggccatactaaaataaaatagaaggcaatgttttaatcaaaattaggattatgtatgtagttttttttttcttctaaatgcatgacattaaaattcttagtttaacaagagggattgaatggtttgctatcatatttataaagagaaagttggtaaaaaaaatcgattatattattagtgtggtgaacaattcagaatttagaataatttagcaactcctaatctctctagcaaattctgaatcactttcttcaatgtattcttcttcttcatcttctacccccaagtttgatgtcttcctgagttttagcgtagaagccgaaactt

SEQ ID NO: 41282 - DNA, 568 bp, Arabidopsis thaliana columbia
tgctttctttgaagcttaatccatgttgtaatttgtaaacctaattggacttgggtttcataatcctagatagatagtcacatcaaatcattcgatttaagagagatcagttcgaggaaccaaaacctgagagacaaacatgtctgatcaagtttccggtaaaagcactaaatttgggaaggtaaaaataacttcaaataatatggatcatcattcatgtgccgaagaatattcaggtaatatattcaacactctacgtgctagattttgtttttttttaattgcatgatcagtcttagcaattaaatagttaggtgtgaattccttttagtattgttgaattccatgcatctcctttatgttcgtcaacgtttcatacgcaagatgtttcacatctatggctattttcttagcttttcgtatttgccacagatgaggatgttgaagtgcggttcatgcctgatattttggttaccgtacacaacagcgaagtaggcgtcattcgagatgtctcggtgagtcttttgcgtttaccaactccagaattttattaatacaaaagagaaca

SEQ ID NO: 41283 - DNA, 802 bp, Arabidopsis thaliana columbia
ggatatatttagtccacaaatttacttatatagtaaaatgttgattaggtctcacaatcacaagaaggggatgaggaagagacgagagatcttagaagccgtgggtatgtctagtgccgttatcatgcatgacttatgttaccggagatggtggggatggaggaggcggtgttggtactggtttttggccaacgccacctggttttggtggcggaacttagccgtggacttaacaaaccgtaggactatgatgagtacatttatcggacttggaggtagagaataagaagaaatgttaaaggtggagtattagttctttaatctcttttggttttggtttattaattgaaattttcggttttgatagtggagcaaagttggtcgtcctgattagaaagaagtgttacaggatagaccagctttgatccatttaagattagtagtgagacttgacgatatgtttctacttacatgatgggctgtgggggctacataaaatatcaaatagctttggattattttgttaaatctcttttgtagataatgtgtcaatatctttaataaatgtattccttaaaaataaaaaacatatgaaaatatttcgccatgtagtaagaggactagaaaaagtgtatgatcaatcttatgagcaagcgctaaaagatgatgtctattaagaaaaaaagaatcttttagtcactgactttagttaacttgttgagttcacctatttgcctcacaatcactattagatgaatttgatggttgtcgagcttaaatggcctagaatgtgcagagtcac

SEQ ID NO: 41284 - DNA, 1277 bp, Arabidopsis thaliana columbia
ggagcggttgcagtagttccatatttcaggagacttaaccaagtaaatgacagaaacaacaaagccaaaagcgttgatctcataaagagactcaagacttcagagcgagaagccttgaggaaagtatccgcagagcttgtagaggagctcgagcggtctctctttttcaagaggtagtgacaatgcttttggcacatggagtgaaagtcttggacagtaacaaacaccatatcttgttttgttatgtcttaaaagctgagacaaagagcgcgcgcgaaaatgtacagttgaaagttaaagaaataggaaaaagagcagagaagagaagagaatagagagctaaaagagaatcaaaaggaagtaagaagaagagaaagaagaaagaaaaagctagcgagagaagaggcgagcctagcgagtgcagaaccttgcggctgtatgattcccaccggtgagagaaacgcggctactcttcaaattagaccaaagagacatcaactgcctcatcctctgaatctccattgtggttatcagctatgacctctttcttgctctcaatctgctatttcatcattaacgcgcacacacaaagatatatgtttttgtttttaatatatgtatggtaatcaaatggatcctcagatgttgcttcccattctttgggaagagataaactcaaggaagcaacatatgggaatgaaaaagagagagagagcagaaagaggttttgttgaattgattttttgtgggtttgatttcttgaggcttaagttttctttgtttctcgcaatacatgagagagagttagattgaaaatataaagggctttgctgttttgtttgagcctttgtttacgccatgcctctctctattttaagatattttcctcttaattcatgggggattttaacttcttttacaagtaacctcaccattatcctttattagggtatgtccacatcagtgctaactcatttcagttcttaattgttttgactctgtttttgtgttgatgaaacaagaaactcgttgcacatttagttaaatcatttcctgtaatcatgctgccacaataatatcatagctttgacatagatcatctctaaccgatgatatatctcttgtctacatcttccttaagcaaatttgattataaatcatgactttatcatcggaaactcatataaggcatgagttgatctttctaatacaacaaaataccaaagtattcttcatccattatgatatataagcaccacatccatcaattaggctcc

SEQ ID NO: 41285 - DNA, 755 bp, Arabidopsis thaliana columbia
cccatattttgcatacactttagttttggcaaagagttaataacatctgatgcaggctggacacagctacctgaaagctgctacaagaagcaactcttctatgcagatccccaaaagatctgccatggcagtcacaagattcaatgacccaacatacccaaatcaaaaaagggaaaaaatgaagaaatatttagaagaaaagagattggaatctttagtctagggttttcccaaagagatgagaatttggacaacaaaattgatattaaaaataaaagagcgagagagagagagagagagagagagagatgctactttaatatattgatatgtttagttggtctaaaatcgaaggacaagaagaagaagaggaaaaaaaagagagagagtatactattagattgttggtggaaaggatagcagaagttaagggttcagaataggaaagtaaactaaataaatacccttttgctttcaaccttttgttccttattataagattcctatttcacatatcaacatgtgtccttgttaagttcttagccacatatttgtttatttcaaatttttttgttacagaaaaattcctcaatcattattcttcaatcatgcgtgccatatcgaattcttgaaacatacataactatatatatcatataataaggaatataggaaaattgaataacatcactaatctttctctgtctcaaattttcgagctgttgttagttttggagaaaaatgatttatcctct

SEQ ID NO: 41286 - DNA, 884 bp, Arabidopsis thaliana
gtcacaggcttatcattggtgcttttcatcgagagtttgcaatggctcccatcgatccaaaagccgttgtcatcgagtttaatcctgacctgtcagaactcagcccccctcccagcgaaactcctccgccacccccaccactggaaaacagagttgatactatggagaaggaaatggcgtacatcagagaaggcattcaacaactcttacgctttcagatctatggccctcctcgtgaaggaagagagtctactccgttggcctttttcaaacccattccatccccgcagttttagagtacacctgcttcgagctcagagaggcagaacagagacgcaatcgtaccctgtccgacgcctgcgactcagctgcgacctcgagaggtccgtttccacatcccacctgttgagcaaggtctcgtaccacctcctgcaacattaccggcgccgagaggcttagacttacccgattatgaaggaggtaacccagatgactggctatttagggtggaacaatgcttcacgttacacaacattgcggaggaagctaagcttgaaaaggtaattccttgtctaactggtgcttttgtaacatggtagagatgttcaaaggatagggagaaaatttatacttggaaggattttcaggataagtttaagataaggttgaagcctagtagaggtagttcagctatggaccatttgcttaatattaggcagaccagtactatggacgggtatagaggtcgtttcgaagaactcatggtggagttgccacatgttactgccgatttattagaatctggattagtgaatggattgagaaagagtctaaaggatcaagtggtgaggtgtagagcagaaatatgaatgatattgtggaaa

SEQ ID NO: 41287 - DNA, 606 bp, Arabidopsis thaliana columbia
  unsure (1)..(606): unsure at all n locations
ctaaagttctgtgagcgctcgggctccttgctcgtgtgcggttgagatgtgtatctgggagaatgataggaacctggaggacattaaccggctggcccggtaagaacggacagtgcgtcgtcatcggttcggcctcgttgtagtattcgatatcgtcatcaagaagatactaacaatattattagatcattgcacttggtggagatttcttgagtctcacatagtaccaataggtagcccccatcttcaggccaccggagcgcgccgaaacggtgttatttaccaatccgtcgcaggttatgtttgtgaatgtatgacatccgcgccaatgaccagcaccgacgcgcttatccctttccattacatatggttttgaaaaattatcccaggagcccagcaatgtgaccgagcggacgtttgggctcgtgcagctatatcaagggttagcaacattgcaatccaacaagtctggacactcttacagcaagaacgtcatcagtgtggtagaagtcatggccggtgaatctctaattaagaattcgaatgcggaaacagtgatccngtatcaaagactcaagagagcgcaattgtattgcgaatgaaaga

SEQ ID NO: 41288 - DNA, 546 bp, Arabidopsis thaliana columbia
gctgttcatagatgcttcaagtaaacaaaaatgcagtaacatctccctacctgctttccagcttgaatcaagagacagcctaccggaactttaaccgcaaccttctctccattccttaaccaaatatatagaccagggaatctacttcttccatgaatccgttggaaaatttagatcatagtgatatcctgcaaatatcgtcccttcctcgttgtaacagttaagatcacttcccgttggagcaagaagatgaggaccctaagattcacaagaacgacactcttgaagttgaagaaatcacaatccatgcaatgactgttctgaacaacattacaacagctaagaacttacctgcttcatgagtgatgtaaatgcatccttaggcaaaccaaacccaattgctgccatttcagcaacaacctgaacagtattaacataatattcatcaccacatagttaaaaaaactaaacaagcatcagattccaactctgcagcaacgcctcactcaaccgcggatatcatcttgtaacccatgagtcattact

SEQ ID NO: 41289 - DNA, 521 bp, Arabidopsis thaliana columbia
gttatcaaagttttgaagattaaactagctaggattaataatgaatacatcaatgatgttgattatgggagaatcttgctagattctttagtcaaaagaattggagttcttagactctcataggaagggaagatcttccccaccattccttacacgcaacgtgagttatctagaatttagcttctacctgctcttgagtcttagcaagtcaaagattagtagcagcagtgcagcacactattaacaattacatcaaccatcagcgtcagaagacaatttaaccagactaatattctctaaaatgttagccgtttattttgaattttttgatggccggaaactaactctttactacttgatggtagtagggttggcttacttggtgggagctacaatggttccgcagccggccccaactcttgaactctaggagttttttttgttcttccattatattgttttctttcttttttttcgaaaaaaactcttccattataatgtcggttttttttttatttgga

SEQ ID NO: 41290 - DNA, 370 bp, Arabidopsis thaliana columbia
tagaaagaaaagtgattccaactctgcagcaacgcctcacctcaaccgcggatatcatcttgtaaccccatgagtccattacttcttcccaccccggaaaaccttccggtacaacaagctcagaattaagctcctaaaagcatgtcactcacaaatcaaactacaacttcaacatataaacatatataatccgaaatctcatctaatgtatccgaagatcaaaccttacaccgtgtgttagatggcctaggaccaactctccacatatatctccacttatgatcaggtcctttcggaatatgtggtttgtattcattaggcattgtattgaaattttcttgcatctcttcatcaaccaaactcctcggaa

SEQ ID NO: 41291 - DNA, 522 bp, Arabidopsis thaliana columbia
  unsure (1)..(522): unsure at all n locations
atatatattatcaatccaaagcctttgactaattataagagttaaagatagattaggagtgttttagtcaatacttatagtcagttttctcatccgatatactagaggatttatgttattgaacatgatatagtgatatttatattaattcattccaaataaatacaatctcatgttagtcaatcatattaatatcattctaaatcaactatattattaagaacttagcaattctttatcagaaagctactaaaactgattttagatgatttccaatagtcttttgttgaaaaatattgttgaaaagagattgtttcgtttactgttttggagtttgtatacatatcgctgccagagataagtgatatcaaatgtcgagtacaatgcttttcgtttatcatatcatatgatactgcccaatagtccctaaacaattctatcatattacaagggttactcccacaagttcccgatctccatgtgcnacttatatttattatttcagaaaaaatagagggaatt

SEQ ID NO: 41292 - DNA, 516 bp, Arabidopsis thaliana columbia
tatcgcatttgttccttttgataattatttgcatatacgtttttaattttgttttatttgcccttttgatccaagtttggttgcccagaaatatcaaagaaaaaaaaacaaagctttgttgtttctggcagtagaatcattcatggctttctttgcgtgttaaacattcactaacctaaaaactaaaacttcgttttcaggtaatcacaatcacaatctcaaatttattttttttttcttttttttttaatttgaatttttgagttttaagtctcttcatgtccgcttaaagatttttgattctcttcccctaatcaatttctcagtaatgaagattgatcctaggaactgagtcatactctgttttcaatttcattaacatttcaagccattgtatgcttctggatttggttttttgcaatttaggactttttctgcaatctagtgattatgaagcaaaacaatctgtaatctttataccaattggttgaagttgaattttttggatgtgaatga

SEQ ID NO: 41293 - DNA, 496 bp, Arabidopsis thaliana columbia
tcgactcgatccctaggatataaaataaactaattagctaaagacttatccattatgaattttgatttatatgcccttttgatccaagtttggttgcccagaaatatccaagaatgcatgcatagctttcagtgtaccaatgatactaaactatcattgatagtacataaacgtttgcaagttgtagccatatgcatatttatttactacttgcataaacttacacttatattcataactcacaagtcacaagttgtagccatatgcatatttatttactatttgcattaacttacacttgcacatacacttatactcacaagtcacaacttgcattaacaaatacttcaatatccagtatgagaatgtacgtaatcacgcaatacgatcagactgataaagtccataaacgctctaaacggccaatcccttgggatagagacgcatatctcaggaactagtggatcaagcattccatcgaacaccttctgggtgc

SEQ ID NO: 41294 - DNA, 1249 bp, Arabidopsis thaliana columbia
cactgcatagccaacataggattagaaccaaaccgagtcaatccaaaattgttcacggagcacggtaattacatcatggttaagctttaaccaaaaacatttcaggctgttactaaaccaaaattttaaaatcttgggttaaattttgggctgttaacgttaaacatttcacacattacaatcggtgacgtgtcaaaaaataaaattcaaaattctattctcgaaatgggcggcatttttgtctttccaaaattgacttttgtcaaatagtctgtcagaagacaatcatctacaagtccctctctgacctctctaatacctcaaaacacctaaatactccatttcgaaaaatgtctgtaaattttgagaagcggtgctttcccggcgaccctgcttaagccaccggcgactagaatctagaaatagcgttctctcacgttattcgtttcaaaggttagagattctcgaattctggattttagtcgagtgaattccgatgattccagatttgtttccgatttgtgtttctctgctacttgattcgatttactgttactatgtctcttgttacttaatttgtcttatctttacgttaatcttcttgattttatgagcgatcgattgattttgtcatttcattgctttcaataccttctaactcctgatttgtttgatttgggtttgacagatcactagcgtctagcgatcgcgaaactgggggatcaagaggattatgatttgtgacgagaacaggactctttaaaggaagcgacagtggatgagaccgtggtggtggtgggtggccgccgtgaggtggattacggaggcggtgacggaggtttgtggttttcaatcgaatttattatgatttaattccaccgtctcaaatttcttgtgttcgtttttctctgcgaacccaataagtttgattttgaattttcgcgatctcatccgatcatttttgatctaatttgttgtgtctttggttgatagaagcttttagaaatcattttggttgtggaaaatcatattgttttcttatgtcattgccattcgaaattttaaaggtttgttgttttgattcatatgcatagttatactgaaacttgctaatagttttccaaatggtgataaaactttagaagacacttgtacattatttgtgttctcttcataagattcgtctaggtcgtaattcagataagtgaaagcatctttagtgttgacatactcatttattttgatctct

SEQ ID NO: 41295 - DNA, 510 bp, Arabidopsis thaliana columbia
gatggaggagaagattgaggaagagaaagaagaagagatcaatgtagagaagccattactggagaagaaaaataagaagactaaaaagaatgatgctaatgaaacttgcaaaccaaagaagaagaagacaaaatctcccaagaaatggtctcgttttagcttattgggctgctaattttatctaaaatttcatggactatgcattatttcgtatttgtttaaatctaagtttttctttacccatcaaactttaggattgtcgagttttgcttaaactctttttttattgctgtgtatctagatactagataagctcggcttttgacatgatcgtagcaaacaactggattaattagtttcgatttagagttaacatgattttctaaaacagacctaaaataaaactgaaaagttagcagtagggactacaagtatatattaatcgacatcaactattttttttttttttgtgaaaccagaaactatgttttagcatatatatgctcttga

SEQ ID NO: 41296 - DNA, 866 bp, Arabidopsis thaliana columbia
tggctgctaaaagttacttactgccctggctttttttttaacttttatcatttttctgtttcttttattttctacacaatttgaatccctttgcacttcataatttgatcttgttgaattttattgtactgatgattcaggcaagtcagaggtgtcgattgttgtttacaaagttggcgaatgtatgcaagaactgattaagttgtggaaagaatatgatttgtctcatcctgataaaagcggtgatttcgctaataatggccccactcttgaagttaggattccagctgagcatgttactgctacaaatcgccaagtaagtcgaatatatatccaaatttttctcataatcattttcattgtttttcttctagatgacttggtgcatatagttttagttccagtcttttgatctgtttaattcacttcgcctattaatttgagaaacacagctcccttgtttgttacttgctgagacatttggctcgtgtgcaggtaagaggtggccaactatggggaacagatatatacacagacgattccgatcttgttgctggtatgtaccctaatgaatcttatgcaattattatctttgtttggcccgaacatgacattgattctggtctacctgtcatctagttctcatgcatacaggttactgtcgtcccacagcttctcctcctccaccgacaatgcaagagctgcgcactactattagagtcttgccgtcacaagattgtaagttagcttacctctgtcttgcttttgattcctttaactgactgttgcatgtgaacttcatactatgttgagctcttctctgctttatatcaaggaagaatctttatcaaacttccaacttaact

SEQ ID NO: 41297 - DNA, 1245 bp, Arabidopsis thaliana columbia
ctttgtttgattatttaaaacaagtccgtgataagaagaagatcccactaatggaaaataaaatgttataaaaactggcggcaatacacaattgtggcgacattatgaacttgctcaataagggaaaactttaaagaaaagagggagagattaaacaattacaacaaatctaccaaacttttgactataaatagatcactacacatgtggatttgtctcatcgaagtaaagtttattaaattgaaagagcaaaaaaagaagtcttactaaacgcaaagcattaaagaaatggcaaagaacctcaactccgttagcttcaccgttctcttgctggttcttttggtggcttccaccggtacgaatatattctctaatctctattatactttgtgtgtatatgtatatgcaaaaagttacacttacataataatcttttgctgatgaatttaatgaaatgtaaaaatgtagaaatcctgaagagcgatgctgcatgcttcacgttcttaggcgagtgcgggccggagccgtttacaggttcaaatgctgattgcttagcgtgttgtgtagctctctacaagagtccaccagtttgtgctggacgtgttgagggagtcccggctcactgccattgctacaaatcgtaaagaggttcaaaataaacctcatatatataattaccaagtgtaacttttcttttcattcggtgtgataaggacattacatgtgtgtgtgtgtgtgtctgtgtgtggtaaactggtgtctggtaagtttcttttgaatccaaataaaacatcaagggcaaagcttcactgcttccccttaataaatgtaagctcatgttgtcttcacttttgattcgttttgaataataaactcgttttttgttccccatttcattcgaaactatattcaaatttctgtcactccaaattatctaacaaatattgaccatttattggatagtaaaatctgatttaaacatgtatgttgcatgctcaaaagagtatagatgactatcataacaaagcatgagctaatctatatatttgaaataggttttgagttggaaatttattactctcgacttccaacctttttactttccaaccttttggaggaatacttacgtttctaaaaatgtttactctcgacttcccacctccttacaagccaaattttgtccataagcacacacagaaagaacacgtttaagacaatttttttttttgcatgactaggaaagtg

SEQ ID NO: 41298 - DNA, 586 bp, Arabidopsis thaliana columbia
gattccgaccgagagatcttacatatacaagctcgcaacctcttccggtaaatgcaagagcagcattcccttccggatagatggatctctggatggagatgacgtttgtcttaagggaggaacacggtttgcggacggagacgagagtgtaccggtgataagtgcggggtttatgtgcgcaaagggatggagaggaaaaacacggtttaacccgtcacgtatggatacattcttgcgggaatacaaacataagccgccgggaagtctactagaaagtcgaggaacggaaagcggacgtcatgtagacataatgggtaatgttggactcattgaagatgttttgaggatagctgccggagcttcaggccaggagattggtggcgatagaatttactcggatgtgatgaggatgtcggagagaattagcatcaagttgtgaaataattaggacattagccaattttgttgttgtcatgtataaaatactaatacaaagcatagttgaagattaatttggttacgttttttaagtagatacctttaaataaaaacatacatcaatatagtgatcttgaaacaaatcaaa

SEQ ID NO: 41299 - DNA, 952 bp, Arabidopsis thaliana columbia
tagaggggtacgagacgcagataccatcctttattaatatattttataaattatgtttaaatttcttataaattcttataaagtttaaatatctatgatatttgaaactttataagagtttgactctaaaccattgcccaatttttaagtaatgtgaaacattgtaaacatatttttttgcttcgtcgattgagtattatatgtcagtgtttttcactgttataaaatcagataacagtaaaagaagaattatatatacatgtataaataaagtaaatttctttaaggaaattagtaccaacactggcggttccccatctcctaccggcggtctctccattgtcgataggttctatgttttctcttttccatttctttattctgttattgttgttgttaggtttttatgcaataaatcgagaatgatagcgacgatgatgaaatcatgttcgtcattacgtcggaatggtgttttactgtttttcggtgaatctattgtgatttcttatgttgttacactatttctatgtcggttcatgttctcggaatgtatgtctagtcaccggcggtttcgaatcaaccgttgctttgctatgtccggcgattgcgccgtgaattttccggctttgttggtcgtgtgtttggtcatactaacatatgatattagttatgtgatagttcccgggcgtcagtatgatctactatgggcgttccgaaatttaacacaaatcctattggagttgatatgtcaccatcgaccggcacaaaaaccaccatggaagcaatatgttgaggaggagttgaggctaataggagaatcagaagatggtttataccatatcaacaaaaatgaggtttaaggaaaaccaagatcaatgacatctctttctatatgagagttttgatcaattcgaaggtttagcgatgtaacggatgaaccgctgcctatgat

SEQ ID NO: 41300 - DNA, 583 bp, Arabidopsis thaliana columbia
ttcgacaaactcgaaagttataggttattctttattccataatcaaaagctcatcaaccatataacgcaagtcttctttatacaagaagacagaaacgaaaacactcatcaacaccagttttgccgaagcatatgtgatctattggcgaggaagctttggtgaagggtgaaactccctgacccagatttgatcctcagaaatgtatgcggtctgactacctcctgccattaataaaataatattttaaattcgaaacagacagtgtggtggtctttcggagaaaagtccactctgaagcatagcagtgcatttctaccgggattgactagggtttatcaaaaagaaaaaaaaaaaaagataaaactcctaaaagttaaaacacttaacccaaacacttataacagtaaaagttaaaacacttaacccaaacacttattgaaacagtaagagaaagcccaattgaagatctagccagctgcatcatggtaacatgggaactagattaagcaatagatggatatcaatactattgtatatcgggctaaaatcagtgttggtttatatgcggtacctagatgcttt

SEQ ID NO: 41301 - DNA, 1158 bp, Arabidopsis thaliana columbia
aattttataaaaataaaaataaaaggattataatattataccccccgtaaatatttctaatttattaatccacggtatatgataaattaatatcattacaaatcaataaaactccaaggtcccaacattattaatttatagagttttcactatatcctaacttataattcataaaagaaattccggatttctatttctcggatcgattatagatatggtagacttcaaaccatcagataaatcatcaccactcgaacatgggaccgctatacgagcactctttagttctatcattctatgtgtaaaatcacctttcaaaacctaaactacatatcccactcagttttgtttcttgtcaattttcttttgttttcagataaataatacccaagtaaaataagaccccaccatctctgttaatcatggggccagttcctaaagcgaacgctcacgtttctatctccactatttccctttttttttgttgaaacttagaaccaaaaatatatccatgacaaactcaagcactactacgactagataacaaataaacaaaaaggaatttttttcccaattggccacttgcactttttagttttcacccaataaatacctctaagtaacctctctttcttcctcctcaaaaaaaaaactcatttgctctctccaaacaccaaaacccaaaataagtttcaaaggagaaaacactaaagatgctcaagatgttgtctatattaagaagaaaccttcaaaatcttcgaaaaagcccgcgggtggcggacgaaagcgcgttgccttcaacgacggttaatggagatcacgggggaggaaacgggagtaacggtggaataatgaagtttccgctatcgatcatgtcatgtttttcggttccacgagttagcagggcagatggtgtgtgggtgtcgggagattatggaagggtctcggaggttaaccatctcatggtttgtgatggcatgagatacgctctcttaatgtaattatatatctagctcgacttaatttagctagtagtacatatttcttttgtgttgatggcgtttatattagggcatttagtgagctatcaaaagcttttcacttcttttttcatggtttgtgtttattaaagaacatatcttagctaggaatatttac

SEQ ID NO: 41302 - DNA, 511 bp, Arabidopsis thaliana columbia
cggcctaactaagttggaaattgacttatattcctttagcaactaaaacaaactaggaaggctgtaaattatcttacagtcatttgcatctcgcaatgtaacactaaagtagacatcaagaagtcggggagcaatcttaagagtctgcttcatcctctctgaccgaggaccacttgcagcagcctgcagcgctgcattcaatgtaggagaagcgcggtgtctttcctgcagcacaaatttgacaaaatactttcagtttgtctaatatatcagacagtttaaaaaactaccaactttcacataggccctaaatttttactaatagacaattattatataaaactgtttctgttgagtttttggaataaagcaaagccagaggaaggatgcataccgctagaccatcattttcgtccttcagaagctccagaaacagaggatcagctacatctattgtattgttatcttcagattcagagtcatccctccatcccgatggttgaccagtata

SEQ ID NO: 41303 - DNA, 2085 bp, Arabidopsis thaliana columbia
tttttttgttctcgctctttttttttttcttttttccaaaagcgtcctttttaatatatatcatccatcattagagaatccaagttggagaggcaagtacaatatacaacaggtaaatttacaagccaaacaaacaaaagaaagtgcaacattgtctatcactaaatagaaaggagtaaaatagtagtttgttaatagaaaactcataacaaatcacaataagatcaaacatgaaacttaaaagtttacatctgatcttatcgcttctatatatgctcgcattatgagtgctttttgctcactatctcaacaccaaaaccttgtttagcaaaagaaagagttgaaacacctaactaaaacaaaaaaaaaaaaaatagaaagataaaagaaacagactccttctttattcactatgtcacagaaggaagaccttgacattgtttcaataaccatcatcttccaacaattcaagtcaaaggctgattcgatctattagatccaaaatcccggaattttgtttcagcatcagagactcgaattccagtggattctggagaggaagcagtcaaaaccttcgagaaagaccgatttcacaaacaaaaccaaagaatgggataagtcggaacaaagccagtgtaaaactggaatagtgacggcaaggttgtgacggcaaagctagaatattccgtatatcaacccggaacaaaccaaaatgtcaggataaaacagagaaatagacgactaagatctagagatccggtaacggtgctggaaaagtcacaggacaccgatcacggcttaaaacagacaacgataactataaaaaaggacagaaatccgcttgaagaagtcatggaacacaagtgaaacggatatttgattctctctctctaaaagatttgagagagagaatagagagaaatcgacccccccccataccccacacccacacccaaccccttttattatgtatgcttttttgttttagatgtgtttttctcaacttttctttatcaactagatattaagaataaataatccaaaaaagaacaaaattatctgataaacacgaacatgaagatgttaaagttgaggttgtaatatataaatcatcgaattaaatgtgtatatatatgtgtgtatatatattgccccttgcgcgcgacgtgatcgccctttggtccattggttgaccaagggttcattaatgcttttataccaagaggtctggggtttgaatcctagatattgcgatttcttaaccagatgtacaattatagctgttcgccaggattctatacagagaagatcattgaagatgtccatcaagagcatggaaaatgaaaagaaggtatcgtctgttgtggatctaataagggtcacaggaacaacccgtcccgtgggacccgcccacgtgcctactctctgccacattgcgtctagttggcgctgcaaaactttgtaacagttctcataatttgcaataaataataaatctaagatgacaagaaagaattgaaaaatatttgggttcatctttaggggtgaacccaccttttttagtttaaatcaatcattataccatgcaatacaataattaaaggaacaaaatatgtatacttttgattaaacaaggttaattatatgtaggatttagattttaaaattaaacaaaattatatgtcggtttgggtttataatagaatggttaggggaaaaaatagatgtcgatttgagtttattgaagaatgtttagggtttatattggggaaaaatgttgttttatacgtgaactttcaaaaagtggtcaatcaatacgtgaactctaaggtcggccaaattaaacatgataaaaacgttaactagccattttaaaaaaacaaaacattgaccttgccaaaatcccgaaacgttaactcgcattaaaagacccattaacagacgttaatgagttctgttaaagctgaaaacagcgtcgttatgtactaacgaaacaaatcaaaattcccaaatcgaaatccctaattctctcaacaatccatattgagttttcgatttggaaattttggttggagacaagaactc

SEQ ID NO: 41304 - DNA, 1389 bp, Arabidopsis thaliana columbia
tacaactcgcatctcacaacccaccatggctcttactctttctccgaaaattctcctcaacttctctttcactattccttagttttcttcgaaacaatttacgcgcttccccacttgccctcacttgagttacaagcccttgttactaaactcagccataatgcttcaactctttataatcttggttgcggtcccccacagccaaccattctcgatcttattccaatgcacaactgcaacaacaagggtaatacctaacccattccccatttaatcaggacatacttgtttacctatttgcttttgcgactcatttactcgataaaacgtttcagaaaacgtgtgtcccgtgagaatcacgaaccacgctctaataccaaaaattgtaacgcccccgaatcgctctatggccggacaagctaagggcaacccggaaacgccacattgatagctcacacggacaacccaacttaggttccaaatggatttaaacctttagccggattacccacatgaaccatccctcacgaatgcggtttaggcttttcaacccttgcacgactaatatcgcatgaaacacattctttatatgaaaataatcttttataacatatgtatttcgtacaccaagtatccaaaacgttttaacaatggcgccacgagcatatacgctcaaatcaaatcaagaatcaaaaccattaagttttgcaaaaagcaaaaaactctataccagctttcctacgtcctgagcatccctctaatggttcccactaaggttttctgcaaaacaaaaaggagttataagtaatctaagattacttagtgagctcggtctacgtgtaacagatattaattatccatcccataatcattacacgaaacacgcaacaaagaatggcaatgaaaggtagcttggcgaagcaaacttcaaaacatgcaaatgcattaagactccagttttattaagtttatagggcctgatatactgccttcaaacaccaccctaaacacacacactcccaggatctctcgctttacaacgacaaaggcatgtaactagagcatccctaccaaaacgctacaccgtcgtgtagacaactcgggtagagtagctagcctcgtctctccgagccctttcgcactaagtggcgatcaagtaacaacgttaacaagatctcaagatagcacgattcactacgaaggtcagacatatcacaatcttgatacgcttatggtctatgcctcctaccacgagcaccatgcatcaagacccaacatttcaagatattatgaaatatatggttatgcaaacacatagaatcgtcaatatccttactcaacacaacctcccaaccataagccttaagcataagaatctaaaagatctca

SEQ ID NO: 41305 - DNA, 1956 bp, Arabidopsis thaliana columbia
acccaaacttctgctccacgcaactcaaattcagctccaagcaactttgcttgggccccaagttagccgagccacccgtccatggcgcgttcaaaggtccggtgggcaaacttcgcccacggtacacccgatcttgcccaaacttgcccattcgtgcccaaacttgcccatctttgccctttgatttttcattgtgttttgggcacttaatgtcaattggccatgcattcgagcaactttctaaaattcggactcttgcccgtggccaatgtccttatgcgggtaactacagggtcgcaaggaacgggcaaccttgaatgctacgcctggaccatcccccggaagcttaaccccacaaaaatttttgttggatccgatgtcaactctaccctttattggacgattaacctgaacttaattctttatcataaagaggtgttagatcagggaaatgagcatatacattaaggacttcttatcccttttttgtggttcatacccttaaaccctatcctcttttcaagcctcatgcattctcatttccctttttcatttagcaaatatgtgcaaaaacgtcagagagaaaggaacaacacagtttcccgccacaaagacagaagaaggaagcaaaagaagagattttaacaaacgccctaagagtttattcttccttggacccaattcattaggtatgcccattagatacggtgtacaatagctcgtagccccttccgcggttttttttcctatcttgagattccacagtgtgtcacaagtaaagattaggatggaaaggaaacataacaaccaagagagtaacgcccccgaatcgcctattgccggacaagccatggggacccagttacgataactgtgaagatgaacgaccacgacttagtagaggttccagatgaatccagtttcttaaccaaattttaatcgaccttcttcccactaggaacaccacttaggcttgccacaccacttaggcttgccaaccctcgtgatattctagtgttgagcgacccggactaggtcttatatcattaaccactcgactgcttttaagaaaacactttatacatagtatatagcttatgctttgcaaagagttacccaaaaatatatctttgtatcggatccttgttaaaatttacataataacaagtaattttgtagaagcaacgcaaaatatcctatttccggcatttcctagtgttcgtcttcccgctatggtcatcccactatggttacctgtaagacaataagaatcatgagtaatctagcagtacttagtgagctcggtctatgcacaaatatatctctagggtttaatcaacttaataagtaaacttatccatcacagatcacaaagcacgtaataaacgtattatcatatacttataataataccagaatatgcagccaaactagacacatgaatgaaccttgggcccaacatactgccaaccttacaaaaaaggtggaccacaacatcaacacaaactcccgcatacgtgtatacgtgttctccacacgtatgctaccaaacacacgtacgtgcacacccacaccacacgtacgtacacaactgtgaacacccgagctatagccacaaaggcttataaccggaacatcactttaatgcatcgtcatgctttacccgacatacgctccgagtcttgtgccatcatgtaagagaccactcaggatcaagacttacagacacataaaggaaggcatcagcttactctaagcatgatggtatcgagtaaaccctaaataccacttagacacaataacctcatgtagtactatatataagtactttaccatgccccaaacaagtatagacaatcaagcaccaaatcaatatatatacataatatagcaaggatttattcacaagctcatagcatatctcatataagtataacaatctaacaacgcaagtaa

SEQ ID NO: 41306 - DNA, 478 bp, Arabidopsis thaliana columbia
ccagatcttctccagccgcggtcacggacaattaagaccaggagcgtatcgcgaccgaaggacaagccgaccgatgcaaacttgggtgagcaggcagagagtccaataagagcaacaaaccttggtagtcataaacggtaagagtctgtgctgataaacctgcattgacattcactatgtttatcaatcatttattcattggaactttaagatcataaacaaaatcaattcttatcaagcatatgagcaattcgagaagattctactctaatcgatcgattcaacaacctaatccgtaagaaaagcgaaattaaacgctcggtgagtgtcactccaggtcgacgaatcctcggacccggtcgatgaagtctcggacctggtcgacgatttcaaccctggtcgacaaatcctcggacccggtcgacgattcctcgtcctggtcgacgattcctcggacccgatagatttttctcgacga

SEQ ID NO: 41307 - DNA, 1443 bp, Arabidopsis thaliana columbia
tgtagttatttcgtattattgtagtcttttggatgatctttttgtgtattaacaaagtcaaaacaaatttataatttaacttacgttacagaatttgttaatggtgtgttttcttcttctatttttttggtaagaaatggtgttaaaaaaatgagaaaaagaatccaatggtaagattagtgttcatacatgtattggaaaatgacaaagtgtctttattggttggatgattgtgattgggccaattcgagaagacgactaaaatggacaagctcattgaattcacggcctccagtggaccacgttggcccataatcggatatacaccatacatttatcagttggtcaaatcaaaaccttttatcatagagtgcagagtatatttttctaagggttttgcttaatccgctatcttttagtgggccaacaactacaaattggattgaaggagaaccaaggaaaccacccaatttaagactcttgtcttttcgtaatctaaccaacataacgtgctcgtcagatttttgcatttgtgtgtttcctacttttccttttatgctcaacaggataattagttacatataaccacaattaaggaattaattaaagcatattaagtgctttaaaagtgtacgatgtgattgtgtatatagtaaattggataatatatagatcgtggagcctacaattattgcattgaaaaggtgatatatatgttgattacagtaattataactgctgaagctgaaattaatggattatggatgattggattcaatgtggataccaagaaaagaaaatgattgatgagaattattggtgtatgatcttatatcacagccacatgcgataggattatataaagtccactagctatatatctattttaatagtatatttttacaatgatgtgataaggacaacctcttacttatcaaaaaggtgaaagtagatcagttgtgttagttcatggctcaaatcttgacacttctttttacataatgacaaaattaatagcagaagaagactgtgttttatgagttgttaaaaattacatctatatgtatgttaaatatcatgttgaatagttaactaatccttaagtaatggttaagttagagtgtcttgtacacatagcattacttcacatccacgatacgttactaatgtattatagtggccatttaaaacaagtaatacatttttttatattttatttttcatttatataaaatataattatgattacataacaagaagatacatacttgccaactaaaaattaagatttgtcgagaaatttcctgaataattatgtcagagatattctccgggtaaaaaaaaaagcaattacatataacccgggatatttttttttaattattatttggataatttatttgacagatacctaaactacgacgtcgtatgtacttgagttgg

SEQ ID NO: 41308 - DNA, 558 bp, Arabidopsis thaliana columbia
ctgtctaagaacatctctctcaagtcaataaatattaatgtaacccagtgatgatgatccaatggtctgtctagtttccgaaacgccaccattttctcttcctctgtagctctgtttcagatgtatctgaacaccaaaaaatatggagaagaagaagagaattaagatgaagaggaaagaagcgaaacatagtctgtgaaacaaaaggtttctcgaagttacctctgtttaagtagatggcgttgtaatgaacctctgcccagaagctcaagaagattactgcagacaacaagagcaaaataaaagatcactgtaataaccagcaagagagaggtatagtagacaaacaaaatttacagtgaaagaaaactctttacctcctttggattcttgggaggtaggaagaatttcaatgtaacatgtatctttgaacgatgttaggactactattttcaccgatactgcaatattaaaaagtttcccaaactgattaactatgaactgaggaaagtaaaaggaagatcactgcatcttttttttacaagatttaagaatgaa

SEQ ID NO: 41309 - DNA, 867 bp, Arabidopsis thaliana columbia
aaatctaggcccatctgtatcatatgagctaaatggaaacatgaacacccacattgtacctctgcatcagcatatgttgactgtcttagtagactacaccgaggatacttgacaacagattttgaaccataccaccgaagctttagctacaacagaaatgatacaattgcataaagcagaatccaacatttaaaaatcatatcttgctacatacacaagaatatgctaacagtgttatcttacctcaactctgtcaaacatgtcatcaactatcaaaggcttgccattgtaatacgcatccttagcctataacataaaaatttcataaagcagaactcaatatccaccgagaccaatccaataagaaaaagaagcaaaatttagaatttaaaacataggattctaaatttctgaataatacacactccacaaccatagagacgaattttgaagaaccaaaaaacagatttttattaggcgtacttggcgataaagagcttctagagtttctttgcgagcagaatcaataggtccaacgaagatacaagaaggaccttcctcacgagaggtaggtgcggttaaaccaccaccgtggagggctctggttcttgtagagaatcgtacagagaaaggaactccagctcgattaatcaaccttgaaagctcaacaattgaagaagagccaatgagacgaggccttatcgaagtgcaagtacccgccatcagcaacaaatatcttcttcttcttcactcgccggaaacaaattgaaagagaagacaaagcgtgtggtggagacggttggtccgagaaattgtggcccacgatttggttcggcgcgtgacgaacatactacgttttatgattag

SEQ ID NO: 41310 - DNA, 116 bp, Arabidopsis thaliana columbia
ctacaaggtgtggttcaccgtgaccttaaacccgaggtactttataatccatggtgatgtttaatttctagattgttctctcattgtttttttttgtaaatcattttggcttttgt

SEQ ID NO: 41311 - DNA, 749 bp, Arabidopsis thaliana columbia
gctcatatctctctctaatatatctgactttgtagaacacagttttctattagattcctcctatcttgaaaccttttagtgttctgaaaggagtagtttttaatttttaatctttaattattaagcgaaccgcgtagattagtgtaataagagaaacagataaattctgaaacaattaaaaacagattgtatataattaagtgagccgcgtactgggaaaggtatataaaataaactctgtttcctatacatcatgacagatcatatgctaatgtcaacacctaatctatctttttgtctctctttatttagattcacgcatataagtctagcagagcacatgtcctatatcgaaattataatttatcattggcttcttaaaatataacctagtgtatgtaaattatatttggtaaacccaaattggcaaagtcatttgggaacgtgtatgtacgactagtcctataaattctgatctccctatccgttcaaaagtttatagcacagagaagagacttgagaaaaagaaaacaaacaagaaacacatacacacacacacaagttcactatactctatggaaatgaactccccacacgaaaaggcggtgcaagctatccgttatggccatagctgcgccatgcggttgaagaggcggctcaaccatccaatggctgatggtggaccgctttcaagttatgatcttgctaaatcgatcgttgaaagttttccaatgccgatttcaatctta

SEQ ID NO: 41312 - DNA, 744 bp, Arabidopsis thaliana columbia
aaataaattgtttcctcttcattggattgcttcacttatgttaagagtctagtagttgctttcaaggccgaatgatatgtggccacgaacatatcatcacacgtggaatgagaacgagtttcgacttttcaaatatgccataaagcctcaattatcttcttatctcgcttgaatatgcaacaaaaagctattaagatattcataaaatagaggcgtctcaaatctaccaacaaaaagctacaaaagatccagtccaatccactgaagaatcccaaaacagagtagaaacccaaacaacccgattcagcaaataattcaaaaacgaacgtccgtacgattttccaaaaacagaaagatgggttccacaagataatgcgtggggacgtcaaaatcctctaaacccgtggttcggccgcggaaacactgtccctaccttccccaccagccttcactggccccatacgtcactctcaagctttactttctattttccactaaagccaattttgttgttttcttcaccttaccactctttttttccctctttgttgtgtcttcttttctcctaaatgtcaataacgtgagagcgagaggtaacgagagagatatttttgtcagcgaatatatttcatgcatatcttattgtgaagattttttataccttttttttgtcaatacaatatagctattattgagattgagatattttgtggaattattgggattcaagataacttgctattt

SEQ ID NO: 41313 - DNA, 573 bp, Arabidopsis thaliana columbia
tagtaacgtccgccagtgtgctctaaagcatatcctttgataaggtaatggtcatgttatccattttattatgttctttgcatatttatcgtttagccaagactgtagcaatatggatggatgactactgccccttagttccatcgatcaactagatgcggtagtgctcttttcctttccctcctttgatgcagtagatagtaaccaacagtatacagtaagtttttattgctgggagagtgcaacggtggagaggtactggctttggtcttggtaggctatgccgaaacaacccatagaagttgaccgattgagacctggtgggatgtatattttcttctctatactgctggccattccttctggcttctttcccgagctgcctttgttcttgattgtgacaatcctccctgaaacgatgttgttttggctttattatggcctgcattagatctttcattcacatacctgcagacttcataggaggatttctccatgatagagacatactagtttgttcgtcacgcagagattctttcaaagtgaggctgtgcagttttctttattgaactg

SEQ ID NO: 41314 - DNA, 519 bp, Arabidopsis thaliana columbia
agtgaacaaatatgagtttttgactattttttttttcacaagtaattttttttctttgacaagtgtatattaaacattctaaacattacatagcccaaacaaagaccctttcagggttttaagtaattaatcagtgacaaaaaaaaatgaaaatattgtatttataagtttttgatagacaaacataagttttacaattttccaaggaaaaagtcatattttcctagtaaaaacctttcgggttttccaatttatttaccaaagataattggtctctgaaagaacaaagcaaaacctaagaaagctaaaaagacactcagcgaattgaatttgtaaaaaaataagagaaaaaatcttgatttcttctgcgatcttcggttctcgacgcatcatgtgttgaagattcttctatcttcctctgtacatactctctctctgcccaagtgttgttgaacaaaaaggggtcagatttagggtttttggaagatttttgtggctggactggccctgcagcgatgt

SEQ ID NO: 41315 - DNA, 697 bp, Arabidopsis thaliana columbia
tgcttacaacacacttgagttaccacttaccagtaatgtgaaaatgcgtggttttggcatgaaattattgtgcatattgcaaggcaatcgacacaaacattagtatatcaaaaaatatgatgtgtagaaaaaaagaaaagaaataaatttcttttaaaaaatggaaatagattttgtaagttcttaacaatcttttttttttggttcaccaagttcctaacaatttaacttcatgattccgatatttttggcgcgaaaatacctttttcgtgttattgcgtttattgcaagacaatcaacacaaatattaatatatcaaaaacatgatgatagaaaaaaaattggaaagaggttttaaagttcctaacaatctaacatcatgaatactcacgacgattttggcacgaaaatactattttctcgtgttattgcgtcttttacaaggaaatccgcataaacactaatacgtcgagaaatagaaataaatagattttatttatataaaaaatccctaaaatcatcaaattccagattattgtaattagattatctctcttataattgttacttaacagcttgatgtggctgtgagcctgtgacatttactttggagtctatgagagcattgaacccaaccaactaaaacaaaaaatatgagatggcaggcaagactaagactcatatagtacaaatgttt

SEQ ID NO: 41316 - DNA, 319 bp, Arabidopsis thaliana columbia
aaataataagattgacagccattactacagtctgtggccaatcagactaataggtaacgtactcatagccgaagtcacgacaaccagcttatccgcgactcacattaggagagtcgaggccgtgattaaccgtccacacgcatgggcccgagagctggacggcatgctggtgagtagtccagactgccaatcaatcgtcctgaccgagtctctgagttcagctagagcttcgaccaccatttgcacggaatcccgctttacggcataggagcctctgccgcgtcgcatgtctgccagtcgggacgagaggagagcatct

SEQ ID NO: 41317 - DNA, 612 bp, Arabidopsis thaliana columbia
  unsure (1)..(612): unsure at all n locations
tgaagttcaataaatttatatatattacactaaaagtattaagtattatacccaatgattaaattttaaatatgacttcagaaatttgtcaatataaatatatatgaaaattttattattaactttgactacgagttttccagacatacttgaacgggcttcatagcaaattcaatcggttatattaatttgtgataccactacaacatgttatgatacatcatctatgaatgtgaagctcttcttggagttcttttccctatagccatggacttgtccttattcataaagatcaatttgacttgacatatatgacaaaacaaatttaatggatattcatgtttcctgcaacaaaactaaagaaatgaagatagtaaggtcacacaatattttgaagacaattgggttaagatctttaaactggaatggagttaaaacacataaagtgggataagaagatgttatgaatgtttgtatgaaggataattattattgaatacagagtttgaaatatatacacatacaactattgctagggtatntaagaagattaattacatgatctaatttacataaatagaagatatgattgatcacatcatttgatatgat

SEQ ID NO: 41318 - DNA, 509 bp, Arabidopsis thaliana columbia
actaaaaatagcacaatgctttatgaaagtgcgtatggcgagagatgaaaagaggcacgtattatattccactaagcaaaacaactattacatgaattatgaatatagtaagagtgcatgagttttcttataagtgatcattattatcagctttagcaaatttcttagtgcttagagaagactaatgttacgtattcatgtcgaccaaggagtctggacgcgtcttcgagatttaagattcttgagtgggctttcatctttttcaggaacctgtgagtagaggacacgtatgtgtgtgcctgttgattggttttggctataaatagggtttcttgccaaggtaacgtaatcaactaatagctagtactgatcgagcttacattgtttgggaatctatctatttgtctgagtgagcttgtgtgtgtattttaaagaaagaaagagatcagaataagagtaaatatgggaaaattcgtgagaaggggttgggtagtggcgtgtgtggtggt

SEQ ID NO: 41319 - DNA, 480 bp, Arabidopsis thaliana columbia
ggtgactattgatagtctcccattatttgaaatgagaactttaagttatattgtttgcaaatgtttaccatttagtagtaattgacttcttagagaggattctaatacatccttattttggcagaaggaccactggaagaagcgaccagagaataatttcgatatgaatggtactatttgcaaattcattttttactttgtggtgcattgtagttcttcagcggctgggggatcctcagcctctgcctgtataaattaaacaatactcctagaggatatcatgttttaagcagcatttatacgtacatcttatcattaaccaccaattatactactaaagcaatggttatcgtttataattctgtgacatattttaattattttttgtaaggtctgtatggtcctcatagtgcatagaagcaatagaccacccagctattggtagagaataattttgatatggctatcctcacactggat

SEQ ID NO: 41320 - DNA, 727 bp, Arabidopsis thaliana columbia
gcccctggtcgtacgtgtacactatatgtagagccatttaccgtgttctcatcgatgatcgatcccagatatttattgtgtgggtaaagccattagttatagaactttccagaaaattattgctcgccataaaaaaaaactttaaaattttactagttaaaacggtttaaattagagcatgaaagaaataaaaggtctacatcgttatatgtagttttagtgagctctttggttgtgaaaaatgagagagccgaaatctttattacatgaaacgatggttgaatttttttttggaaaatggtctcgaggtaaagaaataatagctttaaaacttctgtcaaaaactaataaaacttagactggtaattaaaacccgttcaacatactattccataatatttagacactagtatttaaatcttcaactataataattttgaaaccaccttgaaaaattccatgtgcacgtattgtagttttaaattttaaaactacatttaacgaagttgtcaaacaattatcaaacacttcgtcgtctttttgcctttcttgttatgttgaggatttcaacgttttccttgcgtactctgctttaagatcttttatgatcttcagaaacctctataacctcgtttcttttgctttctgattcaaaccaaaaccagaatcccaaaggctgtgtttcttgatttcaaagtctgaatttcgtaaggccgttgctatttta

SEQ ID NO: 41321 - DNA, 347 bp, Arabidopsis thaliana columbia
agaaaatatatcacgtgcagaggatgaacatcagcaaagaatagagagtaacaaaggcacggtaagagcgaagacgcactcgtaggaaacgaaggccagtgtagagtcgtcaccttggcgaaagtcaggttcaggagagccacgttctagccggccaccatgttagtaaaactaagcccggcgtgccatcctagatacagggtaccacgcgagcatgagcaattacaccacaacctttacagaataactgagggcgagattcatcatgcagactataacggaacgcacattacgcggaaatgcggacggaaccaagatcgcgacgatcaacgacgaccgacgggagg

SEQ ID NO: 41322 - DNA, 822 bp, Arabidopsis thaliana columbia
tttaaaatgtaaaattaccatcccttatggaataacactgtttgaactttagtgacaatgtattctttgaatagtaggaacaaatattaacagtttagttggtgaatgattctattatttggtgacgtggtcagtcaaatttcctctaataacaaaagagtattgacttttatgaatggttgtctatctagtcaacagtaaaaaaccaccgttggatcattaataatcacaaatgatttgagatatatttaatgcattgtcttttttttcttcactctcccactacctaaaaagaaactgcctaagactaagctgaagaagaagaaagaaagaaacagagaagacataaaaatgagaggagacaaggaagaagagaaggcgaacgttgcacttgtgttagctgcaaagtcaagatcgttgttgtacacttcatcgcctgcgagtccacgtgtgtttgcttctccgattcacactcttgcctctgttccgttttgttgggaagaccaaccaggcaagcccaagcaccctcttcgtcctctttcttaccccaagtgtcttgatttgccacctcgtttgctccttcctggtgagttcacgcaaatgcccttgcccgagaggaaacatgggctcttgaggttcttgaggaggaaagggagaggggatgttgttgtgaggggtaattatgtctttctgtcggagaatcagagagcaggagataatatcaacgagaacaacatgaagatcatgaagtttaacagatcagggagttaccatggtggtggttctgttaaaggatctcacttttgggtaaagtatttgtgt

SEQ ID NO: 41323 - DNA, 584 bp, Arabidopsis thaliana columbia
caaaccaatatatgaaaggcaaaaggtgaacaatatttcagctttttggtaaaatttgtttcgattctgctaaatatcattttgctttggacctggttagaaaagtcagatcaaatttggaaagaaatacaaattagtgagtacatgtaataataaaatttaactattttcaatacatgattttaatatttgtatttatttaagaagattataattcaattgtttcagtgaggagttgtttggtttactcggtttattatatatgatgatatacaaaaccagttctttaatttggtatttgtttcagtatgtttgcttcaaatttccttcccttacgaataagcaactaataatgatcaatgaaagttgtaacagagacatcctccttaccaataaacaactataatcatcacaaaagcttcttaagaaccttccaccacttctcttctcttctgaacataaaacccaaacacattcacaaaattcataaacataaaaaaataaaagacattgaagacaaaagcatagcaaatgagcacagcaagattcattaagtgtgtgactgtcggagatggagcagtggg

SEQ ID NO: 41324 - DNA, 613 bp, Arabidopsis thaliana columbia
ctcagagataaacagaattatttggaatcaattgaaattggttaaaataagctgaaatttatccccaaattcgagatgaaatcatagctcccgatctaaagcttcacccgagaaacctagctttagggattgaatttgacctctggaacaaaagaaggaaaacgaaaatcgcttgagaaagagagaatcaaaataccttgcgatcgatcaaaaaccttgagctatcctctccttgaaaagtaaaacaactcgttgtttctttattatctcgctcctgatttcggacttttgaccaacttacaaaggaactagtaaaccatcaataccaagttttcatgtttggcccactaatggcccaaattattttaatttctccttctgtttatcatgcatgggcttttgattaagatagacctctactaaaaccttgcaagtctccttacaaagaaaaagaaaaaagttataaaaaaaaaactctaggctattgggggtaaatagttttggtttggatgctaaatgctaaccggctaaagtgattcacggcaacggcaactcagtctattaggatttcagtgcactagaacaatgtattttagacttttagtttagttgg

SEQ ID NO: 41325 - DNA, 412 bp, Arabidopsis thaliana columbia
gatatgtatattggctatatatatgcacataagaggaagctagagagtactatgtgatgtgtattaacgcttgaaactggagaggataaagacattagacattagtcagaattccacatactcttcatcatacatagcatacaaaacagaggagagctttttggttgatttatccaaaacaatgatgtttttatatagtacattcaaaggaagaacatgtaacacgaactgttttcatccatgacagctatatgtttacaaagacaatcataaatttgacacaatttcatttttttatatcctaaaatcaagacaaagacttagtcctacaatttggaagacagagtttgatgccgaaagtaaagaaattacggcagaagtgcagattcctggcggtgactgggagacgaat

SEQ ID NO: 41326 - DNA, 580 bp, Arabidopsis thaliana columbia
tatttgtcgaccagtttaatttcgttaaaatgaacagagcccattgcgtgtacagatgatgaaagaagcccaaactcctatcgtatatatatattttgaacatgtggatgtgtctgttaactatcatttttaacatgcgtctggttaactacaaagtttctcattccttatcgcacacatttgtcgttaataattcaaagcccaaagccgaattagaacttaagcccaagcccatattaatgtaagacgccgcatacggtatataaagaaggagatagacgtgaagacgatacgacttaccttgcgggaatcacgcgaccaattgattcttcttctcacaagcaggtactctctctctctatctctgttttctccgattgtcaattctcgcgagaaggaagcttccaattctaggtttccgttttggttcgcgctttaagcccaattatggtcggatttgtacgtttgggtgtcaccatggtagattcgtttcgttagaattgtggagtactcgtttaggaatcgaaaggttgggttttgtgcgtttcgctcgagttgtagatgacttgcctatacgggg

SEQ ID NO: 41327 - DNA, 554 bp, Arabidopsis thaliana columbia
ggttatgaattgattgttacacattacaactcgaaactcaaaagcaatcccgctttctatataattagtacttcttttttagttttatctaaaccgctcgctgctttacaagtaaaagcaaattcgcattgctcaaattaaacagagattataataaaagacaacaagaatcttaaatttggcattaatcatgacggaccatgtggggatcttcatgccttgcatataagcaaccacaaactaataataatcaaatccttcttttcttcttattgatcaataacaaagatacaaaaataccacacatcaaataaacaactagaaaaacaaaaccttatcatactctaggcccctctctctttctttcatatcaatatcgcttacatatatctcatgacacaacattgcaatcatattacatatacataataatacgtcatttaaagacattttcaaacttttaagaagtcaaattctctttaaaaaccattttattctttattatattctaagaagaaaaatactgagttctggacatccgtttttggtccggg

SEQ ID NO: 41328 - DNA, 489 bp, Arabidopsis thaliana columbia
agaggatcagcagcaagtaatctgatctgttttatcatatgcgtccaagtagagatgttgtggtgggtaaaaaggctcagcccgacctgaatccaaaataaacccgcccaccaaaaacccaactttagaaaactcatatgggtttttgatttagtgggtaaagcccgaaaaaaactgattgttctgagactactcatgggtacccaacttggtttttatcattttttttaagtgtatgtttaactgttaatacactattatatgtatgttgtatatatattttgcttataaatatattttaaattatatttatccacaccactacacatatatctgaaggcgagaaggttgaattgcgtttttgagcgggaaaatgttaaattgcgcttgtggcgggaaccatgtcacatccttttcttggccggaaatgtcgaatgtagttttaggcgggatactgttagattgcgtattttgcgagaaaatgtgaaa

SEQ ID NO: 41329 - DNA, 834 bp, Arabidopsis thaliana columbia
cctgccaaaaacgcaatttaacatttttccgccaaaaaacgcaatttaacattttcccatcaaaaacgaattcaacttttttcccatcaaatatatatgtaattcagaaaataaatacaatttaaaatatatttataagcaaaatatagatacaatatacatataatagtatattagcagttaaacataaactctaagaaaatgacagagaccaagttggatacccacaagtagtctcggaacaatcaggtttttttgggtttacccactaaataaaaaacccataggtttttggtaggggttttttttgggttcaagtcgggctgggcttttttacccaccacaactgcctataacctataagctatcacttttaagaaatactaagtagccgagtttgggctttaaaaaggaagtaaaagcccatataaaggtcatcggagcgtgagagccactctcgtacagagcgcgttagagaagatataaagcgacggagcagattctttttcttccctctctcctgagaagaagaagtaaagaagtaagatcaattctcggccgtagttagttatcctccgaatagatttccgattctctgtttcttctagattgaatttaaaaaccctacttttgaattttcacatgggagaacaatcaccttctcaaccatcgactcaatgccaaagtcatccacaatcacccaaacccgatactcataacctaatcccaccggaatccaccgatgaatgtctcgattcagctggagtttcaggctcaatcgtctcatctaccacaatcgacgctcgacggatcactgaactaggcaatgtatcg

SEQ ID NO: 41330 - DNA, 562 bp, Arabidopsis thaliana columbia
tcctcctccgttgctcttgtgtgccccgttaatctccatttagacttttgatcttagttttacaatagaagattaactaagaggagattacaagatctctaaaagaaagaaagaagataggagcttatttgtaatattgttggttaaggaattgtatttgttcctgaggaaaattagatgaatgaagggtggtttaaataaggtggtagtgtttgttggtaggtaagcgtatagagatagctagtttctttttttcttccatataaagattatagaaaaaatgaaaattagtgagaaagaaggagttggttgagaattaatgatgaccgttagatggagagtgagtgatggattttagtggtggagattataattcgtggatttggtttaagtcgcaaaaagagagttatttttaatttgattttaacacggtggtgaatttctttggttttcgtcaacgtcacggtggtaaaagtggtcgtggctggtggctgacgatagttgcatttcgcggttggtgagactcgagattttttgaagagtggttttttttttttttttg

SEQ ID NO: 41331 - DNA, 440 bp, Arabidopsis thaliana columbia
tactggcaggatcaaaaagtcttttctttctttgtttataaaaatatatgtattattgctccggtaaattcttgatctcatatatcttacaaggtcacccaggtcattcactttgatttactctcaacaacaacttgaactcaatattaccttttaatcttgcttaaaaccttaatgtcaaattctcatttgatttttcgactaatttgatacattgatgttatctaattactaacttaagcgtcaaatgtacacgatcataagtcagggccggtcctaagcaacatttatgttatctagttactatctatttttttccatttatcgtttgagcaaagctgacatgaaatgacaaatgagacggtgagatcgtatgatgcggtctgaccgctttggtcacctaccaatctgcagtgcacctatgtaacgttcccttttaa

SEQ ID NO: 41332 - DNA, 517 bp, Arabidopsis thaliana columbia
  unsure (1)..(517): unsure at all n locations
ttttctgcttgcagcacatcaacacatattttcaggcttcaatcaaactgcattcgtgtataacttacctcaagagaatcgactgacacaaatgaaaacctctctacattttgctctaaattactaagtgactaaaagtgaaagcatgtgaaggtaacgaacagtgaaataaactcgatttagcttcaaagtaataaaaatgaaattctttaatccaacattatactacaaacaagaatagcaatcaaaccaaacacaataccatatattctgagtcagacaaagcaggttcatattcaaagctcagagaaacaaactagttataaacctcacctgcttaccaataaatttagctctacgaagacattctcggtacaactgcgcataaaaaagagacaaatagatcagtgaaatagcatcaaggaaaggtanaacaaatcacaagtcaatgtgggaattgttactgaccctaaccacattgttagcgagttcaggaggcagagaagtntgcagagac

SEQ ID NO: 41333 - DNA, 480 bp, Arabidopsis thaliana columbia
ttcaaatccatgttcactgttccaacaagaccagtttcagagtaaaaaatatatacaagcacaattttgttttagcatcaacaaagttgaggcctgaaaataaagtactcgagcatttgaagattgacttttgacttgtgctacgtaggatccatatatatgtggaatataaaggtattcgacgatataccacgtttaaaccgggaatagaaccgaatccaaatttgaatatagaccagaccggatcaaacgaaaaaggaattccttgagcataaacttttttttcttttttcattttaaaagttcgaatatatgctcattgacattgtaacttgtaagtatgtaacacaatgagacattattttaaatttgaaaaactgtatgtagatctcattgtctttaccgtaatccacataaatgatgactcctttctacacacgcaagcccttctgatgatcactcttcaagatcctatagttg

SEQ ID NO: 41334 - DNA, 2000 bp, Arabidopsis thaliana columbia
cggatttgtaatcctggatcctgaggttaagccaatcatgttgggctttgggtagttgtatggtcttttggtggtcgtatcgattcttcaactcaagccaaagctcaagtggatcctcgaccgtaagtactgatttttcaagctctctgctatgtgatggcgtatgattgaaatcgcctgatactttgacctctccgttttctcattgccttccacaatgcactcggcgagtcctttagacttcagctcaatcttggtgtccaatgcccattgaaggtaattgtcaccagatgccaagagtgcagcgtacatgaggtttgtgagcttcgacatctacaatgaagaagttacgagtcaatatcatgtaatggacaaatcgtaaatgtcatgaagaccataaatcgatttttctatttactcaaggatttgactttctcttttcctctttcccttgggacaatttcctcttttctctaggataatttcccttttctctttaggagaatttcctttttctctttaagataatttcctttttctctttaggagaatttcctctttctctagggattatttttctttccctcttgggagagtttcctttttcggtcttagggtaaattttcctttttagcgattttctattttccttagggttttggttttaggttttatgcaacatgagggattttaacaattcatgcatgcaaccatgaaatcaatcaaactaaacaccctagacaacttcaaacaatcacgaaatagaattagggttttgatccgattatagtgttttcgatttagggtttatgtcttttagggtttcggattctaggttaatatgttttcgatttgcaagtttaggataagcaataacaaaacaaacaatcgagcaaacaagcaatcatattacaaacactactcaaccattcgtttttagggttttagccgtttgttagatccatgttcgattagggttctttagctttagggtttaatgaattacctttctcctttggggttgtacggactggaaccaggagctaaaaaccttggttatcgaacggtggtcgctggtcgacagtcggtggtcgacggaagtatcgtcggctgacagacgggccggtcgacaggcggtcagcaaacggtcgacaggcggtcagcaaacggtcgacaggcggtcagcaaacggtcgacggaacagcggacggcggacgagctagggttgagcggcggcttctagggttttgttaagagcaatgtcgtgctgataacgtgtgaagaactaacttgtttcttattgattcataatgaggttacatcacatatatatacatacttgaggaggttacatgtctaatgggctaggttacaaaagcccataactacttaagtatatgaccgacctaagtatagtctccatgggccggacctacgggccggactgactgtggcttctctccatggaccgggccgataggccgacgggccgatggaccgatggactggtgggccgactggtcgatgggccgtcacaccaatgggctgacggacctatcctccaaggacatgggccacggttatggagtccatccaacaagtggtttacaacaaattatatattctcataaatacttaagtaaaccaaccaataaagtaacaattaaaccgcaagtcaaagatactattttatgactaaataaatgattcaaccaacaaaccaagaatgactaacaatcctaaaacagccctaaccggttctaataaccaaaacacaaaaataatccaaacgaattcctagatcatactctcttccttgccatgattccacgatcacactttatctttacctgcaccaaaaataaagagatgcgtaagtattatcacaaatacttagggagacgatcctcccatctacgagctatacacacaagcaattaaaaggggaataatcacaaatacaacataaacaaaccagtcattgaacaattcacccaaaa

SEQ ID NO: 41335 - DNA, 507 bp, Arabidopsis thaliana columbia
taaaaatagtcacacgtcctaaatcttagcacattatgttgcctaaaactatttcagctgccgtcaaaaaaaggaagaaaaaaaatcagatataggatccaagaaatcatataaagattgtgacaaaaaaaactttttcaccaaaacaaaggaaacaagacaacgaatgtgtttcagggagacacatcaatgacctcccagatggcattgagtctttcgtcttcactttttagtcgatatcatttttctttttgtctgataatggtctctgatataatggactttaaacaatcttataactcaaaaccatatccactataaaagatttggtcttcccaatattttctcctaaatcatactacacacatttcttgttaggtactactttaatcataattttcgttagtcaaaacacacaattaaagaaaaaaagtaattgattggagaaatttactcaaagtagtaattaacagattttgccttgtcacagcaaagtatgcttatttg

SEQ ID NO: 41336 - DNA, 712 bp, Arabidopsis thaliana columbia
gtacggccgccagtccgccagtgtgctctaaaggcagcttgcgacctctgctaaatgattagaaacttgaaagaggtggttcagcgtcttagtaccactgatcagcacttcatgatacggtagcatgggacatcgcttgtatatgcagctcagctcttaaagatgtcataagtacccgaacagagacaaagaacaagctggaatcatgcagatttcccgcgttgacttttaggctcaaaactgggacgttgggaaataactgtgaaaaaaaaccacgataatcatcagttcacatgaggtgtgaacgagggatctaatactaaacttgctccgtcctggaaggccgcgagaagaaaagactggggtgggcgacggcgcgctcgacactttaatatatgaaaaataacacttcaaagatatcaaagaggccccttctgcaaaagcaaagagcgtatcgcaaacagagacaagaaagcagttaggtggtttatctctgtaccagcaccgatatgatacgatcttcgcagacggcaagacttcgcgacttttctttgtgaacttgctaccgaatctcttagacctcgacagtttagccacgaaagcgcggccatagcgtatggaagattctgagccacgggggtgatgacatgcagaatggcgctgccaggtagatacttgaagctctaaagtcggggggttagaggaatcatat

SEQ ID NO: 41337 - DNA, 565 bp, Arabidopsis thaliana columbia
ccctatctccctcttcgccatcacttctccctcctcctctgaacctccttctcctcctgttaaacatccccttcctcaattcggcggcggcggccacttcatcatccccaccatcgccgtcgctgcttccgcctggttcttcttccgtctacaccaataccctcctatcatcacctcccccgttgatctccacctcgatttggaagaagaaggcgctatcaaagagcttcctttggagagcaagcctggttacgttaaagctcttcacttctacaaaatcaagccaggtaccgtcttgaaactcttggacgttttcgactccgacagctacgactccttgaaagcccggattcgtttatccgccgagtggttagaaactgccaggagagaattggaggaggtggttgagagagaccctggtcgggtcatggagtattctcaggtggttgatgagctcatggagattctcagggacatggaggtttacattgataaatgccaaaaggacaacgtcaagggttactcagatcctgcaaccgattgcttgctcgtgtcaggagaatgg

SEQ ID NO: 41338 - DNA, 543 bp, Arabidopsis thaliana columbia
gatccctatttggaggaattatagaactacaaagaagaattcacaagtttctctttatctttcatctcccatagaagattataattgatttgatgatatttgagaccatgaaaacctcccaacaccctgcatttgaaggaagttcccaacccaagactcatataagagtgcctaaccactagtagccactcacggaaaataagaactctcaagttcacatggctattgaagaagaggacaacacctttattcatttctctataatcaagtttatgaaaggtgtcaagtctttctacatggaggaaaatgagactcttgctttctcataaaagtccctttgagcacacaaattcttcaattccaagatgtcatacttccatcttgccagggaatattaaagattatatctctttagtttaatgttgaatatagtgcggttatcttcggttatctataatgtgtatagttgattatctctcttagtatttaagttttctataatctcttccggaaccagccgttgataataccacatttaagacg

SEQ ID NO: 41339 - DNA, 415 bp, Arabidopsis thaliana columbia
cagacctctacttcccgctcttagaattgcccctaggtgtaaatacgacgccttgtccactcttctcacgatatctaccaatatctcattaggcagctcggcatgaccataacatgatttttcttagatctgtcttgtttattgccaataagaaagtcaaatatataggcgtttctctctcatgaatttacaacttactttttttcctacaagtatagatatatgtatcttacatagaaaaggtgtacaaaaaatattatggtgtacatactgtctaccttgaaagtgtacagacacgaatgtggtgtactcaacctattataaagtcatagtatcacatgaaaattcgaacacaatccatttcaattcaagtgttatgaaccatagaaaccaatcaacggttatgatgttgata

SEQ ID NO: 41340 - DNA, 680 bp, Arabidopsis thaliana columbia
cttttgagaagggatcttcaatttctctgcaagaggaacaaaatcccagctaatatgaccaatatcgccatggctgatgctctcaaatctcttgagattgtaagttttcttcatctgttcgctcgatttcattctgaatctgaacaattttggaaatcgctcacactcgcatcctggatctgtagttgtttatggatacatttatatgaatcggatagtaatcgtgcttgctcgtttagtgacgaagatctgtggaattgagcaagattgagaatcgtttttgctttgaaaattttcgatctcagatttgttgttctggtcgatcgctgcttgatttgttatataatctacggaaatttgtcaaatcaatcaagagcgagatatcgttttggtacttttggatatttctggatctcaatgttttcttgttaggtcatcactgccttattcgtcgattaactccacctctgttgatgattagtcttagcatggtggtttagaaattgaacttgtttagatcatttttctcaagttggagtcgtggtttttgctcttgagttatctgtgtttgatcttgagttatctgtgtttgatcttgagtcattgctcgtggtttcgttaaacgcaccgagactccataattggtggctcctgagattctgaattacttggttaacttg

SEQ ID NO: 41341 - DNA, 455 bp, Arabidopsis thaliana columbia
actttttttcttactcgtcaatctatagaatcaagttaccctttctagagaatcaactaactagtagtctagtaccttcctcaatacaatagtcgtacgaacgcccatttatctaggtaccctcaaattttgtgtcgtctcacttattagttatctattactagttgattactcaatacaaatttccctaaatagagaggatatgagagttgcgtatttaaacaaacctaccaaaatatgattttcgtcaaaccaaagcaaaaacctaccaaaagaaattatttcttaaatacagaaaaaaacaaaaaggaaacttccgggaagctgcgtacatagatggacccaacataaaccaaaacaataacacgtagtcgccacctatatataaaaaacctgacgcaacacaaacagatgtagtagaatcaaaacgtcttaaaacatgggaagtatcgtgg

SEQ ID NO: 41342 - DNA, 621 bp, Arabidopsis thaliana columbia
ccttgtcttctaacaccaatacgtctctcttgagcttcttaattatcgtttttttcctgctaataatctcttcaagctctgtttctcgctgttaaagagagaagaaacatatgtttgtgtaagtcatatggaaaaaagtttaatggcgtttgaaaaagtctaggaatccacaattacttttgaaccagctttgttggtcagctgaagaaatgaagttaagtcctttattgttgcatctttctcttgacactcctttctgagggaaagcatgtcttggtcgagtgaaagactatcaaactgcaataaatatttaaaccaagtgagtattcatttgcaacaagatccaccacaaagattgtttcagcaaatttcacatattcttaacatacatgggtttctgcagcagaagtgacactagaacaccaatctgacatgtaagacatacgcctttcctctggctctgcatcaagcaccagatttgtgggagctttatcctaaacagtataatcagtgaaaacatgttcaatataagatcatatacagatgctcagtgattgccatggaaaagcaaagagcacacacacaaacacaccgtgtacagcaggtgacgagtgatgatgt

SEQ ID NO: 41343 - DNA, 420 bp, Arabidopsis thaliana columbia
atggacgcaagagctagagctacagatgacgggactgatgtcagggatatcactgatgcgtatatcggagaatcaatggcattggcgataaattgggaaggttatcaaatcggctttagtgaagcggattgctgtgagccgacggcacgaaatgcatttgacgctgaagcgatgcaagacagggccgatccagattggtttagttcgaccccgtgctgacgaagattgagtgaagagtttgagaagtgacgttgcccatgaaagaggagcagtggttaatcgactgcttggagtagaattacttggcgctgacagagttgcagggatcgtgtcccttggtgtcggaaactggctcgaacgagactctttggcccttcgaaaccaaaggctgagcgaaggggacagaaacggatgtgaggt

SEQ ID NO: 41344 - DNA, 667 bp, Arabidopsis thaliana columbia
acgatatgagtttcataagaaagtaatatgaaaaacaattgagtatataattttttagtataaattttgcacggtaattttgaaaattttaataaatatttaattgataatataagaaaaaaaactaactattgattaaaaatatttagcaattaaaaaaaattaacttcttaaaaaactaactattaatattatgaatactaactagcaattctagtttctttgttctttactttgggttccagtagcattcatttcatggttcgtttggtcacgttgatctgatcagtcagatacttaaatcggacgttcctacatattcctcgattaaaaattattttgcttttgccaatataaaccaaacgcaaacggattttagcgttttgtcctcaactgttatatctcgagagattagataggtttcataatgtaggcccaataagaccttattaattttaaattcaaaattttaaaatatttttttctcttccgtttactcagccactgtgaccgttgtttgcttagcccataaatcgatttttgtgtttattgggcctacagattttctttctttagactgtgttgtatacacaatgaagaagactcagaaactcgaaagcaagcatcggtttggctgaagtggaaggaggaattaagaagatatgga

SEQ ID NO: 41345 - DNA, 1193 bp, Arabidopsis thaliana columbia
gaacatatcccctgatgaaccaagctaaatacacaattactccaaaatcaactatcaaaaccctaaataaaaaaaacctagactacctttgagattcaatacaacaatcaaatcaaattgattactaattccttattcacatgattactctgcttccaaattagtcaccgaatgatgaaccaaactaaataaagaacaaagatttatcttttcacagttacacagaaacaagggttctgtctcaatacagatttttactaaattcagaaaaaaaaacaagaaccattagcttcattttcttactacaattactaaaataagaaccctaagccacaagattcagtaaattgacgtgtaagcaaaagatacctgtaattaacatgtctcatggaagaagaagaagaagaagaagagaaagatggcgaatagaattggttgccccaaaacggccgtcgttaacacccaccgacgctgatctctccatagtcgcggagatcactcaacaacgccgcaaatggtaataataatttatcgatgttgggatcgaagagaggataaaagattcgattaggttgatgaagaagaacgtgtcccaatcgatgcgggtgactttgactacttcttccccaacgaggccacgaccaatgtcgtggtcgcagtttctagtaacgatcgaattcgaagcagtaagaggagatctctttttttttttttgggttagattcaaatgcatttatgacctaaatgtattttagtttttgacctttgactgctgacgtggattttttaagaataaaacatttcaacagttttcccgtaaacaataaaatgtataaaaatattaattgttggtaagatttttttaatattaggtatagtggaggagaattttcaaaaaaaaaaaaatatatatatgtatattataaaagagaattaaaaaaaagtaatgatgaatgatgtaagttatcatgattactttaaagctattttaatttctatgctcagtcgaaccgaaaataaaagaagtaagcatgataagttagaaattagcttctctcttgtgtgacatatttttgtaccaaaaatatccctataacccggagtaaacgataactaattgtagcgtagctgtttaagcatttaacgccgtagagatttacgaagattcactcgccgattttggaaacataaaa

SEQ ID NO: 41346 - DNA, 420 bp, Arabidopsis thaliana columbia
ttttaggaagaggtaagaaaaatgccatggcgtcatctgttacgtttatgactgctggtatttttgttttcttttaaattttctcattttctttctacagagtttttagggttttctaggcttaatttgatgctgttttccttttctggaaatgatttctatatttgtagaaaatcaacaaaatgaaatcaatatctttttttcttaccatatttgtagctcaaatgaattttgtcaataaaaaatgagaaaaatagcaccaatcttgagatggtacaaggacaaacttatacgtacttcctacattactatatggttcttagcagcttttagatactttgttgctttggttttggagaagtagacagtatttacgaaaagataggatcgagacttgcggcactgtctacactgataaga

SEQ ID NO: 41347 - DNA, 514 bp, Arabidopsis thaliana columbia
cctttcttgcttatgttaagtaattctgaaatcttccattgttttcactaaattcacccataattctatatatccattttttaaaacataacttgtgaaatctagtgtatataataactaataactgttatatttttatatttgtttgtgtgggaaaatgttaagtaataactgttattttgtataacatgttctctgtatataataaacaagcactagggtactagctataagctacgtttctaatttgtcgcaaatttttaaggttttgcttaagaattagttgcataaacaaatgctagttggatacttttgatgctgatgttttatgtacgtatatcactttcttgcataaaaacacattagccgaattttctagcaactgacaataatgcaactgaatttaatacaaataaataaataaaatctacaaaagatatggcgatggtactgatctatttgtatataatgctgtttccaacgttacccttgtttacgtcaagaagttgcacgt

SEQ ID NO: 41348 - DNA, 879 bp, Arabidopsis thaliana columbia
ttcaaatattttggacatcactctcttgcacacatattgatttatagatgatcacgcaaattaactaatcataacggattgaggtctcctagttcttataccgttatttgcaatgtttctgtgcataacaaaacaaaccatagattatgtgtacgtatgcttccaaagtaaaaaaaccaacagcctctggagccaataatgctcaataatatactactttcatccttaatcaaataccaaatttggtttgagaaaattatgaaaactgctagaagaaagggttcctcataatgctcaaagaaacatccccaagagtgaaaaaaaaataaaaaaatcaacttacatccatgaagctgccactgttaataggatccctagcccccacattgcagtctccaagcctaagcttttgcacagttgatgaagctcttctctggcgactcccagtccctgatctttccatcctctacaaaaatcaacaagtttctcagctatccaattacctaacacacagaagtaaagaaagcagaattcttcgcattgtccattgccagatttagcattatatataatttttcttaggtctccattataagagaatctaggcctacattattcacaataaatcaacctctaaaaaacaaccagctacctccatatgaccaacgaatgagaaagaataaaaactagtagaagtgcccaattatgcaagaataataggcaccaacttataaagaaacgccctttcatataaacataaatgtgcgttatagagcacatgacaaaagattcttaagatcaaaacagttttctattcttctctaatcccactccttaacatcaaccagaagcttatacgaataataacgcccttgatga

SEQ ID NO: 41349 - DNA, 597 bp, Arabidopsis thaliana columbia
tagggtctatagctatccagtagctagttttaacattcttacaatatatatgtaatttcctgaccgcccatgctagtgagcacctacgtcctttctcgggtccatgggtcctatcctgtctgacattcggtccgctacgtccaaaaggttttaaagacttggtttcagaccctacaaatcaatatatgatttttctttgtgttttttcctcacttacacagttccgacaatataatcgcaaaaaaatgattttcttttgaaaaagatgatttaatagtgccgaaacagttagtacaaatttacgaaatggtctatatatacatatttatgtttaaacttagttaacaacaaaaaaaattactttaataaaacagtagataaatatttttgcgaaataagaagatgaaataacagaacctaaatattcaatgcagattcattaagagccatgttccttcatgttcatcctaaacccttaaaagtcaaaaatcaaatgtcaacctctcctcgtggccttctcagacagtaattgatatgcgatcatatgtatgtgacgtgtgttttagtgtttttaattgtttaaagatcaatagtgca

SEQ ID NO: 41350 - DNA, 516 bp, Arabidopsis thaliana columbia
cgttgtccaatataatgtcgctattttttctcttaattttgtcaactacttttaattctttcaactttaagatgattgacatgcgtgcaccatataagaccagatcaacttaactaatcttattgaatatgatggctgaatactgatggctctccaaaagaaatttgtctccatttaaaataaataaattggtcactagagtcaaatatattcgttaatatggttaaaatgctttcataccaaatgtttaaccaaataaaaactacaatcgttgaatcaaaacatcattgattcaagttgttcgaaaacactatacattttcaagtgcttattttgaagttaaaacaatgaaaatataaatattatgacatcgacactcttcgctcgtctaattaagctcgttttttaaaaatgtaaaattcatttccgaactcaaacgagcttcattccccattgctctgtctcttaacttcctcaatctctcacccatatcttgatcctccattactttcctta

SEQ ID NO: 41351 - DNA, 482 bp, Arabidopsis thaliana columbia
gtaacttataattcaagtaatccattcttaaccggaaataaccaatacttttccataaattcaactttacattcattagactttggtttaataatgaaaccaactccaaaatctagcaatttaataataccacaattcaatccactgacttaataattcgatccactaatccaatctatactcacgagtgacgaccacattctaaaccaacaattcaatttttattgccaagattgaccacattttcaatagaatatacatatttaatcaagtgtggtgaaatcaacaaacccaatagcgacgtatctgttcatacataaacacaagcacgaaagagagtttctgtaacaacgttttgacttttgacaaatttgcatacagagtcaacaaaaagtcgagatctttgtgtaccaaaagcataagaaccaatcagaacagttaacaataaaaatgattaagccagaatacctagaacacaaatt

SEQ ID NO: 41352 - DNA, 601 bp, Arabidopsis thaliana columbia
taacgaccgccagtgtgctctaaagctttagagtttcctgattgtggctattgaagaggcggcggtgttgtatacgtgggataatgccgtggtaattgtgctccttgtgctgtcctttgttctggtttgcgcctttctcacctggatctggttccttcaccgcagcgactctttcagagagcccgtctttctctgggaatttgtcaaaaacagggtatttatgggaacgtgcctgtacgtggccctccctaacaagcataagagatgagagcatactcactaggaaataaggatgaccctcctctctggtgttcctttggtaacgctcgtccttgaactccctggccgctttcagatcctcaacaacaactcagcctttgattccggcattcgcatcttaccactgacattgacaatcgccatatcgtcagctttggcaggaggactgaccgctcgaggccgcgtacccccgttggtcgtgttctccgccgccgccgcattgcaaatcgtcggactgggcttgctgtactccgttccacagactcaccactgagcgcagtatatacggataccagacctcattgggacaggcgtaggatga

SEQ ID NO: 41353 - DNA, 165 bp, Arabidopsis thaliana columbia
aagtgtattctagggtatccctagtagtataatagtttaaaacattgatttgatgactttgttttgcaatttacaaaacatccaatccttcttctaaaacaacatgttaaacttaagaatgatttagaattagtgatactattgtgttcaaacaatgtgatttaa

SEQ ID NO: 41354 - DNA, 602 bp, Arabidopsis thaliana columbia
tgtgaggatgagctggtagtgtcggtaaggtcaatgagtatcatcaatcaagagaaattaggtaatattaaagtagtatatgacctggcatcaggtcactggttacattattcgtgtatgacctaaatacataaaaggagtccgagttaccaaaggaagtctgagaaaaatacaaacttgtgttttttggtattcacctaacaaacataaaacgatccgagaccaaatatggacatgtacgagtacgaaatatctcgtatacctagagtgaagattccctgcagtcatccgttagtttcctggtggctgatgcatactggaagtggagacccccatgagtatcttccatgcgatggatgtggtgacacggaaggcaacgcgatttactgtaaaatctgcaaattccgcgcacatttcgaatgcatcatccagccagacatcatcaaccgatccgtgtcactccaaacatcctctcaagaaagtcttggccgagacaattgactatacagatggtaactgtcatttttgtcgaagccacttgatgaggtgatgtatcattgtccatatgtaatattagcatagatttaagctgttggatatat

SEQ ID NO: 41355 - DNA, 469 bp, Arabidopsis thaliana columbia
tgaatccaataaaatcttataaaagcatcatgcacattaattaggctaacatgtaaatacaacgagaattcatatgggtgaccaagattcacatatttctaatacttaacagaaaaatacaaatttcaaccaacagtaaaaagagcatgtagcctagaaaataaatgcaatgaacttgccaatgtaaattcaatcgcctcttgctgtctttttagttatctttttcatagtaacttttagttgattgataactttatggaaaatataattcaaaacgtcatatctctttcacacaaacaaaacttacctatttgatcaaaacatttttcacgtggttcactgaaccagaaagacataaacatttctttttcacctctcatctattttactatttaaataatcaacccacttaggaataccaaatggttttaatttggcctccttcctccaggttaccaaaccaaatttt

SEQ ID NO: 41356 - DNA, 428 bp, Arabidopsis thaliana columbia
  unsure (1)..(428): unsure at all n locations
atttacgctgggacataaacagcagtaatctcacttttcccaagaaaatgacttgagcatagtctaatgctacttattcagagtactcaaaaatcttatgttcatcggatctgcgatcgatatttctttttatgtaattactacaacataaaaaatacataattactataaactatacatataaaatccaatcttaattttattaaattcttccccatacatctaaagatctttagatccatatatacagcgtccaattccccttgacagattatctaatgaatatcatcaacatntaagggtttggctggttcccgcccgtaaacgtgaaaacgagaccctttttatcaagtccaaccactagcagtacactatgccccatcttaatccgattccagaacaaatttgactaggcggatntagtggga

SEQ ID NO: 41357 - DNA, 590 bp, Arabidopsis thaliana columbia
tcgagctatgtctagagaaccattctggtacagatttagacaacaattgtgcagctaaaagcaatatccattacgaccggccgcacaacacggttgactttgcgctaaccgttgttcttgatcctgtgcacataccccatataaacgcggctggaggagcagcatggttgcctactgtgtatcagttaggttaagatacacatttggcgaaaatcctagcgtgacgtttcttggaatggaaggaagtcatggaggtcgagcttgttggcagcgagtggacgattgggagaaatgtaaacagagagtgagccgtacagtggaagtcaacggttctgctgcaggagatttgactcagggaaaactcaagttggttgcagatagtgtccagagaacattgcatctatgtcttcaaggtctgagagaaggtggtaataataataacaacactcatcaaaaggaatttaccatatagagagaggtaaactcttgtcagttttgggaatcgtaatgtgtacatacgtattctgctgttttttttttctttttcttttactattgggacttggaagaaacatgtgtgtagctttgaa

SEQ ID NO: 41358 - DNA, 546 bp, Arabidopsis thaliana columbia
atccccaagcccaataaatctgaaaatgaccactcagatggacaggtacctgtgtataagaaaacaagcatggtcaaatttattaacagagcatcaatctaatcgatgaaagtaactaagtggagtaagctttacccgctttgtcttaagaggtagatcaaccacacaaattttaaagctctgcatttccttcacaataagggatagatgttttttgcagaaatcaacatcctctatgattaattcagggtcgttgataaaaactgtctgcaaacaatagatgaacacaaacaaatcagaaatgaggaataatggtaatcagcagatgaaaacaaatattgtatcagctaaaccaacctcccagatcctttgacaggaagagaagtgaacaggacttcggagaagataatgatggtcgactgttccaccgtcattggaagcatttgtaaataaatacaggaatccctgatgatgctcgattatgcagtgggctggagcattgtgtcgcaaaccaatgccaaaccagaaaatgggtcagctgcattt

SEQ ID NO: 41359 - DNA, 511 bp, Arabidopsis thaliana columbia
cgttacgcttaaagttgaagattccaaagatttgggagatatctcacaatgatcaaaaactaatgaagctcaacaatccatacaataatgttataaatttgagtttcttaagaaacgttcatattacatcattttctttgattcttctacacaaagattcttacttttattacaccccaactacacacaataacccacctagaacacaatccggctacaaccaattttacataactgatgtagatcattcatcatctaatacaacttacaaggacgtgaaataagcttggtggtgggagtctctaaggacttcttaacttaccctttgtgtttgtgagaaacagggttctacggatagctagaatgagaatccatgtcgttgctgtgatttctccttgatcatcaatagcaatgctgagctcaagacagtcttcaagatttgagcctgcaagcccttaaagaaccctaacattccttcttttctccatatggcatacacaacccctggaat

SEQ ID NO: 41360 - DNA, 545 bp, Arabidopsis thaliana columbia
atcacattcaagctggaagattgcaattctcaaattgatgaatcatcactttcttctcttctgacttgtctctttttttcccttatactgtagaatgtgactactttctgttgactacatgttattgaaagaatttttgagtctttttctaatatccactctttactattgtcttgataccaaatacaagcaccgttaaactatttaacgttgaattggtgaaactatttccctcggccaaattgttcggtgaacgaaagatctgatctgtgaagagtttagttgaatagattcggctgatggattggtagggagagacaccatgcggttggtggaaggtacccgtgatagagtcttgacgtgaacaacttagtccaagagttaggagacacaataatgataagtagccgtcaatatatcttttgatccgaatttgaacttattatatgctttacttggcaaatgatatgaaaaacttgttcattgttgaagaatctatcaactattgtattcaatcacttacctttttatcttttaccaatcat

SEQ ID NO: 41361 - DNA, 515 bp, Arabidopsis thaliana columbia
gtatctttctttacacgttaacaaactggtttagttggtaaaccgattgttttttcttctttgtccggtttattgataaaacgtaccggatttggttcagggttacccggagattctgaaaggatttcctctgactccttacgttacaaggtatcttcctccatttgatgagtttgaagtggatcattgtgatcttcctagaggaaaatcgacggtttttccggcagtaccaggtccttcggtttatttggttattgaaggaaaagggcaattgcgaaccggttcatctaaagttttggtaaaccgaggagatgttttgtttgttccggctgatattgagattcacgtaactggagaaagtgatgtgatgaagctttacagagctggagtcagcagcagattcttccaaacattgtaggctaaagtttaagtatattaaatttactaattactatatactatatatatttatcgcgaatcatagggaccaattctccaaagtgttaggaaatgtg

SEQ ID NO: 41362 - DNA, 598 bp, Arabidopsis thaliana columbia
tgaatgtgggaaattttgaggcttttttggtctgaccagctaatcaagcaatacgcaattgaagatgaaattgaaattgaaatttgttaaaagcagcaacgagaagaagtaaggaaagtaccgatggcggtgcgcaaggcggcgacatctccggcctgagcagcggcggccaagtcacggaggtgagagggaagctcggaatcggtgtcgtagtcaacaccgttttcctcaaagatagcgttttctccgtcaacatcttcttcttcattcaaaccatttcctcctcttggaacagccattgtagtctctctttgtctcgctctcttttgttttttctccaccgccgtggaatgattttcttgtaacaagtaaaacaactaatcgccgccgtgcaataagctacctcaataaaatttaggttttctcgtggtgaattggcgcagttaattaactgtatataacttggtatattctctcggtctatgttttcggtccaatggctctgaaccaatttggttaataataaagaagacgatattgtgtttagtttacttaagagttaaaatgaaaactcttcttatcttttggaaattgagga

SEQ ID NO: 41363 - DNA, 454 bp, Arabidopsis thaliana columbia
gctagcgagaaaaaacaattctttttacttttatttattcccagaataacagaaacaagaaccaagagcaaccttttcttgacatccttctggtgtttctggaaaaatatctccttgcaataaatagtggagcatgtccctgcttccctcacagaacaggtatgtaggtccatttttagtatataaaactagctaatggtaatatgcaaacagaaattctcatcattgtgtagatgatctatttgcactgatcacagatgccaggagaaattcccaacataaataaaaagactaagaaggtttttttcctggtattttcaaggcaatatacttagggaaatcataatttgagcatatcttggaaactcaagacaccaaataaacaaagagcttgtacttgtcctttaaagaaagcctgggttttagaatggggcaggcttagcttgtaatgtct

SEQ ID NO: 41364 - DNA, 531 bp, Arabidopsis thaliana columbia
ctagcgtacattacaaaaactagattgtttcataaatgaaagtaaattgttttgcacaaaaaaatataatattatacattgattcatttattactccaaaagttatctttactccaacaataatgaattactactttcataggttttatggtggtcactgctatatatttttgtatgactaaagcttgctcggctaatcaaacagaaattcaaaaccacctccctcatggtactgaaaagagataataccactctacgtctctatgactctatcattgtgaaaagttataaacatggtaaaccttttcttaattatggcctcaacttacatagggatgctaaaatgtatagataaagaattaaagataccttatgtgtctttatttcgaggcactagtaataaaagatacagaaaagcatgtgtttatgtatttaaattgaacacatttaatttgtatcttatccttttgtttctttaattttatttttctggtcctagtaaaaaccaagcatagtgttttatcgaaccag

SEQ ID NO: 41365 - DNA, 510 bp, Arabidopsis thaliana columbia
ccaagttgtgcgatctcattggcgtaccggaagtagttccttgaacaggattttgtatcaatgccatcgaagaaaaatggtagaaagataaggtggagaaaaagaaactgcaaattttctgggtagaaagcagagctagaagacgacgacgataccgttgtttttccttcgtttttttcttcttctccggtttggtgtagcttctcttcggtttgtaaaatataatgaaatggttttagttttgatttggatgccggtttaatttggatttacaaaattaaaaatttagcattaatcagttttttcttgtccggtttaaaggattggattgatgaaggaagaaccaaatggagctttttccaatttaattttgaattcgaatttgttaaaacgagattgtccttggcaaggaaccggaatttggaaaatgaaaaaccaagaacacagttgaaagttatccacactagttaggacacgtggaggctaatgtattcacgtggacacgtgctc

SEQ ID NO: 41366 - DNA, 553 bp, Arabidopsis thaliana columbia
cccaaatcaaacaaaaactcttgttcattattttgaagtggtatatttagattaaagccatgaaaagccattgttgaatttgactccatagtataaattcacgttgatttatatagaagattagttgaatgtagttaaggttataggctccaatctatttttttttgtatttgacttaacataattgtggctccaaattaaaattttcaattattttgagtaaacaagttttatttggaaagtgaaaaaatgacacggaagaagaaagtgaaggaggaatatgaaagggttacgattttcagagagagagagaacttgctgcatgcatgtgtaattctgattttcgttgcatgtgcaagtaaaacacgttatccgtaattctcattttcgttgcatgtctaaggaaaacatgttaccttgaattgggtttttaattaaataatgagaaaagttttgtgtcttaatttgtgtgcaaaagttaaacatcaattttgctggaacggagggagtacaagattggtcgtatccacttggacgtaatgatgccgctgtt

SEQ ID NO: 41367 - DNA, 2353 bp, Arabidopsis thaliana columbia
ctaaactccgcagttaagcatgctttggcgagagttgtactaggatgggtgacctcgtggaaagtcctcgtattgcatccctctttttttcggtttttctcttttttttttgttaaaaatgtatgactttataacttttagaccgtgaggccaaactgggcatgtgataccttttcggaaagcccaaagagagctctccgatgactgaggaagtaaaatggaattcttctattgttttttttttctactcccaattttgaactaaatgtactttttcgggccttttcgtgatctttgctatattacgggggaaaactatatgttcggacattgttttccaatattttgcatgtatcaaagctcttataaagaagatagggtattcctacatagctggtgggactcacggcaaatggatcataaagtctttaagaaagaatagataggattacattgcatgtagtaacacatgcgatcataccagcactaatgcaccggatcccatcagaactccgcagttaagggtgcttgggcgagagtagtactaggatgggtgacctcccagaaagtcctcgtgttgcatccctctttttttcgatttttctctttttcttttgtcaaaaatgtatgactctagaacttttagaccgtgatgccaaacacttggcatgtgataccttttcggaaagtctaaagagagttctctgatgaatgaggaagaaaaatggaattcttctattgttttttttttctactccaccttttgaccttaatgtactttttcgggcctttttgtgatctttgctatattatggggcggaaattatatgttcggacattgttttcgaatatttagtatgtatcaaagctcttataaacaagaaagggtattcctacatagatggtaggaccgacggcaaatggatcataaaatcttcaaaaaagaatagatacgattgcattgcatgtagtaacagatgcgatcataccagcactaatggaccggatcccatcagaactccgcagttaagcgtgcttgggcgagagtagtactaggattggtgacctccaggaaagtcctcgtgttgcatccctctttttttcgggttttctcttttttttattgttaacaatgtatgactctgaaacttttagaccatgaggccaaacttggcatgtgataccttttcggaaagcccaaagagagctctccgatgaatgaggaaggaaaatggaattcatctattgtgtttttttctactccaacttttgaccttaatgtactttttcgggccttttcgtgatctttgctatattacggggcgaaaattatatgttcggacattgttttcgaataatttggatgtatcaaatctcttataaacaagataaggtattcctacatagctgtgtgggacccacggcaaatcgaacataaagtcttcaaaaaagaatatatacgattgcattgcatgtagtaccggatgtgatcataccagcactaatgcaccagatcccatcaaaactccgcagttaagcgtgcttgggcgagagtagtactaggatgggtgacctccaggaaagtcctcgtgttgcatccctctttttttcggtttttctctttttttttgttaaaaatgtatgactctgaaacttttagaccatgaagccaaacttggcatgtgataccttttcggaaagcccaaaaagagctctccgatgatgaggaaggaaaatggaattcttctattgtgtttttttctactccaacttttgaccttaatgtactttttcgtgcatttcgtgatctttgctatattacggggcgaaattatatgttcggacattgttttcgaatattttgcatgtatcaaagctcttataaacaagatagggtattcctacatagatgtgggacccacggcaaatggatcataaagtcttcaaaaaagaatagatacgattgcattgcatgtagtaactgatgcgatcataccagcactaatgcaccggatcccatcagaactccgcacttaagcgtgcttgggcgagagtagtactaggatgtgtgacctccaggaaattcctcgtgttgaatccctctttttcggtttttttttttttgttaaaaatgtatgactctagaactttcagaccgtaaggccaaacttggcatgtgataccttttcggaaagcccaaagagagctctccgatgaatgaggaaggaaaaatggaattcttctattgtttttttttctactccaaattttgatcttaatgtactttttcatgcatttcgtgatctttgctatattacggggcgaaaataatatgttccgacattgttttcga

SEQ ID NO: 41368 - DNA, 596 bp, Arabidopsis thaliana columbia
tcatttaagtctcttcaagtcactacaaatccaatccttaaaatgttttcaataacagggaattttaaagtagattttagaatcactagttaataacattaaattttatgagatttgtaaaaatccatgattgaataatataggatttgttattttaacacaaattacttgaaatgtttgattgaatacaccccctaaatctcggtaaaatagattttggcgtctccttaattatatttattagaaccggtttaataactaaattaatctgtgaatttaatattaatcgcccaaacacgctatgctaagccacaccataattcaattcacgtgaccataatattacgtcaccggttttctgtactttaattacttggtttagtccctggttcaataattaacaaaagcaacacaagtaaaccttcgcaatttaacattttaccaaaaaaataaaaaacaaaagtgtaaccttcgccgtttacctttgccggcgtttcactcgacggttcatgacgtctcgacgaagtggatctgcaacggttcaacccatggtggttacgcctcatgactcacaattaacaacacagatgacaaac

SEQ ID NO: 41369 - DNA, 545 bp, Arabidopsis thaliana columbia
tcccctaaaaaaaaatatagagaaaaaaaaataaatatattaacatgtatataataagttgttgttgttgtttttttttcccaaatccgaagctgatattcagttttgaataaactcagttttcaaaatttaaaaactaatccaatgttatttaatcatggatttttaaaacatttcaagtaatttgtgttaaaatatcaaatcctctgttattcaatcattgattttaaaatttctaatgaaatccaatatttattgaactagtgatttgaaaatctactttaaaatctcatgttattgaaaacattttaaggattggatttttagtaattttaagagactttagtgaattttagtggattccttagtttaaatacaaaaatttaaatctcatagttttgtttttttgtaggcaaatctcatagttttaagtgggatttgagaggattttgattttatatttgagttaatttgggttttatatgttttttatataacaaattgttgttttgttggaaactttcaggtggagttagttgaggaga

SEQ ID NO: 41370 - DNA, 515 bp, Arabidopsis thaliana columbia
ttcaaggactagaatgaagaaaagtacactccttgatcttattaaatacttacaaggtaaagagcagagaaggcgccgagagttaagactatcaatggccaaaagcccaagaagaaagtccctccaattgtcagcaagatcctagcacgcggaatcaacccctgaaacaacaataagcagttcctttcccaaatttaacaaaacaaactcctaaaatcaacctttatcataactacataagctgctaagaactatccggatacaaaagaaggcaatgaaacataatttcaagccctacaataactgactatgagaaactataataattagagggtactagtgataatctgacctcaagcccttcgctgtttaaagccaaagatctctctctctgatttaacaagcttttatcgaaggccggagtagttgcagtcgttttagagctgtttccggtttctttaccggttttgatctcatcctgatccacttcatagtcttgaagcaaggaagtagga

SEQ ID NO: 41371 - DNA, 572 bp, Arabidopsis thaliana columbia
cgcctcgcgaacgttgggaagcttcctttttggatctcctcgcttccacgtttgtcgctgatccatccaacattaccccaaacctttaatttccattcacttcttatatacaactttctaatctcacactttatcttttctctttattaatatcttagtaagcccttcacaacaaacatgaacaaaattaagatacttaagtgatttttttctcatgcttctcatatgcttcctttgttggtctggctcggatcatgtgactcattccaaaacttcggtctcattccatttatcttatatacgaaacaaatttgatattaggaaatcagcaacaaaaaaaacaaagacttttctaaactaaaaaagacggaaataatattgggttttgggcccaaagttagattaattaatgcctaaacgcacaccttttggttgccaaatgttaaaacgggacacggtccaacaagaataaaaacaacaagacgttcgatgttataacataataatgacacgcacttctatcaatttcttactactgtggagatgtatcaatgttatattcgagtgatttg

SEQ ID NO: 41372 - DNA, 468 bp, Arabidopsis thaliana columbia
tatcataaaaccgaagaatcaagatcgtattcaatgatttttaattttatcaattcatataatttcacaaaaagatgctataatttatgtttatattaattggttctcgaagcggttcatttactacaacaaaatttttgtactgagcgttatatgctaagaaataaatttcttaaagtagacggaaataaaaataattagaataatagagtcatcaacgttctttttttttttcttgcaaaacaaagttttttcttgtctacaaaattataaataatgtaaatactaaatagtgataaataaaagaagtaaattgtgaataaattagaaataaagtcgaatataagtgaacccacgatgaatacagacaggttcagtcatagatcatacgtggggagatataacttctcgactcagtaaccaataacaaagaagaaaagcaagatagtcagaagctcttatcaaatg

SEQ ID NO: 41373 - DNA, 545 bp, Arabidopsis thaliana columbia
tcaatgtttgggacagtgaatgaagctccaccgtccgatctctgaacgtcgagcccatcggagggtcggaattgaactaaagtcaccggcaaattgatgaatttcctcagatgatgagctttatttcgagagtaacgagagatgtatcaatcggagaaagagactgagaaacatatagggagcatattcgatttacgtcaaaataacaaattttatgttattcaattataaatttttaaaagtttaataaaatctaatgttattgaacaagtgattctaaaatctacttaaaaatcccatgttattaaaaacatttgagacttaagttaatttgaatggatttacttacttcaaaatacagaattttaaatctcataattttaggttataacaacttcttgaatttgagaagattttacaataaatcataataaattcttaaattcactcaattttttcagaatcatataaaagctcaaaatagatcaaatcactcgaaatataacattgaatacatctccacagtagtaagaaattgatagaag

SEQ ID NO: 41374 - DNA, 435 bp, Arabidopsis thaliana columbia
atgaagcaagctgacaagatccactcaaaccagttggttggtgaaccagggaccatgaaatggtgatcaacactgtctacaaaaacattcgtttgtgttttgacttgaggacatctttgtttgggaagtaaggtttcttaatttaatagaaagcttttcaaaaattgttttataatattcttcaagcaaagagaagagagagagataactcttgtgagaataatgtaacaactcttggttccaactacaactttgcttctgtatatatcccacgctgagtctttgaggctcatgtaactttattcaaatttacatgatagagaatgggacttgaatgaggaaatttgtagttagcttaataacgagatcaggctgcagctggctttccatcttttcgaggatcactaactgcagtaagtaagccctttaatggtt

SEQ ID NO: 41375 - DNA, 459 bp, Arabidopsis thaliana columbia
ttattagtttttacaattgttaggctatttattgtgaagctgtagctatggttgaagaatatcagcaagctatttcagtagctaaccatgggggaattcgtgatgttcaaggtctataccctcaacttggcttgaagaattctcctcaggtttctaatctcaaaaacgtgattttttttctggaattatttgttatctcgagactcatttatgagcataattgttgattttttttaggtttatgagactctagagcataggttggtggttgctgaggcggctcagaaactgaggctaccgcttatttcagatggtggtgaaattcatgaggaagagattgaaaagtggagtatactttcaagaagctctcttgatagtgcaagcacgagttttacgattagctccacttctaactccgtgaactatgcgaatactctgcaaatagtgttgctggtggga

SEQ ID NO: 41376 - DNA, 391 bp, Arabidopsis thaliana columbia
tccaagttccgacttgacctagtctttatgcatctgcagtggtgttttctttaaatctttttttgaatggatttgaaaatcttattttttcttcttctttcaaaacactaactgtgaatcaccatcaacattttattgttctaaaatccctatttgtatgctctattggttactttcccaaatatgatgatagtttattggtgtactttagtttagaaatgtaagaaatttcagttgtactagtaggtcaaccaaatattattcttgaatagtcatgtcaaattttgtctataatgaatgatctataagactgatatctactaagtgtgatttgccactactagtagagctactagtagcaagattcctattcatatcaagatgatatgga

SEQ ID NO: 41377 - DNA, 559 bp, Arabidopsis thaliana columbia
tccatggctgttatgaatgggaaagttgataaagagtcttgggaacttttcttgaagaaatttgctggtgaactagataaaggggtcttgcctcttaaagaattgttgcatgaaatttctgtctcttgaagaaccaggactatgatcaatactcaaaaggctttatctatgtcctggaggtatgtatatcttactcttgagtttggttttatgcgttcgagacctttagatgcattgttttacatattatgaataatataaataggaccaaaggctcttgtggcagatgaacgtataagggaagagaagcagccactccaggccgcttaagattcggcatccatgttccgcttcaagctatatagataatcaagcagctgacattgatggaggaagatggaggcttgcaaagaatgaagagatctccaaattgataacttatgatatgaatgttgattgtaacatagatgctaattaaagacgtgaaatcatgatttctggtgagatagttgtggaaagagagtttgatactgttagtgttactttaatctagagaata

SEQ ID NO: 41378 - DNA, 561 bp, Arabidopsis thaliana columbia
  unsure (1)..(561): unsure at all n locations
tcccccaagctacaatgacagtaacaagtcaacgtgcaaaaatcttacgcatttgaatgaatgatttatgaattaggatacctgaaatatactgggagccttgacaaattcaataactgctcgtacagcttcctccttggcttcactcaggacttgggtatcttcattggagaaagttgccaaataatttgtcacaaactggagggattctttcgcaaaactgaaatattgattaaaaatcccatgaggacattggtataccttaaaaaaaggaaaaagaagaaacaaacattgttgcagtaccttttattttctctaagcactttagcaatagcaagaaatagttcccgctgatctttgatgtcaatgttccactctttcaagaagctgtcaatcttcttaaaggaaggtacaatatactcggtaaccttcccgtttacagccagttccagagctttcatgtatacttgaaaacgagcatttgggtggtctaccagattatatagattgaagagngctgcacagagacaagcacagatgagaacacatacacaaaaatga

SEQ ID NO: 41379 - DNA, 514 bp, Arabidopsis thaliana columbia
cttctttttcctctcttttctctctctctctctttctttgtgaaaatctagaagaagagaaagctacaaaaatctcaacatcgaggtatgttattcgtgtttgcttacctaggagatgatttaagttctgtttcttgatttttcactttctggttttctggggtgtttcaaaagatctgtctttatatgttctctttgatgtctctagtcttgttgggatgtgaaacacatgattttcgaggagtagagagagacagagagaaattaagggaaagagctcacttgtgtgacttgttctgtgagaaaattctctaagcaaaattctcaattttatcagcttctttctaatttatgcatattaaaattaagagcttttacacttgaaagttgtcatctttgtctcagtctctctctctctctctcgtttgcatagaagaaacaatttttgtgttgatttagtcagttcacctaatctgaagagaagttaaaaagtttggctaagatttgtcaaaag

SEQ ID NO: 41380 - DNA, 398 bp, Arabidopsis thaliana columbia
gtgtcactagattagtggtatagtgttacttaataacaattataaactgtagaatatagatattttataaaaataaaatttgcaaattttaatatatattacttttaaaaaataaatcatcccgcggtataccggctataaaatctagtccactacttaagggtccatgaatggtcaaatcatacttcaccaaatctgaattcactaccaattcaagtaatacttattataccaatttgcgtaataatttcacctaataccaaatctggtacttttactattattagtacagactatgaagcaatctaattagtggtactctagtgaggtcagcactatatcttctgacaaaccatagtcaaccacatctatactctgaacagagcctaataaaatgt

SEQ ID NO: 41381 - DNA, 552 bp, Arabidopsis thaliana columbia
atatattactattgatttacaaattaaaaagcacgagttaatttggcagtttcaagtactaaactcactggcttccgctaattttttgaccgttgtttttatttttatttttattttattttattcgtaacatattataaatcgtctaaaccgatctatatatgagtcctgtaaatttatcaactgcttctgatggatttttctctattatataaaacataactatctcgataggatatagggacctaacatatacaaacaagaggcctatttagtgtaaacaatacaacaatgagacaatttttacgtcacaaagcaaaacaagaaagggagacaaactaatatgaagaaaattaaccaacatgatttgcaacacacaacataatttaccaaacaaaagtatggtttaattgaaaatacatatggtttcttcacctctcctcgagttgataggaaaaaataataagtattaaatacacaaagtatttaattacagaattgctttgaagaaaatagtgttttaggtggttttttggatatatttagtatttt

SEQ ID NO: 41382 - DNA, 557 bp, Arabidopsis thaliana columbia
tataagacacgaagaccgttatttgcaataaaactgtagagcttccgaaccaaggatgcccaaggttctgttcctagagttactggccagacagagaagaacaaatcacatggaccaagttcagatgcaattttttcaagcaaatgaccataggctggtacgacaacttcctcaatcaagtaaagattccaatccgagcgtacttttccatcccctgccatgtcgttaccaaaccaaagatccctcctgttggatgacaactcaaaatatgcattgatatgcgcagggaggcctgtagttataggtagaggcagaaagcagaatgcacgccccccaaaatttcttctattctgaattgaaatagtggatggcccaaatatattagaaatgctagcagccagatcctccacattttcattcttgacagaatttatatgcacggcaacactagcccatggtattaacttatgggacatttctggaaggttcaagttctttttacttccccggcattcagacattctcctgttatccaccatgtaaaatcagccagatga

SEQ ID NO: 41383 - DNA, 526 bp, Arabidopsis thaliana columbia
  unsure (1)..(526): unsure at all n locations
actataataaccatgactattaacttgtatagactgtatatctcaatgtttgatggtcaagttaaaacgccattgcaccttgagaaaagaaaatgcatgttgatcagatcatagctacgcggaatcacattcctttgacttcacttgcttttttttccaggtgattctctgtatgactagacttgagtggatttggtgtctcttgcagctttacttggtccaagagaaattccaaaaataagttgacaagcacagctgatcccatgtgaggttcccaacattgagaaaaacatagtggtaaaagttgcagacaaacaaccttcagagatgggaaaacagagaaatctatcaagaatgtgtcagagtttctgaagacgaatcctacaacatatgtgatatgtgataccacttcctccatccaaaaccaacaaaatcaggaaagaggatatatactaaagatgaaaaatacatgaaggacaaatgtttaggagcgaatatcagtctgggacaaccccanaagatgcag

SEQ ID NO: 41384 - DNA, 453 bp, Arabidopsis thaliana columbia
caaaagactaaagtagaaagtcgtaggaaatgtttttaatttcagggtagtatatcttatcgtacgggttaatatggccctatagacttacatgaagcgtggtcccaaacagaccagttggctttatattgccgaccttataaaatattatttttctaacattatattttacttaaatagttttttttttttttttttttttgacgaaatttttttttacaatattaaatttttgttatctattaaaatgtagatatttgatctactttatttttaaagtaaacgttaaatactgatatcaaaatcatattaaatcaggactatattaaatacgtctttttaaattttgaaaccaaaacaggtttgtaatccacgtgtaaggatagtagtggcactctttatcctgcaaaattaagattttactgggaagctataaagtataaacctttgttt

SEQ ID NO: 41385 - DNA, 2476 bp, Arabidopsis thaliana columbia
tgcattgcatgtattaacggatgcgataataccagcaccaatgcatcagatcctataaaactccgcagttaagcgtgcttggacgagagtagtactaggatgggtgacctccaagaaagtcctcgtgttgcatctctctttttttttgttaaaaatgtatgactctagaacttttagaccgtgaggccaaacttggtatgtgataccttttcggaaagcccaaaaagagctctccgatgaatgaggaaggaaaatggaattcttctattgttttttttctactccaaattctgatcttaatgtactttttcgtgcatttcgtgatctttgctatattacggggcaaaaattatatgttcggacattgttttcgaatattttgcatgtatcaaacctcttataaataagatagggtattccaacatagctggtgggatccacggcaaatcgatcataaagtcgtcaaaaaagaatagatacgattgcattgcatgtattaacggatgcggtcataccagcaccaatgcatcagatcctatcaaaactccgcagttaagcgttcttggacgagagtagtactaggatgggtgacctccaagaaagtcctcgtgttgcatccctctttttttttggtttttctcttttgtttttgttaaaaatgtatgactctagaacttttagaccgtgaggccaaacttggtatgtgataacttttcggaaagcccaaagagagctctccgatgaatgaggaaggaaaatggaattcttctattgttttttttttctactccaaattgtgatcttaatgtactttttcgtgcatttcgtgatctttgcaatattacggggcgaaaatcatatgttcggacattgttttcaaatattttgcatgtatcaaagctcttataaacaagatagggtattcctacatagatggtgggacccacggcaaatggatcataaagtcttcaaaaaagaatagatacgattgcattgtatgtagtaacagatgcgatcataccaacactaatgcaccggatcccatcagaactccacagttaagcgtgcttgggcgagagtagtactaggatggcgacctccaggaaagtcctcgtgttgcatccctcttttttttttggtttttctcttttttttggttataaatgtatgactctagaacttttagaccgtgaggccaaacttggtatgtgataccttttcggaaagcccaaagagagctctccgatgaatgaggaaggaaaatggaattcttctattgtttttttacctactccaaattttgattttaatgtaatttttcgagcctttttgtgatctttgctatattacggggccaaaattatatgttcggacattattttcgaatattttgcatgtatcaaagctcttataaacaagatagggtattcctacatagctggtgggacccacggcaaatggatcataaaatcttcaaaaaagaatagatacaattgcattgcatgtagtaacggatgcgatcataccagcactaatgcaccagatcccatcagaactccgtagttaagcgtgcttgggcgagagtcgtactaggatgggtgacctccttgaaagtcttcgtgttgcatccctctttttttcggtttttctcttttttttgtcaacaatgtatgactctagaacttttagaccgtgagccaaacttggcatgtgataccttttcggaaagcccaaagagaggtctccgatgacttaggaaggaaaattgaatccttctatagttttttttcctactccaaattttgaccttaatgtacttttttgggccttttcgtaatctttgctatattacggggcgaaatttatatgtacggacattgttctcgtatattttgcatgtataaagcacttataaacaagagagggtattcctacatagctggtgggacccacggcaaatcgatcataaagtcttcaaaaaagaatagatacgattgcattgcatgtagttacggatgcgatcataccagcactaatgcaccagatcccatcagaactctacagttaagcgtgcttgggtgagagtagtactaggatgggtgacctctcggaaagtcctcgtgttgcatccctctttttttttcgagttttctctttttttttgttaaaaatgtatgactctataaattttagaccgtgaggccaaacttggcatgtgataccttttcggaaagcccaaagagagctctccgatgaatgaggaagcataatggaattcttttctttgtttttttctactctaaattttgaccttaatgtattttttcaggcctttttcgtgatctttgctatattacggggcaaaaattaaatgttcggacattatttttgaatactttgcgtttatcaaagctcatatagacaagatagggtattcctacatagctggtggtacccacggcaaatagatcataaa

SEQ ID NO: 41386 - DNA, 501 bp, Arabidopsis thaliana columbia
  unsure (1)..(501): unsure at all n locations
cccctaggtgtcttccataaagttttgatctttattaatctccaagtacagttaatcagcatttgtgatctgaatttgtcagtgaggaacataaagaactggggaacattttggatattttttctccaagtgaagttaaaaggaacaaggagacaaggtaaggttttggcttttctttatgtttctcactagacatgtaaaagctcaaaaagtttttattcttctcttcgtctttcattgcaggttggagtcgaccaatcattgatcgagctagagaaatctggctacaattcaatttcagatgaggtaaagttcttttgtttccctatagacttggaaaatcatggctcagacatgtatataaggttgtaaagttttgatttttctcttcaggttttcaaaacacagaagatgaatgttcanatagcataagaagctgtgaatttcttctttcttttttgtccaatgggaacaatggcagaattgggaccatgggaaaat

SEQ ID NO: 41387 - DNA, 1570 bp, Arabidopsis thaliana columbia
tgagtttatgattaaatgagttatgggttgttcaactcattttgttaaatgagttgggtctaacccataactcatttcatttgatgggttgagttgttaaatgggttaaccatttaaataataatttaattaattattattaagtaatttttttaatttattattgtcatcattaattcattattattaaatttgagatatttattgattgagaaatttttaggagtttacatttttagacggtaaaattacgaggttacgttttgtgacgggaaaatcacggggtcatgtttttttggcgggaaaatcacgaggttacgtttttttggcgggaaaatcacgaggttattctcatcttctagtgtaaagtaatcccacatatctgatgttctacttcttttaaaacgagaagcacttactaaacttttagattgtgatgtatctgctgatgtttgcccaccttcaccaccataagtacattcgtcttcattgtccattttttgtaaaagatcagctgcaaataactatacatagaaataaggccaagttagagattgcttaataaaacctgttattagccaaatacaagaattaatcacatagacacagtcaaagaatcaataaaacaaagagaaaagaagactgttttggacaatacggcaagcatatgactaaatacgatttttgttagctcttgttattctaaaaatatttctacactgagtgtaactctgattagacatgatacattaaaaatttggttaagttagatcatgaacatgatttcccaaaccaagaggagacgtgatagacatcatctttgaccctagacataagctgaaatatcttctttcagcttaaaccctttaccgaaacaaacacataacaatttggcaatcacatcaaaactatcagaagtaactaatcccagaactcaaacttcatcgctcaagtaccacaaactagaagaagactagtctattaaaggtagagccattcaaataaagtgaaaattaaccatataaacaagcttcagaactctagagcattgaatacgcttctagcatcacttaagttagaacctgaacatgatttcctaaaccaagaggagacaggactcacacacaaatcatcttacatatagatctctaaaccaaactccatagaaaccagaaatagaaagttaaatatttcaacaccaacttaaaccaaaaagataccaaaaaagaaacgcaaaattcaagtttccagatgcttatactaacagctgattgcttcttaagatcaactagggtctttcattagcttaaaaacaacaaaagagctgaaatttaacaaacagaagctggaaattgaaggatttgagcttgtgctgaacttgcaaaaaaaaaagaacagtctaactaaaatgatcctaaaagaatagtcaaaggacgttaacctacggtgtctccccgttgattcacctacacatacggtggcgcagactccggggattagagcatttcagccgttggcccgagcggttcggtcatcctccgccgtaagacaccgggatcgcttatctggt

SEQ ID NO: 41388 - DNA, 534 bp, Arabidopsis thaliana columbia
ctgaattgcttgttgcaatgcatttacagcatgttggttggtggtcaccaacaatcataagaggtgaagaccgcgaggcaattcacatcccaaaccataagttcacagttaatgtcgtgagaaaccttactcagaaaactcattggcgtattaaaactcacctagcaatcagtcacttggatgtcaacaaaataaatgtgagttttctaattcccatatggtcgttaactctttatacaagttaaggtccaatcatggagtttttttagctgatccttgtttggaacttcctcaaacagaatattgtagctgacatgcggaaagtgttggccaagaatcctatggttgagcagcagaggttacatagaagggtattcttggagaatgtcattccagaaaatcaggccctctcggttagacttcaatacctatctcttcttttgcacccatcttcagatatttcaggcagctttggaaggtctggttcttacatctggttctcgtttttacagatactgatctcttgctttgtga

SEQ ID NO: 41389 - DNA, 565 bp, Arabidopsis thaliana columbia
ggactgtgagtcttcaagactctatcagccatgactcggtcatcagaaagtgaaaacatgggtctgccatttctatggaaagcttgtttctttcccggaccaaatcttccaccgagcgaattgggacccaatgatttcggaaccatcgaatgtcggatattagcatcaaggatttcctcagatggatgagggtaatgtgcagtcttagggacaatggaaccgagattctcgctattatgatccatcaccttattatggtccgcagagcagcaacatggtgatcatcagtatgacccccaaaggggttgtcttcgtgagatctcggtgctaaaggacgcctctcgcctgcgttatcagccagcctctgctcggcggatcttggaataagggagacccttttgagagggtcggccgttgggagggtttgtgagttcaattgaaagcgttgggccatattggcgaggttgagagaaatatatggtgaaggatctgatgtgttgtgatgaatgattgggttagtaccatgtgtgtgtatatatactggtgcaaaaggttaaataaagtg

SEQ ID NO: 41390 - DNA, 530 bp, Arabidopsis thaliana columbia
aatgtgtaagtttgaatatatgatgaatgttggacttaccaaattgcaaataaatcctaaatccttagcacccatggaattatcgttgatttttttaggtttttgactatcatgcagagcggcgataccaaatattctctacttgccgggtatggctcgaacatcagcgacattttcagctgcaagagcataattagcccattgatcaccttggtgttgggtttggtgtttaggttagtagacacgcgtatcatcaattttgtcttcattacatgaaattatgtgtttcagttttttttcatgaagacaaattctcaaaattttatacacagtttgtatattttttgacgttttagtttttttttatagagttccttattaattttagtcaacatagtatacttaacgataaaatacaaactcaataaaatcatgtgcataaaaaaataaaaaaaataacttttgaaatctgaggaatattattcaatggtacgttgtccattgaaatttgcaatgggattattatcaat

SEQ ID NO: 41391 - DNA, 378 bp, Arabidopsis thaliana columbia
tcttgcggcggcggtggaagctctgctgaagctacggacacagcagccatcataaccgccgcggctatagccccgatcgtcgccgtggatatacgaacagccgcagatcgagtcaccaagcgactctgacactgacactgatgagatttactactacctctgttgtataacaatttcgcgcgatagagagatgacgaaggacagtgtattatcattactcttgctgattttcttgtgcagttttctcatcagactctctgtcttgcttaagctaagtggttctcgttctacactctatccttgtttagacacgtgtccgtttctggtggcttggaatttagatacttctcaaactccgacaaacgcccagttagatac

SEQ ID NO: 41392 - DNA, 514 bp, Arabidopsis thaliana columbia
gtagttgagtctcagtatgccaaaattttgaatgagcatccatatgaataaatatataaaaccatacattacataataataataaaagttaaggaagaaaaaacattggtaattttagtcacatattgcttacctttggactctattaggatcagtatgatgcaagactcgatggtaggccttgtattaaatagagatggtggcttcacaaattggcattcgctctattttgtgaatgattgatggtcgatgatgtagaactgacacgatggcggccgctgctcttgtgtgggatcaaatggaagggatgtgttggtggagtgaagtgcactacaaatatgtgattgatctctgatacagtactcaaccttggtgaataacatatcttacaaaacaccccaagcttactctctcaataacacttaaagagaataagtaagaacatgcggcttctttgttaagggtgaaaattcgtacaattgttgaagagggactttataagagccttcagcta

SEQ ID NO: 41393 - DNA, 504 bp, Arabidopsis thaliana columbia
cccaattgaaatttgataggtaaaatctagggaaaacgtgtaaaaaggtaggggtcgtacgaatctaataaattgcaaagaagaagacatttcagaagtgggggctcggcttacacggacaaccactcacgttcaggtgcatgccaatgcggcaatgccttaccattaataagtatagctcaatattgaattttatacaatgttagaggtcgaccaaaatccaaaataaatgttgaattttaatcgactgtggatcaccaatcaccatgttttgtttttttcccttgcgacataacataacactgtaagtcttccttttttcaatagtgtcagttgtttgattttttttcctcagagtgatacatatatggtttgcttgcatagtaaatatactatttgatgagttgtttctcttttttttgtttgtcatatatgtgatgagttttttttttggtgtggaaaaacctaggtatgcagtttggcttttgcactaatgttaacatt

SEQ ID NO: 41394 - DNA, 464 bp, Arabidopsis thaliana columbia
  unsure (1)..(464): unsure at all n locations
ttctcatcatatactaaaatcattattctaaaaatatgagtcgataatacttcataatatcgaataaatttcgctattgatgccactttcaatattcatggcccttgtttactcgtcgtcttctattccaaagctccatcttatcacatcttgatcaattgacaagccgattagagataaattaatcttcattcgatgtgtatcttggcttttggttctcctcacttaattttttcttgcttcctttgcaaattttctctcattttgtttctgttcgaaaagttgcaacttaaactatacgtaaatgaatatttgctgatgaataaaatttgacattgtcaacaacaaaatgttcatgattaggcattaggtacataaaatcgtaaatggaccaataggatcttagattacagctgacattaatatatgcaacggganagttaaggatacgtatataataatga

SEQ ID NO: 41395 - DNA, 515 bp, Arabidopsis thaliana columbia
tgtatgatatataccttttgaatttaaatgacataagtgatatataacatacacatcaaacatgactaaaccatcaaacatctactaaatacgctaatcaaaacagcatgtcaaagtgaaatcatagtaaatgaattacaacaacacatattaatttgaaaaacaccacgatgagcaaaaaaacaatcgtgtagcataatgcttcttcatgtttcagtctattcccaccattatagaaaaaatgaaatatttgtttttaaaaagactatgaaaaagttaccttggagaccaacttcattggcgaatttgattgtgattgtcgaagaatcatttttaaacttctagcggtaaagagcacctagtggagttgaggagtttacttttcaatgtattgatatatatcgaaaatctgaaaagaaaagaaaatattatgttgatatagaaatatagcccaattacctctcgtaattatgtcttcaacacttcatgttcctctcacccctaaaaccaattat

SEQ ID NO: 41396 - DNA, 589 bp, Arabidopsis thaliana columbia
  unsure (1)..(589): unsure at all n locations
tgagatctgcggttgcaacaagatacagagaacgattgaacaaagtgaggtcaccaagagaacattgatgaaaaatatccaacacacatgagccgatgagtgttccctgccacaaatgttcctccgctgctagaggataagggcttgaaatgccagacacctgagattggttaaggcgcatcgtcataagaaattaacagcaactacatgaacagcaaaaggggatgacgtgaacgcgtgagatggatttaagcacattgctttttgtgatcagaagggtaaaagaacaatcactggtttactcaagaacagtcaaaagactttagagaagcaacttacaagcaagtcacaactagctgtcttcttccaagcctcctaatctggtacctggatcataacttataaacagtcggaactcgtttccgagtttgctagagtgatgaggcttaaacacacaagggcgaacacccaatagctcagctgcatgttctctttgcacctctcctgcaagacgtgagatatccctagttaataatcataagatcatataatttgacttgagaaacanaagtaccattgtactgtgaga

SEQ ID NO: 41397 - DNA, 557 bp, Arabidopsis thaliana columbia
ttgagaaagaggccaaggaccatgctgccttctcttgctcataggctcatagcgtgtacttgataattaactattctaattggtattaatcggataaaacatgtccaactacattctaaacataatactataatagttaacttaaagaggttattggtggtgtactttataatttataaggattttttttttgaatatagaatttattaactttaaaatcaaacatatagaatttacctataatatttaaagcatttgtccaaaaaaaaaattactttcacatttaagcttttgcattattagtttgaaaactgattgacatttgttaaaatttcaatcaaagatgaattaaaatccgtgtaaaaaaccatataaaattaaataaaatattgagtaacgctaacatattaaatttagatatcattaaacaaacaacatattgttttatataaatcacataaaatcattattcaatatcaaattcaagccaataaaatccctaacattagcaacaagagtcatacaaaatatattcctattaatgacgcaataataat

SEQ ID NO: 41398 - DNA, 519 bp, Arabidopsis thaliana columbia
ggagatgatcaagaacaactccgagcttctatggtccacgggaactagtactctgtttaacactgccgtccaggtcagtcaagagaaggtgtttagtctcctctacggtctgggcgacaggaagtacttgtttctcgccgacaaggacagtgacggaaatagtgtgcttcatcttgctggctatcctcctcctaattacaagctcgctacggtcgttagcgcaacgttgcagatgcaacgcgagttacaatggtttaaggttcgctttgtatctctctgctatagatttaatggagtaggcaccttaaatgcataactaaaacggatttctaaaaaatatatagtcttgataatgtaggagatggagagaatcgtgccggcgatcgaaaatgagagagtaaacacagaaaatctgacaccgatcgagatattcagaaaggagcacgaagcaatgcgactagaagccgagaagtggatgaaagatactgcgatgtcttgcagcttagtagcggctctcat

SEQ ID NO: 41399 - DNA, 491 bp, Arabidopsis thaliana columbia
taattaattaaaacgtcctaaccgtggcctaatcaatctaaccatagtctcgtatcatttttcttgtggtgtagagacgcgagggcattgcaagagaaggcagctagataggcaggacaatcaatgggaggagggaaccatgaccatgcccttcgcgttggaggtaaaatcaagaaataagacgatatcatgcaataggggtttttgagatattgtaggtaaatgttattaattggttgatcctccgtgggtcaaattctatatcatggtgagaagttttcaagagttgtgttaagtcttcaagtgtgattcttatcttggcatatgatgttggcttatgaacattttgttatacgtcttatttccaatggaatgtgttgttgatctttctttcttttgtttccgagttatctgctttaaaaataatctggatcagccttgattttctatggtgctggtttagtgatgtgttgttgttccaaatttttgtg

SEQ ID NO: 41400 - DNA, 406 bp, Arabidopsis thaliana columbia
tgaaatgcaagcctattttgttcaccaaaacttgttttcttcattggggaaccaagcaaccgtgagaaatcaatggcatctgaaagaatcatcgaaaaaaccccagaaaattccaagttccacaaacaccaacagaaaaattacccattaatgtccatcttgaagtttcattgtcgccttctgcgttgtgtttccaggtgcttcacgggcatcaccatcagctatccagccacaaaacatggctatacaaaatttgagaaactcgaggaccctctgacaggatataccaacatgaaaaggacaatcatcctcgatcttgatgaaacgttggttcacgcaacaacacatcttccgggagttaaacatgatttcatggtgatggtgaaaatggaaagggagataatgc

SEQ ID NO: 41401 - DNA, 526 bp, Arabidopsis thaliana columbia
  unsure (1)..(526): unsure at all n locations
ggtaagaggtaataataatattaagaaagcaaccagattggtttcgaaccatcgcctctcaattttgttgtttggagacaaagataatttgtttgttgaatggtaagtgatgaacctgtctgcttacacactattatttatataggaacattctctgtaacgagcttgacttgggccagacttccattacatgagcttgacttggcaagtcttccattactttattttaagttaaatcaaagaaaaagccaccaatcaaagttttaggtgtgtgtaaaagccaaaaacacgcaaaaaaaaatataccaaaaggagatactaacaaacaagtatgttgaagtgatgtcgtgataaatgggtttggaattattcagctcatgtggttgacatctttcttaatgccggaacatctttctgttttcttttttcattttttgtcagcattttttgcaaaacttttaagcaatattttgtagaattaatggatcagtntcttatataattgatcgtatgtatcatttttttt

SEQ ID NO: 41402 - DNA, 506 bp, Arabidopsis thaliana columbia
actattgattgatgataaaaagtgggattttatgactattgtcattaatggtgtcgtatcacgaaccccaagagtgttttattggatgacttgattctatcgattaaaatatttgattagtagtagtagactagtagtaactcgttgaattggccggactagtggaatgtttccgtgattcattccttatattttatcaaccagataacttttgcgttttaaattcatttatttgttaaattccttatggttcagaagttagaatctaaactgtctctttccacataagcaaaaggcaattaaagaaaaaaacacattttgcattcatttgggttacataaagctgattaataacttttcttgagctagtggaaatgtcaaagaagaaatcatgatgattacataggaaaacaaagacaaaccgaaattacaggaatcatatttttttttttttttttgggcagcatggattaaggagcttgagcctctttgcaagatgataggtg

SEQ ID NO: 41403 - DNA, 867 bp, Arabidopsis thaliana columbia
ataacccgaagaagaggagatcgggaacgtagacgttgaatcggccggtgaaagctcggagatgttctccgtattgccacattgcgttggcgccgaatccgtggaggaggaggagattaggtttagatcgattcggggatttaggaatccaacaatgcatagctgttgatgcgattgaattgccgtgggagagatctgtcgttacggaacgtagaccggcgtttgcgaatgattgccggaataaccaatctcgcgacgccgtgaagctgaagcatcgcagcagtttcatatgatcaaacatttttgattcgaataattcaaaaatgaaacagaggagaagatacggaggcgtgacgatgacgaagaggaaaaaaacaaacaacgaattcagttatttgtcgagaaattgattgtaaacgtgtcatttatgggtccctccgtgtaatttaaggaattacagtattggacttgggggaaattgtaatttacgtaaaagaccgttaagaaaacaaagaagctaaaaggaccccataaaacttttcagatcaagtaattagaggtagaagttttcatcccaatctgtacacatgtcacaaaaccactaaatgattagtctgttgaaaccggagcaaaacctttcctttttagggttttagataagtgaaaagatagattggtgaacaagagaaatcgagtaacaatcctttttaactcatatgtgttttcggagtctcttctcagcaacctttgccgtcttgttctgtggttcaaggaccaatgcgtgcctgaaatctgcagagatgatcaccataatgttacgtccaatccctactagtgagagtactcatctggatagctagatgaatt

SEQ ID NO: 41404 - DNA, 558 bp, Arabidopsis thaliana columbia
cataatttgaatgaaatcccctaaacttcctagtaaagaaaaaaaccataagaaacttatgttgaccatgtaaattaaacccaaaaagtcaacttcaatcatttccgccttgatatagttttgaatattaggtaattacttctcatcaacattttaaaacagaggaggtagagaggaatcataactcaaacttaaaacataattctttgttagctttttgtgtatgtttcataaatcatcgtttttatgtttgtttgtattttgattaactgattttttgatcctaacttgagattattttcttaattttagattttcttagtttattactttgtttgaggttaaagataatgcttttgttactctttcgattttgttttatggttttatttactgcttcaatcatgctagttttatcttcttttttgtatttgtttttctatgttgtttcggggagataatcatgattctctcttgcttcctgtcaatattatttaaaatatgagaaaaaactctgtttttccaaggaagtcattgacacatacttttgatgtttag

SEQ ID NO: 41405 - DNA, 604 bp, Arabidopsis thaliana columbia
catttagttaaatttactatatattagtaagcaatgaaggggatattagtacaaatctggacatgaaatgtaggcctttatttgattgattgtcttggtataaacatttcatataatagctttgtagatttatacaaccaattaaataattaacactttacatatacagaataacataaaatgtttagatcatatattttgtcattttggatcaatagagaaaaacactcattgttattttcttatttatacttttctgtatcagtctatgtgtaaagtacaagtggacctgccgtgaatggcatagagcccacgctttacttgtaaaagtatattgggctttacggcccacggaccaatttatgttttgccattggttttttttttgtttgttttgttgggagttaacccacacatcttcttcgcaactgttagttgtgtgtgttgttgttgttggcactgtgccactttctctctcgatgaacctctcaagcaagcttcttcgatcttccgagcttagtttcgttctaaatgtaagtttcaagtttttgttcagtaagaagatgatagcctaataatttgtcccgtctatatagtagagatt

SEQ ID NO: 41406 - DNA, 608 bp, Arabidopsis thaliana columbia
cgtctgagttgtaatagttggtgattacaagattaatgagcttaatattaaaaacatggacacaggtaaccggcgaggctgcaaaatacaacatgctactgaagttgaagaggggagaaaaagaggaaaagttcaaggtggaagttcacaagaaccatgaaggtgctcttcatctcaaccacgcggacaacaccatgactagtccctctcctttgtttatgtacttttgagtgtttacttactctgtaagatattttaacttctgatgtaaaactctaaaaccttaaataacaaatcaggagaataaattaagtttcatagagtgcatgcaatctttggttcatacaataaatggaaacaggagaagattttgatgacagaagaagcattttctagacaaactgctaaacgctgctactctatatatcctatagtgctgttatgacttagccttcttcgtcataatcttcctcatcctcgtctatcctcttacccagactagcaagctgtgctggatccattttgcttatgtccacataggccagccgaatactctcagagtctgttgctgcagttgtggttgtggttgtgctgtggtggtgcagttt

SEQ ID NO: 41407 - DNA, 567 bp, Arabidopsis thaliana columbia
agactttttcactaagttatattgctcattatgctaatctaaactcttctccatcaaacgattagtcgccaataatcaaactttaccttgttaattactttatattatcattgttaagtcttttagtttatatactatggtttattgatgattgcctttgtgtagtagtagtattcaattacttttacatggaagtgtttttattctcccttcactttttcacaagcaacttgcttgcttcgtgggtcctttggtctaacccacgtgagtgacgttgtcgagtcgctagatttatcatattcaaattatgttgttgttaactctcccaatataaataagattacaagagattgtaaaattataaatcaacgataccataagtaatcactaatcaggtctgtcattttcttactctctatatacgtttatgtctgattttgttaatttttgaggtaatattttttttttttcgagtttgagatttttttttttctcttttacaaaaacttgtgcaaaaaaattaaaaagaaaaggggaaaaaggagaaaacggatctttttacttggg

SEQ ID NO: 41408 - DNA, 561 bp, Arabidopsis thaliana columbia
aaacaaaacttaatttaagagttaagaccagaacattagtcttataaagtactactatatgagctaattcaaatatgactctgaaaattccttgtcaatatgatattacaatctatgacaactctaaaaccagtgcttaacaaagatcagtcgtcagataaaactttttaattacattaatttttgttgttgctaaattacattatatataaattttcaaatggtatatgtgctaaatcatttggatttaaaagataacagcatttaagtgcatgcacttggttgagacagttgcaaattgcaatggtgtagtattgaactatggcaatggtcgaaacagttcaataattgaaatcgttgacaaaaataatactagtaataaaagtgttgatcaaacataataatgatgggaaaatatcttaaataatcatctcatcgaaactcacaggatgcttctctttatgtcttttttgtctgaagtttgaaaattccaatatattatctgttgtctcatctttttgtgtggctaaatacgttggactggacagtggacacatgaaa

SEQ ID NO: 41409 - DNA, 568 bp, Arabidopsis thaliana columbia
caagaaaggaaaaaagtagatatacatataataatcatataatatgagattagataggttaaccaaatatttcaattaactaatagtggaattgtggttaaggagtcaaatcagatgacatgagcatatattgtatgtatattaaaagaagatttgggaacatttccaaagtaaaaatgaagacaacccctaaaacccaagagaattcgattgggtggtatgacttaatccacacaaaacgtatttacctattactaattgtacttatatgtcaacagttgacttattgttatttatttattcatgtgaatttcctcttattcatttatttcgaatcaccttttatgtcctttttgttatatttttttttttgcaacatttattattaacaccagaccaaaccgtttcagatttttttttcttttttgataaactctatcggctgatccgctcagtcccggtaaacacgcactaaaatacttcagagtggacttctctccaaaaaactaccacacatgtttcaaaattccttgcaagattttgtcaaataatattttttttttttaaa

SEQ ID NO: 41410 - DNA, 585 bp, Arabidopsis thaliana columbia
atcatcagatacttcttcctccttgtaaagtttgagaacaaagctagttggtgcctttttcccacctgcgaattgaatttgatgccatccttcttcattgctgcttttctcgcctcgttctatcatcaactcttcttcttcctcctcacctacttgcattgtaaagtcttctatttcatccatgtcaatgcgaagtgtccagcgcgatgagcctcctgtgtccattgaaaccgctatgactcttcccccttctctttctttgtcgtttatgacacgcagaactggaatatcgtgtttgtcccatccaacctctgcgtccttcttggtcacacaattgtatttagcttcaaaactgacaaaatcaatcttattctctctaccacatctgaacccttctttgatttgctctgcttccatgtttaggtttccaggagtgtttgagaatagtgatataaacgccacttgatcttgcccgcttgtatcacaacatgtactacctacatgtgtacaacatatatcgaaacgctgagtcccataatgtttgaataacttaaaagtagcaacacaacagaaataaaataaaat

SEQ ID NO: 41411 - DNA, 605 bp, Arabidopsis thaliana columbia
gaagagattagacttccaccaatgttaagctcctgtccaattgatacatgatcagaaaaatcttaaaggtttacttaaaaaaaaagagaaggaagaagagataaaacgtaaactgacaatattctcatggtcagcggcaatcttatttgtgcaaagataaacagcgggcagaacatcttctggagagagagcaaacaagctgatggatgaatttacacaaatttaagtaccaattatcattgctgcatcttattcaatagagtgaacgagaaagaaagagagtaggcaaccttctaaacatgttgcaaagcatagacatagctttgatctttcccttttcactttcaacagaagcaaatgttcggacaaggtggatatatggagcaggctgtccctccctccaacaagctgcattttaccaaaacacatattggtgtagatgcacagaaatattgcagctggttgactaaatattcctactacaccgcaaataatttgctgcaaacaaattctctctaatttaaggaaagtttaactgattatggtataacatttataagattgtgcatataaatacaccaacggtgctctttaggttgatattt

SEQ ID NO: 41412 - DNA, 1125 bp, Arabidopsis thaliana
agaactcgaagacattattttttgtgaatgagctgaaaaaagagtcggctattattctgatatctctaagaaatttgttggctgtttctggtactttttaatttttctttttaataaactgatataatagcccaacaaaaattggaaattaaaataaaatagatccaaactgttaaaataaggccggcaacgcaccggccgaagacactagtttctcataagagaaaagttcactaaacgatcttggtaacaaaatttggaagataatgtaagaaaaatttgttagtggaaatttaatctaattagatctttaggaattgaaatatctggatttttctgatgtattttctcactattttaagaccagctgaaagtttttgttttcttctccatatgaaagatttgtctagtctacaaaaatgaaaaaaatgttataagaaaagaaaaaacattatggattataatgaggattaagatatacggatgttaatttagataggtgattataaaaacacagaatctcaaacataaaaattaaaattaaaatgaagaacaaagattatcttcccgtcctgccccacccacgacgtcttcccttctccgttgttcgctttcctacttgacagaattaaatagatatagattggtgaataaaccacaaaagactaaaactttacggatagaaaatcaagcaaacacgaacttgtggcatgctcatgatcgtgatgatgatgatcatggtcgtgtttgtgtcattgctagaggcgagcaaagtttggaatgaaataagaaaaatatttgtttgatgaatctagtagttgagtaaagtaaagattggtatttatagagaaggtagacgtcttggattatggtttagatgatatgagaatatcttggtaagcacgtagaaaatcaaagatactaataaggaaaatggttatcataatgaatgatagtaataactaagcaaaaattaggaaattgagagataacaaacttgatctctagaagattgatagtgattatgtttaagcaacgttagtttctagaatatgtcatagaatatataaagaccatgccattaatttgtttcttatttcagttaattaaacgactcaatatgga

SEQ ID NO: 41413 - DNA, 386 bp, Arabidopsis thaliana columbia
ctcccccgggtacccaaacaaatttagagatcgcttgctaactcctcacctaaatgcacgtgacctgactcatcatgtacacgtggcatcgcattaatggattgtcgtctatctaacgacacagactcgttagcatatcgtcacagaatcattttgaggatccaatctcaagctttcagacccgacagcattgttcacacgatgaaagcattactcaaagacaaagagaagacaaagaactctcatttgatcttaatcataattgcgtaattctaatgatttctaatactagtacattattattttcttccacactttcatttcatgtattcttatctctatcagcaacaaccttaaagttggaaaataacaattttgtgggtctt

SEQ ID NO: 41414 - DNA, 591 bp, Arabidopsis thaliana columbia
aaacccaagaaggaatcgaatttgaacactgcaacacatattacgcagtcaaaacagacacatttataaggaacaattacatttattagccattttgatatttagtttgtagaaatttagagtccttgggcattagaaagagacaaaatatttgggaattcaaatcaataattcagtgttttatatttctagtacgctaaagctaaagataatcacaaacattttggtacttttgttcttcatagtcccatattttattacaaattctaggggttggatccaagatccacatgcttgccaaacataacatatattgatatacaataattattttgaatcatgtaggtgatgcctcccaatggtgaatagaatctcggcggaattgcattgtgttttgtggtgtttgcaaagccttcatgaccttcatatcgactcatgtgagatctgttcgagaagcaggttactgcttgagtttgcctatccttggtttccagtttcagagttgttgagtttttgagcttttaagttgttgttcttatttctctttcatttgtattttcgtttggagttgtacgatcatgacagttgatg

SEQ ID NO: 41415 - DNA, 460 bp, Arabidopsis thaliana columbia
catcctttatacgtaacgtaagccaaaaattatgatctaatcagttactacagattaataataagattaataacggccggtctactaattttgaacacttgtgcatgcattatctctcgttgaaatagtaaattaatgcaactaactttacaagattaatcgaggtatattatagtctagaacaaatatttaaattaatgcaactaactcttgaagattaatcgaggtaacgcatcacactaatcatatttaatcggataatacatatactgttagtaaaataaattaaaaaagatttggtagataaacgacaaaaatgtttttcgtcttgttgttttcgagaagcttctttttccggattaaaaaaacattatgcaattccacgtcatcagcgcattacaaacaatgaaagactacacacgaccttgggccagcattccaaagacccaaccctgactcg

SEQ ID NO: 41416 - DNA, 568 bp, Arabidopsis thaliana columbia
tggacactaagatctgaaaaattaaccgggtttaaaatgggatagaagcaaacgcaaatagagaatttaggtgggcaaaacttacactccttggcgcggaacagatttcattgtccaggactctcatcgtctctgtcagtctagaaagttctaataattagcaatttccttattagaaaccagtgaaatgactatagaatagaatgaagacctttggaattgaaaattggatcccagtccacaagctcgagaatcacggacaaggtagtcaaacctataaatatttgcagacattaaaagttgatgttgtaagataaaggttcaaatttacgcaccatgatgagtgaaaagggaaagaaagaaactgcagacaagtatacaggtaaagaattacttgtccacatcaatcccatttcgaccattagcaacaatatcatacaagaaacgcttctctgcattgccctgcaaattatgaaaaagggaaaatatatacaaagcttaagtagttgttcatgtttgattagagtagagaacatacttgttataaaacttactttcagctgtgaaa

SEQ ID NO: 41417 - DNA, 450 bp, Arabidopsis thaliana columbia
caaaatgcccgattatgttcttgacaatgaaccttttaactctcaacagtactcgtgacaagagtggaaaattgaaaatcagtagcattgcgcgaatgcaaatctcctctgtcacaaataatgacacatactcttccttaaaggaaaaccttaagcatagcacccaaacgatatgtgcaatgcgatcactagcctaggccacttgtcttattgatcacgagttgatcccgtccaggtaagtccctagtactacaaagaattacgaaatatactgaataacgttttattttaatctttttatcttctttaaaagtatccacatgtttttatcgctataaaatacgataatgatatgttttatatgaataaatcaatatggataaaaaaaacaagtggttggaatttggaccctaatcgaataataatgtgtggaaatataatttgttggga

SEQ ID NO: 41418 - DNA, 535 bp, Arabidopsis thaliana columbia
tctaacatggccagaagtggtatttcctcgttctctgaatactctttacctccaatctctttgagctctcagctatgttaactgtacatactgagtgaagattatcctttttattactaagtaaataatcaaaaaccagcgcatccactatatttatgtaagagcatttgatatgcaggttaaacatatagactgtaaaactataaaaatccaagagctagactcggttactgcaagatataaattcaactcaatgatgagaggtatatcactctctttatcaactattagtgtattgtgtggattttagagagaagttagcattgcttcctttctgtgttgaggctttttcttttcttgttgtagctccaatgcatggttttgcattttggttcgacgttgaattcagcggaccggcctcttcacctgccaagaatactagtgaaaccagtattgctagtggttcttcgtcgataagtccttctggagaagtaaatcagaagaagcggactaatccgagtgatgcacttgtgtt

SEQ ID NO: 41419 - DNA, 274 bp, Arabidopsis thaliana columbia
  unsure (1)..(274): unsure at all n locations
tcgactctagacctaaaatattcatgaaaaaaaactcatngggtcacaaatctcaaataagaaacgatgggtggtcaaaagaaaaaaactaaaaagattattgcttccccgagaaattgggataaaaagaagcaacaccgatcacaacgtctccctataccatctccttcagatccacacactctctcttatatctctccggcgaaaactttccgatcaccgacaaaaaaaaaaaatggttgcagacgcaaacggttcatcatcaagctcattt

SEQ ID NO: 41420 - DNA, 569 bp, Arabidopsis thaliana columbia
catacacatttttagattgaaaaactgaaaggtggaagggcgcgttaaattacatcgaaatttacatggaagggctcatctatatcctctgaggtagtatgtgctgatagaaagaaaagaaaaaagatgttatttagttgtgtagtaataacaagatttaaaaacaatcaaagaacttacttgtgctaggttcttgtctctcttcttgtacagtatcaccaggagccttatagttcatgctctcccggtctgaatcttttttctgagttgactgtgaaggtttctgatcccgattctgcaacgatatttacaggtaaggaatcacaaaccaaggaacatatagcaagtaggatcttgattttctgattaagtaccatagcggggatatctggagtcgatttcttttgttgatcaggaatgtttacagtttccttggcattagaaccatcatgaatgatatcagtcttgggagtttctttagctctccatctagagctttgccaagagattcccacctgctccaactgaagccctttactgaaaacttaacgaagcactcacttttcctt

SEQ ID NO: 41421 - DNA, 576 bp, Arabidopsis thaliana columbia
ccaaattacgttgaattgtatgaaatctaattgaacaagccaaccacgacgacgactaacgttgcctggattgactcggtttaagttaaccactaaaaaaacggagctgtcatgtaacacgcggatcgagcaggtcacagtcatgaagccatcaaagcaaaagaactaatccaagggctgagatgattaattagtttaaaaattagttaacacgagggaaaaggctgtctgacagccaggtcacgttatctttacctgtggtcgaaatgattcgtgtctgtcgattttaattatttttttgaaaggccgaaaataaagttgtaagagataaacccgcctatataaattcatatattttcctctccgctttgaattgtctcgttgtcctcctcactttcatcagccgttttgaatctccggcgacttgacagagaagaacaaggaagaagactaagagagaaagtaagagataatccaggagattcattctccgttttgaatcttcctcaatctcatcttcttccgctctttctttccaaggtaataggaactttctggatctactttatttgctgg

SEQ ID NO: 41422 - DNA, 558 bp, Arabidopsis thaliana columbia
cccgtcttcttgagctgcaaagatgttctggcgaatggctggattatcaacggcgtctgccgtgagttttcttctccctcaccttttcttttaacggcgtctgccgtgagttttgggagaataagtcactccattgagatgagagttttagctgtttgtttgaatcctgtacacgtttcttattgatggatttagctattagtgtttcatttctggggattttggcagcttcctctgtttttatagacgaatatgttggaaggtgaagagattatatatcttgaccagtaatgaagtgtcttcttgatgatatatgaacactgtcttactggaaagtgggagactatcccttgttgtcgaagggattgattgtttttttgaattctgcatttcatagacaagggaggtgagatgtatagagtgacgagaacttttttgatgtgattagagaatgtttttagttgatggaaatcctcattcttcgccaatattctagtgatacccagaatcacaaaagaacacaaaatatgcatggatatgtgttaatgaataatctga

SEQ ID NO: 41423 - DNA, 562 bp, Arabidopsis thaliana
atcccccattacattatatatacacacaatactattgtgtgtataaacaaatacaatcacatacaaatatatataaatacttagacatataaaccaaacccaccaaacactctttgatacttctctccatatatacatatacgacctcttgtgttcttgaaatacagagagcaaataaaaaacggaggatcatgacaagtgttcttgaggagagtggagaccacgcgcgtcttgttctcctcatcaagggcaaacgcaccaaacgtcagcgttctgcgtctcctcttatgatgaacgctgctgcagtatccagcgtttgtagcggtgaacgatcatcagtggaggtaagagaagaagaagctgctggtgaagtagaattccaaggagctaccgatgaagacgaagatatggcgaattgtctgatcttgttgtcgcaaggacatcaagcaaagagcagcgacgatcatttgtcgatgcagagaatgggtttctttagcaacaagaaaccggtggcttctctagggttagggctagacggtgtttccagtgcaaaacgtgtgat

SEQ ID NO: 41424 - DNA, 539 bp, Arabidopsis thaliana columbia
aacaaaggtgtcaaatttgaaaacctttgcgcatgtcataatagatgtcatgctcttttggtgtttttcttttacctttcgacgttggttagtgaaaagctcttctcttttctggtatttttgttgaatttccctagccttgtttccacctaacccccatgcttcaatatctagaaccaaagcctctactggtaaataaccctgtagaaatcatatttagcaagagatgttattaagatccaagagcacaaaatttgacatgcatgatatactcattttgttcctttatggtgttgtggctttacctggtttgggaaaagagagcctgactggtaagttttatcaactgcatgatgacggactgtgattttagcaaagtcttcatcaatgaaaattctctcatttccaagtgttccccgaatccaattccaacaggcttgggatgtgcgtcgtacactccgcagcagggtgcagatggctatacgcaaagtttttctccttacatgaagattgttacacataagtatgaaagactggac

SEQ ID NO: 41425 - DNA, 556 bp, Arabidopsis thaliana columbia
gacaacaatccctcctgcttgccaaggtaaaatcaaaataccattaagatactaaaaaccggtagactagtaggatcccaatatgaagtatgaagtaaaaaaggcttacgttttgctgttctgtaagtgcagctttgaggaactgagatggagacagaccgttctagcagacttcactcgaacttgtcctgcaactgatctgaagtcttacaatatgtcttatgttccgatccaaataaattacaaactcgcagtaataatcgcagcttgtgtatatagaagaaccttgttgtatacatttaacaaaaactttaagaaactgttttagctaaaccaactatcctactttcttgactataaaaaaaactaactcatcatgatttcccgcggagaacccggatcaattctgcaacacaaaaagagagaattgttcgcttatcatgatgaatattgtaggccctcttcccggatgtacttattaattccggttacacattattgatcaagtgaggtgcgttgctgcaaaatgtataaatttgtgtggtaataatggagg

SEQ ID NO: 41426 - DNA, 488 bp, Arabidopsis thaliana columbia
gaaaagggccatgctatcttcagccgaaagttgtcaatgatgaggaagagacacacaatttacacaagatcaactaatgggtattccctcagaaaatctaaggtattaagtgttggtgggtcgcatttaaaatggtccaagtccattgagagagactcgagaaaagctaatgaggttagtttcctcagtgtcttaggcctaagtctataaataattgctcctttaggactattgaatgtggtgtcgacaataaatgtatctctttcatatttgtacaggaggccacattggctgtggctgcatactcagagaaagaaagtgaaaagcaatctggacaaaataatactagtacggcgagcgagaaaccatctggcgacagtaagttggttcactgatatccatgacctatttggtacccttcttctgaatttatggtcttgccatttttgagatggccggatgactctgtttccagcaaacctcgagtt

SEQ ID NO: 41427 - DNA, 560 bp, Arabidopsis thaliana columbia
tcactatatgataagagcacgtttgttacattagtctcaaaagtgaagatatacgattaatttatatatagtctgttacattttgtgataaaattgttattgaaattattaactggctatggatcacaggttttaaaagtcgattattttggtgcagacaaaaaaaaaacgcgtcccgtcgacgtttggcaagaatgatgcaaaaaatacctgaaacttcgttcgaattgtcgccacagtttccttcagaaacaagtcaacttaatcgcttgtgttcgacacgtgccgtatcaacgactccattgacttttcccaaaacattacgtacacaattgtattcttcaagttactactttcataattctgttcaaactaaggttctaatttcgtgaatgcatgcgtattataacaaattgcacttgttgacaaaactttgtataacaaaaaaagacatccgtgaaatttctaaggcctgagagcctttctcttctttctttctttttcggaaaacaaaaagtatttgaacaaagcgaatatgaagatgtcttttgtagtggaga

SEQ ID NO: 41428 - DNA, 1138 bp, Arabidopsis thaliana
agcaaaagtaatcttgaccatgggagatgaacataggtttccccagttagatgaatgttaattcactgctaaagtgctaatttaatgttcaatccgaaccaggactaggttgctaattggttagacaggacattgacattccatgtttgtgtatatgtgtctgctcttgtccctctttaattatcaaaaagagttgtgctagtcatgatcgtttatctgatggattattattcacctctgcagcaaggactttgtgatgcatgttggaggctctgtttgggcaatggagtggtgtcccagagttcatgggaatccagatgctcaagctaaatgtgaggtgattaggtcatatttttttgtttcattactccgtagaaatgggaatcttaggttttcattgttgtgaactttactgttgcagtttctagctgtggctactcatccgcctgactcatacagtcacaagattggtatcctcttataggtcgaggcatcattcagatatggtgcattataaatgccacttgcaagaaagatagcggccaagtttcagataagggtaaaaaattgacaggaaagtctcgaaaacaaccatctggtgaaactactgaaacaacagaacctaagaagccgagagcgaggcccagaaagcatccagtagagacaacagagcctaagaaaccaagaggtagacctagaaagaagagtactgccgagttacctgttgagcttgatgatgacgttctgtacgttgaagctctgtctgttcggtatccagaaaattcagttgttcccgcaactcctcttcggatactacgagaaactccagtaacagaaactaaggtcaacaatgaaggttcaggacaagtgttgtcttcggacaatgcaaatatcaagcttccagtacggagaaagagacaaaaaaccaaaagtactgaagaaagttgcacacccatgatattagaatatagtgaagctgttggaaatgtaccgagcaaaccgtcctctggtatttctgaagacatagtagctcttccaagggttgtcttatgcatggccacaatggaaaagttgtctgggatatgagatggcgtccctcatatgcgggtgatctcttaataagcatagtatgggatat

SEQ ID NO: 41429 - DNA, 525 bp, Arabidopsis thaliana columbia
agtataacataaaattcccaattccgagaaaacttggaaactatcagcaatcgcgtaaaggaatgatttttatcatcggaggcaaattggtattgcttcttctattcaatcttcatttcactgcgtaatttccccggaaaccaaaaccggaaaagtgaaaagaagaaatgagctaattaatacaatacctgggtgttgaagagctgagagctgaggagtgacggtgaagtgaaggatatagagagtgagagaagagacgaggacgaggacgagaagccatgagacgaaaataacggagaagataagagtgttgtctctgaactagagccatggaggagttgatggtgacagtcaaagacatgttttcttctgcttcaaacaagttttacgggtactcatgtcgggccgggttactcaaaccacccggcccaaagttcttgtacttcaattaaataaattccgattatgatttgcagccaaaaaaaaccattaaggatttttcattttcgatgtctctgaattttg

SEQ ID NO: 41430 - DNA, 572 bp, Arabidopsis thaliana
tagtaacgtgccgccagtgtgctctaaagcgatggcggcatgcgctttcgcaatggcctctgtctctgctcgcacagtatcaaaagactcccgaagagatcccgtctcgtgtgctccgagaggcttgcggcagagtgtaaggagcttccgtgcatactcatcttcgatcgcggcgcggactagcagctgtcagaacgacgggttcgcgagtcagacctaggcatgggtgacgaactattgtaccaagtcttcaattcatcgcaagagagcttagctgcttgcatgcgctctagcatgggcgcaacgccggcatcatcctttccccagaaattattggcaactacgtcgatcttgttagtaggtagatcctggtagaggcctgggggctactcacaagatagggcaaccgtgggcccttcagaaaccgtacccggcatcgtgatataatgtcttgaagttattgagctttggccagcctttgctcatttagttaccgtgagacaggctggacgggtcagccagaatgtagattagcaacgcttagcagggcagaaaggttgagtaaatagaca

SEQ ID NO: 41431 - DNA, 367 bp, Arabidopsis thaliana columbia
ccaaaggtagacatttatttttgcattgattttagaagaaaaaaaaaagtttccatattttgttctctttatcttattttggtgatttagttttgatacaactttctcattttgtgcaaggaattccacaagaaataaaggagcaacaatgacgttatactatgtggaggacgacgaaatcaatcaggagatgtatctcaatgatagttatgaagaatggtggcatgaaaaatactctgaatcagagtttgaggaagaactacgctgtgaagtaccagaaccagaaccgcctgactcatacaacaccaataaaggctattctaaaccatggattaaatttgatgatgatttttgcaagcatggttcg

SEQ ID NO: 41432 - DNA, 637 bp, Arabidopsis thaliana columbia
ttcagatcgtgggccgaggaggaagcaaagaaagctagagaacaagggagggccttagaagaagctagaaagcgatgggaaacaaatggactgagagttgttgttgacaaagaccttcaagagacgagcagcagagagacagaacaaagcatagtactaaacgagatggagagatcctcagttgaagaaactgagaggagagccaaaaccctgatggataagctgaaggagatggctggaaccgtgagtggaaagtcccgggaagtgatcttcactgtgatggagaaaatacgtttatggattacagttttgaaggaatatgcagtgaatttagggaagcgagctggggaaatgagagatgcagccattgtgagggcaaaaggagcagcagcagatgttgagcaagggacagttcaggtgagcgataaggtgaagaaaatggctgaggagtgtagagatggagttgggaagatctctcagaggttcaagacctagagtaacagtcttttaacttttgtgtatcttgtttctacatgataacaataacagagaataatgggatggccattacatttacagtattggtcagtgatgttcagattcataattgtacattttgtaacattgttatgtgggg

SEQ ID NO: 41433 - DNA, 160 bp, Arabidopsis thaliana columbia
gttagcaaccgaaacaaacccaaaaccaaatttgatctaaacccaaaccaactgacatctagcaataagatcagaacatcaaaagaacattcaaaattcaaagtcgagaataagaagatgcaacatctttgttagtcgattcatcgctacataggcattc

SEQ ID NO: 41434 - DNA, 449 bp, Arabidopsis thaliana columbia
attgattcaatgcttttgtttttatgttatggatttttgcattaatagtttatccttcaaacaatttttctataaaaggagctggcttcttgatatatgtatgcatcattggttacgaatcaacgtgttagggaaagcacagattgacgagtaaaatccattacttgggaacaagtttatatttgcatagaacatacaaaaatgttaacaatctatgagtgaagtttatgtaaattttcctagactgaccttttgagtgaaactactctatgcccgttacaaactaacagtacggggttacattagccttgtcgacacacgaaggcctcttcgctttatagtagaaatgcgcaatcatatgaaccaattcatccgccgtgcgaaagtctgcatcaagttcaatacgctatgataacctattgctcacacatattgcaaaaaaacatgaa

SEQ ID NO: 41435 - DNA, 575 bp, Arabidopsis thaliana columbia
tgctaattcacacagaagaatgcgcgcaattaagttttggaagctttggaggttttggatcaaggcctttgagcaacagcgtagaagcgacttctgatgtagctccacaaatcgaacattcagatgcaaggtatatttcgtgtttactgattactttttccaaactttttatggacttcatttatatcatacttaccaactgatcatacttgtttgcagaaatactgagttctatggagatgaacatctgggaagtacaaccaatggaaatatggtccacacacctgctactggaaattatgatgattctttagaaacgaggcgagaggtgttgaagcaagaaaactctgagggcgctcaggagcaccagtacacatttacccagtctgagcaagggtatgcgtatgaaaatgctaagcagcagcagatgaattctgcatatgatgcctcacacacaaattcacagaatcagatgcataatcttgattcattatcaaatgtgatggtaagctacatgtttattttttataacagaaccatgtttcaatgggttttgaaaatcatagttgtttgtg

SEQ ID NO: 41436 - DNA, 501 bp, Arabidopsis thaliana columbia
tgaatagagttctgacagaagatggggtccgtctataaatgtcccatctctccttttgtagcgcgcatctctcgggggacttgtattttctgtctggcccaatgcttctctctctctctacctctctcacatgcaaatcagcaatgacaacagtctaaagtctttcctttctttttctgtttttgtcaacaagtgaaacactaaaccaaacgtcttttcttcttctgttttcttataatatgttttgtattttcggtgtgtgattagtgatctttggatggtataagaagtctgtgctttgtagtttttatgaatcgggtaagagagagataccaaagtggaaaaaatagacagttaaaccattgtatggctatttaaatttaacttggtaatttgttagtttttgaggcaaaaaaaaagattccgcttgtagtgcgtagggtagttgatgatcaggatcttaggacataaactcgcataagttctaggttaggtttgatt

SEQ ID NO: 41437 - DNA, 590 bp, Arabidopsis thaliana columbia
cacactagtagtcttccttgattttctttagattacacgttacacagattttgatgcaccaatcattgtaacttcactcatctcttggagatcctgtttatttatgctacttattcttggcttcatcattcaaaaaggacatgctgcacttcccaattttagaaagtttgggatcggttttgcatagactaaatcccaaatgaaaaagcatatatacatacatatccttgtcgtcgaaaacaatgctctactcttaagaactaagaagagagataatacattttacatgaactagtccgagtacaaaaatatttggcatgagatccaacatgtcaatagcttcagttttaaattatacatttcttataccaggaagagtgaaccaaaaagacaaaaaaacataaagacagacaaaaaaaacacatatctttggttggataaatataactagaagatggatggagcctggttttaaagtttcttaggtaaagtgataccacaccacggatagaaacagaaggggtttcagagaggaggcctgctgacagattggtgtcaggaagaggcgacacagtgatgtcgcatggaaa

SEQ ID NO: 41438 - DNA, 337 bp, Arabidopsis thaliana columbia
taactgatttaatgagcaatcgtcagtcatcgccaaagcttatggacttaaccgtgacagagtctagagcagcttccacgtcgtcttgctctgcgaacggacaggagaatgatacacccattcaacagatcccaaatcggaacctgagaagtgaaaaaacatcaggattctgttataaagagaacaaaacgcgttttgaagaaagaaacgtaaaaatcagaacatttcggatctggaaaacagagtatcccggaattattaattcgtttggtgaaacacattttctccggtatttttaaacccagtagagaatacacattttgaagttttaacttaa

SEQ ID NO: 41439 - DNA, 650 bp, Arabidopsis thaliana columbia
cccatataatagagatgtatgttatgacccaaaaacgtaccaccaaattacttgacgtagagagatccgttgcttaaaaaagtatgacttatgtgcgagagtctgagagagacagagacataaaggcattgattggaacgtcgttgactgagaacacacattgtgttgtgatgactgatgacttgaaattcgaaaaagttagttaagtggggagagagagaaagagagctcaacctcaattgtgggttttgaaacccaatgtaactaacctactaataagagttgctgcagtgcaatccaatgcatgtgtgagatcactggcgcgtgagaatcacactgacccaatcgctacgtgtggattttgtgtgtaaatggagatgtcagagagggttgaaaggaagagaacgtgcaaatgcaataatacgatttcttctgactactacttttgatttacaaaagaaaaaggagtatttacatatattgagggtgcgggccgtataactaactcttatcgacgtcattatttttaacattcatcatttgcagctttatgtttttatcaatttaaccaagtgttttgaaaataataaaaattgatccttgagtgtatatatatgataataaaagacaactttactgcgataagactt

SEQ ID NO: 41440 - DNA, 527 bp, Arabidopsis thaliana columbia
tttttatctcacgcactaatcattttatacataagaaataaatgggttaatccgaattttgcatgcatcattcacagctttggatttttttctatatgaacccgagtttcatctttttttttcttcaaccaccttgtcaatatttattgatcatgttcgcgtattattctctcatagtcccataccacccacgcatacatgatccttatacaaaacaatgtaccataaccacaccctattgtgcctcaacctaatcaaaaatctcaatctatttcttaactttggttgcctagttgtaaaattctcgatcagcaatatctgcatcataattcaaaacttagattaattgtttagcgctacgtggtttttaaattagaggaatctctttacctcatcgcttaatttatcatttttgggacgaacttgctgatatttgtttcactcatactctcagtttaacatgcctaagcaacacaataattcatttaggtaaggctaattgtgctttggctcacacccctagtata

SEQ ID NO: 41441 - DNA, 627 bp, Arabidopsis thaliana columbia
ctccgccgtgtccttccactgtaacagtgcgacggaatcctccgaggagagctagagcaacgccgtttactactacaactaagccacctctctcctctttagcctgcgcgaaaccccacgacgttcctacttttccgatcgacgagattctctctatccaaatcccacaatccgaaccaaaaccagcgattgcagagagtttgaagattttcctgagaatcaaaccattgagaactttcaccaaggttacgaccaccacgaagagcagacctagaaatgtgtggccacagaatccttcgaagaagaacaacgcgaaagagaatagaaatccggagattacgaagaaggttaggaagaaggacgaagaagcttgtattactctcaacgattcttattcagttacgttaactccgcctcaatcgttgcaagagctgaaacgaagtaagactgaggtatacgaagggttttctcatgttttcccggcggattgttctcaggttcgatgaaatttctcatcgattttactacctttttggttgaatttgagattagatcagagttgatgagtttgattttgctgtctgtagaacgatgtgtatgataaaatgggttcacatttgttggagg

SEQ ID NO: 41442 - DNA, 506 bp, Arabidopsis thaliana columbia
gtttccacgttgaaaaattgggatcaatgatccagatagtttgtttttagggataacgaatccagatttggcaccaaacattgagatcttcgcagcggaagtagaagtcatctcttcgactaaacgtagcggcggagttttccgttcgacctaagaattacgtcgtcgattagcgacggctctcgtcgttaagggtttgagagaaataccgtagagctctttgtattttttcctctgttaccccttatttactatgcgattttacgctgaacaaaatgatgtgaaacgatgatagacaaactactttgttagtggtccctaccttaaatactcataaaattccaatggcacttatatctgagacgaatttgatctgaaatccacatttgaatgtcgtttaggttctattcgattgattctttctgttttataattaagtatgtggaaacatgtcaaaacaatcaccaactttcaaatttggggcaatttaagcttggatttgaaat

SEQ ID NO: 41443 - DNA, 624 bp, Arabidopsis thaliana columbia
cattataaatgtgatatctccaagttactttgaatgaataacgtacacctaagaaatgatagtaccacatcttcgccataaggcacaagaattaacgtgggagttgacatggcatgccttgaaccgttgatgtagacttcacaatatctgatgataatctccaaacataacctcagccttaaaaacctgtgagaactcctcaccacctcacaaactaatctctcattgtaatttttgttatctatagttttttagatgaattttgttgggaattgtcgatttctcttatgctcggattgctaaataattttttttattttttttaatggtttgattctataattctgagaggtttttatcatatggtttagtcttttttggcattttatctgaaaatattatcatcatccacgtggcaaatcctcgtcagccggctcacgagaacctcaattatccaatctttgtatgtcacttgagtctctatatatcaaaccaccgaaaagcacgattgtttatcgtagtgcgttacaagcgttttaagctctcactagcaagcaagtactagcaacaatggcgtcaagactgcgactatgctcaaacctcaccggtgaaacctgattgggt

SEQ ID NO: 41444 - DNA, 493 bp, Arabidopsis thaliana columbia
gggtaccgagctcttgtattgaagaagtgctttctttgacgtagtatagtgatattaacagattaagatgcattaatactttatatgaaatttcattataatgaaataagaagccaaaatccgtattaaagcactcttagtcttacttagaatgttcacaaagcatgttctggttcaagaagcaaaccaagttgactttttcttttgttgttgttgtcgttaaagttgacttgtgatcgattattgaagataatcagcttgtggttaagtcctgttttaagttttaacatttagttaggagtggataaggtttgagtgaggatttaacacagaagctaataggatgtgtgataatgatcttctccataaaacagagaagcaaggtagcaacaaaatcgaagatttaaggataaaaaagcagagtgtgatacacaagaattaaaatccaaaagatgacaaagataaaaagtttcttcaagctatgaagaaagat

SEQ ID NO: 41445 - DNA, 498 bp, Arabidopsis thaliana columbia
gcccaggtaaaccggcgccgattccgaaccgtcgcgtcaccggagaagtaatccaatccgtcaattgctgctcctgcaatgtgaccaccgccgttggttgtggattctccgtgaatgtgacgcttagcgactgcgatagaagactctgtttcggatgttgggatggagagacgaaacggtggtgagaaggaaccgtcgcagtgaagagagtcgccattgtcaaagatttttcgtaaaagcaaagttttttaaaatattatattattttgattcatatatcccaataataaagatcagccttatcttgttcgtgtgatgaataaagacagagctcaatgattttttttaatatatgttttcggtcaacgtttcgacgagtttgtcaattgttttttctttctctctttggacagtttcaatattggaaaacaaaatagaggaaattacgcatgaacatgaacatcgcttgcaagcaaagacaacaaaacacacgagcac

SEQ ID NO: 41446 - DNA, 1029 bp, Arabidopsis thaliana columbia
catatagtatacagttggtaaaggggaaacacgcgtaatctatatgtatatattaataatatatagttcttggtatgatcttcttagttatttatttactaagctttctagactttaacaatatttgaatgaaaaaaaaatttaattaaccgtcgaaaaaaaagtcataaatctggacgcagaatactaatccacagatttcaacggtcaacattccaattcagttcacaaacctaaatcaaacgttccatttcataccttttttctctttcaagcttatacaacctttgaccatgtctcactttattaataagtacaaaaccaccttacattacatgcatatatataaataaaacacgttaaggaacatatatttatacaaatcccataaaccccatttcattcttcatcgaatagtcgaaaaatatttgaactttcttaggaaaccaaaccaacaaaacaaaaaggaaaacgagataatggtgttaccttggagatcaagaggaggagtagcaaagagacgtaatcaattgatttccggcgatatctccgtcgtggaaaccaagattccagttcaactccgatcgccatcaaggatagagcggattcagtcaccgcgcgtgctgttgacgccgcgtgatgcggtggagataagtcggagattgcaaaacgcagcggcgcgtgaggagtatgccgagtgtttggagattgtgagcaaaatcaagaacttgggaagaggaggggacacgaacaagaagtgtttggtccaaaacggaagcgttttggctttgtcttcttgttttgaaagattcgcggcggcgcgtgatggacacatgcgtttattggaggaaatcttgtttgttctatcatcttggttgcctctgaatcgatcagaaggtttcaacaagatgggatcaacggcttctcttaactgtctcgtacggttcttgaacggtaaggacgctaaaacgagacaaaacgctgcgttttgcatcagagaggttattgcagtagacaagaggtatgtgg

SEQ ID NO: 41447 - DNA, 526 bp, Arabidopsis thaliana columbia
tgtttggcttaatgattgagatgctgtgaggtaccacttgttatattatgctagatttgatttgttattggtaggtgatcaacatttgatcatactgtaaacagtcagaatactctgttatatgctctattatggtatcaccgtatcagcttaaacacccggctgaatgagttggactggttcacatcagcgtggcaaacacaagttctacggtgatccccgccgcaccattctgcttctagaatcacatgacgtcgatgctatcttgctcttctgtgcttgtgcgaaactccgataaaacctttgctgctttggagagaggcgagcagcgagattcaacacaagggtctaaagtagcaaccggcttttctagttgtgcgtagaagtcaaatgcttggaaattttaggtatatctactttcttctctgaaacttgttgtttccatggtttcttaggaatgttaatgcaagatttgcagaggttatgcttagtgttcaagtttgtgtctcggttcgttaacttgaat

SEQ ID NO: 41448 - DNA, 566 bp, Arabidopsis thaliana columbia
tacccataaatccaccgaaccctcgttaacatttattatcaatcaagaacacaaaagagaagcactctactaatttgagaaagcgctttatgcttatctcggtttcatgaatgacagttgttgtttatatggtcaaagttaaaagggtctgcttcattcttcaccatcttttgtagagacaacaagatgatgcctgctctaacaaacaagcatgtgccaaaaaataatcatctgtgctcttctatacacactaatcttgtaaaactcatcaaggctcaaagcataaatcgatgtgtcattattatctgcaaatccgagctttggccaactgcttataacagaatgaaccaaaccaattataaattgtggtttagcatgtgattatgtaaatagaaatatgaaaaatcttttctatataaaaatgtaactattctcataaaatctatttaaaaataaaaaaacgaattttattttgttttcctattttttcgtcgagaaaaacttcataaataacgaggcctatattggcccacaatattatataacatgctaacaaaataaataac

SEQ ID NO: 41449 - DNA, 444 bp, Arabidopsis thaliana columbia
atctgaagtagtgaagtgtaagtaagcatatttgtttggagtgaagatgtccccagatcaagaatcatgaatgatatttgttcagtaaagttaatcttcagagcattttgcgtttagctagacaaggatgcatagaattgcgtagttcttaaggtgattagtgatattggaagcaagaaacccattgatgatatgtgcatgattataaaatataggtaatgcaggggttgaatagattagcatggtggagaccatcttgtttagttgtagaaagttgtctagcagctctggagaggtttcaggaactatgtcatggtatagaattctagttatgcggaaagatttttgcagatagttgatgttatattcagtggtaggatacgagattctggagctgcgtcaagatgaatgaacataagcgtcttttggtcataccaaggtgga

SEQ ID NO: 41450 - DNA, 536 bp, Arabidopsis thaliana columbia
tctctattacggcatgtataagacactagaaccaacactcaagaaccattctcttttcaattacacatccaaaaacaggcttaaacccttaataacccattgatgaaaagggatacaatacaatctcctcagtaacaaagatcgaaagaacaatgccgttattacggaaaccctcaaaacgtatgacgaaaaagctaacgcccaaattttgagtactagttcaaaagaaatgggtaccgttttaagtagaggcaagatctagagtacgatctataaactcaaccggcgatgaagttttttaagaagtttgaaacctgagttctctatttgtagctttgtgacacctctaaaacgagcttgtccatgaactggtatttcttatcaaatccccaacctggattactctgcattgccaaaagtatttcagaaaaacatcaatacctctctagagatatctgatagaaagagagtaatgttagatgaagagtttgagtgtttagttaaagagatcaaaccttaagagtaagagctgcacg

SEQ ID NO: 41451 - DNA, 511 bp, Arabidopsis thaliana columbia
gattagatgtcaaacccgaaataccaaaagaaaattagatgtcgtcaaatctaaaatactaaaatacgtagagaattcgccgtgcaagatatattcttctggatacatgcatggatggctttcacattcgtcatgtaactaagcaaaagtctaaccacgtgggaaatattttgactaagtttatccattttttatcctaagaatcgacttgttcagacagaatcacggttatgcatttattgtctgaacaacttcacataacgccggtcaatatctcatgtttgaatcattctttttatactaggttctactataattcctcaattaatgtcaatgcaattgacatttatactagtataatctatatgttgaattactccgatttcttctagtactcataataaattaacgtaaagctaaattatccgtaatcattaactgaaataatgtattgtgaattgtgaaaaagaatggacaaatagaaaaacgcaaaaatatgaacaaatagatg

SEQ ID NO: 41452 - DNA, 722 bp, Arabidopsis thaliana columbia
ctaaatatctatcacactgcgcaaaacgaaacgctcaagccctcaagtttatcttcctcagccgtgtagttcaaatcccggcacaaaggtctgtcgtcgcttccccgagaaaaggtaaacgaatctttcaccaacgattaaccgtttctaaatattaaatctggttatctttgatctgtcttttttttgattctatgaacaatttctgttactagtaatcacacattttcgggaggagtgttcttagatttattttcattttcaaacgaaatttgcgattgtgtgttttcgagttttcagatccgtagctttcttcgacgaaattatatatgtatgtatggcttccgattttgtcagtttgtgtctagaaaacgcgttatgtttttgtcatgatgcatgtaatggacattactttggctattgctcataaaataaatcgatgtttttcaattctgtttcttcgtggagtcacacatatatatatatggaggcttatctgtctaaatccgataattagtcgtagaaatatcgttgtgtagattttacttggcaaagaagtcatcttttgtcctttttctcagtaaatcaggtcaaaaattctcacattgttgaaaactcaggggtcacacttaaacttgtcgaaaccaaacaacaatggaagatgacaaggatatatcacaaaagatggactcttgacattacaagaaaccagctacaagaat

SEQ ID NO: 41453 - DNA, 340 bp, Arabidopsis thaliana columbia
catctagaggatcacaaacaaaaaaaattccctttttataagcccaactaaaatgtgtctattttagagtttctggcccaaaatatgcttatatctataaaagcccccaaaaattttaggggccataacaaatgcttcatctggttatgctcatgaccggtcctgtttacatgctatgtaatatatgaactagtgtgcacgttgacggacttccctaagtatcgatacactttttccaagtcatacataatagagaacactggaaaacaagttagctcatacaacaaaccgaagtttgtaagtatttcatgataagtttaccataatttttctccgacga

SEQ ID NO: 41454 - DNA, 518 bp, Arabidopsis thaliana columbia
ttttgggttttcgggtttttagttttttgaggttgatctggtggtgtgatcataagttatataattggaagatcatcaaaatgtggtgaaagtttggatatttttttgaaagcctcttggttggctagagggtttcaagtttttttttttttttttgcagccgaaatgtagagagagggagagatctgagttgagatttcatatggatactgatcattattctttcttaagtacataaaacacacaatgtatgcatacatagatccaaaaatccgtagacattgatcacaaaatgtttcaagttgcattttgaaatattcttatcattctttctctgcttcttcacaacaaactccatagatcatatttatatcaagcttccattaacaaccaaaagtcggggtttatttacaaacgcggtaaggacggattctcagttggttgattcgatgtttactcccggtcttggtgttgatgacgactgatagtgttactgaaatggctgatccaccactgaa

SEQ ID NO: 41455 - DNA, 577 bp, Arabidopsis thaliana columbia
gccactaaaaaaataaatacgtcgcctgacagattcgaactctcgcggggaaaccccatgtacttagcaggaacacgccttaaccactcggccaaagcgacttttgatgtttttacacgttattagatatttaaatgtgactactttgctatacatttgtttgtcaactgccctcatatatcaaagattagaatacatcatacgagattacaataaacaaatgtaccgtatataacttatatagtatcgcagattcgatgtttggcaattacttggtgactacatccaacgttgttcgtttgaatatcacgatgatcaatgatagaaaaaaagattacgttttaaaatatggtaattaagagcgaccgctagaaaacgaacaatagaaaatgttgtatataatttgattacttgttgcagttgtcaaacgaacaaatctgtgatttttttgatctaatagaggtatagcaaagtagttatcattcacacatatgcatacttattataatcaaacaatattatcctagcaaagccaattagtaagtcaaagacttgtaataaactcaaagaatagaga

SEQ ID NO: 41456 - DNA, 609 bp, Arabidopsis thaliana columbia
cctgatctttctctctctctctctctcttcagttttttgttcatctgaaaaaaaccttttgacttttccattataatttttcaatttaagcttcaacaagagaaaaatggcatttggtgttattgtaatctgttgtcaatcattcttcttaaaaggtttctttcatgcttgtctgttctagtttcccttctttatcctcatttcctcttcctttgacttcgttccccgataaaggccttacaaggtgatcccatggaaagtttttatctggttgtttcatctctgccctgctctcctctcttcaattacttcttccaaaggacttagccacacgtcgtgtttccagatatttcctgtttgtttttgtttcttgttgcgtaccagtctcttgcagtctaaatgggggtctgttgtagcaagggcacagggataattgtggagcatggcgctgatgatggtaatgaatgtggagacggagaggctgaggttagggacacaaatgatggagctgttgtaaggacgcgtggatcaccaaacacgtttccatgtcaacaaacaagggaaaaaaggaataaacaagacgctatgacagtctgggaggtaagagtt

SEQ ID NO: 41457 - DNA, 507 bp, Arabidopsis thaliana columbia
attcagtaacaagttcgataagttttcttagactttgtgttttgagtaggtcgtagagattcttcacagaaactttcatgcttttattagtttacatcatatattcatattctcgtttctatcttttagtattaccacaatgaaagtttgaacttcttttagtcaacgagacccaatgattaagacattaagtgattagaaaatgagagagaccacccaaccatcgtctaacgaatctctcgggacattgaccaaagacatcaacgcacagtttgaccacgacacttctgacgtgtaacaccatgtattaagccatttcaccaaccatatcacaagggtttcaatatcatcgacgcaagtgatataacttaactatctctcctctcttttcttaagataacttctctctctctattcgttggtataaaataagaagactaggaatatgacggagtggcttccggtggtggtcgcgacggtgttgtttgtggtgctgagccgggattg

SEQ ID NO: 41458 - DNA, 649 bp, Arabidopsis thaliana columbia
  unsure (1)..(649): unsure at all n locations
cgccttccgatgtgtgtggtgaagaaaccaattaaaaaccatcttgntgtacttattttcaggaaaaaataacttgtatgtttctaaggttttgtttttaatcctagaagatccgttgctttgaacacaagaaaaaaagttaaggaaaaaaaaaagatcctttgcttgttcttgaaaacattaccatttatgttttccgtacaaagagcagtcactacacgctatcaatacacaaaaacaggccatggagactccaacatttcttcagaggttcgaggacaatcaaagctcattgatggatcggtttgagcggttatctttcgaggctcacctcaacaatgccttgcttggtcgaagtttatctgagtcaggcttctctttgatgtacagtgcagtcgtcgatgattccccgatacatacagcagctccggctagccaagcccgacgacgactaggactgaataagatactaaaaaatctgatgaaaccaattagatattgtagcaaaaaaatgggcaggggaagaaaagaagaggcgtgtgatattgatccaaagagtttgaagaagtggcaaactttcagcaaatctctccgattattttgatgcttttataagtcttgtattttctatggacatgaatatatatgt

SEQ ID NO: 41459 - DNA, 514 bp, Arabidopsis thaliana columbia
gggtaaagactttgttacctgatttaaaactaatcactgcaaagagtgtcctcaacagttcatgatagattctaagcaaaagaaaaagctttgatgcacggtataagctagcaaatgacccgatcaataacagagatgtgaccaccataattcacgaagtgatgacactctacagctctagtctaattatgcagttttaatctcgttatctgtgtgtgttctttcttcatagatgtcaacgcaaaatgcagcttcaagcttaccaagttacaatctctaccagacaaaaagctatggcctactgcatttcaatcatcagaattcttaatatctgcaatttgacgaatttctctttgtccactgatgatacttgaaagccaaaaaataacagaatcacagacctcaaagtcatcacgttggggaagaagaagtgctgcaatgtaggcgccattgtcgagctcaggacggagccacgggaagtatcatcgtgatgttctttccggcggagagggtg

SEQ ID NO: 41460 - DNA, 555 bp, Arabidopsis thaliana columbia
tattcaacacacacaaactagtaataattactagaagtatgtatatatattctcaccaagaatctctgttttaggtgtaaagaagagaaaaacaagaaaattagcatcacaaacttaaataaaagtgaaaaaagaaatgggaggatctttctttaggtagttgtaatttgtatagagccagctaaaaaaagagctttcaaaaacaatggagaaagaaacagtaaataaagaaaaagagcaaagaaagaagctttcatgggtcccaaaataaaaaaaacaatcaccaaaagatatcaaaatactgaattaaaaattcaaataatcatatgttatgatgcgtggattgaatttaattttattattaaaaatgatatattggaattggaacagcaagtaacagcaaagattaggcacttgattgatatataagcttttaaaaagtcaaatggcattttagtcactttttttggttttgagggacagattatcaaccagagtcagagagattatcgctcagaatttgctctgttttgttgttgctgttgctttgatgtg

SEQ ID NO: 41461 - DNA, 608 bp, Arabidopsis thaliana columbia
tatccctcttgatgtttttttttttttttcctttttttctaagtatatataaataggattttttaagtttattttgagagcaaaacattaaccaagatccatttctgagatgggaaatgtcaagtttcttcacattccaagaggtgtcacttgccttttgcattttttacccctcttcatatatcaattgtgatcttcatgtttttatagatcaatgtttggtttgtagtatgaattgtcaactgttcttctcaatactatttttccaaaacaaaaagtttatagaattcttaaaagaagttgataagatgataagaacttggcattatataaacatagaaaaacaaaaacttggaatctattggaagttcaaatttgaagtctccatgaattccataatctaaatttaaataaccaaaacgcacttgaaatcatacgaatgcacacaaccatatgagagcgacgttgtatcaaggatcgcgtttcactttattcaaaccccatctggtgaatggtgatcatgttacacgaggcggttaaagaaaataactacgggtttacaaaattgttaaagtggttagattacaaaaaagcttggtggtgcgtag

SEQ ID NO: 41462 - DNA, 414 bp, Arabidopsis thaliana columbia
tttgcggcgaaaatttttggacgccgactaattttagcgtcgataattaaaagctgcggttgcggcacgaaaacgaacaacaacctgcggtaggtttgtcgcagccgcagtcgctgccgctgccgcaaccaccggcggtaacgaaacgaacatgcttcattaacatgagttaatcctttaggaaaaaaaattataacgaacttcataaacttaaatatctactatgtatataatgatacattatttatctatacggtacaaagttagaatactattacgcacttgaattttgaagaagtgctactacatgtaaaactgaaatcagattataagaatctatgatctaaggattgaaatcagattatgcacgctatatatagtttttatgataaattatttttgtacattatatat

SEQ ID NO: 41463 - DNA, 472 bp, Arabidopsis thaliana columbia
tgatgaatagtttcgataataatttatatgggtctaccatttcgtttgctagttgtttgagcattactatatagctggtttttcgtcatagtagagattaaagtttcgttttttcctctctttctccatcggcattaatgatttcaatctctgagatccagttagtgaattctctggcacattgaaggccattcaaaattcgattgtgatgcttgttcctggtttttgtaacagctgattgagaagcgaaaaatgcttgaatcaggaatttgcaagtatgcgtgaacaaaggagcaagaaacaatgatctcgagaagatgaaggtgagcctatcactctcactctctatatctagacattcactcatcaatcatgcggtgtagtataactcaagtagtaatcatgttgtacataattccctgtgattcaagatccacttactgttagagagacgttcctaagatggtgatgg

SEQ ID NO: 41464 - DNA, 620 bp, Arabidopsis thaliana columbia
gtacttcaggtagcattacttctgatacgacgttaaatatctattccgaggtacttttgttattcactgattcaaatctcttgggaattttgagtttctttttgatttgtgtttttttagctactcttagtttggtgggtttattctaaatttccaaattctatgtctgtttctgtataatgggtctgaatgtttggaactaatacttacggtctttttcactatatggttctaaatcactaatgcttacttgctttaaatcatatgttgttctctactctttatataaccattggagttaattggatttagatttgcattgcccttaacataaacatctgcggcaacggcagagtcggcgtcacgatcatcaaacaaaaataaattatacgtcagcagcgacgaaacgaacaataatctgtggtaaaatttacagttgtcgcatacggtgacgaaacaaacagactaattatagttgcaatggtaatttattggtttactataatattactaggtacgagtacgtttaaatgagaaatgtatgaattagttagaatattttgttaataatccgttgcaattatgatttgttggtttggtagattgtttttaatgggatt

SEQ ID NO: 41465 - DNA, 499 bp, Arabidopsis thaliana columbia
tgaggaagactaaactgtatgaattaaaacatagatagaagtagaagagtcactagtcaacaaaactgtatgaatcaaaacatcgatagatgtagaaatgtctccaaatagatcgattgagaggaagactaaaagagaatcatgtaaatccaaagaaaaagagtagctattactgctttcaactcaaacctgtaacaaatcatgtagaattccatagacctctttgatttggatttttatttttgatgtttttcgtgaacgaggttgcgtgtagatctgacgaagcttttgatttgggaccctatagcaagcgttgtggctctgaggtctaggaagatccagcccaatcatataatttgaagacctatgtccatgttgtaccaagttgcaattattagatctaaaagcttttcttggattttgagacaaaaaaaaagaggagggaaataaatgattttgaggagtgtgagattggtgacgtgagttaatgacatggaca

SEQ ID NO: 41466 - DNA, 505 bp, Arabidopsis thaliana columbia
gaaagttgggggctcgttgaaaaagtttatttgataaactaagtatttgaaacaaaacattattttaacacttttaacagaattctaacttataactgactatattgatagtgagtacattatcacaatcctctatacatattttagggttcctcattcaagtatgaggtttctaatacattttacttgggataatggttcttttagcaattcatctcgacataagttagatcgaatttctgttacgtgaagaaaacaaaatttgcttacataatctctcaactgaaaaatccttggaacaaaataaacagtttgtgaagggtggcccaagcccaattaataaatagcgaaagtataatgaaagcccaatagatattagctcattatagtattttccatacgcttcacaacatctagcgaagaccaatttaccgcagcctgtcaacaacgctagctaccataaaatcatatacacgaatgctcatatttagatcatagctatgtg

SEQ ID NO: 41467 - DNA, 408 bp, Arabidopsis thaliana columbia
atctggattgggatacttagggagcactaacaacagtaacaggctggtgaggtcatattctgctggttcaaatgtagctccaaggacagcttcgtcccacttggactggaatttgctagatctgaccaaactcaatctcaactaaagacaaaaccctccataagaataagtagcttaaggaattcaagagttaacagttctatgttcggaaaatgaacaaatctttgtcgatttgtataaatatgatttaggagtataaagtatcccactgtcttgggatgtagtcttttttagctaaaatgctctgatattggagacattttaagggttcctattttgtagctcattgagtaattgtggtggctttgactgagagtattcttctaatttctgggtgtttctaaaaag

SEQ ID NO: 41468 - DNA, 567 bp, Arabidopsis thaliana columbia
  unsure (1)..(567): unsure at all n locations
tgttgttctccgtcaaccatatacatataccctataccatatacacataacccctaaaccctaagtcctaaactttaaacatttttattgttgcccataaatattaaacataatcccctaaatataaacaaattgagatagaaaattcacatgacccaatccatatggataacaatggaaatagaggtgtcaagcgagccaaagacccgcggactcggccaaaatagtaccatgacggggcaggcttggacatcatttcttaggcccaaaaaatagcgggcctcgcggacaagcccaagcggattgcgggttttagcgggttttgtctgcggatttgcgggccggcccgcggactacaaatatttaataaatatatatataataccaatttataaacacttttctataattcttaaaataaaaatgtgaaatatgtgatagtgtgatgaaatttaatgtataaaactataagatttacaaaactaatactaataaatatttttttaaaattanaaagttgttaatttaatttttagagaataattttattaattttaattattttta

SEQ ID NO: 41469 - DNA, 315 bp, Arabidopsis thaliana columbia
tatgtaattacttacgtaacaatcaggttacgtttaacatgtacttgcgaaataatatagtaggatggctttcgtgttgtatacgagtccaatgattgtccactcccacgtacctagaggtctagtaagacacttgaaacagagtcgtacatatggtagttcacaggattgagagcgaatagtttgaagagaagcaatacgattggtctctggagttaaggcatggaaagttatggagtgagtggatgcagtacaaccagtggagcggatggattcctctaagctacagggtttcaagtctttaccctgaagatt

SEQ ID NO: 41470 - DNA, 578 bp, Arabidopsis thaliana columbia
tacattcgttctaaccgtatcaattttaaagacacaaatacaaactaaaaccaaattaagttcaaccgaaccaaacgagataaaccgatctattctaaaaaaaaaaaaaaatacttcctttgtagccttttgattgttcgagcatcatcaagtttacattgttcgagcattatccaatccagtataaaatattattcacaccggagaacggtacaattcttcaataaaagatgagtcgacagcgaccgctctaatcagtggaactctgaagtttctgtatttttatctttcttacatgatctcattttttttattttttattttttcacaatcttacatgatctcctagtatcacttaattatatacaacgaaacatgtgaactggaacatagttgatagaaaggaaaaagagggaaaatgtgatttgattatagatttaactcattaacaatgtgtgattgtgtgtggatgctttaagtaaacccggaatagaaacgaataatatggaaactggaaagttgaaaacgcgtttcctaatttgtccacagatttttaatactaaaaaaagtggaatata

SEQ ID NO: 41471 - DNA, 561 bp, Arabidopsis thaliana columbia
tacctgctaaaagaacgacaccatctgaagcgacgcgagcaagttcaggcacagttttattcaggtacctgggtgagaggtaatccaaagcgtctgaaacgatcacaagagaaaacgactttgaccggtaaggaagagggaatttgatgtcagccacacgtacaaggcccttgtgcaaaagacttttgcagttagagtctgcatcctccacatcatatggttcaacaccccatgcttctgtctcttcttcattcaacagactcgagaccactgagcatgtttcaggacccacgtgcaggactttgcgcatgctatctccatacgcactcttaagaataggaatggctctttgaacttctgctgtgcaagaatagtcacctgtagagagggttgttaaacaaaatgttaatgtgaagtgtcacacattcttgcaggtaaatttagaaagtcatcactgtttaaacattatcatcataaacacttatattgaagatgagaaacaagaattacctgtaatcttgctgacttctctgatacttttgaacatacctgtagtaatac

SEQ ID NO: 41472 - DNA, 468 bp, Arabidopsis thaliana columbia
atcatatgatactcactatcttaatcaaaataaacacaaaggaagaggcatggtaaacacaatcaaccaaagaaagccaaaactaccaaaagagagagaaagagccaaaaataataaacgagagaaactaagcaaaatttcagacagctaaaaatatagaggagcatttgctggttattatggctctaatggaaacacactgttgaaaaagaattgcacatgtcttatgttttcttcccccaaaacacaacaccctacactcataacatatgtaatatggagaaactgatgtatatagtgtcatatatgatgtaattaacgcacaaatgatgaaagaacacgattgctaaaaataaaattgtccaaaactttttgagtttgttataaaacataaaggagtttgagtttccttagaagctaacaacataacttcactcatcaacttctgctttgatttctctttggaga

SEQ ID NO: 41473 - DNA, 594 bp, Arabidopsis thaliana columbia
tgcaagaggggaaaataggacgaaagaatgtgaaactaagtgtcgaggcccaagaaaagcttgaaggagtaagagaacgagagaaaaaaaagagtcgttcttggaagtaagtgtgttcgagactaacgatcagaaatctgatatttcccttcttggtgaaaaatgtggttgtattttattcaatgacgtcaatgcaaaacactcgaatactttcacctatttttttttttctcttgtaacaattggccaacaagttagtctagagtaagatggttgctcgaggtcgaagaagttggcttgatcaatccagtcctatcacttccacagcagataagatagcttgaatcacaagggttcgtatgcggataaactaagatagctttagagtatgggtaaactacgacatcataaatataccatctacatggatcattgatgtactctctctctctctctttttgctttgaagtaggaatggagtgtttcgaaattaattttgatgttaagaatatattgggcttgggactaacagggactgcaaaagatgactgatggaagttgacaattggtttcgtttgtttatgtttttgggag

SEQ ID NO: 41474 - DNA, 491 bp, Arabidopsis thaliana columbia
tagaggagaggatccccattagatgattccaaaacgctacgttttctttctacatactttttattattattttttatttttttgtttttactttttagggctagattagaactggaacgcctcgaaggaacgcgaaccgtagacggagggttccggtttccgtccatagacgctctccgccgacgcaccaaaccaactacaactctcccggaaaactagccactccgacacaccggatcgacggtgtcggttccataccaagcatcccaacacactggggattaacccctttcttctatgaccggatcttcgccgatttccttaagccgttactctccaaaccgggcggatggatgccaaacgcggcggatccagaagtcggagctcacccaaaccgactgaacccttgcctccacattagccatctaagatccaaacagatccaccagttgaccaccacgccaaacaacgatacccacctagccaccacc

SEQ ID NO: 41475 - DNA, 963 bp, Arabidopsis thaliana columbia
ctctattggtaacatagatatctgaaatttccctcgatttgattagtgggatcaccaataccaagataaaatctgaagtttagttcattgactcaatagtatttgagtcttggggctcgaaatgattttgattttgatttcttaccgatcttcgagtttccaaagctaagcacttttatcaaatttagggtctttttacttttccaaattatatttttctgtttttggggacgaatttggctttctttctatataacccgcgagcgagacagagaccttgaccctcacctaaacctcaaaaaccaaattttgaccccaaaagccatctcttttagcaatcagattactttgaaactttctctgggtatctgagatttcttcattatttatataaatcatctaatcgaaatctactgcgacgatcggcgaagaatcggaaacacaaaaatggggtgttgcgcgacaatacagctggtggttcaaaggctaatcggatctcacgctggcgatctacaggcattgttggtctccgcgactccaaattgaaggtatacttgtctccacttggaattgattgacaaacttgtttctatctgtctatatgactttgtagagatgtttattctatgtgtgttgttgttattgtctcttgtttgaatgattgatagagacgaaaagcactgaactttgtgattgtgtcatcaatgcagcatacgaatttgttctagggttttgttaagactggattggctgattatctcttgattggtgaattttctgtttttttgatttgttttgttgagtagacatttcctgatgaagtgattgaaatggagagagcagtgcgaacacttgatctaacacacaataagattggtatgcttctgcttcattttgatttctttcttcattgacgtgttaagagtaatagctgagggactttgtatttgaccatatttatgc

SEQ ID NO: 41476 - DNA, 613 bp, Arabidopsis thaliana columbia
tccaaagatttattcttctagacagctaagctttgttgtcatcgataaaattaaaatattgattgggtgcttattatactttacactagttttctcgagaaaaaacgaaagtctatatgaaaactaaacaaattcaaattttgacagaatatagcactaatgtagtacaaagtgtaactgtattgtttgtaattatagaaaaagagtctgatcaaaatgtcaacaattaaaatattattttctggattaaattagttgtataatttatagttacgagtaaaatagttttgtaaaatcattaaccatactgagatcaatagcataaataatataaagtgatatacaattttgaaaaatatttaaaatgatggaaatgccccattcagacttttaggtttggttgagaatatttaataaccggttactgaaacgcaaaccgaccaataaattaatttaaaccaaggagtgtaaagtgattaagcacccatgttctatggagttatggagcatgggttttgtcacgtgagaggacggccgggtaatgcgttgacagacatgaaagcatgtgagtggacaacgtgtcataagcctgttggtggaaggtgtgagcttg

SEQ ID NO: 41477 - DNA, 514 bp, Arabidopsis thaliana columbia
cattggggggggagaggagtattatttagataaaccaaatttgggaataaggtatcttaatcattgattcatattcccttcattggtgcgcgtgccaccgcttaaatcaccgaacacgttcccaaagtctagtaccagcaagcaataccacgtggcgtctatgcacaactatacggaatacgagtgtcgagacatcaaaccaccaatagcgtattgtgttcgaacgcaattctaatcacaatttaatatatggagcgggaccctttaaactgctgtttaatacaccaaattagaaaaagaactcttcaaagtacgtaatcactactagattaaaggaaccaaatcaggatactgtaacttattcacattaataatactcattaggaaggaaaaaaattggtagagaagaggaccggaatacgacgtcgttttgacattcctctgtgaaaaagagagagagccgcacatgagtgaaagcttttcaaatatttgaaaattgaaaccaaaaaaacca

SEQ ID NO: 41478 - DNA, 837 bp, Arabidopsis thaliana columbia
ttctgtaggtaacatagtttagaaaacagttcttcatgaacactcctgtcatttcctgcacaacagagcaacaactctgtttttataatctaataaatacacacaccattctctgatcctgtatgtattgaatctttggaagagagtgttgaggataatctccgttttctaattgtaaattgatgattagtaattattaaaaatatatataaatctgtagtcaaatttctaacttggaaccaataattttgaaataaccactttcgtttttgtttacacggaaagagactatgcaagtgttaagaaagaagacaacgttgtggttaattttacaactctcttctgctaccggtgaggtgaccacacaatcccaaacatgtttataatgcatcttggcattatacaataatgcatcttgcttcagaaattgggtccagcaaacggagccgaggctcacatgtaatctgacttatgggtcatggggtgcgacatcctcggggttgacaaggttgagtggttcagacaaacttgggtgttccaagtaaagctgcaagcagagtggttcgctgttcaaagacttgactggcgttaaaacatggtgggttctgccactgctttgtgtctgttggaatccacagctctgcttctttgcttgaacccacttgaggaagtgacctcagataagccgttacctcccatctacaatctgtttatacgagtgggaaagatcaaaacgctttaaaacatagaaacattgctataagaagagagaatgtacagagggtgggtggagctagagatgtatttacttaggggaagaggtttgactagggattt

SEQ ID NO: 41479 - DNA, 554 bp, Arabidopsis thaliana
ggtcccttgaagtagtagaagaaacttgttcaagtgttagaaaaagtctgtaacgaaagtctttgttctgttcttcttgcaggggacaatcaggaggccgtggtgaaggaagagtccctccccgtggtagagggcctccccgtggtagaggcaatttcagaggtagaggtgctcccagaggtgctagcagagggtttcaaccaagaggtggtcctcgtggaggcttcagaggccgagggagggcctagattcatattctatagccttaagctatctttaaattgctttttttaagaaccatattgatgataactgttttcttggttctagttttttgataccttggttttattaacaagagagtaaaaaagctcattaactattagagtccaaggttttattacatacagaagcgtcttctagtacttgtaaacacatatctgttaactcaggatgacctctaagccaaagtaggaggataaacaaaaagtagattaaagtttggctcaattcttattcaggagctgctaaagagattgcataagagattagat

SEQ ID NO: 41480 - DNA, 541 bp, Arabidopsis thaliana columbia
ttcatttattatatataaaaaaaaaattattttgccttttattaagtaaagttatttctgaaccaatcaaaacaacatagattttttttttctttttcaagatttagcaatattcccatagaactatagaaggcatagtttttgagtcacagtctcaatgttttgttcggttgcgataattgatcaccaacttttaagcttgcgtatcatcatcaatcacgagccaccattattcttttattatattactaatataaaactataaatatatcgaattatcctgcagccactgtaactgttcacttatgtaagcctgccatcaaaaccatacaaagaaattgttttttttaaaaagactttatattggctatttttatgcatgaaaccgaaactttgataattgattgtatatgcaagctttggtgttatatgtaagggacaaaaacttatttgcttctttctagataatattgtaccccgtgacttctcacttgtttcttttaccatcaattttcatgtttgttatacaatgtgtgccgag

SEQ ID NO: 41481 - DNA, 606 bp, Arabidopsis thaliana columbia
tgattcatatccaaataaatatactatgctttcttttcaatgtgagtgatgatatctttcctatattaatgcaggtataccttggttagcctatatttttattacttactctgtgtttctacagacttttcaatgttaacttgttttggaagcataacttcttagatcaatcttacttgagtctaatacaaaaacaccaatcagaattattatcgctgatttgctgattgattaggattatagcctaatgatttgtattattgtcttggttgtgttcccactcaaatttgaatctggtggggtttgcagaattttctaagaggttttggtaaattggattgaaaaagaagcattgcttaatgcctagttgtgatcactgttatgaaaatgggtgccatttggttacttgttgctaaaaccaaatgcaatgcgtttgataagatcggtagaagcaacaaagtgccattgttggttgtgttgtgttttgttgtgcccatcatcagttatgtttggttgtgatctcacaccagttgctggatggcatgtcgttggcactattgtcttgttgggcaaaataggcatgatcagtggttgtgactagggatg

SEQ ID NO: 41482 - DNA, 527 bp, Arabidopsis thaliana columbia
ggacccccccactgccagcatctccttattatatatccccaatacttcatggaaaatgaagtaaaaatctttaagtacctttccaattctgcagtaaatatgggtaggtactttgtgcatagtattgttaagatcccgagtctgaaaagttgaacggtagaaagcactaacttcaactggatgaataaattcccgcctatttcaacagagaaaggaagaaaaaataaacagttgcttgacggaattctataaaggctagaaaaatgcatgatcagggaagccatacgcatattaagaacccagggaaagaaaactactaaccattggtttgtctgagcatcaaagtacagcactaatatgtttgatgtgctcataatcctgactttagaagatagcatttgtacagttagctgtgtgatattgactgaaccacgaaacaggggaaatctgtcccttgtttctgacagttcatggacgatggtcagagatacgccatcaattgttacagtaatagacgggggagaaga

SEQ ID NO: 41483 - DNA, 475 bp, Arabidopsis thaliana columbia
ccaataaaaaaaatttaaaataaaaaattatatattttcgtcaactatttagtatttactcatataaagtttattaaaagtattactattttatatatgtaggttttgcatttggggacaaatattcaatttcaggtaaggttaaagctcaaaagcctgatccaactataagttttgggccaagacctgatatgggtttggcacctttaataaagtcaaatgagtcgtcatcattcttgggggacgatcaaaataatgaaatgcatcatctctcccaccaatttcattactttgcttcgactctcagactctttctctcattcgcctcactcatcatctctcactttctcgcatcatattcctttcttcttccacctgactcatatctcctgtttctcttagaagaatcccgtactgagatcaggttagattttagtttctcttctgttgttttgttcttgcccgattgcatgta

SEQ ID NO: 41484 - DNA, 562 bp, Arabidopsis thaliana columbia
gatcttcttgttaaaaatataaaattaattcataaacttttctataaacctaagttttttaatattttttgtatcgtatttatactaatttcgatcttctttgtttcctccgtaatcgttgtcgtaatttcgtaaacctaaatttcatatagctcctttcttctatgtatatatgttttgtacaatgtttcatatatataataacaccctttggcaaaaaaaaaaaaaaaaactttttcaatgtttatctttcgtggttattacatatagtagaaatcccaacattcaacaacaataaaaggttacaaatcctatatttaccaaaaattaagaaagtctaaaaagactaatagatacaaaaagaagaaaagaaattgtttactttttgagtgtaaaacaaattaaagttaaaaaccacataacatcccccatcccatcttttttactaataccttcctccattaacataagattgtctctcctctttcgaattgtctctcctttttcagctctctctctgtatctccttcttcttcttcttcctccagcttctttcaatttc

SEQ ID NO: 41485 - DNA, 511 bp, Arabidopsis thaliana columbia
attcattttagataattattctagtataagatttaattaaaccattagataattttgatgtattttatattattaacattcataattatttgacgttatttttgaattaaatttcttaactattttgacagatttgaccaaaaatcacaaaaaagaaagttcagtttgattccggcggtttggaaatgtaaaagttcagctagatccatctgaaaatcactaaaattcagttagtcagcaattcagcctgactcagccagatttttcggttactatttagaccagtgttttcacgcccgacccgaaccgtccggtccgaccggttaacccgtgacccgaacacgtttccggtttgggtttagtgctaaaacccaacaagttcaaaaccgaaaaaacccacaaaaactcgcaattaacccgtgacccggtgaaccggttgaacggccgagtgtgggttttaaaagtctcttgattttcaataaaatatgggatttagctttatcaattattt

SEQ ID NO: 41486 - DNA, 860 bp, Arabidopsis thaliana columbia
agtccgcaagagagttaagtccttcctgagaagagagagcatggtgaacagggtatcgcctggaagggaaaggtgtcattcttctgaaagaaggccttttctggatatggctcagagttctctttgtgtataacatgtgaataactgggaaaaccttttcccggaacttgaggatggcgaagaaggcaatcctatacccaatgagaatcatcatcacaactgctagatccaaccactttgaactttctggatttatgcctagaacagtttgaagaatgagttctcctttcatttttggtaccaagggtaacggagaatcatactccaccccaatcatctcattcttgtatgctccctgcaatttatcaggtatgctcatttaagatagctacttgacgatatagtctgcatcttaaagttgagaaaacctggttacctgtagtgcccatgcaccatagtttatgtaggacaccgggtatcgccagaacaccattggtaagtcggggaagaatcggaaaaaccccgcacttaacaccataattccctatgagatgaaggataaagcggttttcaatttagaatagtttttggagatataagaaagcttgtaggtgaaagagcgacagaggccactcttacaatgtaaccagctcccaacatgactcccatcaagaagttaagggactactgaagctatcatcatcatgcaactctccacagttgtaatcgcgcagataaggtcgagacagttgtagaagaaatgagaacctccggattggaacctcaccatgtagatagtgattgagctggtggagaggcacataaggattatgaaaggtaatgaggagagtaaattagac

SEQ ID NO: 41487 - DNA, 508 bp, Arabidopsis thaliana columbia
gttttgaaataatacttgtattttttttgttgttataattttgaatgtgttccataatatagtttcgttaatccatgtgaaaatcaaatatgatgttctaaatcatttataggtgctagtcaaggccagtccaagactttttgacttttgtgattctatagttcattttagtatgatttctattaagaagctgatagatagataaaagtggggaacatgtaataagagttaaggattattacaaaggaaaaagtcatacaaatattatagcatgccaaattctatctttttaataagaaaaaggtgcaatgatgatgatgacatcgtcgtcgtcccatgccctctatatcatcatttaccttccttttttttctcaccgtttagacatttctaaatgtatcattttaggatcgaaagaatataagcaatttacaagactacaaagtgtgtatagagtaagatgtcacgaggctagaagaaagtaggatagtattctaagcattataaa

SEQ ID NO: 41488 - DNA, 515 bp, Arabidopsis thaliana columbia
  unsure (1)..(515): unsure at all n locations
gcattgtgttacaatattcttaccttttaaatcaattcagaattttttttttctttaattttgtcaaacatgttttacaaaagcatattaacgtaaaatactttttgattattttttattttatttatatcctgtcaacttcctgttcctgtatttagtatttgcaaatgatttttaataaatagattactctataatttaacgtaaacacgaacacaagagtgtgtccaatgagatgcgttattttcataatcatcaataggtatagagacgtattatggttaagagggtagctagatatattatttagtaattgtagttttccgtttaaattataattctcatggactcatgcctacatataaatacactatgtaatacacatcatgtctcatgcaacttcgacattaaattccaaagtaaactacacaattaagaacatgacggaagagtttgagatcgcaggaatctccancggagcttggtggagctcgccaacaaacaccgccgcagta

SEQ ID NO: 41489 - DNA, 530 bp, Arabidopsis thaliana columbia
gccagtgtgctctaaagctgctacgccggacatggggagtgagagtgagaacgacgataacgacgaactagcacagtcagaagcaccgaagaaacggccagggaggccaaaaacaaagacctcagccaaggaggagaatacgaaagcagcggcaggttcgaggcctaggggcgaccgaaggtacgtccgttaaggtgccttcggacgatgatatattaaaggagaatacacggagaaatgcgctttcccaggacagtgacgaattgtcgccctcacaacaaaggcctacagagattttcgtaaccacaggttctgctttgctgcgtgggcaagcgaagacaaagaagaaggtcacctttcaggaattgactgattccgaggcggaagtgagcgacacaccagctccgaatgcgcgacgaagaagaggagccgttatcgcaaaggattccggtgatttggatgctaaaccagttcgtaaagcctcatgcgagggtcacgagaggtcgcaagcctgcgcacgcagaaagggt

SEQ ID NO: 41490 - DNA, 500 bp, Arabidopsis thaliana columbia
ttctgaatcatataagaattgtttgatcttcaacaaatgaagcaagattttatataatgcaataagcttttgtatcccagcatctaacttttcttacccttagtatcagtaagcgttccagataaaaccagtaatagactgaaaagagtttctttctccacagagtctcaagcttaagacagacaagccttccagtatcaacggttgtagctgcacagaccaatgtctaataagaaactgtttaaaaaggtacaaaagacaaagtctaaattaaggctcacctttttggtattgtccaatttgactgttaccggaacattggatataacatgagcgagactacatgcaacattgttctgaaaaaaaatgaagtaaccagtcagctgagaatcaaatttgtcgcttttttcaataactgtaacttgcctatttatgatatgtacttgatgacttggagcaacaacgattcctaaacttgtatatgtttatgtggtagctac

SEQ ID NO: 41491 - DNA, 594 bp, Arabidopsis thaliana columbia
ctgtgaagtcttacccgaacattaatgtgagtaacttgtttttcaatcgaagttattaggcttgttatgttgcaacacagaattcaggacttcaccaatgaaagatgatatagctgtaaactcaaagtctcactcgtcatcatcatcatcatcatcatcatcatcatcatcatcatcagcagcagcagcagcagcagcatcatcgtcatcatcatcatcctcatcgccttccacagcctccagtccctccgctaatgccaccccacccaaaactccggccaccgccccgaccgccagtccagtccccatcccaccgaacttgctccccttttccggcgcgtatggatcgccataaggaagcgcgtaatttgatcctggagtctctcgaacggtgacagtgacgtcgagtttgccctgaggtcggccagaggggcgtttgagcttgagggttttcatgaaggggacgctgaagccgactgtatcaatgacatcacggaggctgagatgggcggacgattgaggggctttgtgttctcttacggcctgcgtgtacgatgttgatgtatacttgtcgtcatcgtgttggcggagtaa

SEQ ID NO: 41492 - DNA, 443 bp, Arabidopsis thaliana columbia
cctgattttcaccgacaaagcttgttgcaaaacgaatcaaaactccgaacaatttaaaatgaattaaattttcggtttatattaatttctgttaattaaattaattgaattcctttttcagcaactgaatcatattaattgaaaatattcaatgcgtatatttctttcttgaattcgaatatatcacttctccataattatatgtaatcaaatatttagttggatattcatttttgaattagcataaagtttctgaacaatttccataattaaataactacttataagataatagctaaatagtttcctataattatgggattcatcataatttgtaaacttgaattccacgatttaatattttatgtatatcttttacctaaaaatttatatcttataaatactgtacgtcccatttcaagaactcactcagcaatttctat

SEQ ID NO: 41493 - DNA, 361 bp, Arabidopsis thaliana columbia
  unsure (1)..(361): unsure at all n locations
ggaaagaaaaaaaatccaaaattactaaacccgaaaaaatccaatccgaaaaaattgatacgaacctgacctgaataccgacatgcccagagctactccaaagtggggaaaattggctcggattagtgtggatgaagtttttggctttgttatgtagtaataaggcttgaagaccataattaatatagttccaaagtccaaactagcttagagaaattgtaagccnacagagggtagatatgtctttaaacactctcttacagaaaaaaatagttacttgattctcnaagaagggtgaattcgaggttttttgcagcgaagagcaagaagatggtcggttgagctatttttgcttctcccg

SEQ ID NO: 41494 - DNA, 255 bp, Arabidopsis thaliana columbia
ttaaggatgagtgagcagtgacgtgggttgctctcaagtagtgctttgtgtgctgatgtggacacacggaggcctcagagcatctccatcaatagtctctgatatggtttgtcgttcactagagcacataaaactataatgaagtaggagagatagtgagagacgtttctctgcggagaaagtatgagatacttgtcatgaggcatggcaaattatgtcaagttagataattattctcagaatgcttaattacat

SEQ ID NO: 41495 - DNA, 521 bp, Arabidopsis thaliana columbia
tggacaaattttgttatattccacatcgaatcaagtgttcaagagaattgcaacattctaaagtcaacaacgatcacagacttgaaagacaaaattcagacgaacgtagggaaattgtaaatgataataagcatctctatatacgcagccgacaaccgttagaatttagaaaactaacaaaaataaaaggatagaaaacttctccttttgaatcaaaaaaggtaaagaaaagattctcctaatttatttctgttaaatctagatttcgtatgcaaatagttgggactgatgcgaacttgcgaacgacagtatttgactgtacgagtcatctaccacggccagactctgtcggatgacgtggcgtgtaattattggctgacaggacctcagttgtgtcatcgtttcacgtatatggttaaatgctgccaagtgcaacctctgaaacatggaccaacgccgtaaaaagatggcatacccgaaactaggcggtgacaattgccttgcttgcatttctcatttat

SEQ ID NO: 41496 - DNA, 292 bp, Arabidopsis thaliana columbia
tgcaagatcgaattctacttaaaaacgtttacagttgatttctttttgtgaaaaaaaaaactcaatcctcaagaccaaaaaagaagagcgaaacaaaaaaaacaacccaagaataggtttaagaactttaattttttcctatttctggattagttgtcaatgtcattaaattcaaacattcaacggtcaatttttacgcttctttaacagctagcgaataatatgacataaaccttcattaattcaaaaatcatttttcccgtgatatgttttttttttcttttacctaaaa

SEQ ID NO: 41497 - DNA, 610 bp, Arabidopsis thaliana columbia
cctttgacgaagaccagtccagaaatttgacggcaataaaatttttgcgtaaatttagagattttttaaattaatttagaattttaggtggatattgttattaatttattatcatattaatgttttctttataaagataatattggtttaacaaaaaaaaaaaaaaaattgacagagtgaattgcaaaacaaacatttgataaaataattaacaaactaacactataattttaaaaatgtagtaactaactataaagggtaattattgaccaaattggttttggtggaggtgatagtgactggacgcggtggtggggggaagtggtggtggtcagagatggtggtggccggaagtggttgtgattgagaatgatggtggccgagggtagtggccggaatttgtggtggccggaggtggttatggctggaagtggtggtaccgaagtctgtggtggtcggaaatagtggccggaagtgatggtggccggacgtggtggtgaacggtggtggtgactggacgttggcgtggacgaaggtggtggccggagatggtggtggcaaaagtggtaatagtgatggttttaaaaggataagaatgtattgatatata

SEQ ID NO: 41498 - DNA, 424 bp, Arabidopsis thaliana columbia
aggatccccttgtttaagtaggtagattcaaggccatgacaacagaatatcaacctagctagtttgatatattctgatgaaattagtttgcctagctaggattattattttgtgttttgagttttcagggtgtgcaaacgcaaaataaaataaaaattgtgaccatattctacaaaacagattatatcaaaaacatgaataatcatttaatatattattgagtgttacgttgtctaatttatttttgtgagtgatgcttagtgtttgaagcttgaaaagatgagagtagcaaaaagaaaccatgatgcttttgacgtaatatatgataagaaagggtcactcatatgttaaaagacaaaagacttgtaaccgttttatatttggtttttgtgtggtttctgccaatgtcatgcactgaatgtga

SEQ ID NO: 41499 - DNA, 622 bp, Arabidopsis thaliana columbia
ggtgaccggagcaaggaggcagactacggaggattctaaggggattgggctcatctccaccacggtgctcctccaagtgtggaagatgcactccgtcaagcctgttcacgttccggtgcctcccggcacgcctgtcaccgccgaatactacccggaagcttggagatgcaagtgcggcaacaagttgtacatgccatgatcttttataatatatatactcacatatatacattatatatatgaataatatgcatgttcgtagttatatcttgcctctactccaaatatttattatacattgacatgttgctaggacaacctcaacgtgaaacttttgctgataaattgattgatgatgctcgtatagacgatatgacgttcttagcatatgatttcgtatatggtgacataattcatgaataatatcaacatttggtgtcaaaaggaaacatatttcttgtcttcttcatcaacgtacttgcttataatgaacaaaaaataaaaaaacgtactcgctttctaataagtatcacataggtttaggctcataaacatatggactaacataaataaaccaaaagcccaataacattactcttagcatatacatataagtaaacta

SEQ ID NO: 41500 - DNA, 545 bp, Arabidopsis thaliana columbia
gggctttacaattatatcggccttttaatgtggaccgtaacatgcataataggatttgttttttcttacaactttgtagtattaaatcttttcacctaaaactattttgacaggatgataaaaaaatcagagttagagagtagtttatctaaaaactcaggctaataatccccacacaatttgaccaacgccaaaatcagagcaagacgattccttcacctgtaagagtgcaatggatcacatatatcatttataattagtttgagacgcttttgatgaagctgatgaggatttctccgctttattcacctttacatgtccttcttcaacaaacattggtcggcttaaaagctcttcaaaagatcaatgtgcacatgcctatgtatatatatactaatgaccccgttactcaatcaacaaatattgaatcttgatcaccgaaaaccaaaatttcattagattcaatggctatggctagtagtagtagcagctcgtcattgtttcctatccaacaacaacctcaacaacaattaggaggcaatgag

SEQ ID NO: 41501 - DNA, 627 bp, Arabidopsis thaliana columbia
  unsure (1)..(627): unsure at all n locations
tttttatatgatataccgcttttaccccttaagcctctccgcgtaaaaccgagaacaaaatcttaagcaccgttgttccgattcagagatcatcgtcgtcgtcgttcagaaaccttcaaaaatggctggaaaactcatgcacgctcttcagtacaactcttacggtggtggcgccgcggattagaggttttcatctctcttttctatatattcctctaaactactgtgttattgcgatttgattctctgtatttatcgataccgtctcgattttatttgtattcttctctctgccgatgcgttgattttttgataaacttagaagattttgttgcctcagatgttgaaaaatccaatgttttcatcaatttgatttggattgtaaaggctactagattacatgataaaacacaatcatgattgtaaatgattttcttcatttctgatgcttacgtagtcactagcggtttctatatggatctcgttgctctgggaatctatggaaaatttgagtacagagaacacgccttttaagctagataatgtgattgagattatgtacgaaatgagagaatgaagaaaagagacgatggtggtgagagtagncacaaaagaggaattatagtg

SEQ ID NO: 41502 - DNA, 553 bp, Arabidopsis thaliana columbia
attttagtacgaattggtaacttttgctacttagtttatcatttgcctgttcctgaagtcttaaactttctcaaaaaagttagcatacagtatacacttaaggattgattcagataaactgttttggtaagaataaggagatttgaagcataaactaaagaatttttaaaaacatgtaatggcgattggaggcgggattgtgaatgagattcaaagtgatttgagtataaaaaatacacaaaacacagagaaagcacaaagaaacccgtactatgaagccattttggtattagggaaagaagagcaagggcaccccgtagaaaacctacaggtatttcagagctatttatcaaaatctctcccctgttttttgcctctttcccgattcaattttctcggaaaaacattcgcggaaaacagaaagaaaactactaatcatatgaaaatcaatctttcgcctaattgttgagagaatgatattcagaacatcgaaaaattgaaacagaattcattggaaccctaatgacggctcctgctaaaacctgatgaactc

SEQ ID NO: 41503 - DNA, 258 bp, Arabidopsis thaliana columbia
attcccggtaagaattcaagaaaattagtgacttcacacatgataggtatcattagcatatcctgtaacttctggtatgcctcacaaaataaacgatatcatattaacttacgctgcactcactatcacattaacaagttcgagcaagaatcgtggtatatgcagtgactgatctgcactctatttgcgagccagatcaggcgaatcagattgtagaattgacacggatctaagcattgagccacaggttaagtgatc

SEQ ID NO: 41504 - DNA, 493 bp, Arabidopsis thaliana columbia
ttactttcctcgttatccttttttgcagtcaagttaaattgctctctttcaagacttgtgttctttaaaccaaaaaaaaaaaaaaagtatctgtgttcatcaccaactcattcttctttcagatctagggtttcatgcttcactcaatttttttttgtttaggtagttccatcttctaaacgttgtatttttttttttttgccatcataatcatatggagttcgagtcagtgttcaaaatgcattatccgtatctcgcagccgttatctacgatgatagctccactttaaaagattttcatccatctcttaccgatgatttttcttgtgtacacaatgtgcatcacaaaccatcgatggtaaactctaatcctgatcttttttcacaagaatctcacattaaagatgcaatcctatcactttagcaaaatcttaaattgtccctatcctttgatatgagctcaccatatgaaatccacaaaagaccatagggg

SEQ ID NO: 41505 - DNA, 607 bp, Arabidopsis thaliana columbia
ctcggaagatatctcaagttaaagcggccatccacaatgcaacttcggtcactaaagagaagaataaacgccagtgagaaaccacatttccctagcattgcgttccatgatcttttgtcaatgctgctatctgcaataaaaaaataattgtttccagtcaaaaataactgcaatgaggtatgagcgttggggaatattttccaaggacaacaacctaccaatctgtagagatgaaagtttcaagctgaaatcttccatagaagttgactcagctggagtggtaacaaagaaaaggatgatgagccactctgagacaatatcttggatcattggaagcaactcaagccgtagcttgcatatgtcttgctgtgacatattaacctgcggaaagaaaaagccaaagaagggggatacatcttgacattagtatcaaaatataaactacactgattccaaataagggggatacatcttgacaataatacgagacccagtgggaactgacctgcccagcgatgttaagcagatagctgatgagtaggaagatgtaaatgccgactcaaacatcgactttacaaactgagaagtggcttggacgaggatagac

SEQ ID NO: 41506 - DNA, 544 bp, Arabidopsis thaliana columbia
atcctgtagtcaagtctctcaaaactctcaagttaatatatataaagttaaccgaaatcatctgcaaattaaattactggtttagattggtttaagtcaattagtataggcccattgttagcccattagggatgaggcggttcttgagggtttgtcaagcataaaataattcagacaagccggtgaaaaagaaaagtcgtacgcgactctctctctctatcttttatttcctttgggagcaaggcgatctatcactttcagtcgctatatataatcttcctcatcgctccattttctcctacagtctctttctctctctccctgagaaaacaagggagactaatcggaatctcctgcgtatttgattcttccggcgattgtttccttctttatacgctttcgtatattcttgtcaggtaccaaactttttccccctctttggttgtgagcttctaatcatttgttttatcgttctctttgattcagcaatatcgaagccaaaatttgtgtgttggttggtgttggtcccaaaatttcttagata

SEQ ID NO: 41507 - DNA, 496 bp, Arabidopsis thaliana columbia
tccccggtcttgtttctagagttgttatgtcctttgtatttatgtcaagtgttgctgtcttaaagcccaacttaaacttgaatgtgtctgaagtctaaaccaaattacgtgttagataattgtgtttgtggtattctcttgtcttgacacatttctttagcttcatttaatggcagacaataaaacatctgaaggtattgtatccgaagaaactcccatggatgcttctcaggagcaacaacatgaaacagttgaggagatgcttgctcgccacaggtaatagcatcattaagctttcttaatgttggaattgaatacttaattggataaattggcaatacctctttactctaaatcatatatttcgtgtttttttttttttactacaagtgttgatgttgttgttgtttattgtaggcaagagattaaacaacttcaaaacaaagagacagagatgaagaaggcagctgccaaaggtagcaaagctgaacaaaaa

SEQ ID NO: 41508 - DNA, 545 bp, Arabidopsis thaliana columbia
tgtgtgtttagagtcatgttttacatttaacgtagtcagaaatgattttctcatgtttccccttttaacttagaggccatatatatcttctttaccggaaaaagaaaaactcaagaggccatcaacatattttctcttacaacgttctacaattacaattactactttcttagcttttgggacattgtattattgttctaaagtgaattttcacacacaaaaaaaagtgagtattatcaaaagggacataacaaaaatcgcgagatttagaaaacatacgttagatctaacgttatattttgaaaaatcacgagattcgatacgttgttcgaacatggagaacatgtcaatcatcgatggctgaagaaaaaagtttaataatgagagtcggagagaccaacaaacatcacttctttctatatactaatatttatatatgtttggtgtacataattgcatgtactttttacatgacgtaagttaccattttacaacgagtgtgaaaatagtgaaactgaaaaagctatttaaagggtgtgaaggga

SEQ ID NO: 41509 - DNA, 517 bp, Arabidopsis thaliana
tcttccgactgtgaaatggacagtgatcactatcaatgcatgtaatattaagtttggtgttttaaaagtttccaaaagataaataaatatcatattactttactaattatttacatagtgtatctactcataaaattcacctaaccgaattcattttagcaagtgttgtaagatcatatggaaagatgagtgaacatgtatataaaacataaacacaaccactcaataactgttggcaaaagtaaaataaccattttattaaccacacttgaaaccgaccaaagccgaacatatggaatcagcatacaatgcgactcaaaataaaaataacgacatacacaattgctaatgtatcattttattgcaataattaatttatcattttccatttaattaaataatataacaacgttacgaatgcatgagcatgagcctcaccacgtcacagtgatggccacaccaacataacctcctccaagacctcctccaccaccaatgcctttaccaaatccaccac

SEQ ID NO: 41510 - DNA, 849 bp, Arabidopsis thaliana
ctctattttcaaatttgtgtttagatattgaaaatactaaataccaaagtgaaaaaaaattgagagccaagattggtgtggagattcataattgaaaaggatcgactttttaaatattggtggaaaatgtttacttaccagcttttttttgctgagaatggaatccacgtcatatttgaatatgtgcgtgtataaacatccaaccatacacatgaaagctggatacaaacacaaagcataaatcattgagatacaatgtaaatctaaatatctaaaagttaaacttttataatctacaaaatattattttaaataattaaccagctgtagagtgataccatatattcatttgtattaaaatgaaaaaaacattaaactaagggaaatttgtatcaataaccaacaaaaatttaataatttactaactaaccaaaataaaaaaatggatgatattcagtatattttctacaatatttgctattatacctgtttcttaccaccacaatcatctccgtcatcaccgtcgccgccgtcatcactaccactaccaccgtcgccgccgtcatcatcaccgccgatgccgccgtcatcatcaccgccgatgccgccgtcatcaccaccaccaccgccggtggagctacaacccttaccggaacgagtgccatcaccggagtcaccaccccatcgtcggggttcccattgtcaccggagcctccatcgtcactagagccactatcgtcgccggagctaccatcgtcaccagagcaaccgctgtcgccggaaccacctccgtcgccgtagccaccaccgtcgccggagccactctattgccggaaggagtgagttgta

SEQ ID NO: 41511 - DNA, 278 bp, Arabidopsis thaliana columbia
cggactgatttaggggaagtaatgcttagaatttatattgttggggatacctgatttaagggtagacataaggaatgtgtttaacctatcacgtgggacctgggttgtgagtgagagctctaaggtcaattgtttaatatgatgcaatatgctacaatctacactcttcgccttcaccctttttatgttggaaaactggtagctgaaaaaattcggctaatccacctatccgggaagtttcggggatctaacttggcaccatggaggattatctttgg

SEQ ID NO: 41512 - DNA, 546 bp, Arabidopsis thaliana columbia
gataaaaatgaagcaaactgaagtgtttaggtgaataaacacacatttgtttgttacaacctagaacaaaaaaataggagactttatatagatatcaaaacaagcttccccatagaaagagattcttacgtagacgaagtaatcaaagattgatagaagcttctgcttcttcgtcttctataaagagaccctttctaaatcaaactagtgacccttttttaactgagtaactctaaaccttgtgatttttgctttttggggttgagaaaaaaaaacaatggccagagtactcaaatcgcaatgggctaagaaaaatattctaactaaaaacatcaagctaccctttcctcataaatattttttttactttcctctatatatatccttttaatccataaggccttaaagcctttttcatatatacagatagatattactcgtcaaagattaggtttactagggttcgtcttctctcactttaatcaaacgttttgtgatatatttaatcatatttttgtttcgttatatgttgattcatagatttga

SEQ ID NO: 41513 - DNA, 600 bp, Arabidopsis thaliana columbia
ttaaaagctaaattacttttaagaacaaagtgtcactaacttttgaaaatcttgcaacttggcttgggagtcctacttcctgcaacatcaccatgttatacaataatgcattattattcgccaatctctcatcattccattgatagagagcaaatatacaaagtagacccacctaccttgcgtccgtgatgacaagcctcatcgctgttcacaagtaccctcgcggcccatctgaagcaatagaaaaaaataccacttcataactcaatgttacgataagcatgaatctataatcttggtcacttcactttagtcaaattctgctttactaaaaaatggttatattagtacaagaaggggagaatcaacatacgcgcatgatgtaggagggtccatacaatccctgcaattactacaagctgggaaaaagcaacaaaaagctgagagaatgttgtggggtggttagtttgagtaagtagggagaaaaggagacctcatcaaagacaccagcggggctatcatcgtagctagcaaggaagaaccgccaagagtgtatctgcaatccacacacacaacaatggttaacagtttgaagaagca

SEQ ID NO: 41514 - DNA, 579 bp, Arabidopsis thaliana columbia
gatcagttatgtacagtccggccttaggccatggcactacccacttgggccgggcctggttatgtagcatatatataaacgctagtcaccgggatagttggacttggatggctctagcctgacccgtcaaagtttaacggaaacttgacatatgcaaagaccgtctccgtttgaactttgaagcgattgaaattttttgagaggcgaattaaggcgccaaaattttgagaatgataagtagattacgacacatgtactcacctcaatctgacggttacgatgcaatgtaaatacgaagaaatctcagggttaaaatcgtccaaatgttcggcgtcgtgtatacgcaattcagctacagacagtgtttgttacacaccattttgagaaatctaaattttcattttcccccgcttctctcctagaaatttcgaatttctgcttctctctctctctatcagttttctcagatcttattccagttaatattccggcgatcttctttctctctttgatcacttaattctcacctggaacagagagtcagggcttcgcacttgtaccgcgagctttgattaggta

SEQ ID NO: 41515 - DNA, 225 bp, Arabidopsis thaliana columbia
ggagagacaggagaggaggaggtggcgtgtgggtggttagcgacgtcgacggagagggtggcgagtgaggtggaggagaggaggtgaaggtcgagaggaggacgaggagcgtgtggtgtgcaagaagaggagaagcggagaaggaggaagtggcgtgtgtggggaggatgagggaggtggtggaggagtaggtgtgctcagaggctgagaggagaaggtgtggtg

SEQ ID NO: 41516 - DNA, 535 bp, Arabidopsis thaliana columbia
aataaaataaaactgaaggaaagtagtactctgatagctatatcaccatcacgaaaattatatatttgagtcgattgaaactatatgtaccctacaaaccagaaaatattgttgggaaaacaaggaaaattcttaagttcacccttacggttgaacccttgtagtcacttcttttagtttaaaccaatcattatgggatcaattatgaaaaactccctttttttctctatgcctttgtttcaaacagaccttctcaatgtgttaataggaataggcattttcattcagttaaaaagacatcattgtccttaatcacctaaaccagttcaatctacttcaattcgtcgaccgtgatgtcttctcttaccttgcgtttctcgccggcgtttacacggcggagggcttacatggctctgaaatcaataaagaggagacggaggaaagcttacacggctctggatttgtgatttccttagatgaacaacaccatctctgctaattattaatcctataattttatttcttctcgttggaa

SEQ ID NO: 41517 - DNA, 504 bp, Arabidopsis thaliana columbia
gtttcattgattatgtctgagtaatctacttgttaggtttatgaattttccaaggttttgaatgaatggttaaactgaacaacctgttatcttcaccaagatttgatttaattatttgttctagattgatcatccagaatattgcctatatgataattagttgatacgagagtgtaattgattcttcaaataatcttaggtaagaaaaataactaatcgcaaagagatatggtttaggaattttttgaacaatcaaacttgattgttaatgcttgtctagctaatctattaaattttcaaagaaatttggaattctagtttaggcataaattatttctgcaacgaaaattgattaattttacaatttaagtgtatggtctattaggtatattgttgcacatcggaagttgaataggatcttaagtggtatatataagatatgggcatctccacctatcgccaattgattttaggttggaagccacaatctaatatgatatcaga

SEQ ID NO: 41518 - DNA, 420 bp, Arabidopsis thaliana columbia
ctataggatccccgtgtcgccggcgaagagtctaaagtcggcgattgttttgtcttaacgataataaaggccttaaaacgtacaaggtttacaaaaccaattaaggcccgtaaagcccattcatctgcaccgctaaaaaaataattgggcctttactgaagcatattctaattttcttatatattaatattttcgccatatttaacactactaacaagaaattatgggcctaattctatatttttccacaagaatgggcctttctgtataaagatttttcgaaaacgtttatgagccaaaggccacgtacttcttaatgtataggaattaacattctaatcaaatttctatttttccagatactttcgcatcacgttttccatttttttaatttaatatttggagaaaatattcaacaga

SEQ ID NO: 41519 - DNA, 541 bp, Arabidopsis thaliana columbia
cctgctagtctaaaagtgattctaagacgacgtatgtatatagcataagaattttcactataagtcaattaatcgtttggtgtaggaagtttagccaaaagttacaatggtaaacgtttgcggcactataatcaatttgattgttagtggagatactaatacgaacttactagtgcgaacaaactaatttcttattcttaggggtgctaatggcgttttttggcaactagggccacttaagtttttttttcctgaagtcatcttctttcttagttacgttaacgatgtttttgaatgtaaaatattactattttttttggcaaaacaggttgacatttctataaatacgtctcttcagtgtttgctacaaaacacacatagcaatgtcggctagagctcatcctgtggacgatgacggagagattccccggtggaaagatctccccgcggcaacaaatacaccgtatgtcccaaagtcgaagtcctcctaagcaaaccttttcaatgagtcatgtcactttaaagaactttctccacgatg

SEQ ID NO: 41520 - DNA, 564 bp, Arabidopsis thaliana columbia
caaaacttaaatcctccaaccaaatgaagatttttcccgacctaaattgaagactcaccagatagttacatatttcaagacatatgggcgagacgaaaacaaaaactaccgaaccattcaactagagcgccaagaagacccacccggatcaagcctaagatcatcaacccaaagtcacatttactcgacatacctttggtagtcaccaatattatgcatatttgtgaataataggcgagccaaatcacccaaggttcgaattggtttaggagttactcatttggttacatcacacattttttggttaattaaattacaacaaaacttacgttgacaattataaaaacataagtaaatgaaaccaatatatgaactgaataatctcttccgtaggtctaacatatagcttcaaaataatacagtaaaatctttcttttctttaagactcaacagaaagaagaaaaaaaaaggtaaaaaaagaacaaacattcaaagttaatgagaattaagaaggtggcttaaaataaggataactagtaaaaagctctgaaataatgtgagaag

SEQ ID NO: 41521 - DNA, 632 bp, Arabidopsis thaliana columbia
aagttaaaacatatgatgtaaatacataaaatacgattttaagagagatgaagattttactcgaagcatgggaagggaagaagaagatgtgtgatagagccaagaagaagatgacgaggagatgaatgagagctttgttagccatttgactatatatgaatagttatgacaaaattaaatttagttaaaaccttgatgttgttgtgagttttgtctctctttttcctccaacttgttttgagttttgtctttgtggtggtttcctttatagttcttttcttcctatttgcgcattttaaaatattgtcgtggtggggctttcatcactaaattaaacatggaatgtttttttaatctgatttggactgctatagtattttgtatcagcccaccaaaatgtctaaactttaaaagaacatatacgaagcaccaagtaatcgacgcggtttcacttttccacgtttattgttcgatataatatatgatactaattataattacaatatgaaaaaatgtgtgtatcgccatcatacataagcaaaatcgtaatttatccgtaggtttttagtgtttgtacattaacatactatatattgttttaaagaaaagataagattatagtcaatgttgaa

SEQ ID NO: 41522 - DNA, 327 bp, Arabidopsis thaliana columbia
ctaaggcatactgatagtcaatcgcataatgttgattcggtaaaaattgggactccatcaaaaactggacaagcacacgatactggtacgatgattcggcttcactcaagtataccttcagtttcatgcatctatgagattaatgtagtgtcgctcgcagcatatcaagttcgtatctcgttcgactacaacgccgcacgcaatacagtagcgtgagaattccagagcctgttctgttgacatgctgatttgcatgcatgacgttgccaataagtatgatgtaaccactcagtttacacgagattctactccattaagcaatgcttt

SEQ ID NO: 41523 - DNA, 548 bp, Arabidopsis thaliana columbia
tacaatcaaaatttgaaacttcagacgtaaagcatacagaaaccatcaaaatgaattcacagaggacaatgactgacacatcataatagaacaattctcatgtttaacaatggagacacacccaaccattagagagaactataaaagctcactcagactgaagaacagtaaggtaataaggataaccttggcatgtccctgatgatgttgcactttcatgctcagatagctcccagttaagttcatatgaagacagatcgtagatacctggagagaaaactgatatctgcagcggtatttcggttgtggataatggctggatttggatctttgtggaacttaaacctgaccatatgaaaggaggtgagctttccatggaagatggcggtttcccagacggcttccatcacatctgaagttagtttcatttcctctgtgatggttggcacgtagcgccaccggattggttccagaggaagaagtagttgctgctgcgtctggtagaaaatcattcgtgttgatggcacagatgatatccatcagatgtg

SEQ ID NO: 41524 - DNA, 615 bp, Arabidopsis thaliana columbia
taactgaaccgtaaacccaaaaagacccaaataccccaacgccttaccatattaaattaggaggaaacccgttcataaataatttttcgggtttgggccacaacagaccggcccatttcaaccggttcataaattctaaatactagaaaattccaaattagataagtttttgtccatcctttctttgggattcttgacgagtaacgtttgatgtctttcttaatttggttgaatgatcaaatttgtgatccaaattcttacaaactgatatgttaatgaatctataaccaaaataacgtctaaaacaaaaagctgtaacgatttgaaagtgcattttttcccaaaactatataactaattaaagaatttagtgtcatttatctaatggatatacttttaacaaaatcttataaaactaaaaatatttaagacaaaagtgaaatggagatacggaggtggattgtaatgagctgtccccacctgcaaaaatacgcacgcttcactgtctgaaagatgcttatctctctctttctaactttcttaatccacaaatcttttttaacctttttttattggtgctctaaaattggtaacaataatgttgtgatgaaaata

SEQ ID NO: 41525 - DNA, 303 bp, Arabidopsis thaliana columbia
gcgcgaaccattgaaaggcgtacgatagtgtttctgcaggccgaggtcgggcgccggccagtgggcacagcgtgtcgtcggatgcatccgcggcggtctgcacgacggtcagcggcacagcttgaggccggactcgacggcgaagggcagggtcgagattttgccggatcgtgccggccgagccgggaccgagctcgtaaagccgcgaagcgacggccgccagccggccctcgacggtgacctcgccggatggatgaccagcggcggcagttgctggcggtccagctggttgcgtggcgccca

SEQ ID NO: 41526 - DNA, 557 bp, Arabidopsis thaliana columbia
aaaaaataataataatgcatcttccataataataataatatgaattcaacattagcattcatttcattacccaaatccgaaatttcattgattaaaattaatacaattgtattgtagaaaagctaaaagcttacgtaaatgccaaagatagtcaaaaccctgcaatgacaaagttgccaaaatcttgaagagtttggtccacaaaatttaaggttcttgtttttccactctatttataggcaaagagatgagacagagaagattaaattacttcttaacaaaggttgttttcactcaaccacatgcattctcaagtgtctgctcctcacattccccaagattcccatttactcacttctctatttggtacgtaagtcacacaatatgattctaaattattttacacattattcgttttgtcacacttgctttcgactttcgtaaacctatatagttcatccaatattattcggtaaattcgatatttatcaatctttattctcgtaggttaaaggagacgattgatacgtgggatctcttacgtatctgcatgatta

SEQ ID NO: 41527 - DNA, 523 bp, Arabidopsis thaliana columbia
gtgcggacatcaaatgataagacaatactaccatctgtaatatatttttctcgtcaacaaccattaattaaaatcttatttcacctatagtatacaaatggtaaaacgaatgacaatgatagaagtgtgatcgtaaaaatatatatatggtagctatacttattcttagatagattgtctcgtagatctacatttgcgaccacattgaaattttttagctaggttggatattgggtgtgaatcgtgcctaagatgcaagtgagaaatattggatatgtagcagtagcatgccgtgcatatatcatgtatgctagaattggtgattggtcaaaatccattgaacttcgaaacatcacaagaaaaatattaatcgtgagtgtcactgtttagttgtccaatgagatataaaagaaaaaagtacatatttttcccatttatgaaaagtccaatcacattttatttataaaggcgacttattggactttctagttgacagatcaatgaagcagaggatatttagatg

SEQ ID NO: 41528 - DNA, 1318 bp, Arabidopsis thaliana columbia
caaaaaagcatcgatatactactgactattctagtactatatgacaagtggctgagatgttggattccttacatcggaactccaactaaactttcgttaatttgtgcttcaaagtttcattacaataaggtttttatttatttattgatttgtgtttatataatataggatagggtcaaaaacattataaaagcactttaaaaatagtctatgaagattattgtacttactttggttctcccttcatttaactgcataaaacaccgttcgtcagtcaacacttcaaagataaattaactcatactagttgatatatacatataccatcatgtagctttagtcactagtcgaatattttagttaatcttgatatgtttgtttcattcgcattatcttcgtcaattattttattcattcatattttttataaaatagtttaatcttggtacataatttaagttaaagctcgctttgataggattttaagtcgtttgaacccagtcatacacaaaagtggaatacaaaataagaaaaatggttaagtagttcatgacgttatattggtgtgcccaacggtaatctgatgatgatgagccatgatcccatgagagagcgaatcaccgtggatctgtagcttattcgacacgtggcactatgaatggtgaaaagagtgagcctcgcgagtgtacgtattctctatactcgccgtgtgcccgtgcgcagtgacaagttagtcatcaaatatactaacataatttgtacttttactaaatgatcactcttccaaattttttgtttactagtatttaataacatgttttgacaataatatcgttgaaatcagctttatttttgtttttatataaatttgagtgcagttgttttcaaattgcatatcagttataaaaagacactgtaaaataagcagtcccaaaattttcagtgacaatggtacgtgggtgtcgttcccacgcatatagaccgcgcgtggttagtagtacaacttgctaacattcatataaaattacaaaaaattgttcttttaaaatgtgcactctttttttatatattagatttgttcatacggtcatggagtgaaataatattaaaaatacagcaatgaacatattatattcatatgtttttgggtgggcacaagaaatcaataattattatatatgatagacttgtattaaaaaaaatgtagtcatagaatatatgaataagataataattatagtatgtgatattaaaaaaagggaaacagataataataatatatgtgactaaacattgagcagtggctttattccgggga

SEQ ID NO: 41529 - DNA, 343 bp, Arabidopsis thaliana columbia
atttctgtttgtggagatgatattcaaatcaaaagttggacctaagaaagcgagattcaagttgaataaactaagatggacaaaccaacaaattggcagcgactaaatcgcactaagtctccaaatgtaggattaattgtgaaccaagaattacgttttcaactccctcgtttccaggcaaattaccaagctggttttgttgtcggggtgtaaccttgaaaaggatctgggcggatgctctttagacataattcggaccagatgcaacgtagcattggtagtttagtttgtgtacaagtttgagtatctagtatcaatttgagagaacaacttatctagtcga

SEQ ID NO: 41530 - DNA, 549 bp, Arabidopsis thaliana columbia
ctccacactatcgccgattagagactcggagaagccctgttgctgttgcggcccgaccttagaggattttgataaggtggtgggtttcaagagcaccattgtttcttgggtttgaagaaatgggtcttaaggtgttggggtatttatttaccatcttcggtttcttgtttcggcgactgtttttttttgttggagccgttccaagttcgtcaaaatgtacacgctggtcatccgtttatgtctctcattttgttttctaagtctttgattttgggacaacaaattgtttgtgttaaatttagactgaaatttacaggttgtatggataaaacacatgcatgtatacatcattgtctttcttaatttagaggtatagtttgttaaatgatcagtcacagtggtaactaacttttttctctgtttttgttcttaagagtaaaagttggaataacaagggattggttgtcaaattaataggttttcacgttttcttggtagacaaaaaagataagagaagagggaaaagaaactagtaagaaagataaacgg

SEQ ID NO: 41531 - DNA, 642 bp, Arabidopsis thaliana columbia
  unsure (1)..(642): unsure at all n locations
ctttaagtggaaccatagtccttacggttttcgccagcctgtagaaacctcccttgtcttggctgacaccgagagcactgacaatgttgttcagccttccatgattagtctcatgcaagattcaggcggcgaagaaggtcagtcccctgtgctgagaagagacggttggtacgggttggatgggcagtcttaaaaggagaggagatttgggtgaaatagagatgtagcctcaaggagacaaagggtccttatgagaagaagggccttattgtttatggcatcgagattagaccagtgccctaattgtatcctactcctaaatacctttgcggtttccagtgttctcttgattccaacctgtgttgttatcttctctttccctgccttcttcttcttttccttttctatattgatgcagaagaataatgtttttttgaaaaatgtttttatatgatcagctttttgattatgacattactatatatgcttgaatttttgtcttggtttgcaataatgtctgattgaaagagaaatacaggcaaataagacggtagtttagcagtttgtgtttatatcgttgttgtataacgcctaagctanaaaaacctcatgatcatgcatgttaatatgttatgtgatttg

SEQ ID NO: 41532 - DNA, 536 bp, Arabidopsis thaliana columbia
taacaaatattacaagactagttaaggaaacaacaaactgattaaggttttatgtacaaaacagagacgactaccaaaggagagggccagacgtggtagcagtggtggaagacaaacatcctgacatctcaagaagaacaacaaaacgaaaaacaagtttcgtagttgaacttaaagcttccatcttatgtggtgagcttcttgcataccaacatgtcaaacgaccaagaactatcagtagcagagtctttctgtgagataaacctttcaaaagtgtaacactatcaagcagctgcaagtagaacaaaaagtgacagaaacctgaagcaatcaaagagagattgcccatccaaaagcctgaaaagaaactatgtttcctaagtactaagaacttactaaaaaccataaccttaccccaaaaagtgtaagtcacagagtataagggtatgttatactctgaggagcaacagtcatagcagatctatggtgtgttatcagactccgaataaaaccttactccataatctttgcgatat

SEQ ID NO: 41533 - DNA, 443 bp, Arabidopsis thaliana columbia
caacacaaatatgtgacagtgaaatttgttgtctgcttaatgttctttacgtactccaaataaataaaaatgtatttagatttcgttattgattaattttttagtttatagttatcaatatatgaaaatacaacctgctactagtattgttccgatattagactaaatgcacactcttgttgttatttttttatttttttttcactcttattgttatgtatgttcatatagtggttttactttataatattacacatacaaagaatcgtataaaaatatatgagcaacggaaatgtggaaatgatatgtaatgtctctaacctttcaaaaaatctaattgcaaaaagaatggagtaggtaacaaaggatacattgaaaaataaaataaaaatagcgcataattatgtgattgcataatcatatatatatatatatatatatat

SEQ ID NO: 41534 - DNA, 271 bp, Arabidopsis thaliana columbia
agaataccctcagtttgttgtttccttaactagtcttgtaatatttgttatttgctttctttatctagacgtccttgttttatataaacagtctatgtacgttgtattgtacaatgcttaatatcaataacaacaccctttggcaataaacacaaaattacatatcgtgtcaagcatagtagtgtacattgtacatcctttaggtatatgaaagtgactcagtttcgtatggcacgatatctggtatggttctgcacctgggacctctatt

SEQ ID NO: 41535 - DNA, 409 bp, Arabidopsis thaliana columbia
taaaacaagttgacagaatttggaaaccaattagctttctttgtaactgtaactgcgataatatggtaataaatttccttttgataaaaacattacgtttatttgcatgtaaggtaagtgagataagatagagacattcatgacttgataatatttttaaataaaaaaacaatctatattcttgatttatgcagttggtgaataattcttcggtgaaccgtgcctacggttttagaggcctacgacaatatttaagaatgtgaaattttagattatcaaacaaagagtaaaatgtacataaacttaaaatctgacaaacaaatctttaacaagcattaaccatagacccgcttctaatacctgagttaagtatcagtattggtatgaatcacacctttggcatattgat

SEQ ID NO: 41536 - DNA, 940 bp, Arabidopsis thaliana columbia
tgtaagtcctacgtaacaaaaaataataatatatattcaacattattttggtttgttaataaaaaatcaaagttgaattaatgaaatgtttttttttttttgttatgttcttgaaaagttggaatatttttgatatgggacaggtgatacgagcgatatctggatgtaggagagaagcggtggggatagaagaagaaaacagagcattaatggagaatcgtattcaaaggtttcctttttggtcggagcaagttactacgacggggatggagtcttccaagatacagaacggtttcagcggtttcagaggagtgatgaacactatgaagaacataaactcgttacttctcgtgatcttgatgcaaggtcttgtttattacattcccggagacacgacggttccgacggggacgatgatgaggttaaagcagagagtggcggcggaaatggagaggataggggtgaggaaaggaatgatgatgtacgagtataggagaagcaagacggcgatggaggagcttaaggtggagctggaacggcggtgttgcggcggcggaggagaggaggaggcggtggagaaggggttgagagagagaattgagaatttgaaaggaagtgttgggagtttgaggaatggaacagagagtattgttgctcagattgatgatttctttgatgatattgttgatggtaggaaaatgcttttggattattgtagccacaggtgatgaattaaaaatgagtgttattaggttttaattagagatgaatcagattgttaattaatgggaatctctctggttttatttgaagttttaaaatatatctaatcaaaatatatgttttattactattgttgttgttgttgtttaaattcagaacagagagtagatatggactagtactgtttgtagaagttagaatgtgaaagttagaaagg

SEQ ID NO: 41537 - DNA, 1192 bp, Arabidopsis thaliana columbia
tattcttgtgctgtgtgacaaggaaatggagccagagatgctagaaattgtcaagggttcaaaaacaagagcgcaacgaatggtggatgcagctataaaggtatcgattcatccacttttctagattctcgaacatacatatgttttgctaagttatggtcactctacggtttctaggctgcatcatctgtgaaggaaggggaagatgtgaacacaatgatccaagaagccttagagttggttggcaaaaatcagctattacgcagctctatggtcaaacatcacgagcatgtaaatggcagtatagagcatcatcacaacccatctccttcaaatggatcagagcctgtggctaacaacgatttaaactcacaagatggttcagagaaaaacgctcaaatgccttcagagcttatcacctcctgtgttgccacttggctcatgattcaggtaattaggaaattgcttagaaggattgcatacccaacgtgataatctggaggccgttatgaatctattatactaagtttagagttggtttggtactaaacctaggctttagtagtttctaaacttttcgggacattgaaagtagctatccgtgtgtgccaaatgccacttaacctaggacttggattcatcatttatcctaaatcttaaacagactgcagcttcatagtaatacattgaactttacttctcgtgacttgcagatgtgcacggagagacagtaccctccagctgatgtcgcacagcttatagacgcagcagtcacaagcttgcagccacgatgcccacagaacctaccgatctacagagaaatccaaacgtgcatgggacggatcaagactcaaatcatgtcccttgtaccaacttgaaaagctaactcatttgggttggttttgttttgaatcttcgttaggtaagtctagtctcctttttactagagtagatgatgacatcttcacctgagaaaatggtgttataagttcacgaattcaagatagcttgaccagaggtattgtagttgctgaacaagcttttggcttattcaggggctattggtagtgaaccattggttctgcaacgtaaaatgatgtttatgcttatattaaaattctcatcaatgtcgttcagcaatcgctaaaatgcctttttggccactttcaatgtttcgaattgatacaaatag

SEQ ID NO: 41538 - DNA, 554 bp, Arabidopsis thaliana columbia
ctcctagaaccaaaaggatcctaaccattcaatctgcatacaggtatataactttatcttatacaaattattgtttgagatgtcgaaaactgtggttcttgttactccttaatgttttgtgagcatcgtaacattttttagtatactttagttttctattggcaacttatgtttacagagacagtttgcaatgtctaatagcatcacaacttgcagagatgatgatggttcaggcagcacaggcctattcgtcggagggtttattttgggcggacttatagtcggtgccctcggatgtgtatatgcaccacaggtagtaatctgttacatggtttagtttgatcactcttagagcttgtattcgtttcaatcaagaagttcttgagtggactcgaggagctctgtaaccttctctgtttcactttgactcatcaatgtgtgatgttacttttgtgaattgtatcagatcagcaaggctatagctggagcagaccgaaaggctctcatgaggaagttgcctaacatcatatatcgcgaggaaaaagctttggagg

SEQ ID NO: 41539 - DNA, 396 bp, Arabidopsis thaliana columbia
tgattgcgtctaacaacaaaagaaaataaatggttttctacaaggcctttttaaatatcttataactgaggcccaatctcttgaagagaacatcacattcacaaaccactatctttgattatttggtaacggacgcagaacacaaactgaaagtagctaggttcaagaggatcaatactgagaattacaaatgaatatatagttttagtttttattcatcacaaaggcccaattgtttgtctatctaagcttggcacaagtcttgtttcttggtctgtaagttacataaattccactgtttgttgtaataatatggacaaaacacatacttaaaaattaaaagttgcaagttgaaagattcgtcttgcttactttggcaatatccttagccataag

SEQ ID NO: 41540 - DNA, 463 bp, Arabidopsis thaliana columbia
gacatgggtaacaccaccgcatctcggagatccttcgaatcttcaccggcacgaccacaacatctgcttgtggaacagatgagtgaaaacaggaaaggagatggcttgtggtaaatgtggataaaaggcttgaaccagataggtgctagggctaataggataactgggttgtgctttttattcatccggcccatcttgctgtaagcccaaacgtaactcaaaagtcaaaactagaaaccctagtttctcattttcatgcatgttcaggatgaggcgacggtatgaagccgcaacgacaatgaatggccaagtagatctctgatttgttgggacaaatctcgagagcggcaaagagggaggtgcggtgtaaacgctggctcgttgaggataagtatgacaaaaaactggcaactttatatatgtcttcacccggagtgagagagacgatatattagagttggag

SEQ ID NO: 41541 - DNA, 345 bp, Arabidopsis thaliana columbia
ctctccatagctcgcgttgactacgtcccttatagattgtttggaagtagaatctaaatacctttgtaaatcttgatgctagcaaatctcgccaaacaaataaccatctcatcactagcttgttcagaggcattgaaaatatgctcggtagtaattgatcccacaaagtaaaaggtaacctttcatcactacagaaaagaagaataatcaaccaaaatgaattgaaaacatcaaacataatttatttatgaatgagaatacaaacatctcagtatctgtgttcaaatcaatctttttgttcgctaattgttgacataaagagtctccatttcacaaacgtttatg

SEQ ID NO: 41542 - DNA, 462 bp, Arabidopsis thaliana columbia
cccaaactaaatctaacaaccaaggatgttttcttcttcacagagctggacagcttcaggctcataatctctatctccatctattatttatgagatggagaaggtgctaagaaagtactagaactggcttggtctcatgagattccacgagaattcgctcttgttttattcatcttcttctttctcagaccatgcttcgtaaaccaactccaacaacttgtatgtttactggttttggtgctttcaacttgagagaactttaaaccttcatcttcatagtagtccgcttcgctgctgctactctcagtttcaaagatgtccaattcgctgctgctactctcagtttcaaagttttcaattcgctgctgctactcttagtttcaaagttgtcacgtcgctgctgctgctacccttagcttctccgtcatgatctgtacacacactcaataaatcatgtatcga

SEQ ID NO: 41543 - DNA, 770 bp, Arabidopsis thaliana columbia
gaggatactatcccggtagtaagtagaataaaaagtatggtagacagtacatgattatgaatgaatcatgacgttctcaaatctttttgtaatcagattttatttccatcacaattatttatttttagtcattacaaaagtttacaccaaaatagcaattgttacctttaaaatgcatattttacaagaactacttacataattagttttgtccatcttaaactagctctcacctatacctgaacctacttgcaatgttagtagcaaatttctaacgacgagaataataataatgaaattaacaatctgcaagtggtagtaaattgaagtttcactaaccgagaatcaatttttgtattaggaaaagtttgattccacgagatgatgttccatctttaatgtctgacaccagctttattcctctcttaatcttactttgtttctaataaacaccagaagtcttctcttacttatagctggatatatttgacttcggaataattagttagttcggtttgggtttagttatttagacctggtaagaaagccggttcaatttacgaagggagtagtaaaaccatatattgaaccaagaggccaagctagttactcgtaggcctgggcgttcggtttgcttaattcggtttgggtccggttatttagaacaaaaagtttgatatggccggttcaattaaagaaggggaagtagatttgaagaataaaaccagtgagtccatttataaccaagagtccagaatctttttcaagaa

SEQ ID NO: 41544 - DNA, 591 bp, Arabidopsis thaliana columbia
tcacagagaaactaaacataaacttctcctcagatgtattcagagaatagctatactccaataaagtcttaaactttgagccagtcaagtacactgatcaaagggtttatgaaaaacactaacttcttatcctctaattgcgattacccatagacgaaaccaataaaaaagcaatggagaactagagcacagtcactacaagaaataccctataaaagtaccgacctgcaccgatgaggatggtgagcttcccgagcggaagagccatggctagagacgagcttatacggcgaagaactaagatggcaaacgaatccgcgtgagaatatctaagagagtattggtaagagagagctgcaggaacgtaccggtgaaacagaggcgttttttgggacgatgaagtgaggcagcgagagagatacgacgtgcgactatattgttcgcttgttgaggcaacaaaacagagttgcttctaaaacccgaaccgaaatgtccggtctgattcggtctaaatcacgattaggttcgttttaaatcctaggaggcaataaccggacggatcataaattcataatagagacagacaaattg

SEQ ID NO: 41545 - DNA, 522 bp, Arabidopsis thaliana columbia
taatctgttaagatctttaaatctgcaaactagatgagaatccatagaatatttctgtgaccaatgtagagtcgccattagaagatcacttttcacctctctgttttgtttcattcaaaagatgtttctctaacgttatcttcatattacttctttgtgggtcactcgtgtctcctctacccttcctaaacttacaacaactgactcaaactgtccttgaaatttccaatgcgccagtcttttcatgggacttagttgagctgtttagtttggtgacagtgaaatattattaaagtaacctaaatgaaagtttcaagtggttgaaacgtggcctcagcaactgtaatggagaagcccaagctctttatctcttatcatgtgaacaatgattttgtctataaatgcagaaactcttttatttttagatacaactgccaaaacattactctaaaaatagaaaccatctccttttatgccatttgattcatgatgattataaagaatctcttctgatacagtttt

SEQ ID NO: 41546 - DNA, 627 bp, Arabidopsis thaliana columbia
tatcatcatctttccaatctctcaacaatctattgcttctattcttcttcttcttcctctctcgagaggttttcacaattatattctcaaaacttttctccccgaatccgatttcaaattttgaagaacataggtttcaaatttgagcagatgggtggttctggaaattagatcaaatctcttgttgttggttggttcttcaatggcggctcctccgatcatcatcttatgtacaactatcatcatcaacattcgtcggatttgctttctcgaactaatagccaaaaccaagatctctatctctcactacaattgttctcggattgtccaccatcgcttctccaccaccacctttgcttccgtctctgagcatgttctgttctacaggcagagcaattctttagggtttgacacatcaaattcggagagttgggagcagtagtcgtcgagattccgaaggatttgtttgacacaatggctcgctgagaaatttggtaagaagatctctaatcatcaaaaataatagagtcctaggttccttcagattgtgatcattttgcctcttgattattttgtttgcataagctgagcttgtatgtttggcactcatggctaatgattttttga

SEQ ID NO: 41547 - DNA, 493 bp, Arabidopsis thaliana columbia
gtttcaactttcaaaccataaattcttcacgtgtctgtttgtctgttatctctacaagtttcttatatcaaaaactctaaaaactttttttctttttctttagtaatgaaatttggattagattccaactactttaaagaacacaaagaaattttaaaaacagttcacgtcgtaaataaatcaagtatcacgacaccacaaattaatgtcacgaaaacgcgaatatagagcttcagttatccaatcctatatatataagcttcctcaaataattttctgttgggttaaaatcaagtaataatattgaagtagttaaattaaataaaatacgtattactattttttaaaacctaaaaataaactgctgaataccattggggcaaagtttgttgtgctatctcaggttacgattctaccagggaagttcgatgcaggggagttcgattctaagatttccactataccaccaaaaaaaactatttaaggatatggt

SEQ ID NO: 41548 - DNA, 499 bp, Arabidopsis thaliana columbia
aaatttaatatttaaataattatatatataaatagattttatataaattcgaaatagaataaacataaggttaaataaaagtaaaaaaatcatatatttatatttccataaggtaaaaatgttttacgatattagtaattaaacgagttaaagaaatataagatttaagatagaatgttgctagcattccaacctgaattttttgaagactgatttcagttagaattgtggcaacaaatatgaagattccagtacttaggtcatatggtaaaatcacgcgaattcttaagttttacaagatcgaattcggtggttctctttgtaacttggctttctttgcttagaagcgatccaaaccttttttagtagtaatgttgtattcattttcctgtagattatttttatatgtatttcgtaatctttgtaataatgttaaaaattaaaattggtataaaatttacctttttaccaaaaaaaaaaccaacctgaaaaaaaagga

SEQ ID NO: 41549 - DNA, 601 bp, Arabidopsis thaliana columbia
ccaatttttctggatatccgcttcgtgcccagcctagtgaaaagttacatgaagaatatttacggttaaagacaatacagaaatgtgacttctgtgaaacatttttttaggatttttagaagggttataacttataagtacaaaatctacataacaaatagttcttataaaaagacttcctttaccaacaattgtagttgaatttgaatataagaacataaattatatatgtttaattacgaaatagaaaattttgacatagaataatttggcaacattttaaatattaataaaaaaaattcccatagacatacatatattcagagaatttagacaacgattgtaattttgctattctcaaagggggaaaaaacagagagattcaaaaggaagagatgaaatgttgtcaataatattttcatgaacttttctcttccaatgagatctttaactccaaatcttcatttcctctcttaatcttaagtgtcaccttatcacctacactgtactcatccaatatcttcatcaactcggctttgttcttccctgattaaacacactcaaaatctcagaaggacaagaaccaaaacttgagaattat

SEQ ID NO: 41550 - DNA, 552 bp, Arabidopsis thaliana columbia
cgttcaagtaatctatctcttgataacgaaaatcctaaatgaatacaggttcttgaaactctggcagccctagatcgagctattcattctcctcatgcaactacccaggtaaatttggcaaaaccccatgcaggattctgtctttttacttgtataatacaacttgatatttattatagttaggttatcactttatctttttctctgatatctgaatgctcttacaaagcttatagggcaatataatattatcttttataggaggttgcaactgcagtcccaaagcttaccagagagccttctaggcagtacgctgattttagcattctatcctccttaaattctcaggtaagccatatcaattttcttctatagtctatgcccttggattgctcttgttaaatcacttcttgcaaactggatcctgaacatctgattcttgactcattgctttcatcttgccagctgtttgagagctcagcgctgatgcaagtgtcttctgttaaatcacttctttctgcactccatatgttgtccatcaatccatgacag

SEQ ID NO: 41551 - DNA, 952 bp, Arabidopsis thaliana columbia
ccagtgtgctctaaaggtgatgtttgagatatttgctctttaaaaatctggatcaagctgaaaattgaaacactgaacaacgagagttgttcgtgagtctctcaaattttcgcaacacgatgatgaatcgaaagaaacatcttcgggttgtgaggttaagcgactaagcgtacacggtggatgccctggcagtcagaggcgatgaaggacgtgctaatctgcgataagcgtcggtaaggtgatatgaaccgttataaccggcgatttccgaatggggaaacccagtgtgtttcgacacactatcattaactgaatccataggttaatgaggcgaaccgggggaactgaaacatctaagtaccccgaggaaaagaaatcaaccgagatcccccagtagcggcgacgaacggggagcacccagagcctgaatcagtgtgtgtgttagtggaagcgtctggaaaggcgcgcgatacagcggtgacagccccgtacacaaaaatgcacatgctgtgagctcgatgagtagggcgggacacgtggtatcctgtctgaatatggggggaccatcctccaaggctaaatactcctgactgaccgatagtgaaccagtaccgtgagggaaaggcgaaaagaaccccggcgaggggagtgaaaaagaacctgaaaccgtgtacgtacaagcagtgggagcatgcttaggcgtgtgactgcgtaccttttgtataatgggtcagcgacttatattctgtagcaaggttaaccgaataggggagccgaagggaaaccgagtcttaactgggcgttaagttgcagggtatagacccgaaacccggtgatctagccatgggcaggttgaaggttgggtaacactaactggaggaccgaaccgactaatgttgaaaaattagcggatgacttgtggctgggggtgaaaggccaatcaaaccgggag

SEQ ID NO: 41552 - DNA, 656 bp, Arabidopsis thaliana columbia
  unsure (1)..(656): unsure at all n locations
taaatattgttaagaataaattttcattagaaaaaaaagattcgtcaatgtcatatgtacaaaaccgcctacctagtaccttcttttctgtacactctttacaaaaagacattcttttaaaaagcaattatctattaggaaaatgcgtcctagctatatcagaaatataagtttaatatggtaattaagaagagctttttaactgtgctggttacagatagcatctatatattaaacttataaccaaaatgaaaataaaaatcatgaggtctgtgaattattctatgtataatatatacacgtatggccaacttggacgcagatccatcccctttagtcgtagttagaagttcgatccgaaattattaaattgaagacgataaaataatcaaggaaaataactgtgctggttacagatagcagctacatttgtaggttagaagttaacaagacgaacaagtaacagaagaaaacatatacttttttttcttttttcttttatgaaattagttgtggttaagttggatttgcatgtatgaatattgaatgcagttgtttcatctanaaacacattgattgaatattggcgtactgagtacgacactatgtggtaagaaaatgagggaattggtttggtaagtaaattgaaaatgtat

SEQ ID NO: 41553 - DNA, 609 bp, Arabidopsis thaliana columbia
gacgaataaattactgtatttgtgcattgctatattttcttcttataaaattttttaaatatgagctcattaagtcttgagatgtaaggaaaatatatggagctcaaaaagtgttgtactttttgttagttggatcggttaattgcgccaaacacgtatataccacagagccaatggtggttcatgaccacataaccactgtccaactgtggctcaacaacatggctcatttgtttgctttgaccacaccacacgcacctaaagttacctaaccctttaggcatctccatctctctttcttacatgattctaatttcatatccttttttagatatatatttttggttttgcttgtaattcatacaacgttcacatttggttaattttcttaactttattcatttgttttcattttgatttttatttattttgtttgcttgtaatgcatacaatgttcacattttagttagttggggaggataaaaataatctgaaagtattaaatattagttgatcaatgtctagttcgacctccaaccccaagtgttatcgaaccccattttttagctcaagttacaacaataatatccgattcactaagtagtaagt

SEQ ID NO: 41554 - DNA, 530 bp, Arabidopsis thaliana columbia
gagaatccttccactcctttcatttccttgtgtgtcccatatccgaaactattattgttacatatgatgtatatatagtattacacttcattgcttgattgtcccttaaagtctattcatattgttatataatgtatgaattttgctgtagacaatatgaacatgttcttgtagttctcaatgtcaaagtgattaacgacatctagaccattttccattagggctcattcgttatctaactttgacaagagagatgtatgaatagaatattttactttaacaatcatatattaccattttcctatctaaatctgtaaatgtagtcacatattatattgtttttcatccatttacttattaattgtgttgctcatgctagccaataattctatttatttccattttatcatacatcttgttggatttgaccatatcatgaacggtcaattgttatttatcataacgagtgtaaaatattagggttttgatgatgatgtatttgaatatatcaatggatatagaaaaattat

SEQ ID NO: 41555 - DNA, 562 bp, Arabidopsis thaliana columbia
  unsure (1)..(562): unsure at all n locations
tcccttatatatatatatatattatatattttgataatgtatggtgtcgaacatcaacaatcttctgcttcccattgtttatggacagcatagcttttgtcatgacaatgctatacttaagaaaatgacaagagttcctttttttatttatttttcttttaatgacaatagtgaatttataattactttttttttgttcacatttaaaatagttatatatatgtgaaaagaatatgagtttttttttgtaaatattatgaaagattcgtgagatgcaaatgttccagaacatggcatgttgaaacaagagtgacacatggattatgatgacgagaagaaaagaaccttgtctgtcgtatttgcttagctattttggtggccctggtgaaggcaatttaaattgactataattattatcatcataaacgtcatgttagtataactctgaaattctgagcaagaaatttgacccaatgttaactctttgaaataccgttatttatataacttttcccanaaaaattagaatcataaaattacccatgcatgcatacctagttga

SEQ ID NO: 41556 - DNA, 438 bp, Arabidopsis thaliana columbia
aacccgcaagcgttgcactaatccatccatatgacacgtacaaggagagccagagtcactcatccctgtagaacctgagtctgtaaccacaggtcaacacagccactaacaacaaaaggtataatgagatagcaaaaattctgtaaataaacgaaaaaggatataacgacttctttcattccaaacggaaaaatcaacaagtctcaggtgtcacaacaaacatagaatccccgttacagaatgaagcagtttatataaccacaggtaactctcttggaaagaacaaaggtcatttccacagacactagctaaaactgaaaaccattgagtatgcataccactatctacccctttaacgacggcgatcttcccttcttaatgaatccctatctttttcctcctgtcgttacgatctcttctagattctgccttcctttt

SEQ ID NO: 41557 - DNA, 859 bp, Arabidopsis thaliana columbia
aaaaaaatctaatgaatgagaaaaaattacttcttaatcatgttacataatggagaacagatggactaataatttattttaattagaaaaaaccttttctgtataaacattaaacagtgataaaaaaaacactcgtttaactttctaagataattgaattgagtgggtcaaaaatatcctgaaatattaatctctaaaaatgtcaaaaaaacatatgcaaatataaatatttatatatgttttaaataatttgtaagaaaattgaaccattggttgtaaaaatttgaaaaaacaaatactttgaagatataccaatttttagaaaaacactgaaaaagacttaattattaaaaatatattttcttccattaaatttaatagtcattcacttcattttatcatatatttgatcaaatgatggttatctcacctaattatcatttatcaattatcatcacctaaatgatggtattgcaaaacattggaccggcagtctggcacgcaagcgttggctcacatcttccacgtaattgccacaatttatgagtctttggagttatctaatagttatactctaaccaaaaacatcaccagaaagttcaacagagcatggcacatagccacacactcccataacatttgggtcccttagttaactcgagcatcaatgtatatgacacttccagattcttcggaagttctaagccctctcttttcattctttgaatgcttttttttttactgccatgcgtgcatttccataaatgttacaaatttttgaaaaaatggtctcaagttatgtaatattcatgcttgcttcgtgaattcctttgtccgattagtaatcaaatgagcgatt

SEQ ID NO: 41558 - DNA, 508 bp, Arabidopsis thaliana columbia
taggggtggcatctaaactagataccgcaaactaatacacttacactaatacacttacacaatacacttacacaatacactcggactctaatcaatacattgttaagaaagaaacaagacaatatcaaaaccaaacatcaaaaccaattctccaatcaaaaccagacatcaaaaccaaaatataacaagtaaccaaaacacttcactaaatcttagcacaactagctaatgagctaatgaggtaaaagagaaagaaacacataaaagcatggagactgagctaaacataaaccctaactagaacctctttacacaaaagcaatcaaaacaagttccagaggttatcaaagcatggagactcctcaagtgttatcaacgaccactcgatcattctcctatcaaaacaagctccagaggttcaaaactcaatgaatcttaactccaacactcgatttgtcatttactgtcttaactcaaatttcaaagctaatgttcggaaagaacaaac

SEQ ID NO: 41559 - DNA, 839 bp, Arabidopsis thaliana columbia
ctttgtaatatcttgttttttagtaatagtagtataatctgattttttgtcatatattgtcttgatttctctgtgatatttataagaaataaacatttgtttctttttacctccaatatttttgtttttgatatatcaaaagttaagggaatagattttaattaataaaatatattgataatattcttaaaagattattaataaattaaattgttttttttttaacgtcaatttcattaatttttaagaaagagtacatggtaaataaagcccaacaacacaattataaagtccaactacaaacccaatagaaagattacaacttgagattaaactaggtttagaagggacacgtgtttaattatctgttcttgcgcatgttggatgagaaaagatgccgatatgactcatcaccgccatcttgagttgaaccgtcgatcgaaattacctagtccgtcgttgaaatttgaaccatcataattattaaactctggaacacgcgacatagcaagagggcagatcagttgcaaaacacactctcctgaactgttctacgccggccaccaaagctccactcaacacaattcacgatcttaaagaggcaccttcatcgttaccagattatggtgccaacatgggaatgaaggctttattcttttcttactcagaattgagcaacgaatggtctacaagattctgaattagacactcagcttctaagatttaagatatgcaaaaggtggatcaaaactatacacattataaaaaaaagccataaaggctaacagaagctcgcacttaggcgagaaaacaaaaaccggacaaagccaaagacaaaa

SEQ ID NO: 41560 - DNA, 1193 bp, Arabidopsis thaliana columbia
cgccctgcacatatactctcttgacggtgatctcacaagggatattgtttaacccgtggttgcagaaatttcgggcttatcttagcaatggcagtatggttcgcctccgaacgaagaagtttgactgtaatgcattggctgatttgtgccagtgaatgtaccgtgcctgaatggcctaaagcttggatctgctgtcctgacagaactttgaattggaaccttcttatctggtgcagtactgaaagatatggtggatggaagttggccagaccagggttcagcataataattcgcggaagaaactgctgaaacaagtaatatatgaaacaaactcaaaatcaactatgaaaaagctattaaagaactagaaacataacatataaatttagcaactcaggatagaaacctaaccaaaaagaaaggctaccatgaccagtaagatttgcaaaagaaaacgatagtattcacaaaaggtatacttattctaagcatgagggctagttactcagctacaagcctagtgattagccaattatctgtatttggctgttatgattaccttcactaaaatttacaagtcctatcgtataaagcaaaacagcaaaccaaccagaataccctacccatactaaaagtgttgtaatttccaaatcaaagactaaaagaatcttatcactacaactgcatctatacaaaacaaagggggatatgaggacttacgagtcccttgagaagcaccgttaagtaccatctgaggtctgtccaatttgaaatggcttccactagtgttagcagtagcaacttcactactaggccactgatgagccacagaagctttattcgctgcagaaacaaaagggtgaagaaactgtcaggaagcctgaagataaagctttgatggtttgtcaaaatgtgtagccttaccaagaccaccaggagatgcaagactaccgtttggctgtgacaatgtatatccagtggatactgtcgaagtggtaggatacttttctgcttcttccatctggacaaaatcaaaacaatgatgaaaacgccacagagaaaattgcatctctcaaaatgctgacaaaactatacccaattgaagtgagcaatatcaaagagaaaacacaattgtgatctgagaaacaaaaggcattacctttcgtttaccaagagaaagcttctcagagata

SEQ ID NO: 41561 - DNA, 469 bp, Arabidopsis thaliana columbia
actgactttttttttacatttgttaaatttttcgtcagttttatctcacgcgccgcaacggaagtgttgtagttacgcgctgatcgaacggttgttaaatgattgggatttttggtaatgaagaatcttggcgcgtgtcttttacacggtatatcggcgagataggatcttagatattcggtttaatatttatctggtttatatgaataatatagtacgtgttggtcagagacaagagtcatataggaacttatttatattattttttcacaagagagataattttattgaacaagacaaaacattagatggactatgtaatgccccacaacagaaaaataacagatatatattaggccaaaccaagcccataatagaaactgcccatgaaaaaaagatattttatcttttgtctctctctatacaaaaaggctttgatattaatttcttttaaattaattggggtgag

SEQ ID NO: 41562 - DNA, 571 bp, Arabidopsis thaliana
tagtaacaaccgccagtgtgctctaaagcgctttactccaacactgagttaacttagcgtgaaaccggagacctatctcccacgaaataagaacacacgtcgactgaagtttgagacgagtaaatatggcgtcgcacgtaaatgtcctcctgtcgtccttccccggactttcgcttcccccgacagtttcctttgcattaccagcgacgtccactctatcagatctttgcgaaaaggtctcatcatatatcccttattctgtgcccctccggtccctcatcttaacaacaacaaataacaaacaaattctcccctcgtcgctcgctgtttctgaactcatctcaccacatggcgactcaactctcctcccccattcgtctcacggttactatgtgtggcggaaagggtgattttggctctcggcttcgtgctgccggtgggcgcatgtcaagcaggcgcaacggcaatctagggcgacgacaacggctccaccgtaatctcgatgggcggcgtcttcgtacagtcacgaggccaaggcgcttgcagaatacctcgccgtgaacccgagatg

SEQ ID NO: 41563 - DNA, 590 bp, Arabidopsis thaliana columbia
tagtaacaaccgccagtgtgctctaaagcgcagttcatcccatccaatccgcagagccaggaccagggccaattggcagcacgatctctactagttccgtatcaactcccacttcgattcccactcccggcgcctccccgagttccagtgtaagctccaactctagctccgaaccgtctgaattcactgccaatccctccgttggcggtggcggcgacacctacaccgactccgcgcgctttcgcatctacggcgcaacgggcactgacgcggagaacgcactacaaatgctcgagtccgcatacacctgctttgtgactgacctcggctggcgctcttcaggcctctcctacgactccaactctgatacagcggagatatggtacaaggagaatgtgtactctgttgcctctctcgacggcaacgctgccggcgtcatgggctctgactatacaacgggctacagctacgtacaggtcgtaaacacgttcctcgcagatccgtccgttacggtgcacgagtacggccatgcactcacctaccacgttcgcaactgggtagacagactatgactggcgcgtggtgggagc

SEQ ID NO: 41564 - DNA, 818 bp, Arabidopsis thaliana columbia
ctcgcatacacacacaatgaaagaaaaattaaaattgataaggtagaagaaaatatagtgatgatgataaagaccggaacatacgaagggcccaggagacaaggacgaaacaaagtcgcccataaaagaagtacccaaaaaaaaggacttgtgataaagttggcccatcgtcgatgatcccctgtgaatacccgaaggccaaaaatgatggggggacccactgaccaagttgcacggcgagtgatgtgttctgtttgggtctaaatgggccgcgaaaacgatgggcccaacttattcattgctttgccagagtcctttgtgttgtttgtagattgtagtactaacggcaagctgttcgagactattgccagtttccggaaaagttttctgacacagactaactttttgttgggtttcccattccaagtatcaagatattattagtttaatctggacgaacgtataaataattcatttcgaaaattatcgtatgtagtaaccaaccagttcagtattcttaagtgaaaaaagtacaaaatttcaatacgatcaaatatgtactagtttaaaaaaaaaaaacatttctcatgcaaaataactggcaaacataaaaacgggttgggtaacctgaaacaaaactccagcccaaaatgatgcccgcttatacggcccaataaagctaaagtttgctgcgaacttaaaacggcagcgtttgctaattagattgagtaaagcgatttcacggtgcaacagtcgaagcttctcgacttgctatagtttcgaagcttcgtcggtccaacaagaccttgcgctagaag

SEQ ID NO: 41565 - DNA, 468 bp, Arabidopsis thaliana columbia
tatataaaacttaacaaattaattactgagataactaattgtgattagatatttataatttgatgtagacacgcaaatagttttgctcccagacgatactatcgaggaacaacttcgaaattttttctccggcgccggtggagttctctctcgtcggcgtcgggaactctctgcttctcgattcatttgcaaactctttcgatccctttgtaaccttttcatccttctagcttctctttttcaaatttttttttctcttgaactcttcttctccatgcataccttctacggaacttcagagatccttgatagaacatggtggtggttccccgtgagccatctcttagatctgctcaggtcgttggtactgaagtcggcaatagagaagcctctcgaatccaaatgttctctagccttgaaactcgagcttagtctcaaattctcatctaaatccttggagtttagatg

SEQ ID NO: 41566 - DNA, 616 bp, Arabidopsis thaliana
tcaaatcagacaaaagaaaataaaatacatggttaagtagttaataaacaataactattcattaatggttaaataccaaccacagatattttatttttaaataaatataaggtcttgccctcaaaatgacaaaaaaaatagcaatataaaaagagagactaaaaaagagagtgaaaagagagatttcgatgtgaacaaaaaaagaagaataagaataaaagaaaatgtttgatggtggagtacctgagcagatccaccgtttcatagcttctccaccgccaccgcctccgcttccgccgcatcaaccggcggcggaaagatcactaccttttcctgtctcattctcttcctttaacaccaatcatcaacctcagcatatgttgagcttggatagccgtaagatcattcaccatcatcatcatcatcatcaccatgacatcaaagatggtggtgctactactggtgagtggataggtcagacggatcatgatgatagcgataatcatcatcaacatcatcatcatcatccatggtgtagtgatgaagttcttgctcttcttaggttcagatctacagtggagaattggttccctgaattcacttgggagcatacttc

SEQ ID NO: 41567 - DNA, 506 bp, Arabidopsis thaliana columbia
cttctcctaatcactggctcaagtaagtcctgaaaacttgttgtttctgtagttttctgagatggcaagacaaagtgtaaatcttgaaaagaagcagtaatgatttggtagaatttgtgaatgtacaggaaggtgaagagctcagggaatgggagtgggaagcaagttttagcggccggtgaagttgagaaccaccaaaaagatgtagaatcattctggtagtcacaaaattaaacaaaatgaggtcaaattttttgcagatacacacacgttgactgtgtctgtctgtctctgtcttttgtcctctcgggtcttcaatggagatatagagataatttagattacattttatgcatttaccattacagtgataacttaatattcaaataaataataagaattaaagtatatttctaatcttgatacgacgaaagttgtttatcatctcgtatcaaacgtagaggcagttgaacaatttaacaaacgaaaatgttcttagattggta

SEQ ID NO: 41568 - DNA, 1007 bp, Arabidopsis thaliana columbia
tatgtaagaaaaaaagttgaattatgttaggaaaaaggtgtattaatgagaggaaccttttctccacgatattaaaggttgaataatgtctcaatgagaagaagcttttcttcacgagaactatatgatgtttaaatttcgcaaactaggccatattttgcgaaaatggtgagttattaacctaatatgatcaaacattcctaattacacaaggaaaaaaaaaagagagtatattcaaaagattgaggaaatggttttgcattctggtacaccaaaccaaatagaaaagaaagaaaacaaaaaaggaaggtaaatttccatgaaaatgaaagcaataagtgaaggagagaacatattctttctttttcctttgcgagttagagagaagagtggggggctaagcaaaagaaagaagtgggcgtgattcttacgcgctgacttaatgatcagtcaatctctggcccatgggcttctcggtcattttctccgacattattacctcaaaagttagcccattgtggacccgcttactttccccctgctttttaccgtgttatgtggctccacataaagcccagtggtcactccctttttcctttcctttgttttttgtcgcaagcagcggggattagtgtccgttaaacatcatcgactcaaattgtttcatgcaattttccccttttttattggttatcaatcgaataaacctctctagcttttgtaactagtttgagattattatgtgatatatgcacggtactaaataaatacataatattgtattttgtgtggtactaacaactaggtttagtgagaataaaaacgacgttgtagagtttgtttagtaagaatatttttgtccaacacaaactacttttaaaaaaaaattccaaacgttgatatacctattgcctattggaataatcaacgcagattcatagttttttatttatctccatacttgggtcaaaaacgtatgagatttaatgatcgaaaacaatatccac

SEQ ID NO: 41569 - DNA, 514 bp, Arabidopsis thaliana columbia
cagtgtgctctaaagcacagagagtcgctgataaagcaattggttagcaagaacaacaacaagaacaataatgagtgggaaatacctggtacatggccatgttgcgggcaattgatgggggtctaggaggaggtgaggatgagatgatggaatgaagtccagagaaaagtgccaagtttttttcggccgcagtcggttgttcgcccttgtccatccttgatacttcgtcaccctccatcttggggccatttcttttctctctttccatctctaatgtactatattagatatctaccagactaatatgctgcggccgtggatctgtcgcacttgtcgactacaaaaacacctgcaccgtcgctccatcaccaccacgtccgccctccgaacagcgcccgcgtctgcttctgcgccagttatccctgcccaatcctcgccgtccaagagctccgacgacgatacccttcgccgagtcttcgactcgcagtccttttggcgcgatttctccgagtcg

SEQ ID NO: 41570 - DNA, 914 bp, Arabidopsis thaliana columbia
cagtgactggagaagcggccggtggtgggaacatggctatgtccgccgtctcgagcttcctagcgatgccgacgccaaatactctgaagctttcctctctaacaacgacgattactctttcttagagatccgaatccctaagataaattctaagaacaagttttaatctgatcatgtcgccttgacgagttttaactttagattcttttcgtaattttgttttctttagttaactattattatagatatgaaattctgtggtagagacacaatggatgaatgatatgttatatatacatactataaaatatatcaaatataacatatcgattataaacaaatgatttattgatattacacacttttatgcaggttttttagtgtatatatattagaaaattgcactgatttcactagtgaagattaattcagactcaaaaatgtgtgttttcgaatgtaatatcagactcaatagggtcattgtctggcgtgtggttttggggaatattatcatctcccatgaattgtttcgtgggcttcaaaccaatgtcatgttaaaagaaagaaaaaagttaaggccatgtaataataaattcattaccaaaaagacatgagaaagacttatgatcatgtgatttatgtcaaatagaactttcatagatgctctattaagacgactaggattgaataaaaattggacgaagtgggtgatttggtgtatctataggctatagtctgtagcatataaaatttatgattagtggccaatggaactgcagctagtacgactagagaagcgaccggtggtgctacgtccatggtctcgagcaccccggtgacgccgacaccaaaaactccaaagctttcctctcaaacaacgacgactactctttctaagagatctgaatcctaag

SEQ ID NO: 41571 - DNA, 575 bp, Arabidopsis thaliana columbia
tggtcgtgatgatatctcttgaacttattctaattttttcggttcatgctttgggtcaaggcaaaattgggcgcagaaaatcagttctactatgacgacaaactaaagagatgggtggaaagaggtgtggaacccccagctgaggaagctgcactgcctcctcctccaacaataggcgcattccaaaacaactcattgggttatgaaaacaaatctgatatgattccatctaatgggaactggagttctggtggcccaactccgtcagagaattcttcaggaatcccaccaatctcacacggttcgaatcaattctcagctcgtgggcgtacgggtgtgagggcaaggtaaacaaatagcttaaggcattttagaattataatctgtggagactatcctggattataaatcatgagcgcaattgtaccgtcacattagaattgcatggaggagggaatattagccacacttggtttactccaggaaagatataaaagatgaaacattcaatatgaaataggcatgattgtagttgctgtgtccagctgtgagttgtaattttcaagtgaaaatgt

SEQ ID NO: 41572 - DNA, 683 bp, Arabidopsis thaliana columbia
tttcgtatttccttagcgaagaatatgtagcaagaagccagagaagtgctctcaacattcagaacagtaatgctgagtctgctgctccaactgctaccgatggcaatgaagagagtcagagaacagcaacccatctttacgctgctatctctgatgctaagtgccgagccgctgttcaacttttgttgatccaggttagttcctctcaagccttacatttatgtattataataatgtgtgttccttcaaatgaaccgacaacttttattttctttaatcaaatgttcttttgtaaattgataactcaaaaggcaaacgcaaacagaaggaggaacttgggagtcttttccgtttacaatttaccaaaaaaaaaaagtaaatgcaatttgtgttgttgctgttattgtagtaatgtttctatttttttcaggctgtgatggagatttacaacatgtacagacctcagctttcagcgaaaaacacattagtcctcgtagatgcattgcacggtgtagctttacatgctcacggaataaacagtaacacaatacttcgttcaagactacaagagctaggacccatgacacagatgcaagatcctcactacttcgtcttgaaacgagtcttccaaatctgcctgacatcttacagatcttgttgagacaaaccaaaaagaagaagag

SEQ ID NO: 41573 - DNA, 670 bp, Arabidopsis thaliana columbia
  unsure (1)..(670): unsure at all n locations
agtattacaaaaaaaaaagaatgctgcggtataactcttctgaactaggttttatgagttcaaaactagggtttcttgacaagctttcacatgttctagaagctttagttttgctttcggatgaagtttgaaagattcaaaagcagtgttttaaaaagtggtctaggcggtcgtttagattccgactatacgttaggcgttcagctgacggctaaaaccgtatcgactgcctaaaataacataaattttattttaatatatttttcttatttctaactacattgtttaaatttataagttttacttctacacacatggttataaacattcatatattgtttgatataaattaaagaaattttttgtcaaatttttatttagaattcgatttaatattttctaatatatagtttaacataatttttatctataatatcgtaaacgaataaaccacctaaaatcgcgtaaaccccaactaagtgttctaaacgctaagcgttggtcattgcctgnttatcgccatatnttcttgtttaaatatatttaattctattaaatccattgattaagggggttttttttattctatattttttttttagtttttttactggtgtttgttcttatatttttttgttgtttctgttctttttttcgtttatttcttttt

SEQ ID NO: 41574 - DNA, 1123 bp, Arabidopsis thaliana columbia
cagcattgacgtttataatttcaatattctcataaacaaatacctcgaaagcgaccacgttttatcgcctagtattgacgaacaagctaactaaaccactcccacatgttacatgtaatgacattatatatacagacacatagacacagcaagtttacagggacgcgaatcgtaaacaagacgtaaaaaacaatgcaggatttttcttcaacggtgtcgtatagcccaagcttcagttactacgcttccggtgaattcgccgccgctgcagttaaagtttcccgcgaaaacgaaagctacaatatcagagatcatgagtccgttaaagtcaactccgtcaatgacgaagacgttgacttcgagtttgaaacgtcgccgttacatgaagaaaccttcgtccacttcccgacgttcaaaaccaacgtcgtttccactactaacaagacagacaaagaagccgccgctgaaaaaatatcggagcgtttccccggaaattgtctgtggagtccactcagatctccggctgcttcgaaacactcagaatcatctactagcacaccgaaacggtgccgtttgaagaaatttctaacgagaagtcatagcgacggtggtgttttgccctcaagtgcatcaaaacggtgctatacttttaaggatcttaagcggaggagccacagcgacggcggcggcgacaccagtaagaggagctcgccgaccgtgaaagttaagaacaaaacggtgtcgtataaggtcggggaaggtgacaagagaagaaaatcttatttgccttaccggcaagatttgatcggagttttcgccgtgattagagggttacgtcgttaattgaagctcaattaatttgtatagttttacacaactggacaaaaaattactataatagcaattaggtacttgtttaaatattgtatttataaatatttccatgtaacttttgtttcgtgtattgaagtccaattcaatgcgttgactcaaaggaacgtttgatattttttttttccattttttttttctcactgagaggaaaagacacgtgtcatgtgttgataaaaaggaaattagatacttccacgagaaagcgggacctacgtgaagacacgtggac

SEQ ID NO: 41575 - DNA, 871 bp, Arabidopsis thaliana columbia
cccgtgattctgagaagaatgaaagagaagacaactccagattggagtctcatatgatgaacaccgtagcagaagctgcaggatctggatctagctctggaagcttgagcgttgatcatgtggtggctgcaagagcgagtaatccatccggtaactctgagatttcaccggatgcttcccccgtagaagagaagcagagccaacttgacattcttgcaaacaagactccttctgcttatgatgtggtggctgcaagagcgagtaattcatctggcaatgctgagatctcacctgatgcttcccctgttgaagagaagcaaagccaacttgattatcctgcaaacaagacttcttctgcttatgatgggagtgagtcttcctctgacgaaagggaaggccaacttctcgatgatgacgaacaatggaatgctcttcagaaaataagatcaggcaaatttgagatgcatagataccctgggtataaggagcaaggcgctagttcctcctcccctttctctgagaataggcgcaatgggattaccacatacaacgagcggcatcagaacaggtctctacagctagagggaccaggagggcgccttggcagacaagggaggagacatgtgacagaacaacttcggcctgacatgcctttctatccgagagaatcatacacacgtggaagcccttcccatccgtcacatgatgagtttgatcgctatccccgtgcacactcacttcaaatgccttcatacgctggaggcatgaacacgattttgttgactatatgtatcacaacaacccaagggcaagaggtcagggccaaggaagtaggatctcaggtgaaatgggaagaaacatggcggttggt

SEQ ID NO: 41576 - DNA, 1082 bp, Arabidopsis thaliana columbia
ctgatctgctcatgtccggagcaactacaaaacaagttcgatgacttaacactgaggaaatatttagattccatttcaagagattctctctaatacgttctctattgcaggccaagttcttcattaatgttttggcagagccagccgaagtggtaagaacccattaactcttaattctttttagcacaacaatttgacacgatctctaatctctagccccatgattcatgatcacacattcgtttgcaggtggctgagtaccttgtcccaaacataagggcaataccggctagcggatctatgaagccgacttacatccgtttcctaactggaatcaaagcctacaccaaaatattctcagttaagacgattaatagctctgcgtagaagtaaatcaaagcatgtaaactatttctgcaaattacttaaccaatttgtttttttctttgtcaaattttgggaatttgtttcagagagttgcgttgggagcaaggaagaacaggtatgttactgaagagtaggtgtcaaactaagtattagaattgtattgctttctcagtttgttcaatggtaaataaaaacctctacattttgttcatgacaactccaaaacatgcaatctattgtacaatttggatttaagctcatttgcaaaaatgtgagatttctcagttaatgattgaagtgatgatttaaaagtcagttttttttttccaaccataataatttataggcactattttgagaatcagaccagatttgtcgagactgggatccaaatgcctgtggtctagtttacaatttaacaagcagcaaaaatgtcattccaaaccaatcaaaccgggtaaaaccgaagaaccgcctcaaccggacttgatatcaaagcgattaacatcaaattacggttcaatttagtaaaatcgactaaaccggttagttcgcaactttctctttgcttcttcgtctctctctctctgtcgtgtttgagaagacgaaaagagtcggagagaaagatcggacgatgagtgccgaagatttccagaagaaggtttcctcagagattcctctccggcgatattgag

SEQ ID NO: 41577 - DNA, 950 bp, Arabidopsis thaliana columbia
acggccgccagtagcaccaagccatgtctattttgtaattgtctctcattaatttgataatcatctgccctttgagatgacttaagagaccaagatatacatagtcaataaccttttaatatatagtttgggaccatgttgactaaagattttgatctaattaattagagctctaaaatataattttgacaacgatctctaagatatttccaaagggcatctttcatattaatcgtatatatagttacaagtaagattccacttcactctactcattaatgtacttctaatatgttatcggatcatgttttcatatgaacaattgtaatgccattgattaacgcgtaaattcatgcgtattgttggaaaataaaagcctactcctccatataatgatcaaattacaagttacaacaaacattggtaatgtcatggattcatgcatgaatctatgtagcggtactaggggaatccgctggctttggtggagaatcaatagagatgcagcctcgatactcttggtacgttgcaacgaaagagaacggtgaatcctacaccggaaagaaccagggtgagtggttggtgagcaaaaggcagttggtcttggtcatgcttgtctgacgagatagcccacgggaacccacttccaccgcagaattgaaatggctatgaatttcaaccttcatgattcctttgttgtttgtcatttgttgcaccttctccatttcctggttttcatttacaagccatgaccattataatgagttgaaggattagaaagcatttacgaaggtcttcaccaaaataaatttttccttaatgaggtgaattaactaccatgaactgaaaaagaactactagctatgcaagtacttaaaaaaaacatgccatacatattagttttatgttagttattgcactaagatttcctctttacttagaatatagat

SEQ ID NO: 41578 - DNA, 832 bp, Arabidopsis thaliana columbia
cgaattcgtaatcatgtttatatttttcttctctcagaagtccatcccatcaacggattctcccacctagaaacatatgaatgccatagataagtgatgtcaatcgaaatctaatcaacaagtgatggactagtactagtcacaagcagaagacttaagttttgaaaagataggaattttaaggataagaatcatattaggacataaaatgtgaggaaaagaggattatcttaatcaaaaagtagcatactttaaggtggagacgaagttaatcttccattttccgagttttccagatcctgactgggtagctgttctagcaggtgagtatattatcacctgttaatttccaaattcaatactcttagcactattcgattgaccaaaatcaaatcaagaacacgatgtagctcaattaagacgattctctgatcacgaaccctaattttctaaactgaattcgtaagaaatcgaatgcttatttaccttgcgagaaagatgctcctctgggattccggagaccttaccgatctcaccacgcttgtaatccgactcaaccaccgcgtcagtagcgaaaggtcgagcaacacgccggagcgtcgccgctatacggatagtcctttgagtagtagcacaaagcgccatcgtcaattagagaaatctggaaaattgctgagctttttgatttcgctttggtttcttctacttctgtagattttagaaagaaaaaaaaaacacatatttcaatctagccatcaaaattttataaattacgctttcggtcttactattatatgacgaatctttaatagccctaaactatctgtgagat

SEQ ID NO: 41579 - DNA, 691 bp, Arabidopsis thaliana columbia
tttcaggttaaaccaagtcatgttcttttagctgtcagactgctaaagacttcagtcatcaggtaacttcgaacatcttcaaaaaatatttttatctcctaaaattctcccaaaatgttaaccgtaaacaaccatacttgcttctcttatccagtgttgagtcaggcgatatcgatctttctgagtaccaagatgctaatggtgacaacatggacgacacagatgacattgaaaaccctgttgatggagaggaagatcaacagaatggtgcagctgagccagcttctgcaactgcaggtatttatgcacagtttgtgctcttcattttttctctgcctcacttaagaaagaatcataattaacatcatatgacgtagcaacagataatggagcagcagctcaaaagctggtgattagcgaggaagaatatgatagaatcacacaggctttagtcattcgccttagacaacatgaagaaactgtaaacaaagacagtaagcaacaacactcttcaattttccatacttttcattttctctcctcaactattgaaaacaatttttttcctttaggttctgaattgcctggaattagacaaaaggaactgattcgatggttcatcgatcaacagaatgagaaaaagaaatatagttcgcaagagcaagtaaaactcgatatcctctaggaggaa

SEQ ID NO: 41580 - DNA, 546 bp, Arabidopsis thaliana columbia
tcgtaggccatgcttgctaagttagctaaacataaacgacaaacccttgctcactggtgcaataatcgaagtgaagagcctctttatatgaaatatataagcgacacagccttatgggcaaatcgaatgctatttatttatttgataagaagattaataatttcaatttgtcatccactagtctcttggggtactcaaaacatatcaccaaaaagtccatagagttatttgttcttatttactgataaagtattccaagttgatgtacgaataaagtggcaatttcatgtattatcaatataatccatttttgggaatctgatattttgtttatcctcgagctctgagagatatattttggtgcagtgaaggttcaaagctggcatgcatgatgcatataataactgctctggacctaatacttactacgcatttaaattaatatttatggataatatggttaataaataaggaacttctatttatatcacaaaaggtcactggtcttcttcgtgtgactcaccactttctcacgcccacaaaaat

SEQ ID NO: 41581 - DNA, 567 bp, Arabidopsis thaliana columbia
ccccaatagacaagtaataatccttgcattaatcatctgattatcatcgacccaaaatcaaaaccctttgatcccgatttgaatttgacccaacgaatcagagacgcaattcaattgatcggagaaaagaatcagaagaagatagaaaatgaaaatcgcttctccatgcgaatatgtaaaccctaacgcatttttctcaaagaggatttgaagaaatgaattttgaaatttcaactttcgctaaccgttacttgtggaaggggaagagttaacgttggcaaatagagtaagtgaggccagaactatttaaccggctcttttgaaacaatcagcatgttaatttacgattatgaccctgagttttcaaaatttgtttcccgcttttgagttagaatcacatacacgctagagtagtttaaacgtcgtgtaaacaccaacccaaactaatcctttggactttagattaacaaaaacggaaactaaaaaactagataattcattggagctaggtcgctgaaacattcaacttgtggagtttttgattttagtagcacgacaacacttgga

SEQ ID NO: 41582 - DNA, 850 bp, Arabidopsis thaliana columbia
caaattctagctcctctaatgtttcagccatcggtaacatcctctctccattcacaaatcggaacgactatttttgtttttttttttcttttttgctcactttgttttaccattttcgcttcagctcctaagagaaagaagccgagacatgtcaagtacgaagacgataacagttcacgcgtcactacaatcaaatccgaagccgaagctccttcaaaaagtcaagttccgttcagtaatcaactaaagagctcaggatccggcgaaggaaacagctccgtattggattctatcataccactgacgagagaaagcaacgcttcgttagattcggagaaaaaagagaacaatctgtcaaaagacgaaacaatattgccgaaagtggaatcttcttcaggatttagatccgatggtgaaggagctaaatcgtaagcattcaatctatacattcattttttctggattttttacccaagttttggtactgaatgttttttgtttttaatcatgcaggagttcgccggaaaaagagaagtttgagatagatctgatggtaagtgtcaataacatatatattttattttattttcctttttttttgaagttccgtactaaattaattgtccgtcggttcaggcgccaccgccggtgagatcgtcgtcggagagaggcggagagatgatggaatgtgtggcggcagaagctaaacctaaagtcacggaagtggaaacggtgagtggggcctacttttgtttggtaatattgtgataattggggatatccatcattactttttcatttttgctttttttggctctctttttcttatcttcatctttttggctccctc

SEQ ID NO: 41583 - DNA, 1274 bp, Arabidopsis thaliana columbia
gatacatctgtcacattctataaaccaaaacccaattcacttacgttttctcacttacccttttggccttattcaatccatatcttatctctactctatgtctatatctaacgtggcttcttttggtttgtttggtgaaaacagagcggaaaagtatttcaagagagcagcaaaagcagagccagcggacgcagaggcattgaacaaatatgcgacgtttctgtggagagcgagaaacgatatttggagagcggaggaaacctacttagaagcgatctccgctgatccaacaaactcagtctactccgcaaactacgcacatttcctctggaacaccggtggtgatgaaacgtgttttcctctcgacgctccatcgcaacagaacaacaccacatgaataaagagtcacaacaatttgtgtatgtacagtgtgttttttgcctatacaaaactcatgtcatgtggcaaacttttttttgtttttgtgaaccaaagactttagtttatatatgcacatatttcgagttttgattaatttttttttttaacatactcggacttgttctttcgtgaacaaaaccatttgtcaattagtttttttaaaagaactaaaccttatctttatagagagagagccagagaggatttggcaatggtttgtgcatagcattttggtggatggtttataaatgatattgtccacttttgtctatatacaagtttgaaccatctttttattgtgcgtgtcatttgtcccctgtacatgattgtcgacatgcagagtgtgaaatcagaattttacacaacaatgtctcacaaaattacattactatatcagggcagttgcataaattgcgtagtaataaataattgttacccctttgatttaatattaaaatgcattaaaagcaacaaaagaggtgggagttaaagaagtatgtgtagattattttataagaaaccaaaaacccttctcgattcataatttccatacgtttctttagatctgtagacttcaaaacatcggatcgtgaggaaaaaaccccaaaaacattaatgtgaaccccgaaagagggacacgtatctctttcctttgtttgctcactcattgtcaagtggacttgtgtatctaccgtctccatgataagcttttgggattccgcagatctctgtatattctcacgtgaactcaccataatactctcattgtcactttttttttcttctgctagatgatgtggaaagatgtgaaataatgcttcaatagtatttta

SEQ ID NO: 41584 - DNA, 491 bp, Arabidopsis thaliana columbia
gtttcggattcgcgtttccgtctctcgctcgacacgtggcactcccattccttaattttttcctttaataccaatcgagacgtcagtttatacctccgattctctgttgcagcgcacgcaatcaccaatggacacgcgtcacaactaccaatgatagctcgacacatttagcgtcggggagctccatggatcttttattctagcataaagccacgtgtgttattctcgagcaccggaccaactgatataaatacgatagatcacgacgcgcgtgtttagacgagcacgttttcatctgaactgatagtcacctctcttgtgcaggtcaccatctaagtctcctgcaaggtcgagatcaaagtcaaaatcaccaataagttacaggcgaagacggagatctccaacctattcaccaccgtttcgtcgcccaagaagtcacagatcgagatcaccattaagatctcaacggcgatcaacttatgaagggagaa

SEQ ID NO: 41585 - DNA, 989 bp, Arabidopsis thaliana columbia
tgaccgccttctcccatcataagttgatcgccgttgagatcttaatggtgatctcgatctgtgacttcttgggcgacgaaacggtggtgaataggttggagatctccgtcttcgcctgtaacttattggtgattttgactttgatctcgaccttgcaggagacttagatggtgacctgcacaagagaggtgactatcagttcagatgaaaacgttatcaaaaagagaaaggagcaagccataggtaatagagagaaacgtctatagatttttattggatgcccacctagacttctgatcagcttctttttcatcatttccaactccatcaggtctcagtttcctacttatctctgcagctctagctgctgcaagctcagtggcagacttcattgtggcagctctatttgctgcctgctgagtagccacggcttgttgcattagtatagcctgctggaattgcatctgctgcatcgcgacggcctgttgcatcatcagtggtagtgaggacgaagaattatttgaagatggtttgtgaggtagcgattttgcaatctcaacattcaatgctctaccaaagacttccgtattgtttaatgccaaagcagctgttgcttcttcggaattcgagtattctatgtaggcgatatgctttgaatcagttatactacagtcaactactgtgccacagaagctaaatagctgcctaagttgttcagttgtaagcgatggacttaggttgctaacttggagaaatttcttcaaatccccgttttctcctttttctggggaacctaaaccaaaagctagtagaactcatgagtatcgagaaaactaaataaatatctaatgatattcaacttgagacccaaagaaaaaatagagatgaatatcgagagactagcaacaaaaggtacagtacctaaagatcccttgtttgattgagcctgtgcttgcatctgagaagcatgagcttgaagagcctgtgca

SEQ ID NO: 41586 - DNA, 698 bp, Arabidopsis thaliana columbia
cgaaacgatttaaaagtcctacagagaacaagggaagggaatatcagatgtcattgcttggaagacgagcaaacacaaaaacaatagatgagttcatttacattagctaagaaaaagttacctaccattagctttttactagtgtcctgcactaaaatacaccatgtcacttacaatggatagaaaataaattatagaataatcgatcaatgcgaagattcaaaatatgaaaacagctacgggacaacctacagatatgctctatatatttattccaacgagatgctcaaatatcgcaaagggtcaaagttattctgcaattccagatagttatagctaacatgtttataaaaatgacaaataacaatctaacattacatgctatatctagaatctactatctacacaaagaaaagcggtttgctttcgtcaaacatgtgaaatattatagataaacgccaaatgctataaataatctcattctcgaactaataagaccttcaaatttcaagatcatcatacctaacaatctattttcattgtagaagtagctgaaacaagtttatgaataaaacacatcctaaccttgctcagtaccacaaactcctttaggcttcccagtagatcctgaagtatacctaagataacaaaattttctctgcctctctttcttgcaaggccaaacaaagcttgagcaa

SEQ ID NO: 41587 - DNA, 674 bp, Arabidopsis thaliana columbia
ccgttcctcatcaccggtagcagagttccggtgatggttttgggcggcgtgaggtggttcaggtggtttcgtagctgctcgattcatgactgttggaatttcttgaagcttgctatcgctgtctcttggctcatattttgggtcctccgtagtgtttgggatggtcgaaccaatttttatattgtctatattatgcttttatattatctttttgttgttcaccgactttcttattgtatcaacgtgcacattttgatttttttgcattttggtcctaaaattctagaaatgcctatcatttattgtccggtcaaagataaagtaaagttttatcgctttgttagaatgtttcaatctctttttaggtgccaaattttcagtaaactgtatttctcaactatttcagttgacaatataacattgaccgttttgtaataagaatgcaggggtaaaatggctggtttggtctcagtttgtcataacccattacaagtagaacaaaaccgagtcaattcccactgatcatgataaaatcgaggactgatttttggcccaaaatacaatggacccatcagagtatattatctgaaaatatttggtcggttgtggaaataaataaataaatagaggaattggtcatcaaaaagtcaaaaattaagaaaaattttacaagt

SEQ ID NO: 41588 - DNA, 1244 bp, Arabidopsis thaliana
gattgttctgaacttagtaagaatattattgtccaacgtatctataatgcggatatatacaattcaatatatcaatctctatggttaagtataaattaacaaactatactattatacaaccaaaactttaaaaattcgcaaactatattataagtgttatacgacttgtactataaagaagaatgtttggatctgaggacgtaggtcgacacatgccaaagcctatgtcccacgggtgaacaaggtctagtcacaagtagactggctatataaaaaattaaagaacgaatattacattgtattaagtattagagtttacatattgaaagatgactcagcctgaagaaattgtggaagacgcgtgtaaatcagattcaggcgtcttcctagtcccaaacacttggatgttgtaagcatatacataagcaattctcatgttgtaagcatatacataagcattttatttatttgttgacctcccaaaaaaaaaaaccagaagcatcttctttaattactttattaaatcaatgttagctttgttaatttagctattaacaaccctcggtcggtgatttatcatgcggattgataaatcattatcgaactagggtcaactttaggtcatcctctttccaatcaattacctttagcctcaagtaagcaaattctgttgtgctgattgaagaccaggtcaaaaatattccaaaattgtatatgtgatcaattaagtttcaagattctcaatagtaggtgacacatttttcaaatctaataaagcccctgaaaagctacatttatcattgccggcctcttccacgcccaccaccacggccaccttttccccgggaaccgccgcctcctctccctctaaaaccaccacctcctctacctctgaaaccgcctctaatatttgttgatttcagtccaagagactgaactcctctcctcttgtttctttgcccatcttcatactcatcgtctctatcttctttgtactttgatgaccctctcgccttgaaagaaaactcccgtgatcctccaggaccgaatttgatatctttcgagcctccaaagttgccacgccggttctctatagccttgacacgctcgcccataggaagactatcttctttagccagtgaagtgcggttgtgataagctgcggcatgcccgtcatctttcacttcatacaacctgacaccaaatcatccacatcagaaaacaaaagaatcaagatagaatgt

SEQ ID NO: 41589 - DNA, 775 bp, Arabidopsis thaliana columbia
cccctttaggattggccgccaatacccgatgatgcactgaaaccagaactactcaattgttgttcatgtggaagtaaactttctctcgtagctcaggtttttgttcaaatccaaagcttcactctttttaggtttcaagagtttaagaagctgaataattagaacaatttggtctctttcgttctctgcatttaggtgtatgccccaatctcaactgaaattttagacatccaagagcgtaccctctatatatttggttgcttgatgcctaaatgtggaacctctgaacaaaggtattgtcttctttttttgttacttatgattctttgatcactctcaatcacttatatgagagaatgatctcacggtctgaaatttgctccttactgtgtcagttggagagcttttagcattcagaaagctatagcaaaagagaaaggatcaactaaaatagcggatttgcctgtggcctttcctaaaacacatcggttagacggtgatgatgatgatgatgatgatgatgatgaagattttgattttgcgagtttagctaaggcgctggcagaggcttcttctgctgcggcttccattacgaagaaacaaaagagtaaaccaagtggcaatgctagttcagggactaaagcaaagccttcacctttgaaatctgaaacaagagttgaggatcatattaaacttgagactggtgcggtggttccgtgcttctacatttatacaaaggaagagatcccctcaaaagaagttgatcgattctcac

SEQ ID NO: 41590 - DNA, 547 bp, Arabidopsis thaliana columbia
atcaacaccatggagcctcgcctcgcagataaagcaccaaatggactcctctgtgtcattaggattctgagcaacatctatccggaactgctctgcaccttcttcaaacctgttggatatttcatcacttaatatgagaccaaagtccacaatagaaacaagcactttttaaaattttcgacagtggattcacagtcttctaagaagaaactcaaatcctaacaagagtcagtgagtaggagcttgtacctatctacatagtaaagagaaagcccgcgttgccaaagatctgtcatgaagcaaatgttagtgttcccatgaagcaaaaacaataaagattcgactgaaatttcaaagctttatagagagatcgtgttatgagataaaacgtacatgccttttgcctgggatccaaaatgattgctctatcgaactctgccaccgatccagcaacatcaccctttaacaaaaagcatctcgaataggatggtcagattcaaggatccaaaattaaaaaaagagtcccttatgttagaaaagttctgtt

SEQ ID NO: 41591 - DNA, 582 bp, Arabidopsis thaliana columbia
gtgagaatatgtttttaggttttgtaatggataagtcatggatagacaaaccaagtttatctcaagaatacaatattagaagtgataaatttcttggattcatataaatcaaatgcagaaatgatgaagtgtccatgtattcgttaaatgtaacaaaaatgaagtcaagaaaagatattgaatgtgacttgatgtgcattggctttttaagctcttatacaacttgggtattacatggagaggatatatgtgtcacagggaatgcaagagtaccttctgatattgatcgagctgatttagattcaactttgaatctcttggatgatcttttcaccgatattaattcgaatttgtctggtgaacacgtacctggatcgtgtgatcaacctgtggacactgatataccatcaacttcaagtggaaattgtggaaaaggagaaggttttgatgatttgtttgctgaatttatccaaaagctatatatgggaagtaataagttcacgaagttgtctttcatattgaagttgtacatatcaaatgtttgtgtggaattagtgacaaggagatactatgatgcttgat

SEQ ID NO: 41592 - DNA, 1185 bp, Arabidopsis thaliana columbia
  unsure (1)..(1185): unsure at all n locations
acaaaagtaaagttgaacatatatagtcgttaagaagagtgtgagctggtagactgtcgcgtcatcactcgtcagcaactaagatgggaatcgcagaatcggtctgatgatgacttcacaccgtgtaatatccaaaccgactacaaagaaaaattaaagtcaaaagttgacattgtcacactcaagaaattcttcaataagttacccattggtttcctattaaccaattaatttccaccttttgctaaccatttttcaactcctactttttttgttttcttacaaatctttttatgagagtcatagagacagagttcaacgatatctcttatgaagaagcacaacgagaaactcattagatattcacttgtgtcaatctctttaattagttcaaaagagcgaattctgaaaaatattatttacataaatgatatattacagtttagtataacttgttttatcagattatccgtgtttatatttgcattgtaaaaaattaaaaataaagaaaatgttgaaagtttttcgttttcgctccgtaaatcctccaatacactgaaaacacatcatttgtttgaatacatatcatttgttttgtttggcttgtactatttaactaaatgactaaaacatgaagaatttaattaaatatgtaaaaacgcgatgaaaatgattaaaagtcaaatattctcggtcaagaattaatgccctttgcttacacactcacacacaaaagcataaatatacaagaaaatcgcgaagcattcttttcaatcacgaagagaaatagaaccaaatttttttataaaatggagaacaagaatgtgtttgtgttgtgtgtgatcttatttttggtgagctcgtcgttgatgtttgagggtggtcattgcagaactctacgatcgaagccgttcagagataccaacggccatgaccaatcgtcggcgactatgaaggtgaagcacagctcggaaagttttgctttccgtttagcgtctgggtcgagcaggagaggacgtggtcactgatcaacaatcactactactattttgaacccgcgtcagtgttttttttgttcgtattagttttgttagattgtagctttctaaaggttttgtttttgcgnaaaagtagaaggaaagacttattcattcaagaagatgtgatcagtaatatgaagttttt

SEQ ID NO: 41593 - DNA, 642 bp, Arabidopsis thaliana columbia
cttgaaatttatgtttcaaacaaaagtttaaaaaatggtgtcggaagttatggggtatggtaggggaactatagctataatcatggacagctgttctaaaagcaagtttgacaaatcacgatttctcagggttttcaattttttatttttttttgctatgtctcgcaacaaaatttaggttctaatttattaaatttttcattttgttttcatactgtcttcagcataaatatagttagatttcaatttcaattttgacagtaaaccgtacgacaacgtgtcgagttagggaaaggacatagttgtttctttgtttttggctataacgacatgagatagttagatacgatatacaaatttttgcatgcattcacacatagtacacatagatattattagactttttgacaattaatagggatatttgttgtatgtatatattattatatctagttacagtctattgctcggcggataatagagggtcctctttcctctagtgatgatagtacagaatccatgagctctgtgccattgcttgtacagacgcacgttactaagaaaatctaatttatttgttttctttctaaatttgttattggttccgaatattttgattattgtgttgtttttatcaaaaac

SEQ ID NO: 41594 - DNA, 711 bp, Arabidopsis thaliana columbia
ctttgttatatttactatttggtttggattaaaaaaaatctcttaggttcatgtgacttttcatagtagtattggactaatagttctttagtcttttaagtcctccctagacccatttacgatactatatccaaagttccccatgatattcataccttatatagtattacattacaactttaataactaccgatgtgggacactgccaaaaaagaagcaaacaaaaactaccgaacgttatattattacaagaacacaactacacaagtaaacctaattctctgctttctctccatctatcgacttcagctactgagtgcaaaatctttttggggtcttcttagttacgtttgcaaggcgcgaggcaacaacaagtgggtttctcaaaaaaaaatagattttcgttttgatgttattcttctagtcacatgaatagaacataaatttgatcagataataatagatataaagacatgtccttaaggagcttaacagtgaagttactcgtgccggtgtgtgagaaaaacaattagtcatctgctactgccaacaaaatatcatccctcaacgaatcgagaaccctaaactatactactattttggtgtcaccgatttcacttgcttgcttcttaagaaatcagtaggcttacacacagtttcgaatacgaagaagaaacaaaatttaacagtaatttgaatatttgaatattg

SEQ ID NO: 41595 - DNA, 1290 bp, Arabidopsis thaliana columbia
actttctcaaattccattaacagcgaagcggcaatgtcttgcatcattgtttgtaaatgaaactcctgagtttgcttgtcagatggggatacaaaatcaaattttcacccttcttgtctccatcttcaagctgcaaaagacagtacattgttcagtaaatcgtcaatctaacgcatccataagcaagtaactaaatcactggtacaaaaaatggacatcactatcaactgtagagacaaatcagaaaaaagctagctagatccatcggcatcgagctaagaatgccatagcagataagaagcatggaaactaatatacttacttgcgaatcgccaggggagaaagcgaagcagcgccggacaagagccgaggaataactcttacaagcgacattgaatttttcagtgacagaatcaagatcaggggacgagggacagtggcaaaggccgatcacggcgagcatcttccgattagactgaaaatcctcccaaggactcggaggagaaccaccaagcacaaatttgaaccggagagagccggaatcccacggctgattcgtgaatggagatttctgatgttcagtgtagaaagagctaatagctgagagcgcgatcgtgtgatgacggagcagcatcgagtggtagtcccggagaagcgtcggcggaatagtgccgatcggaaggacggcgatccgaatgatcgacaaagtctcgatactgacgtcaggttccatggcgagatcagagaaggagagtgaggatctttcggtgagcgtgagtgcaccggatctgaaggagacgaaaacgagaaagtgttgagagagagaacgtggtctgtttgggtacaggtattaaactattcttagttagaattagactatccggggttaaactctattcatataaccaaacgatatcgttaaattcgcgattattaatactctcactgtgaacgaaacttgggcgaaattgaaaagttttggcgttatggaatcgtccattgaagggagctccgagtcaactactgtcactacttctccttcgcgtcgtgtacgagaacttttagctttgtgtttcagtgtaagctttctctcttcttcttctcctcgtttcgggtttgtgtaatttgttttctgggtggaatttctagatgctttgagatcgatgaatacttagctgtttcgtgatttttggagctcgaatgaaaaattcgccgctaattttgtgatttttcagtcagttgaagaagccggaggatttcaagactttgagagttttgtgacagaacttg

SEQ ID NO: 41596 - DNA, 527 bp, Arabidopsis thaliana columbia
tgaagaagatcataaaaacaaaattatcggatttgaagagaataaattttgaccaaaaaaaaagaagataattaaaataaaataaaaacaagaattggccaactgtgagaacatcatcaatgaagaccaattgcgagatccgacaacaccgcttcttttgatttcgatcttactttcctgggtatgtctcaattcttcttcctccttcagttcgtgttctgtgtctgattgattactctcacaaaactcatcttttcattgtctaaaggtctaatctttagctataactcaaaatctgtatctaagttctgacaagtttctgttacgaaattcaaattttttgatacatatgttcatttctcagaacaggagatgtcaattttggcgatggttttcgtaacataaacatgagatttgattgttctgtgcagatctcatagttaatctggtttgagtctagaaatgtcgagtgatgcagctcgtacgccattgttacccactgagaagatagatccatggctcaagat

SEQ ID NO: 41597 - DNA, 933 bp, Arabidopsis thaliana columbia
tgaatccttttgcatttcgttgcttgctcccgtataaccaatcggattctttatatgatttattaaaaataaaaacatttggaaactaatataatcaccaaaacaatcaataaccaatccttgtatggtcctattttaaaccggagttggttattgactgtttctaggtaaactaactccggtttaaaataagaccaaccaaaggaggtttcgtaataatgtaacaaatcatgtccacgtaaacaagtgagtcacaacgtcaagattctcgatgtccttctataaatagcctctgttccataaagagaatcaccactcaaatctcttcaccttggcaccatctataaatatcctcaaacattagcctctttaagaaatcaattccaaccttttaaagattaatcttgaaaagtttctaataaaaggaagagaagtgatcaggtgtggtgacgagtaggatatgaaattcttgttggaactcgtcgtgccttgttttggttcacaacagttccaagaatccgccgcaagtactgcggatgattcggtttctgacgaaacacaaacgctgatgaaacaacggaggcgacggaaacgcgttagagtggctggtcaacctggacaagtggcagagtggagaccgtctcttagcgttatctccgagaacaagccggcgataacgaagatatcagaaaagaacgaagaaaagaagaaagtccgtcggaaaagtgaaggcaacggcggcggagacgcatcatcacggtccggtggtggtcatattcgtttccgtagtgacgatttcgggtaatttatatgatacgtttgtgttaattaaggttagggttatagggtagtcaattaaaaattttcttttttacaaagcttaataatatgtttagtatctagttgtagtattaaaaaattattctaacctcg

SEQ ID NO: 41598 - DNA, 752 bp, Arabidopsis thaliana columbia
tacattgtttaactgcagtcgcctgaaattctcgagttatcggagaaaatcaaagagaagatgaaggaagcagatatccacggtaaaaattaaaagaatattgcccagcaaatattactttgctgtttcggctttgtttttgcaaataattcttgactggttattggtagtctttcaaagttctgatgtcactttgcagatcttgaaggcaaaatggatcttaagattagagctcttgagttagtcgaagagatgaggaccaagagagctgaccaacaggtgaatttgctttcgctattggcttaatgagcatttttgcttttttactttacctatgtcaactagaaagtcctttgtcttgttttttcatgtaggcggtgttgctgttggaagccttcaacaaagatagagcatccttgccacagcccgttccagctcaaccaccatcttccgaattacctccaccggatcctcgcactcaagaaatgataaatgagaaactgaagaaggcagaagatcttggtaagggaaataaccctaatttgtgtttggttatttgtctatggtcatcttaatttagagctcattgtagtggaaagttgaaactgcttaaatatccacggtctagtattccctgccggctgggaatttctactggctaatctaagatttcctaacctataaattgcttaaactgtatatacctaagataaggaaatttcttcccgttgtatgttactaaatctatgtta

SEQ ID NO: 41599 - DNA, 647 bp, Arabidopsis thaliana columbia
  unsure (1)..(647): unsure at all n locations
gatagacgagagagttccaaggtagtgattattagggttttgaagttggcttatatatggcacaactctattcttaccattgggttaaaacaacatatacactataatcttgatgtcgattacatatgtataaaatttggcataaacagctcaagaaattataggataaatatgaaagtattttattctcggattgtgcttttcgttataaattccaaattttataatcagatgcgtttttttaagcattttatcatcagttttacttcactagtaaatgcaaaaaacataacgtatgaataaagattttacaaaatgatattttggtttccaagagtttactactacactatttttgagttctaatatgatgatgatgatgcaatcaatattgatttcttcatatgatcaaatgatatgaactttgccatcgctgatcatcactttgttatcatcttgcagtttctgcataaaatccacaatagagtaaagttatgaagatattgtataaaaagttaaagaatgagaaagcttgtctcttaatttgtgaattagtctaagagagcataacncatctgcagagtacgagatgtccaacccattgttgtgacacagtcctatactgcatagagatgcacgagctgtgt

SEQ ID NO: 41600 - DNA, 429 bp, Arabidopsis thaliana columbia
aattacattccatgccaatttgaccattatttcgtgttgttacaactcacaaattactatcattctatcagatcaacttggtgtctatatacgatccattttctaagtctcaacagtcgaattcatgattcacaaaataaccaaaccttcaatttataatcgtttccaatcccaaaatcaagccatggacgccaagaacaccaaagctgatggagccaagaattttggtacgagtggcggaacgtgtggttctggtagcacttccgacatcggtaaaacaatggttgctcctggatctggtggacgacaaagcgtttagagggaggcttttgagagcaaccctaagaagttctttgatgatcgtaacttcaaagagaagacatgaaccgtttaaatgaagagcaagttctcaaaaagtgatgatatatc

SEQ ID NO: 41601 - DNA, 582 bp, Arabidopsis thaliana columbia
tgcccatccaaagatagcacaactcgtgtaattgtcgagctagctcctatgaaagtaaaagaatcattttagattagatcaacttaatatgtgcttagaaaaatgttgtatgttttatcacgatttacctatcaacccaatatcaagctgtaatcgtttttttttttgacaccacttaaattgttaaactattatgcaaaagtgaaggagggagctgctggacggtccggtgagcacgagggccgaggacataattagttggccttgggactttcaattgctaaagacctaaataaatattttaagaatattcaacccacaccttttacttttatcatttcttcctagatttttgtgtgtgattttaggtcgtgtgattctcaaaactggtgagttgtggtgcccgtcctgaagacaagcccacctaaacagtggttttggatgtgtttttttttctcccatacctttgttttttttttataacattttctagttaaacaaaaattatggatctattgtcttgtatggaaactaagctatgataaatttataatgcctttcagtcatatttcggcgttggtg

SEQ ID NO: 41602 - DNA, 563 bp, Arabidopsis thaliana columbia
tatctcttaatatggaattggaaagtaaactttttgcaaaatattagatttagataactttcacttggtaaattgagaataaagttttgtgcaaattattgatttagatcatttccatttctattctcaatctctttttgagcgttccaaccaattacattgctgccccgaaccaatataatatttacaatagtatcatagccggctccaatggatcgttgtaatccattatggaccgcccaacttcagcccacaaaagaaattgtccacacgaaaacgctcaataatctataaacggaccatttgacatatttaagtgttttgcaagcccaaagtaatcatattcactcaacaaaaagtataaaacatctgaaatttaatttaggtcgttgctaagcttgttgtagggtacgtacgtttgggagcattttaattagaataagattagaaatttagaatagttttaatcctccgaaactttttgtagtacggacttttgggagcatttttatgagtcgtgccaatcttgcaaaaggacccatgcagagaacaaatttggttgt

SEQ ID NO: 41603 - DNA, 544 bp, Arabidopsis thaliana columbia
gaagaaaggtgaaattagacaaatttcaccaaaaaaacacaagctaatgcaatagaaagcaatcagaagcacagaaagatttcatgcatacaaaacccagaaaacaagaacaaaaagaaaaggttgaaattgagaagctttacttacttgtaagaatcatggcgatctggtagatcgatcggattgcttgtttgattctccttatttgtctcttatcccactctatcagttcttgtccatttataataaagtgtttctaatgatatacatatatgatatatcactcttactccattgacctgtttcttggcttaccgctcttgggcgaatattatatctttcttcttcaattcacgttttccgaatattccatttgtttttggttgacaaagactttttaaggttgcattttatatttctgaataaaaagtagtaatactaccaagcaacgcctctccatgctaaaattgcaaagaacatcctcccatcttttatatcccccaccaaaaaaaagcgatgcattaccaactttttttaatattga

SEQ ID NO: 41604 - DNA, 440 bp, Arabidopsis thaliana columbia
  unsure (1)..(440): unsure at all n locations
aggtgacttagaggactaagtgtatatatgatttgagttagactgactattagtaagtaatagatgngatgagattagtgtacttgcaaaagtataaaggtgtataattagaatacataacgttaaaagttacgaggttagaggaagtgccgtttggtaaatatagtgaaacgttgacatatttttgagaacctcttttctcggtataatgttgagatatttttgagaattgattgcgacatagaagtgtcattcatgtgctccgtcgaggtgatcttgggtacgcatgtgctctgcactttttatgttactatttatgttcgtatgtacctcttcgaaagcgtgttatatatcaaaaatctgatcgcgataaacaattgaggtagatacacattaagataatgacgttcgtttagattaccagggaacagcacgaggag

SEQ ID NO: 41605 - DNA, 576 bp, Arabidopsis thaliana columbia
gatagttaacttactgtattagggcaacgctaagagaaaatcttcagcctgaaaaacatccccttcatctacgtccccttgataccatgctactgtcccatcgacggccttctctgacatcaccagtcttgttcggtttctagggatgaaggaagggaccgaacctgaaaagatactggagtctggtcaatcacataaagaaatataccaatagccagatatctagttaaaagaaaaacagaccttgcattacacgttccatctgaccaaagtgaatgactctggtcttgtatgtattcatactgccaccaaatatagattttgataatgcttcgtcctcgtctttgaagacctcttcgttagacaggtttgataaacaaacagtaaggggctgtttagcatacacgcgaggtcttcgagagtactcatccaccttatgctttttgcagtttagttggtacctaaaaatggaacaagaaactggataaccaaaaaataaaatctatgaaatatagaacttgttcatgcaccaacaaacattatttatttatataaatgcaatgatataaggagaat

SEQ ID NO: 41606 - DNA, 484 bp, Arabidopsis thaliana columbia
atcctctaaattgtaaactacagcaacacagcaatactaaatattaagtagaaccgatcaaaaatctgaattggtctatttggtcattgttggtctagtcgtaggttttctggttgttttgaattggagattcttttgagtgtagtttacattgatccctgtctaagcctaatttccgaatctcagggaggcttgaggcattgcttcttgaagcgaagggattatggggagaggctgaggaagcatatgcgagtcttttggaggataatccactcgaccaagtaagtcttcacacccaacatttgcttctaagtttatggttttgtaagtaaaacttaaatgtctcatataggcgatacacaaacgaagagtggctatatccaaggcactaggcagaccttccatagccattgagcttcttaacaaatatcttgaactgtgagtactctacatatcacaaatcacatataaaggagagctataa

SEQ ID NO: 41607 - DNA, 525 bp, Arabidopsis thaliana columbia
taaagtaggtgatgctgaaccattttagagttaagctaaaccttgcgtaaatctacagtaacactaacagcttgtgaaaaaggaaaaaaatatattaacagcttccgtaacaatatttaagaaatcgtgtatcaagcaagcgaacgtgtttaaaacagtctgataatccaataaaaaaaaaaacaatttatagtatgcacttcaatgggcctagaggacatatgggctatggctcatgtgtataacataaaactcatctcgttaaaaagagaccaataggtgtgtgagatgtgttaatttgcagagtcccacatcgctaagacctgaaagaatgattgaggaagcagagtataactgaagatgtggacagtctgtgaaaattacttacctggacggggtcaacttgtgatcaataagacgagtggcctaggctagtgacctccattgcacataacggaggggtgcttagcttaaggtctcccaagtgggagagcatgcgtcattatttgtggcagagggggctgc

SEQ ID NO: 41608 - DNA, 623 bp, Arabidopsis thaliana columbia
tgctccactgagtagttcttcagacaaatagggcactgccactgcatgttaacaaaccccagaacaactaaagtcagaaaacaagagacataacccaatatctagacaaggatagtagacctacctttctggaacgttgattcaactccacaaacacatcaaggtcaaaacagcccatgtgcacacagggtaaaaatctcccagcaacttttatcctagaaccgctcatctaatgacgcaaacagaaaagacaataaaaaaaattcagtctgcaagatagccctaggaagaggataagtataaaaactgggctacgagctattagtaacttacaggacaccgaagattgacaccgaagaaatcagcaacaacttcaatgtcactatcactgtcggcattatcatctccacctccacctccaatgcatcggcggacacgtgcaagagcatcttcaaaagtctcccctttaccctcttctggaatcaaatttagaacctagatgcaaaaatgagtatatatataagcaacttggagatcattagatcattaacgtacaatatgaattcgtctgtatacaagaacacgacaaaagtgataaatatattgattaaagggataaatgt

SEQ ID NO: 41609 - DNA, 525 bp, Arabidopsis thaliana columbia
cctttggtctgtcttataaggctttgatttattcccctcctgtacaatgtatgtaggacattttcatacccatattcttatcaatttgtagatggcttgccttgcaatggtcactgatcctaacccatgtctaggaacattttggtttgtagctgatttgattcatcatttgagtactctagattgaagaccatgtttgagacccttttttataagtgagaacgaataggatgtctagttaggtagcttttaatgattttttttttaaccatgaaacagaatgtgaaacctgtagtaattgtgcctgaccagaaactataagaacaaagtagtgcaagttgactatagtaatcatgtttggtctctctttattactatctgtttagatatcttaatatagaaaatagctgactataatttgtgatgcttaattacatcatgtatatgattttcttcctagcgctttagttggattcttgtgaagcatagacacaataatgccagaatagtctactaagatgagtg

SEQ ID NO: 41610 - DNA, 595 bp, Arabidopsis thaliana columbia
ttgtattcgtgattatacctttttatttgcttgtgtgtatagctcgtagatgggaggatcgcctcactaagtatttatgataatacttacgcatctcattgtgttgttgatgcaggtaaagataaagtgtgatcgtggaatcatggcaaggaagagaggatgatctaggaactcgtttgttttatttttggtgtttttggttattggaacccggttaggattgttagttattcttggttttgttggacgaattatttatttattcataaaatagtatttttgacttgcggtttaattagatatttatgggaatatttcattatatttttttaaaaaaaaaatgggtcgggttgtttcagattcccaacacattgggttgtcggtgaaacaccacgtctcactatacgttccaaaccgatttggaggcaacgtttttatgtggaacttcaacgtttcacaaaatccctctgcttcttagtaattgtatctctttttaaaattcgagtaaacttcgtggtcctcatttccagctaaactcttcaacataatgtataataattacgccagtgggtagacttctttagcatatgcggcg

SEQ ID NO: 41611 - DNA, 760 bp, Arabidopsis thaliana columbia
tgcgaacatgctgataccttatcagggtaggttagcatgtgttactaataccatgaagaacgatgtcaatggtggtattatattgtggactttggatgatgcagagaaacacatatggtcatgtaaactctttcttgctccttttgcacatatggtcattattgtatgtatgtatgtattattgtctcacaacagcaacaaggtaagtatgtgtttcttggttcccaagttattaaggttttcaagttttggattctattttgagtcctttttttgttgatgcgtctaggattacaatttttgcaagatatatcttactccacaagcaataaagaagaagaaagaagtggaagaagagaagaagaagcagaagaaaggagaagccgttgtttcagttgcacatgtggaagcattggaagagcagcaaccttgcaatgtcgagtatcatcaaccgctagcaccgctagattcttgccaaccgcagcgtcatgatttggaatatcaacagcagcagttttgtccaggcccgctggattcttatcaaccgcatcctcatgatatggagagtcagcaaccgcataatccgctgctttagccagagtcatatgatctggagtcttttgagattgtgtatcatcagaaacaaacaacatagtcgcatgatgatgatgcaagagtcaatattgaggataagattgtatcttatgcgataagtttaaatcttatgtgataagtttaaatcatagttatgatatgttta

SEQ ID NO: 41612 - DNA, 946 bp, Arabidopsis thaliana columbia
catttctcgtttgcacttccacatcatttacccatcaattgaaaatcagataatcaatcgagggaagcttccgcctccggttcctcttccgcttcatctaccacttccccattttttttctttccccaattcctcaaaccctagttccagatttggatatttagggtccaccgtttcggatctgcttcctccgcaactttaccggcttccgacatgtgcttcagttgacggttacaacatcatctctcttctgggcagcaccagcaccagcaagtgcttttaagtcttcgtatcttggttttgtttttctaaacgtaagtttctcctttcattctctctctcttttcctctcttcgttcgatcttcctctcactctccgatctggttgttaatgaaggtacgattcacatgagacttcttaaggtcgctcctgtttctcatacggtttatgcagattcaatattgggcattagattggcggtgtttgttatcctagttttggtgaatcatctcaactggataattgattaggtatgtgttatgtttattaattaaatcggttatcaaggtttgatttttttcacttttgttatgtgttgtgtgactaattgaattgagctgatgtggttttatagttcgatagatccatttgttctacttgtgctgacaaagctatgatgtcaaagcaaatcatgtttgtgtttttggatctgaatatggactttcttttctatatgaaattgccactagattcttttccacaaagtttgagtctttacgtttctttattggtgtagccttcaaatttgttactaatctattctggttgttaatgtatttcagatttttgttgtgtacgtgtatttgtgagacgtggtgggtgcaagaggcgcctaaagacatttctattaataaaggaggaagctaataatgttgatgatttagg

SEQ ID NO: 41613 - DNA, 555 bp, Arabidopsis thaliana columbia
ctaaagtgtgggaagcacttgtaattctaatgtgggagcctcgttggccctggaaagttctagggcggatttacagccaaacaattagatcttttcttctctggctctcactgggcagtcctgtgatgaattgagccgagcatgttgcaaactggtcagcagtccgcgcagggtttctcaatagtcaaccggataaaggaacacacttcataaatcagcacgtgcttaaggactgcctgcttatacttggttcatagttatacggctgcaaggactggcagtctcgagccctagcttttcgctcaccctcggtcgtccatgtttcacaaagtagcctcaaatagggcagaagggtgagcacttgactttcccttatatatattcacctcactgaatcccgccttctccagaagagccacccattgttgctgtgttcgctcgtgagaagacataagctccatcaattgaaagtcaacaatggccgcgaatggtaatacatcgggaccgtcgtgaccgtcaggaagcgtataatcgtgagtaataagcaccgagtct

SEQ ID NO: 41614 - DNA, 511 bp, Arabidopsis thaliana columbia
gtaagaattctgacagatggagcttcggcttttttgttgatcacaaagatttcaagataagcaaacagaaactattgcaaatgagagaaaatcgaagaaaagtgccataaaataatcataaatcatcagtatcaaagtacctggaatgacggaagcaaagtgggaaagggaaataatgtttctagaaggtttgtgtcatcctgagaagaaatatattcagatctaccaaattggaatccaaatttgtagtttgttccactcagtccagcatctgccatgccagattcttcaaaaacagcactcaacagactctcatcattaagagagggtagacaatagttttgcgacaagttcaagacattccaagcatttctattcctctcaagatccattttagatactgaaacaacaaggttttcattacagaataaccctgcaacgccttttgggcagtgagaccactatttccatcttacacctgtagcatagcatgactctggagtctgatttg

SEQ ID NO: 41615 - DNA, 554 bp, Arabidopsis thaliana columbia
caatcgcgacagagctgatcataagcaacattctgaggatagggaaagttaatgtgataggagatgttatattgtttctaggaaagctttgtgtgagtctcttcagtgctctctttggcttcttgatgttggattcgcaccgatatcgtgcttctcacaacaaagtctcatccccgctattacctgttttggtaaaatccttttccttgctctctagactcaattgtaaatacaaagacagatgtttttttttttagcttaaataggtttgcttgcttgtgactctctctatgcacaggcatgttgggcattggggtatattgtggcaacacttttctttgcggtggttgagatgtcgatagcaccatcattctctccttctgtcaagactcagaggagaatcaagggaatgctcagcacgcaccacctcttctgcttgaaactttagatagcaatcaggaggaagaggttcagagtcttactcactgatagatccatactgtataagttttgtttcttctttggttggccggtttatatggtttttaaaatag

SEQ ID NO: 41616 - DNA, 514 bp, Arabidopsis thaliana columbia
tctcagcctcaatttaatcccttcgttttgctagcaatttggatattttttttttctttttatcaaagcaatttggattttttttttgatacttgacttttgaattttgattacttgctctcgcctagtacaatttgcaatggatagacatgtacttcacaatccttgaaaccgatattagaggccacccacgtcgtcacgacttggcggcaaactatacccatggaaaaatttacaatttaaaaaaggaaaaaacattgaacttggttccgtataagaaatatatgcagcgggatcaaatgtacatgcttttgtattagtcaattcctcagaattggttttaaaacctataattttatctgttaatgtaatgtttctaaacacgatgaacgcaactaatccaaatagtgttaaatattatctcttaagtataacaactaatccaacgctaaagtcaagtttacttgatcgaccgcagatctcgattagagcatatgctatggaagaggtttgc

SEQ ID NO: 41617 - DNA, 517 bp, Arabidopsis thaliana columbia
ttctttatatttttcaggtgtatgatttctgtagccaagactcatcacatctagcagactaccataaggatggatatcagaaagtttaaaagagagaaaaagaaaaagaagcagttagctgagtagagagaagctgaaatgtctgattgtattgctgcaagaaatattttgagtgatgatggactccaatttgctggagaacatcatggagagtttcaggatccaccacctcttggaaccattaatcctcctgttgctactgaaaacgttgcccgtgtagctgttgctaatgttgcttctttagctgcgttaaatgctaggcatgcgcctcgacaaactcagagggattataatgctcccaatgttgagcttttatgagatatgaaccaacaactccctatcaataggaatgattttgagatgaaaattgggttgttgtctcttgtgaatctgagaatctggtctaccatttggataattttgaggatatatgtgggacgacgaaattgaatagagt

SEQ ID NO: 41618 - DNA, 497 bp, Arabidopsis thaliana columbia
tgcgatgtgccttgtgagtggcgagatttgtttagggggaagagactatcttctccaggagagatttataccggagaagttatgttggtttcttctcgtttagaatcatctaaacctttttctgtttactattacgatccgatcaaagagagtttcagaagtgcggaagtggaaggaattgcggaccatgagtttagacgtatccacggaattggtaagcgtgctcgtgagatgttgtgttttccaggtcatattgagaacatcatgttcttgtaacactagtcttcctagttaaacttaattatgtttatttagagattaatttttaacttcctacaatatcttatatcttcttttgtttgaagattttgctagctatcgtctattttaaattagttttagagttttaatgttataaaaggtaatcctgcttatgttaatccttacattacatttgaaaaggaccaatgggtaagtgtgtgtgtgcgggtgctgca

SEQ ID NO: 41619 - DNA, 388 bp, Arabidopsis thaliana columbia
gtaacggccgaagattccagccaaattagaatattttttttggtatgttcttataattttgcatagacatatgtattcaagttcgagaataatatttatgaatatgagtaactttacttaaatccagcaccaagttcgatatttttttgtcaagtagttccaagttccaaagctcaatttcgggtggatggatcattcagctaacatccgtgatccatgtaaaacacacagacatcgtaatggaatcaattcgggaaaaaataacatggtagagattgtttgtgtcaaaagaagaaaaagatgatgaaagaaatgaaaagagagaatcctgatcccgtgactagggccacaagtgacaccttgaatgtcgacatctgagctagccagt

SEQ ID NO: 41620 - DNA, 658 bp, Arabidopsis thaliana columbia
agaatcaattagaaatagacggttgaataaaaaactcaaatggataaattatgaatcagaaaagaaaacttcatagtttggttatcaatcagaactcataagtaccgtatacaactgcatgaaattaaaagaaatcaacttaatgattaatttaattaaaagttagtacaatgtaagcatagcttttcacgcaacccgaaaataatgcatgttgaaggtccatgcgtttgtgcttaaacacgcttcgctaaagcatgccttgtaattgtaatcaaaacaaataatcccactaatgaacggatgatgactaatgaagattcatgtttggtacgaaatgttttaagcccttttgaacaaatacaacagatgatggacacacacacacaaatcgacgacataaaacttgatttggaggatatccggaaaaataggctattcacatatcatccgactcagccttaatgattatgttgtttttatgaatgggttactctatttaatttgtctttaacttatttttaatacgatgttgaagtgaaataatcaacaaatagttataaacgtgaagaaaacaataaaggagtagaagacagaacagagcgagaaacaggaggggcatgcgtaacaagagctaatgatggatgagggtaaaatggga

SEQ ID NO: 41621 - DNA, 416 bp, Arabidopsis thaliana columbia
tgcaaaagtaaatatatttaataatttttggtcaattctattttacatcctattttcttattggttcaattaggtgtagttaacgatgtatttatagaaaatagataaattaaatgagaatcttgtgtttttttaatctgtgtaaaaaaactttaaactacaaacatagtgaaatagaggaagtaaccattaataaatattttctagaattgaattatggctccaatgaataacacatactggcgtttttgatgcgattatgcaagaatttaaccaagaaagaaatttgcataatacttatcttaacacaaaatttgcataatagtacttatctaaacacatgacagcctttgcatctaaaaaaatagcgcagattcaatatgtaaataagtggagatatagttgattacgtcatc

SEQ ID NO: 41622 - DNA, 646 bp, Arabidopsis thaliana columbia
gtgtatgtgaaatacacatacttttggacatacatatagaaagaattagatttgtctattacaaatttatatcgcatttgatgtagtcgacgaccgagatgaatcaaatgaacaagatacataaaaaagacaaacattaacacacaaaagaacaaaactaataaaattaacatagtatcaaaaaatgaaataaagaaaagaaaaatttcaaaatctagtacgtgcttgcatctacatgatccaacgaagttcttcgcctatccacaatatattgttttgcctatataaacacatctcccatttcctcataagaaacctcaagccctaactaaaatctcaagataaacctatagttgtcttgtcaaacaatcaaaccctttttagatatagaaaatgggaatcaaattcagccaaggtccttcgaatacaaccattcacaacagaagtcatcaagatggtgaggatcaaaggaacgagacggcgacgaagatcaatcatgacaagcctcaaaatcaatcaagtagctttcagattccacttcattatccaaagtatacaaagagtgattatgagaaaatgccagagtggcaattggatcggcttctgagagagtacgggttgcggttatcggagatcttacgagaag

SEQ ID NO: 41623 - DNA, 351 bp, Arabidopsis thaliana columbia
ggagcggattgaagatctttacaatagcccatgaatgtgtaatgtgttccatctcaagtttcctacttcaacttctatgttttttttcattaagttattacgcatgaacatattcgactaggttttcaagttgttttttctttcttggacttgtttcttgacaattgggaaggttttacgtctttaactttttctatttagatcattggatgattgcaattggatgttttaagtaattggattcttattgttccgttttagcttttatatgtgttgttgtagtgtaaacatacccaagtagggtaaaaattgatttcatagagtaaatagggcaaaaaacccgatcccgac

SEQ ID NO: 41624 - DNA, 720 bp, Arabidopsis thaliana columbia
tccccaaataaaatccagttaattatcttacaattctgattttcatgtacaataagttggattaatctttaaaaaataagttgtaaggatccatcaaataatccccttctaactataatacgcatatttggagtttaaactctcaaaatttagatattgaattgagccttaaacctcgaaaataaagtatgtctactacaatgatataatttagatataaacttaacataacacaaattgtgggggtacaaaaaatgttagcaaaaatataaaaagtccttttggaaaataaaaagatttgagcaactacattaagtttatgtatttttttagaatttcccggaagaataaaactactgtagtctcatgatatcaaaacgtttattggggacaagacattctcttgtcgttttgtcaattatccattagatagaaactggtcctcgaaacctagaatcatccaccccgcaaagtcgacagatttccagcgaattcaaacccgatccatcgagattctggatcaacccgattacccaagatccaatctttctaattgatgaatcaatcgatcccttctaccgtatcttcttctccgacgactgatacgatggacgttcgccgcttcttggccggaacagacgtaaccgcccacggtcctctcagccgattcgtggcgcggcgtcgagacttctccgccgtgctagcaaccgccggatgatg

SEQ ID NO: 41625 - DNA, 2897 bp, Arabidopsis thaliana columbia
ggtcgactcatccccctctttttccaagggtattcctacatagctggtgggaccacggtaaatcgatcataaagtcttcaaaaaagaatagatacgattgcattgcatgtagttacggatgcgatcataccgcagttaagcgtgcttgggcgagagtagtactaggatgggtgacatccaagaaagtcctcgtgtgtcatccctcttttttttttgttaaaaatgtatgactctataactttaagaccgtgaggccaaatttgacatatgataccttttcggaaaggccaaagagagctctccgatgaatgaggaaggaaaatggaattcttctattggttttttttcctactccaaattttgacctaaatgtactttttcgagcctttttgggatctttgctatattacggggcgaaaattatatgttcggacattgttttcaaatattttgcatgtatcaaagctcttttaaacaagatagggtattcctatgtagctggtgggacccacgggaaatcgatcataaagtcttcaaaaaagaatagataagattgcattgcatgtagtaacggatgcggtcataccagccctaatggaatgaggaaggaaaagagagatctccgatgaatgaggaaggaaaatggaattcttctattgttgttttttcctactccaaattttgattttaatgtactttttcgagccttttcgtgatctttgttatattacggggcgaaaattatatgtacggacattattttcaaatattttgcatgtatcaaagctcttataaacaagatagggtattcctacatagctggtgggacccacgacaaatggatcataaaatcttcaaaaaagaatagatacaattgcattgcatgtagtaatggatgcgatcataccagcactaatgcacaagatcccatcagaactccgcagttaagcgtgcttgggcgagagtagtactaggatgggtgacctccaggaaagtcctcgtgttgcatccctctttttttttggtttttctcttttttttttgttaaaaatgtatgactttataaatttaagacagtgaggccaaacttgacatgtgataccttttcggaaagcccaaagagagctctccgatgaatgaggaaggaaaatggaatttttctattggttttgttttctactcaaaattttgaccttaatgtactttttcgggccttttcgtgatctttgctatattacgcggcgaaaattatatgttcggacattgttttcgtatattttgcatgtatcaaagctcttataaacaagatagggtattctacatagctggtgggaccacggcaaatcgatcataaagtcttcaaaaaagaatagatacgattgtattgcatgtagtaacggacgctatcataccagcattaatgcatcagatcccatcagaactccgcagttaagcgtgcttgggcgagagtagtactagggtgggtgacctccaggaaagtcctcgtgtgtcatccctctttttttttggtttttctctttttttttgttcaaaatatatgactttataactttaagaccgtgaggccaaacttgacatgtgatagcttttcggaaagcccaaagagacctctccgatgaatgaggaaggaaaatggaattcttctattggttttttttcctactccaaattttgattttaatgtactttttcgagccttttcgtgatctttgctatattacggggcgaaaattatatgttcggacattgttttcgaatattttgcatgtatcaaagctcttataaacaagatagggtattcctacatagatggtgggacccacggcaaatggatcataaagtctttaaaaaagaattgatacgtttgcattgcatgtagtaacgaatgcgatcataccagcagtaatgcaccagatcccatcagaactccgcagttaagcgtgcttgggcgagagtagtactagcatgggtgacctccaggaaagtcctcgtgtgtcatccctctttttttttggtttttctctttttttttgttaaaaatgtatgactctataactttaagaccgtgaggccaaacttgacatgtgataccttttcggaaagcccaaagagagctctccgatgaatgaggaaggaaaatggtgtttttctactgtttttttcctactccaaattttgattttaatgtactttttcgagccttttcgttatctttgctatattacggggcaaaaattatatgttcgaacattattttcgaatattttgcatgtatcaaaactcttataaacaagatagggtattcctacacagctggtgggaccacagcaaatggatcataaagtcttcaaaaaagaatagatacaattgcattgcatgtagtaacggatgcgatcataccagcactaatgcaccagatcccataagaactccgtagttaagcgtgcttgggcgagagtagtactagggtggtgacctcctggaaagtcctcgtgttgcatccctctttttttttggtttttctctttttgttttgtcaaaaatgtatgactctagaacttttagaccgtgaggccaaacttggcatgtgataccatttcggaaagcccaaagagagctctccgatgacttaggaaggaaaatggaattcttctttagtttttttttctactccaaattttgaccataatgtactttttcgggccttttcgtaatctttgctatattacggggcaaaaattatatgttcggacattattttcgaatattttgcatgtatcaaaactcttataaataagatagggtattcctacatagctggtggaacccacggcaaatggatcataaagtctttaaaaaaaaatagatacgattgc

SEQ ID NO: 41626 - DNA, 563 bp, Arabidopsis thaliana columbia
tagtaacggcccgccagtgtgctctaaagaatagataacctatgcaaagacaatcgccaatgcggcttagcgtatcgcaagcgaaaacagaaagatcctgcttaccggcctacgaagccgatcaaacgcgtacgcatggcgcccacagctcaacgtgttgacttggatgcttctcgcgacccggcaaactttcccaataatacatctcgcgataaaacctatcctgaaacctttccacgaacctctggcggaacctctgacggccctgcaacatcccgtgatgctatctcccatgctacctccggtgcgacaatcgatccctctagaacttcgcctgaaacgttcgggcatccatcaataaacagccatccagcctcacatggcgcaatcggtcacccacaagaacccgcaagtgaaccctcttgcgatgtgataattcagtcgcatgcaacctctctagaggccttgaactcctcccgagaagacaactgcgagacctctcgcgagcaagcagctattttccacgcagtctctcaagaatcaatggtcgcccacaagaatat

SEQ ID NO: 41627 - DNA, 608 bp, Arabidopsis thaliana columbia
aaacatcgaatatgtcaaatttagtattatcttacaatttttttttgttggtcaaaatattatcttacttgtttctcgttttatgaacgtctttgtacatcaaaacagattcaatataccaacaaggattctaacgtacgcaaggaatagttaagtaaatcctctatgtagtaatgggaaattgttaggactttgaagtaagtatcagagactcgtgtataataaggtattcaaagtcaggaagataataaaatatttgtgtaacttggtggccacttagaagaagaaccaagaatatacaagcaaaaaggaaaaaaaactagattccgtaagattttcttttatttcaatcctgattataattaaaagaaggaaactatatccacaaccacaatgttacacatgagctaatgagcaagtcaagcaaacacggtttcttaacgcgtaaccaaacgtgaaatgaactattctttctatttttctcaatattaggatgacatatatactgttatttaacatctatatatctagatacaaactatatcttcgaatcatacttttctcaaccaaagattgcattgataagttcttaatttagaatagttatg

SEQ ID NO: 41628 - DNA, 546 bp, Arabidopsis thaliana columbia
atcccctgggtcccgcctaatgtcaaaaaaacagaaacaattgttttctatgggcctgcttttgggtcttatggttcgaaacaatggtccatgtgaagcgtgcaccgtcaagtaacctacaaaaccacgacatcgtttagtgctattcctgtttccaaacacaccttaagttcgttatcaaccccatcctctttttttctataaataacgaagcaacgagttaacgagaaaaattctggatcggagagagctacgaagcctgggaattttcgttacctccttcgttcttctctgatctcgaattcaataccaaattcttcaatctcccgaatctgattttcttatcactatccctggataacaaaagcccccaaagtaaaaacccaattgcgattccctcgtaaaccaatctagggttttcgcgagttcgtctctgagcttgtttgtttgtgatcgtgtgagaatgtctcggtgttatccgtttccacacctggttatgtttggaaagaaagtctgatcgaatcgatcaaggttgatttgttgagc

SEQ ID NO: 41629 - DNA, 565 bp, Arabidopsis thaliana columbia
catttatcttaactaaccgcaaggagctgtgttggagaaagctatagagagtataagcgagacagttgagaacaacccgggaggcatcaaaggaaaccaacacgtggcagtgaagatgcaatttcagatgacaaacaatcatccgtatccccagatgatctccctggtaagaacatttttcattaaccaccacttaatatttaccatcttcaatacttaaaaccgctagcacattcagttaaaagcgggtttgctttgttactgttgctgctttaggctcttgcacagcaatgtacaagcggaatgcttcaactggagctagagaagacccgtttgaacagtgcatgtttcattgagaccattccgttggatccagtgccaccagtagccaaagctgcctactccagaacatcaactgattctccaagcagaaactatagagagtcacaaccaatgggttctccggttcaagccagacccagacgaagataagacttctcttctccattgttactatgctcgaagcgtgttggtgatcatgacaagttatatcttacgatagata

SEQ ID NO: 41630 - DNA, 560 bp, Arabidopsis thaliana columbia
cgtcaatctgataagcacgccatcgagtaagtttcttattcaataatggtgcctgagagagtcttatgattgtttggcctgacacaacgaaaatcaatttactactagtaaaggtgacttagtgtatagcttacaattggctatttgtttgtttttgacgcttatgtgaaagattaaactgatcagttcaaaatttcttataccataaacgttgaattatgtttatttgtacattgctcctactgaggaagtaatgatacgatgaagtcaagaagattttcgatatttgtatgttcgacttattccacaggatccaggtttctccatttgttatttattaacatatacaaattgtattataaaatgcgttgcgtgagtaaccttagtaaataagtaataacacattcagtattggatgctcgtaaaacaattttgagtagtagaaagtctaacgattttgttagattgaaactgcaagactagggagctaagaatatgaatatctcaatcccaccaaatgtaataaaatgttgaatgaatcataaacctctagagtaggg

SEQ ID NO: 41631 - DNA, 530 bp, Arabidopsis thaliana columbia
gaagaccagctctacaacatattgtgcagttaccagttcaaacttgggaaggttacaagaagtagtcttctagtatgcacgggagcctagtcatccatctcctccttctagaccctctccgctttctgattctcatcacaccctcgctgttcaggaaagtagagttgtggataatagagtgcatacttccctcagaatgggacctcagttggattctatcacaattacggttcccgaggaaatgtcaaatacaagagcttcagggaaaagaaatactccaaatcaaaaaccaaagccaccacaaaagattggaccaaaacaaaagcctggaccaaaaccaagagtaattcgtagtccctccaaggggtaagcctaagaaagcagaaggcaaccactacttgggcctcttcctccaggaaaaagctccacgttgataatatacctgactttcaggatggcgaggcagctgtggcccttctgcaccgcgtatactgcctataatcctgctattaacagagcctcggtggatt

SEQ ID NO: 41632 - DNA, 545 bp, Arabidopsis thaliana columbia
tttgactcgagttgcctttaagtggtggtggtgggggtaccactggaggaagtcaaccaaattcagggacaccaccaaatcctcctcaggcaaggcgtctattgcgttgaagttgaagttgaagttgagtttcgttatttgcatatatattctttctttgaaaaaccttattatcaaaccagctttgtgttactactttctactgctggtttgttgttaatctcccgtttatttggtttttgtgaaagaatttaaaatgtgggttagatgagaaaattagtacaacattctcttgtatctatgtttgctatatgggttatatttacttgatgtgatttgagggtttatagtttcttgttctatttggttgaagtatatgagccatttcaaaccaaacgaggtaataccaaccgataacacaaatacttcattagtcttggcattttccaagttcgaatatgatactaaatctagactttgatgctatgatttgttctggggtgactcttaacattttgttgacttttcagttgactgatatgttg

SEQ ID NO: 41633 - DNA, 570 bp, Arabidopsis thaliana columbia
taagtctatatgcaatgtcacataaatatgaaaaaacacatcaatgcaattctcatcggttatccaaaaccatgaacggaagttattaaagtcaataggcataccttaggagggactaggttcataacattagtgaagagcttgtatatctcattatcctctgatgttttccttcccgtgagtccctcagtgagacgcttcaacggaaggggctgtaagacacaacagcatctatgataaatattttggagtgtagtggctggaatttatcaaatgcagaccaataaatggatgtactataatgtcaagaaagtgaagcaaagtatgcaaatccacattcagagtcttgcacatatgaagctagttttaccaaaagtatcaaaatgcgactgatacaaagtcaggactatatgcatgttcaagatgttgaataaattgagttggtgtgcatacgagaccaaaagttttaaaaaattaccacaatagataagtactaagactatcaattaacgttacttttaagtttagctatcataccagtttcgcaagacggccaaagtttgggagtac

SEQ ID NO: 41634 - DNA, 574 bp, Arabidopsis thaliana columbia
cttttctgctgaaacccgaaaaccatagatatgattatatgaaggagactttttgcaaccaaaacacagtgctactgtgtctgtgcttagtgtcgatattcacgatacacatcggggaaagtgtgttttctttttttctttcccaatttacttttctttttttttggcgcttgaaattatgagataatgatttaagaaattatcaggcccaaactatctaatgggcctaattaaaaacggtgtcgtttcataggatcctcatcacgaagcaggtaagtaaaaatatatcttatcttctccaaaactctctcttcgatttcagcaattgcaatggcttccttcacaacaacttcttcttcctcgcttctcctcaaaactcttctccccgtaagccacctgaatcgtttctctacactctctggtatccgcgttggcgattcatggactcctctgctccggaacatctccaccgctgggtctcggcgtcgagtggcgattgtgaaagctgcgacggtggattcggattactcgtcgaaacggagcaatagcaatgagcagagagagacgattatgc

SEQ ID NO: 41635 - DNA, 121 bp, Arabidopsis thaliana columbia
atcaaaactcggcagattctcatgcttctttggccagtaattctttatccagtaatattgtcaatgctgagctgaatcctgattctaatgcaaatcgtgactttttgctccaaagcatgcc

SEQ ID NO: 41636 - DNA, 608 bp, Arabidopsis thaliana columbia
tagtaacggtccgccagtgtgctctaaagacgccaaggtagccctaactgccagcgaacggagtttaggtgagcctgaggctgcagttgattggttaatgcgtattaggtaaccctctggaacttgcaatacgcacccttgaccctgccattgcggagaccatcggcattacttcccttcctcgtcccctcctaagaagtatagcatatttcatatccagcataaaatggtcagcccggtcaagccagtctctgattgcaagatgaagtacggggtacgtggctagccttgccttccgggcttgggggtgggaggcggaatcaacatgagttgctcgtcaaatgtattgagcaccttccctgtgggacatgggacttatcgatcagctgttcccatatacttctcagatatacgttgtcgggatacgcccttaggctcggtttactctgggtggtcatcccaatgctcttcggttttctttgtcacaagcagtaagaattgattaccccggggtttgaagatgctcaagtgtctgcagataactgggattgcaaggctgcgctgcgtaaagggtgaaacggtgataagtgttcgaaacatgaggaatt

SEQ ID NO: 41637 - DNA, 891 bp, Arabidopsis thaliana columbia
tgataatcttgagctacaagtatgatatatcttgttggtcagaatttggaaaatgtgcttgtgacgacaaaaccaactcaattctgtttttgttgtattagatagtaaaagacaaaagaaggcaagtattgtaaaattggagaagggtcctacgttatggaagaggtgaagcaagagttggtccatagctcctaggctatatgcgaggaccaagagaacgtgaacgtcatcttagttgtcactcattttcatatggaccctcttgatcttaaatattaatcatcattgtaaatataacaagaattaagtaacatgcacatttttatacatgcagagcagagagacaaatctatggacagaaaagcttaataagctgttgcaatctaaaaacataataatgtatataaatggtagatattaatgtttatgtaattttttttttgtctcaagagaaatattgtattaaacaaggtagtcaaggcttaaagaaaagccccgcgattacagaaacgatttaggcccaaataagccaacagagagtcattcacagaagaagatactacagtttgactctatccataccacataccgatatattaatacacgtgtcagatgggtactctaaagcgatccgatttcatccttgcagtccgggcaccgtttccggtgaaagaatcaccgacgatagtctcatcgatcatggatctaattggtttctcaccaatagaaagcaatcgaggctcctggtgtcgatacatcagcttaatgcgtatcataactagcaacggactccacttcaaatcatcaattacaatcaccaatctccgcacagattactatgtatcttcactctcatgaaaacgcatcggataagagtcattagaaagcgag

SEQ ID NO: 41638 - DNA, 742 bp, Arabidopsis thaliana columbia
cgccagtgtgctctaaagtccttcaattttaatgatttcgttgcagacattgatcacatgacagaaatcggcactagaatctgtcaaccggatgaggctcctccttactaatcggtatccagcacctcgctcgtttgtataatcgtttgatgttttacactgtttggatgacaaggatgtctgtttgatgatttacatcgtttgcatagcagggatatctcctggctatcgagaaacttctttttgaagccctcgaaaaggtataaattgcctatacagatcgtacttaggagatcaagaccttcaatacaatcgtccgttgcagacattgattacataaccacctcaattgttcacagaatccacctcgatagcccacacgtgactcttgccaagacccgtgacttggtgatgccgatcagccttcggctgctcttcaatgtcccatgggtcctgatggtcctgctgcagcctggataaccaccgatacttcccgtcaaacggttagtccttgcatctcgatcctggaagtcgtacccgatactcgaaccactatctccaaccggactggcatgtctgttgctatccatgacgtcaaacacttcgcaacgcgtcgtcgccggaatcgttaagtggtgacgcaggaactgtgctgccttcgacatcaaacatcactcgtatcatggctacgattttgatatcagtttggaatgtgcgttggagatggaaagcgctgagaatg

SEQ ID NO: 41639 - DNA, 661 bp, Arabidopsis thaliana columbia
tagtaacgtccgccagtgtgctctaaaggatatcttttgctatgaaactaggacacccataatctaataccaagatccagacttggctccgtaatatacaactacctcattgagaaatgtgactttcatccatcgaccgccgaaatatggagtcgctgtggatgtctatactgagttcttgtcaatggcatacccagcgcttacagagctaggtctatgtgtaaacaaacttggaagatatagcataatattcgaagttggcatttctgagcagggtgaggatgaagtcaaggccgtggcaagctgtgttcatgtctttgtcgagtattcaacagggagaccaccacaagaagataggactacaaagttgaggcaagctcttgaaaagctatatgtagggtataactagattagttatagcaaaccttgcattttccaacttagatcatttcccaaacttttcagctaccaatcaagcaagaagtcacaactctatagaccagatacagtcaaattgattatgcgataactgtgcagaggcttttctggtccaaggccatactatatcaagatgctcagggcccacgggaaaatagttgataaagggaagtctaatatatacgtctctcaactgacgtggtaattggtaggcgggtaaggt

SEQ ID NO: 41640 - DNA, 600 bp, Arabidopsis thaliana columbia
ctagtaacgtgccgccagtgtgctctaaagagtcaaatacttccaccgaatcaaacacctcctccgagtcacggaacgatgagtgcgccgaggcccccgagaagcccgagtcctgccacgtgcaaggctcgggtctgggcgatgtacggctgtgggataattggcgctcctcaaccgagcgatcgctaatacacaataagagcaaagaccagtcatggcaggtgctcatccggcgcgagtcggaccgatacccagcgctgcgccacagcacgctggctctgtccgctatccagcttgcatataccagcgaacgcattcggacaagcggaaggcttacttgcaggaggctgatgcgcactacagtcaagctgtggctgcggtcaccccggttgccgaaaagccctctgggtctcggtgcaacgcggccttttctaccgccagtattctgctgatgtatgaactggcgtccgcttcgctggccgaacggggggataaatcgagtcgcgaaaggatgatgaacaaggaacgtcgtcaccatcactgcataaactactcgacatgttcaacactgtgcgagggttatcgccagttcagaggtga

SEQ ID NO: 41641 - DNA, 198 bp, Arabidopsis thaliana columbia
aaatgacgagcaaaacccatttcatgacagttttggagcctcccaagtttaacgtccactgaaggtgttcgcaagtaccaaatcaagatatcatggcagttattgaaatctagaagtgtcatgatcgacattaaagtgtagtcagactcatatgacacacggttggaagctagtgcctgtattaaggaagcaccgtcc

SEQ ID NO: 41642 - DNA, 569 bp, Arabidopsis thaliana columbia
  unsure (1)..(569): unsure at all n locations
gtttaatgtccgagaggcttgtttggtctcgacataaaagacatattgtttggttttggtcttatcagtgaatcccagaggctaatgcatgtacacagtacgcaacattttaaagttccatgtgttattggcatccatgtgctattaagtgagtaggcccgaggtatagactaagaaggagcaggtctggcttgtaaagaatgaacaagcagctaatgagctgtggatttttcatttgttgtcatatattttgtgtaaatgtataaagataggcaaatagcaaggtatttggatttttcatttgattttatttggaaggaaatatatatactaatccatggtcaaaagagtcggactagtcccatttttgaaagccaaaaaccagcgtccaaataattgaaagaacattgaattcctctagaatttagtccaacataattattacacaaaaataaataattttggaactttttctaaagaaatcaataaccaaacaaccaccgaattggaaaaaaaanaaaaaaaattattagaatgtgttgaaagcattttgttttttaggcttgttg

SEQ ID NO: 41643 - DNA, 586 bp, Arabidopsis thaliana columbia
tatcttttggttctctcaattgtttacttctttgtttccattggctttactcccaagccagaaaaccagacaatggataagtttttgtgaattcctaaatatttcagagaatcagaggaccagatatgttttctgacgacatctttgtgtacaagatcgatgcagagatattgggactttcgagaaaagtcatatggttcctttcacgcattacagtttgggttgggctttgagctaggtttgggtaggacagtctcaggatatgacatcaactaatttggattcatataagataggtaaaaatattaatgtagagactataaaaataacaataatcttttattattacataaaaacgtgaaattatacaaacaatttttcctagaaagtatacaaaacaattttctttaacattttaaagcatatttttatggtcatctaaataaattatcacattttactttctttttttttaataccaaaaacctattatcaaacacaaagaaaaatatcgattataattctaaaatatattgaaaaaattttactctaggaagacaaaccggtcacgtaaagatagatgtat

SEQ ID NO: 41644 - DNA, 494 bp, Arabidopsis thaliana columbia
acttgtaaaccacaacgtagcatctaaaacttgtggacacgttgctccagaaatatacgttactctgactctggtcgtatcataaactaaaagttgttttgaccaaccatatattgacacatcatgctttctagagactgtaatataccgcgtacaggctcgtcaaaacgaaacacaataccacgtcaccatactcaacgaacttacgttagatacgttccattgccaggtcacacgccagttgatatttcaatcacgtttctcaattgttgtaatcttgaaaacttcacatattcagatattctacacatttctctcttattggtttctttttagacctttataacaatagtagtatcaaatcaaatcgaaacgggttacatttggttatcacctcaaaaagaaatccacgtgtgtacacaagaacataattacgttgttatattcataattctcctctcagccttggtagataaaactcgatgttacaaaag

SEQ ID NO: 41645 - DNA, 522 bp, Arabidopsis thaliana columbia
ttcttacttaaggaggagagaaatctgtaagtaccatgttcttgaatggctttgacaactttttcttcatcaaatcccatagcaaggaaatgatcaatagccttggacttggaagaaccagcttcacagtcgctcttcacaaataaacaaaggagaggatatgaatactgtgatgacagaagcacatgtaaatgacaagcaacccaagagatcaaagtattagaaactcactgagtatttggagatagtatcaattataaccgaagtttctacatttggtcctgtataattattggtatcaagttacggatcatatatatccagaaaggaatacaaacaagagaaaaaagcctcaccagtttccttgatcgctctagaaatcatctcaacaggaaatcccatgtcaaacaatgtagcaaaaacctcgtctgagaagcccatctgaactaaatcagttgtctcagtaggagagctcaaagaactagttgtctgaaacaaaacaaaaattcacataagcaatga

SEQ ID NO: 41646 - DNA, 548 bp, Arabidopsis thaliana columbia
tcccttagatacgtggtgactggtgagttttctcttaatcataggatatctctcgtacgattaattatagtttaaaaacatgataaaagtaaacaatgattatagttgtgacttgtgagctaattattggagcccgcacttgcacaaattaaatcatactcactatcattgcttttgctggagaaacatagtgtttacgtgtctctcatctttttttttgggttgtcatataaatggaattatggattggcctagggcatcatgaaatgacatctcatctatgatacaaataaaataaaataaaatgcatatgaaaaagattttgtttaaaaaattgaaataaaggactctttgtatgttaataacttaactttaaatgatcaagttatcattagactttgaacacacaaattattgaagaagaattaaaacgaaataaatgtgtgtggggaaaaaaatgtatggggaaggaaaaacatataatctggcatcaccacgtataaaccatggaccactacacattgtaatgtttaattttataagtaggg

SEQ ID NO: 41647 - DNA, 539 bp, Arabidopsis thaliana columbia
ttggagcttttagttaaaaaaaaacatataattatacagcttttgtttcgtaaaacaataattaaggagcgtggatgctaggttggagagattaaatagacgttagaattcagatagttggccaaatttgatgcggacacatgccaatttggccaagtggtatactattctattactcacttactacgtttataatgtttaatatcaacttgctactacaaaacttattcacaaagcaatctatttgtgatataatatcatatactgtacatatattgttaatacgtagaattttctgttttcacactttagtagaagatactatgaagaattttgtcatggtaaaatctaacaaaatactagagaatttgttctacaaaatacaacttatgcacatgtggactttattttatttaagctaatataaacttaagacttccttagatacaccattctacagaatgtaaaaatgttgcgttaatcatctcgttagaaataaaaacgaaaaatttccaaaatattttattttacaaaaggaa

SEQ ID NO: 41648 - DNA, 507 bp, Arabidopsis thaliana columbia
gaataggagcaatggaagcgagagaagaaggaacaagctcgctgtcgaattggtctttcatcttcattaggatgctcaatcatcatcgtaccagctcgtgtcatcttccgagacatagaccgaactggctgcatttgcggcggccgccatcttcgcctcttccaccactactagtactcgccataatagctgatcaatttcaaattccgaagaatcgataaaacccatcttcttcttcccccatttttgtggatatatacatgtgtgcagaggaaagtgaagcgggaacaggagcttagattcgtggagtgggctttagggttatgcgattgctctacgaggaagaaaggaatgctaaaggagatattctgaaaaattgattactcgatttgtgtcttcttcctctacactcagatgtgaagaattgattgctctttctttcactcgctcgcttttgagctgtgactagttccataaataggtacgaaagcaacccaggacgaggtt

SEQ ID NO: 41649 - DNA, 582 bp, Arabidopsis thaliana columbia
ccccaaggtcaaaaaatacaagtcattcttatgcagtctcaacttacagaatcaaagccagggtgaccatctagtgacatcttccggatgctagccatcaacaagaaaaagcatgggagctgcagataacaatagccaaagggaaagtgagaatgaatgcaaacaagtgacctatttattaaatgtatcaacatagaaaaaaagactatatcatttatgaagaaagccaaggatcaagtgacatgaaagagtttcatataaggtagtaaacagatatacaagcatgtacgatatggatctttctgcaaaaaggtcaactctaatcgtaaaacaaagcaggactgctcttgtccagattttcacaaaatcttacagacaaaccagaatcacaaatcactcaatagaagatgttttttacctggacagataagtatgggaagaccacaaaaaggaggggccccaattgctcgactctctttaagaaaatgagaaaactggtcaatagatcctttcaacgttggagtctctgggatcggcataggcactgtgtaagaaatgaagaacattatgattggcttttac

SEQ ID NO: 41650 - DNA, 602 bp, Arabidopsis thaliana columbia
taccagtatctaacagatttacatctcgagcaacgtgtcttagcaggaccaaaacaccttgcacatacatgtaactcattattattgacaggagccacaactgtaaccccacatgtagcagtcacggaatcagatctctgctcggctacagtttctctcgcaccagcgtcaaactctgctcttacagcaccaccaccagcagaaacagtcttggtcctggttctttgagccctattctcagtagccacactctcaaatcttacacctctatccgcattaaccacggtctcagctcttaaagcttcttcagctgccatctgagccagcaagttagcccttactcttttttcagaaatgttactccattttcctaataaaatgtaagctaccacaggaagtacaaccaaaaccaggaacaatattggtatgtccgctccccttggttcaagcatgtcctcagacacgcattcatgacccgatcacagctcgtgaaaatcccttaaattacatgaattcagataaccataatcacactcctgatatgcgccaagatctattttcaggccagcttgtgaactactgaagactcggaagatggatag

SEQ ID NO: 41651 - DNA, 598 bp, Arabidopsis thaliana columbia
attcaacacaattcgtttttcttgctttgaccacaataggagactacacaacaatatctattagctatattccctacattcaaattttatttgaacgtttaaccaagtacactctagctgagatgtttgacacaaggattaaacctaaagatttttacaaaaaaataacactagctgataagtacaccataatctacattaaccctaagaatttctaatccattgatcgaatgaaaggttttagttcttagcattcatatgaattgtctcatatgctaaacactagactcacatgactttgatatacaaaatcttctacactgcaaatgaacaatgttgttgttgatgtttatctataatacaaacaaaattaagttcaacgcaatttcctcatttcaaagatgtagcaacagagcatctcttactcacttctgcaacagtacttatgtactttttccctttttggacttttatgctcaattcatctttctacatttgactattcctttcaaaatattaaccaccaaaataaaaagaaagaaacgtgtttactttttacttgtaaaccattccaatatgttcgcacataaacagagga

SEQ ID NO: 41652 - DNA, 1461 bp, Arabidopsis thaliana columbia
tgacggtgtgaagactactcttggagaatcaacattgtcttttgtgttgtgtcagcagattatgttctgaattttttgatacaagttacaatgagcttagtattgtacaatcacctctgggacagttctggacctcaacatgagggagagatggttattactgtgctgatactaatggggacttgttctgtatatatcaagatggcttcagaaaaatgagttgactttcagaggtactaagttcaattctataagctaattgggttgttcagttttgttttatggtggttattgtgttttatgagatttgaccggaccaaaatccggttagcactgatttttggttttgagtttctatggtttgcataaagggatctatcgaatgaaacaagtgagaaaacccagaaaattgagctctcacgccgaaaccctagcgatgggagaacacgcagcaatgcccggcgtatgcgaaagatgtttaatctagagtatgtgtttcgcacatccttacctgtagatttgagatatgtctctactttgttgacgacaataacgacacgtatggaaggtatggtgtccttgtcctgtactcagtgtctggtttaattggtagagtgtctagatagagtttttgatcaattatgtcatgcaagcagggggagattatgaactagtccctgagaactctaattcatttgtaaactctctagatgttgataacgaagaaagctagatctagttgtgggggagtttaggattaaggaggagtttttaagctgtgtttgttaatcatgtccttttggttttagtaggtttttgtttctaagtactggatgatgtattttgaaccttaaaaacttgtttatgcaatctatgatgagaccctctattgtttatttccgctgcttattatctctatgccttgatgtgtgcttgtgagttttctttgaggggtttcttgcaggattgcttgaattgacaaattgtatcaaaaagggggagattgttagtgcaccctctgtcaggacaaaccagaaggagtgctgattgctggaacaagctggaagctgtttcagaagactaaagtgaagatcaagtaattgatgctgacgtggatatgccgccaaatgaacgaatgacgtggagatcacaacaggatgagttcagtttggagaggagatattcacgcgaagatttggagtgatccaagatctcgaaggctaacctagaagaccaaagacctcgatagtataaatagaggtgctaaggttcttgttagacttggccgtgattgtgagtgaaaagctagtgcaacgctttttattattagagactaaggtttagtctgattggaattctagagagatcaaagagtgtgttcttgtgatctgctcttgtgtgtttagggaaatctctggtgacaagctaaagtagtttagatcttgtgtaaaacctaattaa

SEQ ID NO: 41653 - DNA, 548 bp, Arabidopsis thaliana columbia
cgacgaagagctaattcctctccatctccatctccatatttaacctgtagtaaattttactaacagtcaccaaaaaaccaaaattaaagacatgtgacagatacactagacagaaataacttacaatgtgatgctttgtctctacattatatccgacgatagaaccaggataccaaacagcatccaatggccaaaaaacctaacaattagacaacaatcaacagttaacaagcccatctcataaacagagaatgaaatagctaaagaaaacaactctatagctcaaagcctaccttgcattgcagcccaatgaaatgtttaggatcgactccatcataactcaacctgccatgccaaaactcgtccatcatacaagagaaaactaacaaatagcgtgccagttatcaccaaaacgtctatattgtgaacgccataactaacaagtgcaacacaacagggcatatacatttcaaccaaataacttatatctaagatcacagagcagaattaatggttggtgaatcctacctgacccatttcttagctgt

SEQ ID NO: 41654 - DNA, 494 bp, Arabidopsis thaliana columbia
gtaggcaagaaaacaaaagagccattagataatgtgtgtcttgtattgtatttattgaatcttaccaccgaaaccgacatatcattagagttttagtaagcacgtcattttcagttagtaggttggaaaagaaaaattctcatcttcaatatgaaaatataggatgagtatctttttatgaacgttaatcgcttagttgtggttaagttatttaaagtaaattttaatcaagttaggcagtaaaaaataaataatgaagaataactatcttctttacaatatgcaatttaaatttctatagggaaattatttttcggttatagtagtagcacaattgaatcttattgatgtatttgaattatactaaatattttcattgtatcacccaataaaaagctttaatgaaagagaccaaaattaggaggttagatattacataatcatcgttaatatgcaatcaatataattcatgaaacgagagagttaagaatgag

SEQ ID NO: 41655 - DNA, 364 bp, Arabidopsis thaliana columbia
aataattagtggttaataaaattatttttgtcgtaattaatggttagaagagacaaagggttaaaattaaacctaaggtaaaaatagttattaaatcgctacatatcttctgggattgtaactaataaaaagcagtgataaaaaaaactcgagtaatttggccccgggaaaaaaaatgtaaacttgcatggatttaatgtaggctgatgaattgcgggtttcggctgcctgatttaaagttgttggattatatccagcacggttgtttggaggttgccgttggcgacgtttgcggctttgttgtcgtactcggtgcgtggctccctccctccccccccgatctgtttccgtccttgcctcgctc

SEQ ID NO: 41656 - DNA, 595 bp, Arabidopsis thaliana columbia
cactcttatgctatcacaaggaggaggaggcgaagtcatctcctccaaaagataacgtcaaaaaaggtgaaacgacgggaaaaaaagatggaggtcttgttgttgtgtcgtcttcggaaaaaagtaagaccaaaggctgttgttgcggcggaggtgggtgtggtggtggtggtgggtgtggaggcgggtgtggtggtgggtgtggaggcggttagaaattaggggttctgtatagttatatatattagtgtcattataatgattgtgtgtgcgcttttttttcctcgtattgtgcgtgtgatttaagtgcatctgagattcaaatgtatgcatatattaactaatctatgatgtgatatttatctctaaagctcaccaaaaaaaaataaaaaatctcacaatgtgcatctcgtccacagtccaattcgaaagcgtggaatcgcggccaaagattcgctagtggtcggcttcttggacctccaacaatgcttatttgtatgtttccagatacagactaaatttaaatctatggtttattagtactcttaaatcatttctagaacgtaactgaattaatcacctacattattaaatg

SEQ ID NO: 41657 - DNA, 474 bp, Arabidopsis thaliana columbia
ggataagaattgattgtagtaaatgatgtcggcagttacaagtgtagttagatatatgcaataactcaaatcggacatgaactcattttaacttatctaaagagaccaccgacgaatcattttgggttcacaaaattgtacttcgatttctaagcctgaatgtgaacgcacgtttttgaatatttcaacacgtgtttcatatttcattacatgcattataacataaatattacatctttgagtctttaactagttgaccaacaaaaaaaaaaactttaactaagtctagctagttttgttactacatatataaaaacaaaaccgaaataaatatttaaaatttataatgcaccccctctggctaaatcaatcaacgtgtcatgaaggtctaattcaagttggtaaggcaatctttcgtttatgtccatttcccacgtgtcactatctgtctgacgggtagagaccgacatgttg

SEQ ID NO: 41658 - DNA, 607 bp, Arabidopsis thaliana columbia
agacttccatgaatatatgtggtgcaggtacaataccttctgtggtcatccgcctgaaatagtcaagaaaatgccgaagaaagagcttgcggaggaggtattttgccttttttctcttacatgcaaatatgtcgtcgtttttttgtttgttaagtcttagatctctggtatcattattactcagtgctgttcatgtctttttgtatttgatctataatttggtgtcaggtgtggagacttcaagcagcacttggtgaacaaacagaaatcacgaaattcagtcagcaggaatatgagagactgcaaaatgtaatgctctcacctcttcttcttataaattacacttctcagggtttagctttcacaccgtttctcttttggtgttgcttttcctttggactgaatttcatatctcgatgttctctctgttccaggagaaagtgctgtgtagggtatgttttgaaagagaaatcagtgttgtactgcttccatgtagacaccgtgttctctgcaggtatcataaactattcaatgtttatgcattttcacaggaagaaactgaatttaaagcactaaattagttcggtgattaatcaagtgcaattgc

SEQ ID NO: 41659 - DNA, 589 bp, Arabidopsis thaliana columbia
tcccctcaaatcaaatatacaaaaatgtgagggagaccaaagcgaaaagagtaactcctctttggcaagcttggtttatgaaatgtgacccaaatttgtttacattttagtcaatttttattcaaattaatgtgagaacaaacatatttagggtgctagttagaaatctaagatattcttcttcttcaaacaagttcagtattcaacaacgcttttcttttacaagggaataatttcatttatcatattttcttgatttcttacttctttgcgactctctccactcggtagttggtccgctctagacttccaataaatacctgcgatgctaatgctaatatgctatatgagtaaaataaacaacttcagtttcatatgtgaaactattatctaaaacatgacccaaaaccaaaagacacaataattgactaggatttattcatttatttgtttttaagttaatataacagagtgaatgacattgaatagtttctgccatcttgcaggtaaaagatatataaagaatcaagttctcaaaacgtcggagaaaaccctatcaatgtttacacatctcttaaaaaacatattg

SEQ ID NO: 41660 - DNA, 608 bp, Arabidopsis thaliana columbia
tcttttatttgaaaagatttcaaaatcttgggttattagtataaatcatatcatacaaaattcccaaatctaaaacataagaaaattctatggatgagtgtccgaactgtgtgttttgtttatcttcttttgagtattttttatcgtactactcaactatcgtttttgaattttgacaatggtaagtatcttgagcatacatatgaaaagaaacgaatcatgtcccaaaatttggaagcaaactgagatcataaaactgaacacaatcatacagtgaaaaaatcatatcgaatttggttatcctctttcaccaaaaccaccgatcatacctgattaatcacatttggttcattgagcatatcaaattattactatagttgggcctaacccgcaactgaaaatctggagaagatttaacgaataaaaaagagtggtaaaaccgttaaagtattttctttcagctcatctcatatccaccagaaattaaagatcaaaagtttaaaccaaagtcatcttgatttggcttgtcgtaggcggctttacttccttctccctctcaatccacatctcctagtttacgcatcaacacacacaaaagaaaaatcaaa

SEQ ID NO: 41661 - DNA, 616 bp, Arabidopsis thaliana columbia
ccataacaaaattagagattagaaagggaagaagatagtgaagatgataatcaggataagcgagagagcacatgatcataatctttgcttgtaaaagtgaaaaacgaagagctatatagcttttgttatttgcttgaggttggctcttggaaagttgaacatgttagcaatgtttagatcttagttctgttggtgtttcatatcgatttctttagactgtatcttttttaagtgaaaaaaaaaacagtgctttagtgaatcttgcaggtagtatttacttgtgaacatttgttaactcaagtactgtctgttcatgctaaaaaataaactaggctaaattgtacgcgtggctcggatgggagtacaggaagccagcgagagttcctccagcttgtcctttcaagccagttgctaaaaacgacaacgccaccaaagtaagtgaaaggactttactcattttttattcttggttgagtcgtttcttagttgaagcagtttagttgatggaacatagattctacctccaattggtgttatatgtttaacttcaattcacaatatccatgatccagtagctctgagactgacatcactgtgtactgattctgagttttgc

SEQ ID NO: 41662 - DNA, 549 bp, Arabidopsis thaliana columbia
  unsure (1)..(549): unsure at all n locations
tatcattaattaaattaagtgcatatttttctatttttattgagtcattaatcctgctagaatgtttcacatcaaaaatgaagtgtaatctaacaaagtatgtaatggatataggtcaatttattcattgcatattgattataaatgagattttttatattcttaaaatagtatgaattagacattttgtagtgatatttccaacaacaaaaaaagatctcataattttgttaaaaaaaaaaaaactaaagacatttcgctgcatcaatagtaagatttaagttctagagcttttggaattgcagttttttgtttagtttaaagttttgagattatgagttaatgttttaaattttgaaacttactaaatgttaaatgtcatttcagtttttgtacacagacaacaatattttttgtattttcacatgctcaactttttttttctctcacatgctaaagtttcaaaaataaccacacatccatacgaatttccatcacgccaaaaatcattacgtttgtttttgtccaaagtgnttgggtgtcttattt

SEQ ID NO: 41663 - DNA, 506 bp, Arabidopsis thaliana columbia
ctctatccccctattcttactgatcattgttattggttctttgagaaccccagtactagtatgtggtatgccacaaagtagataatcgctggtacataatatcccaaagctgagaagatcagaagctctcaaagaattgaatcagggttgcattttattaaagcgagacaaaattttggaaggtattcatactagtaaatccgtgtgttaaaacagttaccttgttcaaatttcaggtattatcagtcataccatttttctggacaccgtttcttggtgtttcacttgtgttcatgcttctttatctctggagccgagaatttccaaatgccaacatcagcctatacggtcttgtcactcttaaggtattgaaagtgtttcttttgtaatcaaatccactccttggtatatataatgttaatggtgaaagttggaattactccacaggctttctacctcccatgggcaatgctagcacttgatgttatcttcggttctccgatcat

SEQ ID NO: 41664 - DNA, 478 bp, Arabidopsis thaliana columbia
tttttatcagcaccaaacctaaccaagtgaatactaaaacaatctggaggtactaactcttactatactctaaattcaccaaatcaagatccaaagctcaagagctttgaggtgtgagacttaacgcaacacttttacaacatgacatcaatgagtttgaagcaaaagctttgacatggcaatatcctctcattttactcatcagcttcatcttcttcttctacccgaatctgcttcccgaatttcctcaatgccagagaatatacttctttctttctcattgatgttctttctgcaaccgttttcaccgcctgataaagtttgatgttaaatccggaatcattaagtcattaagtcacatatcgatcaatatctatgaactgaacagtctaagttcaattctatatctgtaacgtatggtaattgaagcttagtttccaagaagagtaagttctcaaatcaaaatgcgttacgtgga

SEQ ID NO: 41665 - DNA, 463 bp, Arabidopsis thaliana columbia
acatcttcaattgcaattgctgttgtcatctgccaagtacagaaagataattcagtcaacaaatcctttttgcttgttctattagagagaaggatagcacaactgtcaccaaaatgtgtcagaccagcttcattacaaagataagccaaaatcatgagctttcaaaagtgaagcccatacataaaacattgtgtcctaatgcagacaaaaggaatgtcagattatggtctccccaggacgcagccagacaaagacttctctagttacgtttttcatgaatcatcttttcaaaaaaggatgaaacagacaacaaatatcacatgtaacaccataacattcttacaaaatcaacagctaagtaatcaaaacgtaacctaactgtgattacaagcttcgaacaaacaaatgtttgcagaagaaaagctcataaacattagtacatgaaactcattctttgatgact

SEQ ID NO: 41666 - DNA, 542 bp, Arabidopsis thaliana columbia
caaaaaaaaatttcttcttttctttttaatacatacaatcgaatgtttgatatttagtaattgaaataaatatgaaaacataatagaaaagtaatttgccttgactttctatcgagaaagtttgaaacgaatttgaagtcgtaaagagaatatgtgttcagcgagatctttattaccaaattttcgagtttttcataaattactgacaaggaaaacgaatttgattttaccggaaaagctttgagattaatgccttccttggttgtctttgactcgtggaaacacgtacagtttcgctctatagtggtaacatggtccggtagctcgaagctggtatctttgggtactttgttattaccactaaaccctaatattttcaacattatttcgtttgtcttatgattgtaacttcgttctctctacctgaatatatatatagtgttccttttgatgtcgttaacgtaagcaaactcatgtaggattagaaggtttataatttcaagattcatttgggattagagaaagatacattactagaaaaa

SEQ ID NO: 41667 - DNA, 605 bp, Arabidopsis thaliana columbia
cggccgccagtgtgctctaaaggcagcatttggaggacagtacttgggtacaattgcggctggctcgatcaaccaacagcctgcatacggcagtcaaatcaataatctattcatgactgccagcgggaaagctgattcgctacatggcagcctaaatatccggccaagccaggccagagtgactcactactgccagcgtatcgagtcatctactaccgtttacccaattaggacgctggccttaaagctggagagttgactgacaagatctggagatgcagcgactgcagtccgacttgccgcgcaatggcaaacggccatgtgaggggcagtcgctggaccgtgctctacatgctgatcctattgtaattctgatatcagtggggggtttctgatgtatcgtcctgccgagaatactttacagcgtattctggcctggcagttttgcagtttttgaatgagcttggaacgaagcatcttaccacggtgtccgctgtttagaatcttcagcgggggttgtatactacgtggcggcaacaacccgaaaaaggcaagaaatcaccaggctgaggaaacaaatttttgagctggtagtattgtattgg

SEQ ID NO: 41668 - DNA, 635 bp, Arabidopsis thaliana columbia
attaacagcggaaaaactatctggcacagcagaagctcccataatcttggatttcaagcttgatttgtggcttggtttaagaacattcacctgattagccacaacagaatcaataaccaagttttaaaccaaatcaggaaaaaatgtatttagctgtacttcattgttgtaatgtccgttgtatccaccaaaagcaaccactatgtcttctccattgtatgagctcacaactaaactcaatccctgtcatcaaacgaaaagttgcagaggaaatcacaagactgatttattcaatgtcttggaaaattcaagtttcatgtgtcaggcaatatgagttggagactcgtatgccaaacatacgatgaggatgcatgtcagatacctcactagcgagaggtacatgttcttggactgatgtgacaactgaccatgcgagagttgacatatatcatgcgacagtcttagatgccgctgcggtaaagtatcagcgagtatctctctgaatcacactgtacagacaattcttcgcggcaactatcaagtttttccccaggactagtgccagtgatgtgacatatagagcaagacgtgcaggaatcgcactgcagggatagagacagaggcttttgaaggag

SEQ ID NO: 41669 - DNA, 2166 bp, Arabidopsis thaliana columbia
agcatctagaacaagaaataatgttgctgcaacgagaataaatcttcccgtgcctccccaaggacccagtcaggtaccaaacatacttctcagaagatctgtataactaaagagccatacctttagttactcatcagtattaaggatccgtattccttgatcttatttaataatcttaggatatcagctatgagatcattatttttgtcaatgcatatgctgtagctgtcagatcattattttactcactgtgtttttagagcctcataatctgtcaacgtgtctttcttacagtatccaaaccctggtttttctgatacatgatgctaaaaatgacaggttataaagccacagcagaaaatggagtctgcagctactccagtagagagggagaaacaagcagtaaatgttgcaccagcatcagatcctccaaaggtggattttgctactgatctgtttaacatgctatcaatggatgattcgactacaaatacctcagaggcaactcctggcgatactcctgccgatgataactcatgggctggctttcagtgtatgtatctatctagcatgtgataatctaacatcgtggcacatttttcctatccttgttaactttatgtcaattgttcttcttttgaaaatgctttggagtaatagattaatttctgaatcctaaaactgtagctgctggaagtggtcaaacggcagagaaaattgtcacagccaagcctgctgagagcagttctcctccagcttcatcttctgactttgaggatttgtttaaggacacacctaatttaacaactcaacaagcaccaaaagatgtgaaaggcgatatcatgagcctgtttgagaaggtaaattattagttaattatatacgcttctcagatttcactgctttgttgatattcagctttccaagtttcgtttttgtatcattatttacttacatttacaaatatagcgaatgatatgatttgtgttttgttatcacttactatgatttcttcaacacgggacatctggaacaccagagcagattcaagtgatataactctgtgtgttctatctgattacagacgaatatagtatcgccttttgccatgcatcagcaacaggttgctatgctcgctcagcagcaagccctttacatggctgcagcgaaagctgctggaggcactccaaacggcgtgaatcaacaagctattgctaatgctcttaacgtagcttctgcaaattggtcaaacaccggcggctaccagatccccggaatgactaaccccgtaggtggtcaagctgatctccagaaacttatgcaagtaagatctcccctttactttttttaagcaagatcaatattaccattgaccaaagttcttgcaaaattctcactaattcttgctctctgttacatcgccataattttagaacatgaatatgaacgcaaacatgaacacgagacccgcacaaccgcaagagaacactctacaatacccatcatccaggtatgcacacaaaactgcatcttgtttgtttcttctgaaaacatcataacgttatcaaaagtgcttaacctaactaactctcatatgatctttggttgttattaataatgcagtttctacacaatgggtcaagctaatcaagtgaacggtatgaccccaaactcaaccggtaaacctcagtcatcatccgcaacccaaccaacaagcaccacaccatcttcacaatcaggcaaagactttgatttctcttccttgatggatggaatgttcaccagacattgatcaagtgagagagacttttactgaatttgcctttacatctttgttctaaatttgaagaaccaaaagaatatatatacaatcatctctggacagtttttctctgttaaacatatattgtcttttctttggaactgtgttgtagccgagctttgatttatgattttactcgattgtcgaaaaattaatagatgtaattcttgctaagaaaggaaaaaaaaaaaagatttatcggtgagaccgccacaaaacgtggattgttctcttccacttactgcttttatttgctttggtacgaagtttgtgacataccaattttttggaactaagcaaaacaaagaaacggttccgaaaagcctttgaaagaaaacaaattg

SEQ ID NO: 41670 - DNA, 223 bp, Arabidopsis thaliana columbia
gtcggactagagtcaagctcaacagggtcctccggacccgctcatcgtgaggtgtggagttcaatggggagtgagtcgagattaccccgtgtcgggattcgacgatgcccactgtgagctctcacacgatgtagctctatgctcccgtcgccctaactgctcaacctagccacaggcaatcgggctatcatgctggcaccacggataccactctcaggatgag

SEQ ID NO: 41671 - DNA, 484 bp, Arabidopsis thaliana columbia
tgacaaacaataagcaaatacctaaaaggacttttattgacttctataaagatgttttgattgaaatttcatataatttaatagtttcctgaaactatatgcaataaaattataatttgataattacatgtgttagaaaacatgactctcaaattaatatgagtcgattatcaataaatttttgtgatatggctgtgctgcagaacaactgaatgggcctagaagtaaagttgatattgagcaaacaaaaaacgaaatagattttttttttcttttgggcaaactcaaaaaacgaaatagatatgcctcgacaatactacaaaatctcaaatgaacaatattgatgaaaatgcgtttgtaacacagaaatcaattattttgacttattttccatatatagtacagacgtaaaacacatactgtattatctttcatggaagtaaaataattttccaagaaatagaacacatgtaaaacaggtggt

SEQ ID NO: 41672 - DNA, 471 bp, Arabidopsis thaliana columbia
gcttttaagcaaagatggaaacttttcttattggaacatacatggtaagtaatcaggtagtgaccaaagattatacaaagtaatacataaaagtgaaactcattttggttttaaatgttgttttgcaggtggatgagaagaaaaagctgacatggcaaagtggtgaatctagagtgaccaatgagaatgtgacaaataagcctttagtgaagagattaggatgctcatgagccacaagttataatgttatatattagcttatatcaacatcacttccagttaccaagaaataaatctttttttttttgtgaattgtggagtaatgttgataagttgagtttttcagttgttcactgaaacaatattgccaaaattgtaatttaattttttgggaaattattagatcatgaaatgaatatttactccctttgttttggttttttacttatatcaacaaatattatatatata

SEQ ID NO: 41673 - DNA, 544 bp, Arabidopsis thaliana columbia
cccaaaaccaatcaatttctacagcgaaatcaaattacctacccctcaatcagaatctacagtaagaagaatgacaactatacccttcaaaatcatcacgttgtatacccctctttgattctcatcatatctatatggcacgaaaaacgactgacaagctcgatccactgttatggtcaatctgattctcttctccatcatctgctcttcttcatcttcatttcagttttctgaatttgttttcctttcccattgccttggcttgtcattatttttttggtctcatatgattcttgcccttctttgatcatgattacgttatgtgtatactacgttacacttgtacaagctttgattaaacattaaaaccataatctgaacaaaagaaacaacattacggcaagatttgttaaggatacaaaaatatgtgagctcttttgcctttaagagacccaccaagttggaatagctatgaaaagttgaatgcaagttgattttcttgttgcatagtttgggtcacaagatccttatgtcgatatcatgg

SEQ ID NO: 41674 - DNA, 553 bp, Arabidopsis thaliana columbia
taaggaaatgctgtaatgatgcattccatgatcattctatagtaccttcgtgtagaaaaaaagatgtacactaggataaatatttattaatttaattttgttacttcttacattttaaagaatttcttgctttctttgtaattcttttaagagttcgtattttatcgataaattgatgctatgacactaaagcaatagaacattttatccataacaggtttttgggtctgcagttgattttctatttatgtttcataagtcaccgttgagtaaattttggacgcgcttcaagaaaaaataaaaataaaaatagaaatagaaataattcatatatacaaatatatgataaatatgtgcaaaaatgtcattgttgataccacgtcctttgctcctagaaattcgatatcaaccatgtgtcccaatgattaattggaaatgttaagctctttttatctatcatgaaaaaaaaatacacaaacccccttatcatataaatcgcacatgtattgtttttttcttttttgataaaacgtacgcacatgtacttaattgt

SEQ ID NO: 41675 - DNA, 534 bp, Arabidopsis thaliana columbia
  unsure (1)..(534): unsure at all n locations
tcagacaatggagaaattgccggagaccgaacagtttcactgcacaccaacaagaagttttccaggtcaggaacttttccatcattaaagtcagaattacaaattcccttaaactgtgttaacatcacctccccatcttctgatacagatcgccaagcgcacggtagagtgcagcagcggcaggtggccttggcaaagagccaaggaggatgtcagacgcagctagggactggctcccatagaaccgtgagttctcacttgtacgtgttgtgaaaatgcttccttcaagcgagcatccgacaaatgcacctgttcatataatagtgattacgtaaggattttgcaaccccaaaaaaggagaatatacagactgattatgaggcttagttccaaaaacgattttttaataggaatattataatggttgtagatttagagtggcccatgaaatctcgttttagacatcgaagggaagaagtgtaagaaaccttaaccanaaaacctactgaaaactattttggctagacacacatg

SEQ ID NO: 41676 - DNA, 526 bp, Arabidopsis thaliana columbia
gtccattcccacttacacgtattatttatgaaacgttttgtttgttttgtgacgcatgggctctttaccccacttgggctcaagaatcgtatacactagaaaacaaccttaacctcacggtggatccgttacgttacgtgttcgcaatttccacgtagtcgacatataaattgagtaattctaaaactatccattttccgaaatttgttggtaaatcaagcattagttgatagagacagagaatcttaagttatatccactccgttggacaaaaaaaaattaaaaataactcaaggagataagatagagaagaaaataactgttaaatacattgattaaaactaaactaatatatttttaaatattatggattagggaagatgggtctattattatttgggtgattaatgtattattaactaattatgaactttaactaaaaacgtcaattattttcacgtggcatgaagttgaagaccgaccaattattcaacacactcttctcttacatctctatcttcttaag

SEQ ID NO: 41677 - DNA, 278 bp, Arabidopsis thaliana columbia
ttagtacattcaggaatcaggaggtgattggagtcccaaaacatgatatccatgatcaatataccgaaagagtgaagcaagatgcaagttcagaaaccaattctatgagaaagatctacatcgactccaagcttaaagacgactctacttcgtcagcagcgagacctacttacttagacatagatcttgagtggcttggatattggtgcgactaaggtcaacaccaggtacaatcgtgtgtacggctatgtaaagtttacgatattacagctacattg

SEQ ID NO: 41678 - DNA, 2024 bp, Arabidopsis thaliana
ccaagtttaaaacgtgggccgaatccattcggcaaagccgacttggtgaccaagttttgtcctgagcaatgcacgccaactttagccaacttggtgagcaagttttgtcccaaagccaacttggtgaccaagttttgtcccactcctcatatccgaaccttgagcctataaatagaaccttacccccccccccttagttacaccttagaactttcgcaccaaaactctgcccaaaccgagagggagagagagaaatcatccgaacccttaacccgagagagagagagagatcgtccgaaccttaaaacccgagagagagagagagagtctgagaaagagatcgtcgagccttaggatagtccgaaagagagatcccgagtagaaaccatcggtcgagttaggaagattcatcggtgattgtgagttccggtttttgttttgcatgtttgattttccttcttgcatgttctcgattctcccttctcttagttttgttgttgttatggttgagtttgttgaggttgttaaccgaatagctaggattgttaaaaccgaagcaccttcccctataggagtggttgtgatagaatagcaccattcgcttgagagggatggttgcgttgtcaagacactactcgctagtattcgggagacttttagagaaaactttatgaacatgtgtgttgaaaacgaaccgcatgtttcatagtcttgattggaaaattgtagtgtgtggagcttggagagtatccaagttaactccataagcatgctacggttaagtgggatgtatgttaccttgccttgtgattccgttctttcctggtgtgtgcttgacgagatgcaagtgacctcaacgggttcgaaggacccggagagactgggttagctacccaagggccggtgtcgcttacacgacggtgtagccaaggtgatgttccggttatatgcctttgaggttataactcgggtgttcacgatgtgttgaggaagacagtgcattcgggacctaattaaaactttaagaaacgttattttcttgttgtgttgtgtgttgcttgctaccttctctgtgtactctgattatttatgttatgcatgtgggattatgggtggggactagactaatgtttccttggggaacccgagctcattgagtaatgctagattactcatgactctacttgttttgtaggtaaccttagaggggattagagggtgtggtgaacactagggaacccgcaatagtttttcagtgtccttttgtaaaacttaaagtatgtattttcgtatcatgtacttttgggcctcatgccttggccataaaaacgatgtttatgttgtgatttttccttgtattttcgtaactctatgatattgaaatcggtatttattttaaattatacgggtttcaaactgataagactttgtttgagtagacacaacatttgggtgaagtgagggttggcaagcctaagtggatctcaaatggggaaatgagtaaccttgagtgggctaaggattggaatgtgtttctgaacctcggctactctatgggaattcatttccattgtggcgtctccgagcagtgccggactggccgagttctagtttggaccgggggcgttacaaagagtggtatcagagcatggttttgatgcttttgggatccggtttttcaaatgttttatcgagtaaatagtcgcaaaaggcacttaggataatccgggtcgttcaccactattaggatagaggggggaaatattagaaacctaagatcgttgttggattggatgcagatatcaaggcaggggtcggacgagaaccagtagagagatgtgatgtctagtcgtggaaactttgcgtagtatccggagtcggataattggataccgagtgagagtggtgagataaacagagattatattcacttggagccgtatggattacctgaatgggaaaccccgattcacgcccaaacactcgccgcccggatcgatgttcttcgaaacatcaaatgagag

SEQ ID NO: 41679 - DNA, 413 bp, Arabidopsis thaliana columbia
tgatgatggataattcaaaatgttaacatattcaaacacacataagggggattctaaaataacgagaagagcgaatagaaaaccgactccattaccaacagcgccagactgtctcttctgacgcccatgaccctctgctcttggaaacgcatcactgctccttagagcctgcttcacacccatcctagcagcttccctcaaagggcctaccatattacaaaccaacatcagataatacaatatagccaaaacatgcaattctcttcttcttacaatatatttctcgattcaaacaaagcagagcgcttcaatggcgattatatctaaagggtctagctcaaaaacaatacgtaacgaaagaagcacattcgtcagaacgatttcatctagaaaatcagacttttcaagtatga

SEQ ID NO: 41680 - DNA, 451 bp, Arabidopsis thaliana columbia
agtagaatggctaagttctagcagtaattaagatcataaaggttacattcaaatgatactctcaggtactaaaacgtcaacatcataaaaatactaaagctagattaataatgcactacaacgatgctatgaagaagaagagctggtaaataaaatacggaaatgtgttaaataatgatataaaaatgtggtaaatgaccattaaatatcgagtggatggaagaatgatgatatgagagatgagtattagaggcgattacaaagaaggcatgtgggaagggtgttgacaactgtcagaaatgccatgcgcagatgggggcaaacagccttcactccttgtgggtctctcttaattatctcttttcctcttcccttcctctcaattctcatcatttctaaccccaacacaagtaagtaagtcatactctatgatctgtttatttgcattttt

SEQ ID NO: 41681 - DNA, 545 bp, Arabidopsis thaliana columbia
ctcgtgtgatatgttgtaagtatttttctcaactatccaagtcaatctctgtaccctaatatagaagttaattatagatgacgttatatacattttccacataataaaatcgtaatttcgagtttgtttctttagattacttgaagacaatattatgcattaactagagacccagcgtaattgacctcatatccttcattatgtcaactctattgttcatatatatgataattcaaaagtttataatactatttaattacaattagctattgaatcagtttataatttataggttacaataaaactagacggcgtgatggatgggatcatgaagaataattccaccacttgactttgaattccaaatgagaatcaatcttgtatatatctcaccatcatcaaagcgcgtactgacatttttgcccaatatagttagtatataagctacacaacttggtaaaatagtcaaaccaaaacacatcactacttcaccctaaagaagactcattatcaaaagtcgtcttactatttttactataaatata

SEQ ID NO: 41682 - DNA, 437 bp, Arabidopsis thaliana columbia
ttaacagtagtagcaacaacaacagtggttcatcaaccgatctattcatttgtttcacatctcgtttctcttcttcttcctctatgcgtctctcttctaaatccatccatagcccagctcgttccgcttgtctcaccacttctcttagccgtcgtctccgtactagcggtagttagaagaacgcttcagctggagtattgaactctcacatgtgtggtgctaatggaggacggcagagatctggatctggctacgagaatagtaacaacagctacaataatagcatagagccgtcgtctccgaaggtgactgtgtataggtcaagttagagtgaagactaggaagcatgtgaagaagaagatgagagctagatctagaaggcaagtaggtgagactagtttcaggagatccgttgatcagaacgacggtggtagtgg

SEQ ID NO: 41683 - DNA, 584 bp, Arabidopsis thaliana columbia
taatagatagttttatatgttttcaactataatagttttacttatttacatctataatgtgttatgctataaatgtctaaaccgtccacttagctcttaaacactcttgagcattggtaataagtgaaaaatctttacgttggaaattttaagtcgttgagtttaattgtataaaatctgtattttaatttccaacgtaaagccgacaacacagttcatttggaaaagtaagtgtaaattgatgataatataagttactttttgtcttcttcaaaatatgtttcagctataaattattctgatttccgagttttgttttgaaaagtttcataataactaccaaaaaattgtgtaatctaattgtgatgatttctgacaagctagaatgcttttgaatttactaccacaaaatcagcataagaataaaccgaaatatagtagtgaattaacatcatagggatgaatttggtagacagatgaattaatggaaagggtttaaattgttgctcggatgctattctgaagaagaagaggatggttttgcttcacaacaggtttgccttctctctaagtttagcaatgga

SEQ ID NO: 41684 - DNA, 610 bp, Arabidopsis thaliana columbia
tgagttttggttgtgattgatgaattaggttaatcatctatccatgaatacacatatccatactttgtttcatacttgaaatcttttgtttttagtttgaaaatgttcatcaaactaaataaagcaaaaggttgtaatttcttcatattacctctcgcttttttttttataatttccaagaaactcatcaaggtataatttacatattttcccaaaatagtaaacaaaatgtatgtatatatattgagttttgagaacgatgacaaaatgtgagctaccattgaatgaaatatgtgatgtgttgttcaactcatcaaatttgtactttttgaagttttattttctaatatgtctttatttaaagtatttatttttgctttgaattttgtttttaatttatgcatttattttgttgatatgtagtttgtttataggtgcatttattttgtttttgttgttgttgttgttttctatgtttgatcaattgtagtgattgatttgattttttaatacatatttgaactttttataattaacatattttaataaactaaacaaaaggaatcttaagatattatattaatcgaatgaatatgaattaagaaatata

SEQ ID NO: 41685 - DNA, 574 bp, Arabidopsis thaliana columbia
ataattattgggtatttttttaccaaaccaaaaagtaatattgtttttttttttgttaagaaccaaaaagtaattgttaatatgtaataaaggttgaagagagtattccaacgatcatggattatccggaaccaggtccagacccgaaacacgatccaacaaaacccggttatggttttcctcccccaccgccaccgccactgtcaccgccaccgccaccgaagatgaactaagaatcatgatgaagcaaaaatatgtaatatcgttaaatcatgctcgtgagaagaactagtattcatgtgaagcaaaagaaaaacttaaatatgatgattctatgatatgtactatcaaagtaatcaatcaaatataaaagagtaaatttggaaaaattggtcaattgtttgatctttgattttattcctatttatgaatattaaacttttgatttaacaaatttaatctacatgtaaaattaatgatgatgcaatgcttaccgatattttcacttttcaataatcgtctagtgattgttgttcctttaatttaaggaattgaatagcaaagattgatttaa

SEQ ID NO: 41686 - DNA, 632 bp, Arabidopsis thaliana columbia
ctttctttattagagaagaaatatcaaaagtcatttgtattgggaaatgaaaacactttaattacgaaaccagaacgtcatcaatactatcgtaatgctatcttttcgtcttctttctagtttacgatgactcataattacttcttctatgagattttcccatttctacaccttccacgactgagactgaagatactatttactagggaaacttatattcatcaacactctaatgcttcaacatgttttttaaacctgaaagtaaaaaagcctcaccattgcctaacaaaaagaccagttttataagtttcacaattctaagagcatgatatggggtgatacttatatagtatcatgagtaattttttagtattatttataatatttgatttttatttgagattttttatgatactcctactaaatatgattatattggtgagaccggttaagtataaaaaaattttttttgcaaattcaaaaattaatatattataacataagattactaaagattttttttttctctgatttgagcgaaaatattgccaaccgtatgctgcaacgcacatgatactgagtacaaagatatcagccactgatcaaatcagcccaaattttataattgatat

SEQ ID NO: 41687 - DNA, 492 bp, Arabidopsis thaliana columbia
  unsure (1)..(492): unsure at all n locations
ggaaaaaactttataaaatcgatctcgaaatcatacagcatttaagtcaacgtcagttttacactagttaattaaaatataagattatgagatcaaaaatagtggaaagaagaagaataagattagaaaataagaaaatggatggagagcgtaaaagaaagtgccgttattaagagggagtgttatgatggggccacaccacttattaatggaatctacatttttcactgattttgctaaatggattttataagtttaattttggaagaagaaaaaaagaagaaattaatgaatatttaaatcagtaacagagctctctttcacggccaaattcaccaattaccactttgtcaagattccgacatctccaccatcctcttgctttctttcttaccactataaatagagagagctctaagatgaagaaaatagtcatcatttgtctctgaaactanacaaaacacacaagaaaatacagatactacaaagtat

SEQ ID NO: 41688 - DNA, 515 bp, Arabidopsis thaliana columbia
tgttccagctgctcctgcatttttggggcacccgatacttgcgccacctgcagttaagacaatggaaatacatagttagtaaggatgaactgatgaaatattcaacacagcataaaatggagaagtaattccacaggaaacaagaaacaggacatcaagttttccattatagggaaacaataattcagaagtgttttaaaactacttgaaagcacaactactgagatttatgtggatgataaaaacagcttgtagaagacctaggtcacttgcatgagcgctgataggaagcaaaaaaaaaatacaaaccatgaacaaaaactttgacatcttcttgtatgctgtaacagtcaagagagatccttcctccgccacctccagcccatcccctcccacccgatgcagatattttaccgtaacccttcctacatattcaaatgataggtgagacagattgaagcgaaacaaaactaacaagttaacatgtaaaacattgatttacacattccacgaca

SEQ ID NO: 41689 - DNA, 581 bp, Arabidopsis thaliana columbia
tgtgttaatgaaaatatacaaaattacggttttgattatcaaagtacaagattatgaaagtgatagaaatatatactttatgtgatacatagaaggttaaattattagaggggaaattcgtgtggctggaaaactcagaatgatatactttattctatttttgtccttaggttgtaaatagcaaatttgtcgaatgtcatcatgatcagtaaaataacaaaatcgtagaattacataatttttcgactattccatgaaattatcaatcagaccctacttttttttgtaattaatgacaacgtactaatgtgaaaccaactatcatatctatgacatgttaccattcatacacataataatgtagctatttaatgtccagaacttttcttgaaagcaacttgcaataagttaaaaaagaagttataattaatggaaaatgtattgatgatgttgggtttttgtttttcatttttttttgtcgaagttttttattttatgtttgatgatgttgggtaagacacattaatcaagttttttttaggacaataactgtgatgaataaagttttgggccaataacga

SEQ ID NO: 41690 - DNA, 649 bp, Arabidopsis thaliana columbia
ttttttagttagtgaaaaaccatactagagactactgatggagatgttcttatcttttctgtctatttttgactttcatgattcgcttttagtttcttttcttcggcttcgcttttgggttttctattttagcttttttctttttgcttataagaaaaaaaaaaaaactaattatgtacttattgtagtttaattatagtaatattcttttgattttttttcttttttttcctactaaacagttaaagattcacgtactacttatcaaattcagttcagacagtcggacaatatcaataggtgcacctaaatttcattccaagttttaccctaccacaaaaaaaaaaaatcattccaagatacaggcctaaatacgtgtacagaatgttaaatcaccaggcccaattatggcccatattcaaatatcaatagcacctaaatttctagtttctacgtcccttcttcattttttccttgggtcaactaaaattcaaaagtcctattttctaaaataagctaatatagaagcaaaacaaaggaattgggttattttaagtccagatttttcagacaagtcaccggtgagcggtggctgcgtatcagaaaccttgccgtgagcattgctaaataataaccatagataggggaa

SEQ ID NO: 41691 - DNA, 619 bp, Arabidopsis thaliana columbia
taatggtatacactataccaattaaaaagcgcacttagatttatttcaatttgatttattattactcaaagtctaaaaccagttatcagcagaaacaaattctggtagctaccaataaacaaagaagaaaagaagcgatgattacgatgaaataataatgagaaagcaacggaagaaccgacgttgagagatgggaccattgtaagtaggatccaatggacttggtgttaactgatacttcatgccaccgcctgttttttttaataatcttttgacccttctcatttgttgtcactattgattatttgattttttgaatatctagagaattctcatgccaaacattacataatctaagtgatttgtgtttatgctatatagatcattattatttgaatccaaattcacataatactgtagtataaattaacaaaaataaagtagtataaaacagtatttcataaaatatattacatgatctctttatttcactaaattgttttcttttactgttctatcattctgttaatctaatattttctcgattagaccaatcaaaaaattattgaataatgcaacatttactctgaaattttaaacaggtgttgacaagtttttt

SEQ ID NO: 41692 - DNA, 491 bp, Arabidopsis thaliana columbia
cattagtggaaagacagaaaattaactacagcataagaatattacattataagttaaaaagttgtaatatcatattaaaactctcccaaaaatgttacattacacatttttttttgcattcttctatggtcagtgtcagtgatgcctcgggtcaggaccaccgggactaagccgctttgagtcaagagtatttccaaggatcgtctcttcgccttctgatctccccttcatctcttttaacctctcaaaaagttcacgtcttatctttttcaaacgacttgaaccagaaaatctctcttcggcaaccaatggtcgacattcgtgcaccgatgtcaattcgagtactagaagcaggaccaaacaaacccataacttgagacttgccatatatatgtaacttcctcttagttcttaaaggtgagatatatagtctttgaagattttaagggggtgatcccatatataagctcaatagctacggtatttataga

SEQ ID NO: 41693 - DNA, 475 bp, Arabidopsis thaliana columbia
actttagaagattgaagagcccttttctattgtgtcgtcaagcttgtttgtttcttgttttgtactggtttgatcttgtctctctgtagtatcaatcaatcaataatccagaatctccaaatatagtttcttcagtacaacacaatgtttcttgaattcagggtctgaaaaaattaggagagttccttgtgtaccttctcttaaatctgcagttttatcagatgtcctttactcgtaccatctccgagtctctgcacttgtagatgtagacattgtagacttctcagttaatcataatacatttcttattcctccatagcttctttatctacaagtatcacagaataagtaaaccaaacaacaataacaacaacacctgaaagacaaaccagatagacataaaatgaagaatcttgggaatctgaaaccaatgttcgattccagaacaacggaaaattgatgcaatgtcgagagc

SEQ ID NO: 41694 - DNA, 482 bp, Arabidopsis thaliana columbia
cgccagtgatggtgctaggagctggcggaagaaaaacaagaactaactccgcaacgaataatggaagttaacatttgtcggcaaatggcaacaaagaaaaaatgtcggcaaacatcaacagaaatttttaacaatcttggagcataatcaaacaaacatacgcaaaagacaatgcttatgttttacagaagtaaactacttactctctttaccatctcttctcagtaaaaagaacaaacacttaacttaagggtaatcattattcattaatcataggctactaatccctttttcccacctgggctattatccgaggatgtcgaatccgacttcgatggagaccttgccttggatggtgatcttgacactgatcttgctttcccgtcccaatgggagattttgaatatgactttgatcttgatcttgacctcgatggactcaggctgtggctagcggatggtgacttctctttctgtaaggtg

SEQ ID NO: 41695 - DNA, 519 bp, Arabidopsis thaliana columbia
tcgatttcatgaattttaactaaccaaacacaccaaattacgttctacaagctttgaataattaacaattaccattaatggcaagacattaaattatatgtaggacattttatactaacgacttagattgtgatacatggttatcatcaaagtcggccctgagtaataatggattaagccaaaaaaaagaagcctcacgcatccacaccaagcaaactaggttactcaagcttttcaacataattggccgctgaaagagatattatatcgaggagacctttcggtgactgactgacctcccacgccaatattactcggaaggtctactaaagctcaacaacatatacggaaatagttagcatccgtcttttgtctaactggaggtttaacatctcaaataacctcgatcatatatcaacaatctccattttttgagcttgcaatttccaacaatcttagaaaataaccacaagataattagtataatcttgcaaaacaaaattcatgattaagaatcat

SEQ ID NO: 41696 - DNA, 600 bp, Arabidopsis thaliana columbia
ccgtacttaaagctatatatattatatgatggaatcatatctgttcattgctcatctcaactctattctgtataattttctgggggaagttgtaactaaagttcatttgtctgtgcagatgagcttgctgggatgatgcctagttaactcactcgatgatggaggtggaactttacttacttctgaacgttgaaaacagtgacttgtcatttctcacttcttttgatcaaaccagagattatcaaagaccaacccccaagattcagtagatttgtagaagaatgttgttttgggatcaggctgggtgatactatgacacaaataacacttgttctcttacttgtctcactcatgtttcaaaaactttgtttatgtaactataattctgttatagcacgtgttgtttaggtattaatctatagattctattaccatttggtttataagaaaaacatttgtttctggatgtatgtttcagcaaaagaaatttccacttttgtttattcaccatttgcaattgcaagaaaatctaactaacaatagcaaaaatatagacaaaataagcaaaatgggaaatatgtacatacttttttgggagag

SEQ ID NO: 41697 - DNA, 624 bp, Arabidopsis thaliana columbia
ccttaaaatgttttcgaataaaaatattaactagccatataatccatgcaaatcttgatgatatatgtcttgaacaaattctattaactggctagttgtatattataacccatgcaaatcttgatacgtggcaaaacataaatttgacaaaattgatcactgagctcgacaaatcatataatttggattctaaaaccaaaggcatcttaaaaaaaaaatcaatggaggtgtgtagctacggacaaggtcctacggatagttacgtccgttttgtttgctaacgtaaaaagagcgacgcgggggaacgaagtaagtaaatgcagaatatgaataaaggaaagaatccaacatttgtaaaagttttaatgcgaacaaattagtatcatccataatactcttatcactcagattgaaagatttttttttatataaaaaaaactgtttttaatatatattcttcttctcgtggatcatatacatatgtaaagtttccaggtcacaatttggaatcccttttttgttagatagccaaaacttgaatatcacccttttacttgagatgatccaagagtacacttttatttcactacaaaacttcaagtccacatatatacattcaagagt

SEQ ID NO: 41698 - DNA, 463 bp, Arabidopsis thaliana columbia
ctatcttctgtttgttttctatctcttaattagtattttattatgacttgggaagcaagtaagtatctcatgagaaacctatctgggaggttcacagagggtcgctagaagactggtagttcctaaaggactatgtgctgattcaaacgagagaagaaagaaggtagtgaaattcaaagaatccgcttggaaatgtttgtgctctttctcggtggaagcttttgctctctacgttacttataaggagccatggtttaaagacaccagatccttctggttaggaccaggagaccaggtatggcctgaccaaaagataaagtaagaataactttaccttaatgtgttacgtgagacgcaagacactgtcaactatgcggcaaacctaataacaccggcgttttcacaggttgaaaatgaagggaatgtatatgtttgttggcgggttaaatgtatatgccttttt

SEQ ID NO: 41699 - DNA, 517 bp, Arabidopsis thaliana columbia
caacattttttttttacgttttgcctaagattgtaaagaatgaaacgacttgtattattattattttcctctttttgcggtctggttctgcacttcaaattgaattaagacatgatttatttattttctgaatttgctggcccatcccgttttccacctctaaatagtaaatagaaaccagataagtaactaatttactaattcacaaaaatatttattttccttgcatttatttattttgattattgttgaaagacctgatctcttcacgtatacgtgaaattcatggagaataaaagctagaatactaataggaatttaaccagtagtttattcaagttcaactgaatttcactgtttgtcggtgcacgtgtacggtcgaccaagtcgtcaagatacgtttcccactaatagcattaaaacagtaacactattcatatataataactttatcataataaccaaaaatgaggttttagcaaaaagcagaaaaagagaatataactgataatatata

SEQ ID NO: 41700 - DNA, 518 bp, Arabidopsis thaliana columbia
caaaatgaatgaggtttgttccaggcaataagaatactaagatatatcaccaaagaagtaaataactcaccaaacagttctagtcctttcacaatggtgatacacttgcgtttgttgcgtacaaccttttcaatgataacttcctgtcgatcctatatagcatccataaacattagaaaattagacaaccggacaaacatgtccacgtcaaagacgaaggaatggaaaccagaaagcaaaacgtagatatgtgagtcagggaatgtccaagcatgttgttttgtacgtttccatggaaacttggtaatgcattaagacattccagtaaggtgggacgaaatttacacgatattacttactttctttttaactttcccccaggtaggcgcttcacttcctccttcttggatgtcctcctatatattggaagatcctttgattactgagtagaaattcaactaaaagccaaatcctttcaacataggcatcatcaccaatcagtgactctagcaatattt

SEQ ID NO: 41701 - DNA, 538 bp, Arabidopsis thaliana columbia
tttttgacaagcgacgaagatttttctttctttcaaattgtgtttttctctatattcgattcgagattaaattctgaaatattgttctttttttttttttctcttttgtggcatgaacataattgttttcttttgttctaggaatgtcatttgtcacttttgttaatgcaattgagaaatttgaggttgcagttaggtatgcatttaaaataagattgtctagtagaaattggacttacgatttatatgatcttcataagtaaaaaaggatgctaacatattttaaaaaatctgttgttcaaaaaaaaaaaaaacatatcttaaaaaatcaataaaatctaaggatgtaagatattattacaaatagtagagatttataacttaacaaaaaatcgaggagggactaaaaaataacgctcgtaattaagccctagtacacttgatctgtgaaagaatctgattgttcaagaacttagacatgaatctataagccttttgagtcaagtgcactccgtcccaacttatgaacttgtgtgga

SEQ ID NO: 41702 - DNA, 543 bp, Arabidopsis thaliana columbia
tggaaacaaaaattttaactgtcataaacaatggattttaaccgtcaaaaattttaaccgtcataaacacagaaaaaaattatcagacaaaaacaaaaacaaaaaatctttaatcaaattatagtggattttcttaaaacgaaaaaaaaaatggaaactgatatctcaaaaagatctcttagaaataattttacccttatcttttatgtaattttaatttttaaaagataataaatggaaattaatcagattaaaagaaaaagtcaaagaaatcccattaaaatttagggaccgacaaagagtctctctactataaatatatgagtttattcagcctaaaccctaaaatcattcatcgattcaatttctttttcaagtgaccacaactacaaagagaaagaaaaaaaatcagaagccaccagatttgattgtttttgtttttggtttgtaatcatgtttacagttctacgcgtggatttcagtcacaaaatcaaagacgatcctaaaccagaagaagcgggcataattatagtcaatgcaatg

SEQ ID NO: 41703 - DNA, 531 bp, Arabidopsis thaliana columbia
aagggtattatgggaaataatgacttaagttattatcggatacggtaatgactctcatgttaacattgtaaccagccaattataaagagccaagtcatcaaataattatgtgttggtgatgatctgttttctgttggttgattgatcattatacatttatactagtagactaaagatttcaacgtcacttttttggtgataagtttgaaaaagagtaactcaaaccttattaagtttttggtttatgtgtaactgattgggattagagaaaaatagtaaaatacatatctctcgttttacttgtgatcaaaaagattttgtatgattcctaggtgaatcacatctttcgccaacccgtaaagctctggttatgattttgataaatgttccaaggtttctttcgtctttaagtttgttttctataactttgaaaatgtcagaatttggttcttttgaattatcaaaaatttcataatttatactgaaccgcattatttacaaattagtcatttctcaaaatagttcttttga

SEQ ID NO: 41704 - DNA, 479 bp, Arabidopsis thaliana columbia
ctaaagaagagcaaccacaaccaaaaagcatgtttgaaagggagagcttttgactgtgaaaacgatgtaacagctttcactgttgttttggctccaacatcgaagtacacataacgaatcccaactctccctttaatctaatctcttttacaactaaccctcttggctcattcctcttgccttccactactcattacctaaagattattttgaatttaactacctaaagattagacaagctattaacctggggcacggctatctattagattgcaaaccattccctccgtagtactgctttgtcgtttcacgtgaaaactcggcaaaagtcatcccatcccttaaccgagacgatagaggtggaacaatattctgtaaatctggtctagggacgacctcatccgaccttagatgttccattgtatattctgagactgagaaagtttggctccactttgggtgcaagaagacaacaaatg

SEQ ID NO: 41705 - DNA, 564 bp, Arabidopsis thaliana columbia
cctttaacatatataaaccaaactacatgtctacatcatgtatattagaaaactaaccgaattcttattggtaaatgctaactagtggatagttcactagttaaggacttgagccaagaactcattgcgacgtgagtggtccataatttttctcatttactgttagaaagaaagaaaaaaaggattttgtcacaaggatgcgagagaagcctgcggaagaggatcaggaaatggacggtcaggatttttccgtggatgagcttgctggaacaaccgtcccgacctaccggaatcctccgtttagaccggaattacacacgtttgttctaatccaatattctttgatattgaactacttccctagtgatatacatgtacattctagaataaaaacaaagctttacacagtttctctaaaaatggaatagcgatcaaactaaaccatcgaagaattgatttgatgaccaaaacctttagtaactgcctctagaaatttcaaatggcatatagttttaatccatctctaatgttgtcacatactttcaaataggtttagaaatgtgt

SEQ ID NO: 41706 - DNA, 709 bp, Arabidopsis thaliana columbia
tatgtacaaaaccaaagttcctctgtaactttctatgtacaggcacagaaatgaaaactaagaaacccatgttgggttttgtatatcttaaagatgaccagatgcttctgcaacacaaaactttagaaacatggttacggattccatgaccttggatacaacttgcctagtgggtcatggagaccagagttctggcggctctggttcatccacactacatcatctggcatcaaagatgttgtagggttgctaccgctcaagtaatcaagcgggttcgcaggctgaaccaaattgctgcttacttgagttgaacctccccccatcagcattccgtagttaccagacgcaaccatttgatgacttgaactttctggctcgaaagcagatctggatgggcgcagttgactgcattgagagagaacagagaataagctttgatctgaactacttcccctatgaattatttgctctgcgttattagcaactctgagaaggctcggatctctctcggtcccggtttgactgccttggcttgtacatccgacaccgtttgtgtttgcccacatgctcctaaattgccaattctgatttaacaaaggcccggtgctcaacaggggctgtgcggtaactcctatctgagtacaattggggttccagtctggccgctgcatcaagaatccacggtaaatgttgtctgacatgcttcctg

SEQ ID NO: 41707 - DNA, 575 bp, Arabidopsis thaliana columbia
ataattatgacgcaataaaataacagtttataaagctttttaactttttttcaatctattcatagatatgccataaattttcaatagacaaatgtcaacatgcagtaaactgaaaagaagaatccatctctctaattagtaatgtacatacaaatatcaattctattagcaaatattataaaatctaaaatctacattttcatttctccaaatggtgattagtgattagtgtattaaaagtaaaaagagatctcaatgtaaaattaaaatattgatatatatcgtcggtgacattaataaccattgatagatatttacgaggacagagtctggttaggcaccgcttcctttgtaccaaaaaaggcaaatatctaaacattgaaacttaaagctgtatccaacaccataaaatcaaaatacaatttataaaccatttgttaaaattaaatttcataagcagagaattaaatatttttagctaaaataagcgttttgctctaaacacaaacaattataccttgttagagatattaagaaaaacaaataaataaatactgattccatagcatttgttg

SEQ ID NO: 41708 - DNA, 454 bp, Arabidopsis thaliana columbia
gtgctctaaagtctgtcatagcttgcatagacacatacccttaccaatatcttttgtctcgtcttgagtcgcttgtttgtttggctgggtgccggtttagcttatagactctacctctttcttctctgtgtttctataaattgtataattgcataatgttaatctaataaaccaatccacgggtgtcagacaaaccggctttataaccaatgcggtctggatagtcatgtattcctctgctatggatcaggtgcttgatgcccataaacaagcatacgaatctgtaatcacattcgatgttaagcacagctggctgccccgttattagatacatcgaaataacactattatcttacacaatgtatttttaagtccttattgatccataatatagaaagaccaacgaagaatggttctgtcagtgggccgtggttcagtcaggagagcacggaca

SEQ ID NO: 41709 - DNA, 300 bp, Arabidopsis thaliana columbia
tttaggttgaaggaatctggaattagggttacttggttgtgagaaacttggatataatgaagaaagtttgatacttaaaagtaatttcacatttaaagattgaaactttgagtaattttcttcttaaagtttgaaactttggttagtttgccccactttgtttcttctgtgtgaagatcataatctgattttgacttgtgtgtggcgaattggtctggtaatgagcatgaggacatattaaatcggcagtgacttttggtttgttcttggcgatgaagctatcttttagcagagcctctg

SEQ ID NO: 41710 - DNA, 266 bp, Arabidopsis thaliana columbia
aaaaagtagctagaaaactgacccaaaaaaagctataaatcgaaatcgttgacggtatataagagagacaatcctagcctttttgttgaaccagaatagaattgggcccatagaaccccaaggttggattgatgaataaaaacctaataggttttgatgaataccatagacagtaaaattgacgaacacaatgtgaagtccctggagagaaggattcgtggaaaaatcaagcaaggaccaactgattaagttcttaagaggctaga

SEQ ID NO: 41711 - DNA, 374 bp, Arabidopsis thaliana columbia
gaagactcttgagtttctgaaattctggtaatcttgtaaaccttgaaatgattttggtcaatttcttcactatgtcatgtgtttatgtgtacaaatgagcaagactttaatgttggtttgatcagtaaatgaattgctgatgatgattgtttagtattcataaagtctagaacaagcaagagttatcttcattatgatactaaaggtattattattactagtccgaagaaaggttctctttggttgaatgcccattttgtgcaacttcttaaagagtattatagatcaactgtttagttcaaagaagtctaaaaaaaatcactatgaaaattgaagatgaagaaagattttcactttctcaacagagtagtata

SEQ ID NO: 41712 - DNA, 622 bp, Arabidopsis thaliana columbia
ggtacaatgtgtacacacggcccatatataccaatattcaactatacatacatggttgataaagaaaggattcaacttttgagaatcaaatgtacgttttccaaatcttgaatgagttgttcactaggataaacttgaatagtctataatttcacatatacatagcttagaaagtctgatgcattttcaaattaaggttttgaataaatctgtttttagtttactttaatgttagagatttaatgaatcatctattcaagaattgattttacatgctagaaactagaaaacacatcttcctttatattatttcaaaactaaaatcaacttgcattcgaagagctaaaatgatttaaaagaaatcattccaaaacacatctacttccactgaaacctaagatctaatcacaaaccggtcccttaattccgaacccaatatcaagaaaaaaatttagctgatcattcacagaaatcaaaagcctaattgtatctccaattagggtttttgatacatagtataatatatattatatcaatcaaaatctatatgttatatataaatgatgcagatatgcttgctttatatgtaaattatgcagagtcacatattggaaacatatat

SEQ ID NO: 41713 - DNA, 309 bp, Arabidopsis thaliana columbia
tggcagtctctctatccattatgacaaaaaatgtatccatatattatataccacccccctcctcacataaatcccttcactttcgatttacttaacacattcatgattctagatagccgattataaattcctctctagtcaaaaaaaaacacagtttaaaccgattatgagaattcatgatttatcaatcaaaacacatatgtatgaggcccaaatattttatcttcaacattctgacccaatttaagcccacagcacactctgactcgatggttttggttagctttcaggttcggtttggtttaattg

SEQ ID NO: 41714 - DNA, 365 bp, Arabidopsis thaliana columbia
tggatgattcgtatcagacgacttggaaatgtctgcaatttgggtcttttcttcaatgtatcttctccaatgtgttttttaaaaaattaaattttagagaaggatatgtcaattttttctattgaaaaggctttattaaaaaataagaaatagtggatgaaagataatgatatcgttacttgtcttagggtgtagtgagggtcgcagaccgtggtcccccggaaattggtacaaccggtaatagccggtatgaaagagggaatggtaaccggtgaatgccggttatccatatgggttagaagtttaccgcggttgaaatgattgaagctgagttttgactacctctggttaagcccattggtcgc

SEQ ID NO: 41715 - DNA, 297 bp, Arabidopsis thaliana columbia
actctactgagaatcgagtacttcatgagtgttaaaatttaaaaagacctttattcttagatttcagatttgcgtagttcttctttgtttcaacttaagatttgccttctcgtgatcacaaaatgcaaaagatcttcgaattctgaaacaacacgtgatgacgtgaacccgaatatagataatgattctctccatgcgtgcttggactgattagtaaactacaaaatatgattgacattttcatttcataaagatatcataaatcatagtcaacacggcgaaaccaaaccctattga

SEQ ID NO: 41716 - DNA, 564 bp, Arabidopsis thaliana columbia
  unsure (1)..(564): unsure at all n locations
cggtccaatattgacaaccttttttgtgaatgatcggttctccttcacaaagctgaagctgataatggtgtcttctccttaaccatgtcagttttataccatcaatatcataaaccgtactagctatgacggtcaaacaatggactggtctattgccacatagttcaatttttaccagtccatataataaccgggtccgccaagatgtgtatttcacactagtcaaatgtaatgttgctgttggaaataaacttgttattcaaaaaatacaagttgagatgactatatatatatatcttacaatttacaaacgggttaatttaatacaacgtctctttctttatacgatttggttttctaatctctctaagccgtcctttgacgctctaatttggcttagatataagacaacttgtatttccttatgtcccaaaattcgaacggtaaatattgttccaagaggaaggaaccggaatctaagattaatttgtactgtactcaataagccatgtagacatganntacgatacgctgtgctacgacccatgagtaatagacaaagag

SEQ ID NO: 41717 - DNA, 514 bp, Arabidopsis thaliana columbia
cattcagattccagccccatgaagaaagacctttatcacgcgactttctgagacgatgaaaccaatctaagtatgtgaattaagaaaaaaattgcatcattgaattagaggatatttataaaacagatttttaccctaaacttccatgctggcctggagacaaaactgatgcatactttttggtgtccaccatctcgtgaaataaaaatctgcaaagaatgggcccaaggaaatgtaataagaaacacaagtgtcagaaagtttagataacataaggaaaaacttggcacatactacaaacaagaaaacatttctggtagaagcaaaattaacaaaagcctaatagcttaatgatgatcagaacatgggtaaccacagaagaaacttacagagaactgattagacatcataggtgatggatcgcaagtcccaggagtgatttgccactgcttaaactcccctctgaagcccctagatatgctccacttctgcaattacaagcacgattggtcaa

SEQ ID NO: 41718 - DNA, 548 bp, Arabidopsis thaliana columbia
gaacagctcagtaacccagtttatacaactcaaaccatcatgctatatccagatcaatccgtactttttcgacaatgacctctgactgggataaacaaaataagaaattgaaaattatctgactccgaaatattgtaacatcaaaaaaaaacaatttccaattcctgagatgatcaagtccgaactgaagctacagaaccgatacaaaatcaatgagttccaacagttcctcagaccaaacgtcaagaactcaaagtctcagaccatacgaaacttaatcctaagaattgtgttagcttccaagaatccaaattcacaaatgctgatcatgtaacatcagaggaggtaagaaaaacaatcacaggaaccaaagcaatagcaaaaaaaatcccttacattcaggcaagaagcatttaaaaaacaagaattctaaagaacctgagctgcttaaacaggatttgaatcgaaagcatctgaatcgaaccgtgtaacaaaaaacaggattccaatttcatatcgctaccactgatgactgatcagtaccatag

SEQ ID NO: 41719 - DNA, 1544 bp, Arabidopsis thaliana columbia
catattatatatttttatatgtatgatgtgattcaatttttaatacaagctggaaaatcctagaattgacgggtttaaatcgatattaatacaagatggtatactacaggtgaaactctaaaattaacaatcaaaatacaagtgtataattttaaacactaaacaatataaataatatcaacaaaacatatacaactcgcagtttactatacatttaaaatcaaataaaataatatcatatatttataatcatctttacaataaaagtttttagtttaactaaaatataagcctacctgcggtatactgcaagttaaaattataaataagcagattaccatcacgatgtatgtaccttctcacatacacacctatcaaaaacttaaaacctttcaaaacctcttggtatattcaaattaggattcttcattcatggaatcattattccaagggttttgggatgtcttatgaaatgattttggcagaagaggatgtaaatttttttgaataaaaagtagtcagcaaaacatatgttttttttgggagtttttagataattaaatcagagaataagattgggcatatgagtaacccattcgagttcgggtagaacccgttcgggtttgggattaatgggtatataatttactacccaatagaataattctaaatattcggttctggttcgggtcggatccagttgggtttgggtcagtttgcacaaaacgtttcagaccctaaaaataccaaaaaaaatagaaacgagaaatttgtatgtagaaagcgggtctccaaacaaaaaaaacttttaaatttgttaagttttaataaatttaattatatttgaatatattttactaaattttgacaaacataacaaataatttttgaatagtttagttgttttggatatttaggtccaaaattaattgatatatttaaatttataattataatcttagataattagataatattacgattaaatataattaatattttggatattaaattaatgtttgggtttttgaatactttttttgggtaacgggtaatttccggaccaatcggatatccacgggtttactaaaactctacccaataaggaaatttcctaaaattttaacccgccctaacccggttttttggttcggatattgggttggttatcgggtccgttttttcgtcagccctatcaaagataatctaatataggccccaattagatctacaaatataaccaaaatactatacaaagactaattctaagttaggccaaaaattagatcctctaatacaaaggaaacatgtttcttaccaaaacaatttgtatacaaattttacacattaacttaaaactacatatgttgtatttattataaacataacatttttaaacaaagtcaatccaatacagtattatatgcaaatagtaaaaatattgaaaaatattatgacattatttttatactatactatttcttatgtaattcaaacaaaatatacaatttaatttatacaaaatattaatatacggattatga

SEQ ID NO: 41720 - DNA, 524 bp, Arabidopsis thaliana columbia
  unsure (1)..(524): unsure at all n locations
tacctatgcccccggagtcctcaanntggtattatgctctatctgttcaaccaatgcactctcgtcttgcatagatttcgctagactagaagctttaccataacataaaagagcatcaatgtacttttgggtcttgttgtgtaattcagcgagattgatataccccttcgcttctccttggacatgattaatcttatgacagatattaatatccatctcaatgtgtttctttgcttcatcccaacttctcagcgccataaaaacgtttccaaggttatgatgaagcctactccgagcagcatcatactctctcacctcctcttcatcgcaaatctgcagccctttcttaagaatagtacgggctgcttcaggattatcaagatcaaggtcaagcataccgatgttgttatgtgcgttaatatactcctcaaggaatccgctagattctccaggaggtggtttcccttgagaatctgtgcaagttccatggctttcttaaagtactttttagcactctgaatggc

SEQ ID NO: 41721 - DNA, 551 bp, Arabidopsis thaliana columbia
catgggagctgttatattatattattattatttgacgttgaccacttgaccatctaaatgaaatgggatgaatctctctacgcggtacctaaaaaaaatccaaaaaagtaactttaacccaactttacaaaatttatattttctccaactttacaaattaattatttttacaaaaaaatatgttaattatattatttctctataattgtgtacggtcgcatccgtagaatttattcattagagtagccaaaagtaaatatttttaactttttagatagatagaaaattaagccttaaactgtgtaaatttcgcaaatctacttttacataagaagccttagtattttagtgttctactgatatggtactttaggaatatactgatatgactgacattctatttgattttatcctacggcctgacaaatctgaaactctatacattctctgcaaatgttgtgcctttatttaagatttttataatatagtttttcttttctctttcccttgtatatacaccttataagaaaagctaggccactagtgcgcta

SEQ ID NO: 41722 - DNA, 532 bp, Arabidopsis thaliana columbia
cctgtttccaatctttattctctggaattaggatcatgccctcgtcgtcgtattcaagaacgattcaaatcggaacaaggcggcggaggaggaggaggagatgattttccggttccggtgactcgtcggaagttaagagcagagccgaattgtcctcgttgctcaaagcaaatggatcttctcttctcaaatcgtcaatttccatcttctaatcttcttcaacgtcctgatgattctgattcctccggtgccggagataaaacgaacttccagtctgttaatttctgtccgacttgtaaaactgcttatggattcaaccctcgtggtgtctctcctcttcaagggacattcattgagatcggtcgtgttcaatctccaaccactactaccaccaatgctactacttccaaatccaccaggaaacaacaacaacattcaaaggatccaaatcaaggattcaattacaggaacaagcttagatcttccttttgggatacacttagatcttacggtgctgagccactgaggattg

SEQ ID NO: 41723 - DNA, 412 bp, Arabidopsis thaliana columbia
ttgtgtacttggggatattcgatatgctaaaccaggaggaagcatcaacaacaatgttgaattggtagcctaacaatagatcttcaagaccactttgccacaattgtcattgtcaatgcccaggtcccttcattcttaaggaatttgtcgaagaatgtatttgttcttaatattgtttcagccgtcgcaaatcctggtggtcatcgtgacgaaggaaaaaggatttcgcctccatgggcattataattaaatacgagatccgaatccgggattcagttatccaggaccactcgtgacactcatacgtgcgacatcaagtggtgaaaatgaggaataaggaagcaacgttgcacagagggtgattgatggattgcaaatggccgttgtgacccatctatatgagcattgttag

SEQ ID NO: 41724 - DNA, 572 bp, Arabidopsis thaliana columbia
ggcagatgattgtgatctcttcttttgtctgttgtactttctttggaattctttttccttctaagttataacattcaagtaattgaaacgctgtcgttttagcaaacctaaaccttttaaatggtatgcttacgaaatatgaaatatgaaatatgaaatatgaatcacatatgattatattttttttgcaatgaatcatctttagattcaatatgcatttgaaagaaagtttagattcaattatcatatgtaactacgatggtattcgagttttttagagttgaggcaatcatgcaaatgtccgagtttcgcggttcggaattggtgttttttcctcggacttaggatggatgctaatctcttatgcttagattgtcgtagttttaatcttattgttatagattcggtcattttggcttttttgtttcttctgtattcgttgttgcaattagaaaattttcgaaaattttggcaggtcatgctcaatctaaaaccacgttggaaattgagtccatagtgatggcaatgcaatgtttggttgtgaactactaaatggttttatgtgaaggaga

SEQ ID NO: 41725 - DNA, 543 bp, Arabidopsis thaliana columbia
ccaagaaagcatcaagtttttactccacaggttctgttgttcaagtgtagttttcaaacccattagtatagctatgaaagtatttgttaggaattagacggacaatgctaatatggtttgtagttggaatctgtgcaaattcatgttttccagttcctattatcctaacagcaagcagctatgtcttcaaatatattaacaagaacatgtgaaagaattttgtattagttgatctgaattggtgtcggatgatctggtttccactccaataaacgcattctccacatttcattgttgaaagaagtttgtcacaccccaaacccaacttctagggccaccctatttgatttcctaaaaagaaaagcccatgtgtttttatcttcgcctttctcacagccaccatttacgtctccatcttaagcccgaaactaaagtcaccggccatcatcgtttttaagtccgtgaggcattgttgtcactgattctgtagtggtgatcgtatgttggtgagagataggaagagatcccaagagtgaaagagag

SEQ ID NO: 41726 - DNA, 543 bp, Arabidopsis thaliana columbia
cacactaaaacttaagagatgtgattggatatattgggatctgtaattggttctttttcaacttttatagtagtatttgttttttgaaaagagaaggagaatgaatagttgtttcctcctccatcattgtggtcaatgtggcaggttgaaatatttttaaaaaatttaaaccaagttgagttaaaataaaaaaaaattattgacaaaaaatgcaaagaaatcaccaaattacaaaaagaaaagcaagattaaccttgaataaaaatattgtacaccaaacctcaatcatttgaaaaaacgacaagccgtaattttttccgaacaaatcacaaattccgcagtccggtgcggtgaaccaaacaatgcgttgcggtttcaatagtaactaaaatctctacatatatgtgtatgtatatatttttgttcttatttgaaccgcaccgtactctattcacagttgaactgtatgtctctattcgcaacagaatgaaaaaatcaaccttgaggttggttagctctaaaaaaagcatatgtttttttttg

SEQ ID NO: 41727 - DNA, 588 bp, Arabidopsis thaliana columbia
gtctaatggttcattaggagataatatgagagtcgtttctacttatattgtgttgtatgaggtgatgcgatgagagtgaagaaagggatgtttctacttatgtttttttttgctttttatttacaaatttatggtcttttctaaaccaacgtcagaaagttcaattctccaaaaaaactacatgaatcgtaatttttttttatctacaatactacgttttaaattgacctagataattaggatcagagtaagctgcaataaactaaaagagaaaaaagtaagataaaaaaactaaaaaaagaaagaaagaaaaacaattcttcttcttctccgatggagacacacgttcctccaactcgaacaaatggatgcatgcctcaaagtgggtccattcaatccgatctgaaattaagcagactcaaaattggtccgattgatctaaaccgaaatcaattttaattatgatgagattttgtcgaaattaataattagaagggtcattgattattttaaggagacatgtgagctatctcgcacattaaaatcaagaaagaactttgagtgatatcatatggatcaatatattta

SEQ ID NO: 41728 - DNA, 505 bp, Arabidopsis thaliana columbia
tatcttgatagcatcatcgtaaacgaattggttacatcttgagcttgagttgggtaaatgtggtcgtcgaattaagatacacatcagggtaaaatgagcaaataataaagttgaagggggaaaagcgaaaataaaagaagcacgtgatgtataggatgttggagaccattggaaagaggatcagtcgtggccaggtatatgaatatgaatatgatgatgtcagtgtgtatccatgtgaccttatcatgtgtacttgttacttattttatggactacttttttttgtgctgatataatgtattgaaaattgtgaaaattattgttaaaatagatggatatatatatcttcccccacgatggagaagtaagaataacataaaggacggtaaggtactcgacgcatctttttccttttttgaacttctgattttatatatcggattttggaagacaacgacctctacaaaaaattacagactcacttaacacatctccagtgagaata

SEQ ID NO: 41729 - DNA, 555 bp, Arabidopsis thaliana columbia
aactattaaattattgttaattggttttataataagtatcgctcttgtctccattcacttgtcttttattgtccccagtaccaaactaccaaatacaattcatattcactaattaattagtttgatgcaaaggatgatgcaatgttaagaaaattgaaactctaccacattctaaaatgaagcaactctaccatatttaatttctttagacttggaatagtcacaatatgaatgcttaggtagttacggttagttaggagtatcacacagaattgaaaataccaaaccacaattttaatcaggtgattcggtactaatttttattaatgaataaaaacataaccgaaccaactcaaagcagatattaacctgaaaatgaactcaccaaaacaataatagaaagactcaaatcgagccggaaaccagattgagcaacgaactcatgggaatatcatatctatttatgtccagactattaatatacatacctatgacaagatactatgcatgcaatgcaagactgaagtaaccatatttttttgggtaaccattgat

SEQ ID NO: 41730 - DNA, 561 bp, Arabidopsis thaliana columbia
taacttagctaccgcaggatatgaaggagttaaatccacatgttcatgttaggtaggaacaagtccgtgacttcttggccctttgtttgttgttgactcttgactctgactgctttctcttgacttgtaaaacacgctgaaaagtatttgatttaatttggcaatgaatcttgacgcttgagtctttcctgttgactctgaaaattcgtagttctaagccaatagttagtatccctcttctgcactcttagtgttcatcgactttttcctattcttacattttctaacttcctgtcccctctgggaaatatgatgatttcaattctcaaatgtatcagattagtcataggccaaataaggtgctgttcttctttatgtatttatgtcttgatctgtcatgaggtgtcagatcatctgacttcatcatgtcacgattatgatcaatttcgtagtgctcacctggttgtatgcactgtagttactggtggataactgtctgcaatgcttgatgattacatgcattcgtgtgtacagtcagtcggcagcctttgagatgcatgt

SEQ ID NO: 41731 - DNA, 418 bp, Arabidopsis thaliana columbia
tttgagtcaaggaatattctcgtaacgcgtagggttttcttacggcagatttgtttatgttatttccatatttgatgtttaatgcattaaattgacaataaagtgtatatctttctaaaatcaaattttttggtttttttccttattctacacatatcaacgatctcaataagatcttttgattgcgtttctttgtatcaatttatatctttaatttatatttttaatataatcttaatttatatttcacaatttatattcttaatttatagttggtcatatcaataagatccagttttttacgggagcttatgcatttatattgttaatttatgtgatgtagaattcgtcgttttttgctaaaaatatggtattaaggttgattaaggttaattggtcttgttacttaaaagtagag

SEQ ID NO: 41732 - DNA, 499 bp, Arabidopsis thaliana columbia
tcaaatttttttactttatggttcaattcaaactttagaattccaaagttatgaccttgacctggtttcacaaacctatcatggagaatcaatcaaacaaattctatattttctttatattatgattgacctaactataaggatctgcttcttgtgacttagcttcaggaagaaactgaagcaaaagaaacaggggactctgtcttactctttggcactagctaatgcttttctacaaaataattacaaaacttttgaggtttttttccttttagagtatacaccctttttgtgcaagttagcttcaccacataacacatgaacttgcattaacctttcaataaaatgaacacaccataaattgaacacataacacacaaagaagctgaaataaagtcaatcccacttactcttcaacttatcaacatgtctaaactcatacgtcaataccgaactcccatcagttttcttcagttcaaaggtctctagcagtacatag

SEQ ID NO: 41733 - DNA, 578 bp, Arabidopsis thaliana columbia
tttctcggtttgcgtcttatatactactaagataatatctctcttttaagtgagtactattattaaattttaaaaatgggaaaacaaaaggatagttgcataacaataattggtaaaggaaggtgagagggatgaagaaagaaaagctaaggaatcaatgtactctaagaaatgtacctttgtgtacaaactacaatatatgtgggaacataatatcatccacatattgttctagattctacagctagctcccaaatctttttgttcttattttattaatctcaatatttattatcattacttacttcctatttactatagtaaaaatgtaacaaagtaacaaataaaagaaatgacatattggccgcaaaaacccaatatataataagattaattaaggacttcctgattttgtgatggtttatagtagctaaactgtttaaccaacggataagtatcgtggacttgttagtgcaagtacttactaagctagagatagatgtacatggatcattatttagcgtaagatcttaatttcactagctagactactcatatcaatgtaaatatataatatt

SEQ ID NO: 41734 - DNA, 579 bp, Arabidopsis thaliana columbia
taattgttcgagtattagggaaaaatttctctcccaagcacggtatccaaagaggatattatcagtatgtctcccgcttttaaccagatctattttacttttacatcccaaaagtagaaatttttaacggttattacccaaacatgatgaactccgttgagataatgggtgattccgacgtctcctccggcaagtatctcctcttggttacttttgcttccaatcctaacatctgtttcacctctgcgtcctcactacaagaatgcttctcaggtagcttttctcttcactgtgtttaggtgcctgtggtattctcttgtatgttaacctgcttaagcctccacaactttttaaaccttttaaaccttgttgctgctccgagagcatttattgagtcctctgaagatctgtttttacccatcctactaccccacaaccattactatactcaccagcttctagatacttctaagctcattgaagaaaatgagttaacctcatgggtagactaaccaaccgcctgccgaaagactttggtctttatcctctttcttgctaatagatggaactgagagggaa

SEQ ID NO: 41735 - DNA, 476 bp, Arabidopsis thaliana columbia
tctagaggagcccgaaattcaaatgaaactcatagtgtataaacatttagtcgagttacaaagaaacaaagttatttatggttacttctttccttaaaaggaaaagaaaatggttacgagaggaaccacgtgaagatcacgtagagaggttggtcaaacatagaaattcagttggaagtaaatttaatttttaacgctccaccgactctcggagacagctgcctctgactcagcgcctcatgttgacttggcagtctattattaatattgtcgactttttttttttgttggactataaaagcgatattttgtgtcctatttttttttttttttgacaaagtgatatactatttacatttaagattaattatttttattactcaaattagtagttatatatttcaatttaattcaatctgaaattcatctcaattttctatccacgaaagaaagacatgaaaatcaactgaagtatg

SEQ ID NO: 41736 - DNA, 431 bp, Arabidopsis thaliana columbia
cagacctttctcaataactgaatatatagatgcataagtgcttctcatataatgacacagctcctctctccatggtgtttgtttgagatgttttcggtaaatttggcctggtatttttatttccttgtcccttcagagagcaaatacttttacaatgatatatcatatagtggttataggcacacggtttacctaatcaattagttgttttctgaatctataatgagctcaactcatcctgctggtaagcaacttataaaatattatctgcccatatcccaaagccattcaaatgctttattttcaagcaaccaaggttggattatcgaaaacccttctctcttttcctatcttaacatctatatatattcagtatctgggacttgggctactatgaaggtgatctggttcactttttaatacatttttag

SEQ ID NO: 41737 - DNA, 481 bp, Arabidopsis thaliana columbia
  unsure (1)..(481): unsure at all n locations
tcaaatctttgacaaaagagatttgctgatttgcaatcgcaacgtgaactattatatatcaccatggaccataatgtattatacatgacaggttagtttttcttaatatatcaataagatattaatccacattaactaaatgtataaatatcgaccgttatagacagagtgaaataacatagaactctttttcacaattttgacatgagctccatgcgctctaagacaagcttttcttttttctttgcttgtcgtttatctttcttttgctgaaaatgtcttttaatgttatagtctctccatttcattatatgtatagtttcagaaattttcacatatattatattaagacaagaaaaaattggctttcgtcnttacgattttcttcattgatgaaatagttaaaattaagagagataaaactgaataaatattttaaattaaaagaagatttaaagtgtaagaaggaagtaaaaaatgt

SEQ ID NO: 41738 - DNA, 349 bp, Arabidopsis thaliana columbia
gacccatacttaaacccggaacttataattgattctcgagaaatcaactaacagagcaaaaaacagagtataaattataatgccaagacctgatttggttaacgaatcacagtgcacctccagctacacagacatgaaaaggcggtccacgacagaagatgggttcgtttggagaagcagttcctgctcgtgctctgagtacattgttagcgtcttcaattacagcagctgctaccatcgtgtactctcctggaacaaggaagaagagtgagaaacagtgtcttgcttcttgcagcggcgctacttccattgagattccactaagagcacctgacaaaagtataagcca

SEQ ID NO: 41739 - DNA, 315 bp, Arabidopsis thaliana columbia
gtaacggttgtttatttgcgcctttgtcgtcatggctaattccagcaggcttcttaacatctattggttccattggtttgtcgggtttcgcactttcgtctctgttgctacatttggaagctaagcagccacaagagtccccacatccacttccatttgccttgcatttgcaacttttggtcttgcacaaagattttttagtgcaagagcaacacacttctgctttgccctgttcctttttgcaaagtgtttctcagaagtttcggttgaaatggcccgagtttgattcacgtcgatattcttgctggagataga

SEQ ID NO: 41740 - DNA, 464 bp, Arabidopsis thaliana columbia
cgtaaagttttaaaattaaactattcttgatatttttgcaatatagtttttcttctttggatttattatatgttacgtaatcgttgaagctttttttttttgaatggtgacaaaaatatcaattttcaatcaaccaaaaatgaaaatatcaatttccattataactttcaaaaagttttgagttccacagtacctatttatatacattcttcgtaaatgtcaaaacaaatcattgtagtcacacttcaacgtctttcactgaattataatcgatttgtggctatgtaaaacaatattaaaacagctgactaaaccgaaaataaaaccttacctattttgtgtatacttttttaaacaaaaaaaataatttgaaaactatgactaagggtccgaatagtgactgcgttttgtggtgtgggagaagtgtggtgcggttcaaatagtaacgaaaatacatatatata

SEQ ID NO: 41741 - DNA, 439 bp, Arabidopsis thaliana columbia
taacggccgccagtgtgttcaagatcaaacatagaaaaaggcttaccaactgggattttcagtctctgaacatacataaatcgctacggtaatcactctgcagtgtatcccacggttgggacacgactcacatacgcgatttcataagatggtaaactactacttatgcataggtacgacataaacacatgtatttgtattcttacggtacataaagtgatggacattgtatgattgattctccactgtgtctaggtattgtagaaaacggcttctcatctaaggctcaaaaccggccatgcgccaggcgatggtagagcagggcgtatcacagggacccttcttacctctgtgaacacttcattgagtcgagcagcctgactcatcacccgcgacgccttctgcacagatcataaacacccaagacgtgataatgata

SEQ ID NO: 41742 - DNA, 319 bp, Arabidopsis thaliana columbia
gagtttttcttttgaacaaaaagagtgtgagagaaagagagatagagcaagttgcccaaatggagatatgtacaatggttggttcggttcttctctgtataaggtctttaagatctttcttcacttgagagagaataaaaagaatcttttgatatcatgctatccgatattcaactagtgaattgatcctacaaaattcatgtataatcgttgtaaaatacgcaggacactctatgacccattcgggttaatactactcaggaagcggacctctacactgcatcagatattctcctacaagtcgaaatggaggctgctg

SEQ ID NO: 41743 - DNA, 516 bp, Arabidopsis thaliana columbia
  unsure (1)..(516): unsure at all n locations
tgaaacctttacctcagaaattgcagattccgaccaattgaagttcaatgttcaactcaagacaattcacttccagaaaaaaaaaaaaaaaaacaggtttcttcaatttgaacagacaaaggaagaagaaacccctaattctttaaaatatgggcttaggtctcatgggccaagtcaagcccaatgcttctgtataatttcgtttagacccccaatactagtctaaattctattttctaccccagtattatatccgttaccagattaatacccagtcctatacatcacagatcagacttcactttctcattacacaagaatatgttgttgttattcaaggatcgtatggctgacaaatggtagaaacttcttttattagattccaagcagcaaatgtttatccaaacaaacaaacaaccagaagaagaagaagcattgaacgtatcacttaaaacactgatttattctctttccctcttcttatttcaacggcgtatgtgganagtttttgattga

SEQ ID NO: 41744 - DNA, 500 bp, Arabidopsis thaliana columbia
ggttttgtcaaagatgatgaagttggtctttaactaaaattttcatgaatctttttggtccagtttgtctcctctctcgcattaaaaaggacagaatgtgtggagtttcgaagccattgttatcgaagaagatttaaagcaacaaggaacgatggtacttttgtgattcattgaacttttttaaggagaacaaaaatgaaactggttcaatttcatccaaatatgttctacacgaatacatatatactatatgtaaaattcaacaatatcatatacaacgaaacatttacatcaacagataaataaatttgttcacaacccaagaacaactgattaaagctaatcacaaactgaaatctgtcaaaatccaacacgcacactacacttgtgttctctacttagacacccctccctgtcatttggaactgaataaatgaatctctcagaccagtgagtcttccgatatgacagtgagcagagagtatttagctttgattgag

SEQ ID NO: 41745 - DNA, 501 bp, Arabidopsis thaliana columbia
cgacatgcatcttatgaataagggcaaaaaggactttcgagtttactggcgaccacaactcgcaagccaacgcgagcctctatttattattttgtatccttttttttggtaaaagaattttgtaacaatatccattccctagctagattcttcttcttcttccttggatttgttctcgtaagcattcttctccaaaacgcccacttgttaaatttgatccagtggatttgggttttgttccgtctttaagctccatggcgattgcataattatgctctcaggatgggtttctctcaggccattcgcttgaatcttgcttccttctcctctccctctccctgcgatgtttgtttccttacctttctctatattatccctatattttcatttatatatcgctgctgattcacaacactttacttactcttaacttgatcaaacttgaatttttgacttttgctggccttgttctgattgtgccttgttctggcttaaaaagat

SEQ ID NO: 41746 - DNA, 567 bp, Arabidopsis thaliana columbia
tgacgtcggagaaaggattcgccggtgatgaaccaaacttcgttgtggaagagaagagatctagactctccggtgagattcgtcaggtgagtctctttttttttctgtttctggttcctcactacttataatgggcctttgctttacggcccaatttattgcttactgagcctaaaaccttacctaaatttaatgggcctctgcttatggcccaatttaaatttaaatttagagaactaaagaagacatgacactaattacaagtcattcgattatgtgtcatactcgtaaaatttatcatattaatctagtagaatagttaaccacataataaccacattaaacttcatatgataaaaatatatttcaataatctccgttaaatatatctatgtataaatcacatattttaatagcaagcaagttctccaattagaatcttcatataagttaataagtaccaaaataattattagggatccatagttaatagctttagaatatattaggcatttcaagaaaataatactcagataattaagattccagttttgctcagatacttgg

SEQ ID NO: 41747 - DNA, 544 bp, Arabidopsis thaliana columbia
cgtagttgagagtgaatcttgttaatcttgtcaccgtttcacgccaaagttcgtagattgatgaatgccaaagcaggttgaggatatagcacctggccttaggtatgttttgggccggggcgagataaccaagtacaaatgtacaatcatcctcttgacaagaaattttgcttagatttttacatatataggctgttagaaaagagaatggaataggaaaccaactcttatagtcaagtaatgatatagtaagaaaaacaaacatacaaacatatgggcctcaatcactactcataaatccttaaaaaaatgtgtaattatacactagtgaatgaagctttaatagaagtggtcagtggtcttcattttcattttaacacgtagaggcgtaaggcagttgctgcacttggcttcctttagaaccggccatgttaacatagcattgttatgattatgggaccatatgtttagaagtaagtaagaggatttgagattatatggattaaaaaaatgagacatatttgggctctatgctacatgttga

SEQ ID NO: 41748 - DNA, 576 bp, Arabidopsis thaliana columbia
aatatatataaaaaaatctattacattttatctcatgtctttacagattacacattggaattgagttttttttttcatctaaaacttttgttatttatataaccatggaggtgacacaatgccggccgttaaacatgatcttagtctaggaaggctaaacataaaaccaaagccaagaaaaggactaacaaacggactggatagtttgaaacccaaaaccaaaacagaatggattttgtgctgtgtggggtgaagcataaatgtataaatggaaaatatcatcattaaagtttgggcttatacgggccttatttctaataggcaatagactgatggaacattgaatatgcctaccctggatatgtagaacttgcatggctctcggattggatacgtagaacattacacttatgaaggaaaaaagattggattctttttttttctggtcggcaaccaattaagagaaacactgttatgtttgtaacaagtgtgtgttcgctaaatccattgtgtgcttttccggtttaaatgacatctgtatttacatcgtgggcaatgacacatctatctatattt

SEQ ID NO: 41749 - DNA, 507 bp, Arabidopsis thaliana columbia
cgagttaataaatggaaaagaaagataagagcttttgctagaatgctccatcgaagagaatgctagtggaaacagattccaaataccggacaaggtttgtcgaaatcgccaaagataataacaccaaaggaacaatgggagactagattggtgtcgttcaatcaagtcacaaccacaaatcattgattcaaaaaaggcttgagaaagagtgatattgaaactaccgaggtgtgttcttcaatgacgtttgacagagttgaggcaagtttttcagtaaagttcgagagagttgagatgcgttgctcctcaaaaaacttgaggcatgatgattcggcttgaattcagacatgtttgaactcaatccgaaacgtttcaaaattaatcttacaagttacaacatataccaaacgaagaaattgatccaggtttcgagaatgataatgacaagtccaatcaaaatccatcgctattgtcttaggaaggagtctctacccttcgtaaacaagt

SEQ ID NO: 41750 - DNA, 442 bp, Arabidopsis thaliana columbia
aggggaagacagaaagtgttcaactttcctactggagaccaagagacagggagagagaataagaggagagaacctgagtagcttatgtgtctagatccggtcaaggtaaaccctagattttggtacgactagggttttttggtctatgaggtaagatttgatttatagacagattaattgctatgtcgaccgatgatagcaaatttttgattggtcaattttctttatggtttaagggaataaattaaaatataatttaggttttttttgggagaaattaaaaataaactttaatttaatgtgaaagactcttaagtttatacaagatatttataattttattatagtttcatataagattttaattattgtaaaaatttgtattcatatattaagttcaaaccaaaattattatgaaccaataccaaaacttaagtttttg

SEQ ID NO: 41751 - DNA, 436 bp, Arabidopsis thaliana columbia
ttcacattaaccttaaccgcatagagcaaaaatgagaagcccatgatttcatctatcccttaaaatgagaagcccatgatttcatctatcccttctctcatgtctagcttctcttccatgtctatcgtctctctctcttctcctctctttataatctctatgactccgatgatcatcttcgtctctctctctccgactctctttatctctagactcttcacggcgtcttcttcttcttctgtcttcatcttccctactctctctttcttttctctctctgtgtttcctctccagttctcgtgcgtcttcccgatcatgctgtcttctaccatcatcacgttcatctctgtgctgtcttttgccttccccattaccatgaggacttctcctctgaatcttctcactcctctccctctcatgactattatgcttgggg

SEQ ID NO: 41752 - DNA, 107 bp, Arabidopsis thaliana columbia
tacgaaatattcaatcttttagtttcattaacattttgatagatacataacaacttgcgtttttttgtaggtgcatttcgccggagctaaacaaaccgccggcaaca

SEQ ID NO: 41753 - DNA, 541 bp, Arabidopsis thaliana columbia
agaggatcccccataaatataactgtccaatgcatatggaaggttgaaacatccatgtcaaagcaatgaacaaattttcaactgctagctagtgtacgttaatgtatacatacatatatttactaaatacatatacgtgtgtgttacaaagttttaggagtgtgaaaaatagaagaaggaaaacaatcctaattgttataaattatatatgtaataaaaaggagtaaaataataagaatgggtcacaaagtgctatataaatccatcacttccttttatattgctgaatctctgattggtagtaacagtttacatttcgcacataactctccctctgtcttccaccatcatctcttctgtgattcagacacacaaagccctaaatttcaagctttgtcagtccatcttcttcttcctccataccttatctcaccagcttctccatatctctcaaagaaaaaacaaaccctataaattccacaaaaaaggaggatggataactccgacattctaatgaacatgatgatgcagcagatggaga

SEQ ID NO: 41754 - DNA, 460 bp, Arabidopsis thaliana columbia
taatttcaagagagaactattcaaacaggcctctctgagattagaggctaataattaaacaaattctttacaaaaccaaaaacaaatgaagtctttcagagaatgtttggatcaacaacatcaatcttaagatatcaaataacccagcttttcaacccaaagaacatgcctttacaatatacaaagttgatctgaacaagaaaagcaaaacagtgtattcaaagtactagccactaaatcttacaaatacaaagaacaacaacaattttcataaatcaaaatgcagacactaaagatagcgattcacctccaaataaaaaagaatcgagaaagtaattgagaaacgagtaaagctgagtaattgagtaaccacgaaccttccaaattagcagaagcaagccacagtgaatgattcggaagtaagatcagtgaaagtaagataaacaccacataactcgac

SEQ ID NO: 41755 - DNA, 712 bp, Arabidopsis thaliana columbia
gccattgcaaataaagaaaatgtcaagagaccacaaccaaatgtcaaatggaatgcatcagagaccaaacctgtaagagtccacaaaacaattcaaagaaagaatatcaacaattcagagattcaatcctaaaacaaaaagagaactgaaaccaaatcgtacctacacgaccagtgaagataccaatagagagctctgttgtagaatacaacacattaagcgcaattagcagaaacagtctcttcatctgccgatttccacttgtcactactccaaaaacctcccaaaccatttccaaaacagacacttttgccatgtctacatctttcccttccccgaaaaacacatcacttccatcaacggagtaaatatccggcggcatatcgatgctcgagaccgtcctatcgagaaaaggcttagccgcttccgtgaccgccggcgttcgtggaccgtgagattgctgaaacgagcgagaataagcaagcctccgatcattagcagcatatccgacatcgctgctccgatcatcagggagctcgttatcgcctcgaggattaaaggaaatggatctctccattttcttctttgatcttaaagttccaacttcggcaaatactaaaatcaacagtcagtcgtacaaagaaactctgcttatacagtaaagtcaatgggccactgttctaagcccatatataattttagaagcccatag

SEQ ID NO: 41756 - DNA, 594 bp, Arabidopsis thaliana columbia
tgtatatgttgatccagaaggcaagcttctcgttgtggcttagttctgctggatttactctggcaagtctttcaacgaggttcctgtattgaaaataccacataagagtttgtcaagttccaaggaccataacttcagaagttgcttgaactgtgtgttaatacctgaatctccataactcatctgaagcatatccgagccttttctcctcaacagacattgaagccacttcagttgcagatctgtaactcccgatgtcagcccagctcagctttccttggactgtataaagatcaaacacatcgctctctgtggctaaaacatctgagttcttctgaatatcgatccgtggactctgtgcccacctggagatccgtgagtgttctgaaggagaccaccatgacgttgatgatgatggaggattctcacgagaagaaacactggcagtctcttgtgaggatttggatcctgcagatgtctctcctagagacacaaatatgtttctcatgcatctgatcatctccttggatagttcattagcattgtcaaaactctgcaaggactttgccactttgcttctaggttgtcgtttgt

SEQ ID NO: 41757 - DNA, 427 bp, Arabidopsis thaliana columbia
tatgagtattcttatgagttatgccacagtaaaaaaaagtaacatttaaaactatcttcttttacccaataagatttgccaaatttgtaattaggaaaaatgttaacttttaaaaatagaaggtcggttagaaccctctatatcattcagagacttcaccgctaacttttgtaaaggtcctttagggttttcggattcgagcaaaaacaaaatctccgcaatcgagagaaactctgagatcggaatcaatggagtctacaatatcgttgaaggtcaacaaaggaaaaggcaaaggatcaaagggagcttcctcttccgatgacaaatccaagtttgatgtcgttaaggaatggaccaattggtcattgaagaaggctaaagtcgtcactcactatggcttcatcctctggtcatcttcgtcggcatg

SEQ ID NO: 41758 - DNA, 299 bp, Arabidopsis thaliana columbia
atctggtaagtcttttttcacggatacacaaattgagagagagcgcgcgacaaaatcgaacctaaccctaattttgcgatttccccctaatttcgacgatctgatggtgagtgacaagcatgtagaatcaaaccaccgcaaacaccgacggtcgttttcgccgtccgacgaggtctttaaatctccgaagcggcacaagtcccgtcatcaccatcgcaggcatggccaccgtcatcatcgtgatgaggaagttcaatataacgatgatgagaatgttaacggtggtgatcttgatatgg

SEQ ID NO: 41759 - DNA, 627 bp, Arabidopsis thaliana columbia
tcgtctcagattccgacgttgaaaccaccggcggaggaggaagaggatccactacctcaaccgaagacagaatcgacgagcacgacgatgcgatcgaagacgacggcgtttcgaatgaggaagatgagaatcaagacgcagagcaagagcaagaagtggatcttaatcggaacaaggctgcttcatcttctgggttttacttcgatcatgttaatggagttataagaagagctttcaataaacgatctatagatgaatgggattacgattacacaggttttagtatagattctgatagttcaggagataagagtagtagagctgcgtttggatctgatgatgttcctttagatgaatctattcgtaggaagattgttgaggttacgagtgtggaagatgccttgttgttaaaatctggtaaaaaggtctcgcctttgagacaaggttggggagattggtttgataagaaaggtgatttcttgaggagagatagaatgtttaagtcgaatattgagactttgaatccgttgaataaccaatgttgcaggatcatgatagtgttgggaatactggattgactagaggtgataaggttgtgcagaaatggaggttgaatcagattaagag

SEQ ID NO: 41760 - DNA, 466 bp, Arabidopsis thaliana columbia
tcgctctctctttctctctaacaatgtttagcttgaattctgtaagctctccggggttagctctcagagatatttatcactgcaaaacacgaaaactgaatgctcctaaattggtcatacatccacgtggctatctctaattgggtattacgtcgtcatagtttattaggatttggcaagaattttaatgtttatacagtgtcttgataattttgacctaggccgttataaaatttatttagttatttactccattttaccagcagtaaaaagtaattttaagaagagaaaaattgtctaaaccgaagacacactgttccgcaccaatgtacaagcgtcacgatatcgacaatgacgtggcttcttctctttcgttgatcttgttgtgagatctcaggtccgtgacttcgtgcaagtaaatggtcatagatcttaaatctgaccaattatgtttggtttcttgcga

SEQ ID NO: 41761 - DNA, 507 bp, Arabidopsis thaliana columbia
tgttaaaacaaattttgtcaataagttgtatatatgtttaaattatgtagatatacaatacaaattatttgtcgaggttttttgttttgtttgataacatctattgtccaagtcaaatattattttggttgaagattagagaaaatgttgtagagaaacgactctaggtctttataaaaaaacaacaactcttggttcatcaggtttagcttgaaaaagatggcaaatataaaatgttataaaactccgatgaatgcaaattaatggcacacattagtcgcaatagaggctgtatctaactttcaacatggattcaaagttgtaaacttttctaactacctttcgggccacacaaaaaactctaattaaatatacttgattatatattgtcggaatgtatttgcatgccttacttcattacaatttcaaaataacaaaactagcgttttaaaaaaaaaactagaaacaggaatataatgtgatgtactatttttttttttccagttt

SEQ ID NO: 41762 - DNA, 468 bp, Arabidopsis thaliana columbia
cgcattatagtgtgaggagtcgtttaaaatttgtcttccatgtttgaaatttggagagaaaaggcaaagagccgtctctggactattcaagataagatcatgagcttttttaacacgtgcatgttttatggtatacacatcatgtttttttaggttgcaaaacttaagtatctggaagcatgaaaacgattttcttctgtttattattacgtggtagaactaagtgttgacatatgtgtatgacttttttcctgcaataacgcctccacagtccacatcatatcctcatcagacgagaccatttctcgactacaacgtgtttgagaactttcgagtatgatttaacattgaagcttacaatgcatgaaacgtaacattctatttagcatatgaatattaaggcaaataacccatgtattgttttgctttgttacaaagacaatctctaactcatgaattgctgtttgt

SEQ ID NO: 41763 - DNA, 837 bp, Arabidopsis thaliana columbia
ctcaatccaaaccaatgcagcattcaacgattaatgtatacatatagggatagacagacaaactaaagcagtacaatccctcagacactcttcagtggtatttaagtatagttaacaaataactcatgagaatagacaaatccaaaacactccatgcaattgaaagcaaaactctaaacttactagcaaatagctcatgtaaaaccaataatgaaaaagagaaacttacttgcaatagtcaattccttggctgcattaggtgaattctcgaacaatggaggaagacttgtgaatttggtaagaagaacctgaagaacacaacaaaaccccagcgacatcagagactcgcaccagtaaattgtaaatctaaaccaatcccaacaatcccttaaagtagaaagttaaaaatttcatagcacttagctcttctaaaagatccttaacacacttatatgctaaaaattctcacttcaataaatcaaagctctcatagatttaaactctcgcgacataacccatcaattttcccaaagttggttcaataagcagatatgcaaagaagtgaattgaaacaaattagggttcaaagaagagagagagatgtagaccttaagctgagacaacagatcgctacaggtattgtaatccttcctcgcaaacgccgccttgaatctctcgaactgctgtgaaacttcagttagctgcggatccatcgcttctatggttttttctcttcaccggcgacgattcttttcttatagatttgattgctccgagaactggcttgatcgcgaagacagataatacagatagaaataattgtctttacaaaacggg

SEQ ID NO: 41764 - DNA, 318 bp, Arabidopsis thaliana columbia
tggagctatgttccagaagtaacaaccagcacggtggaatcggaggaattagcggtggtggtgataacggtaggtggctgaggggcagagcggatggtggtaataatgggaagtttctattcaacctatgtactgtataggattttgatgtagataacttcttgctttctgccgaatcaatcaaacgtgctagatcacacaatgtattcgccaaattttcccgtgtgtcgtgtagactaccaagacgtatggaggtaaagcagcactatattgaagttgatgaatagtgtagtcactttctgacgtgacactagtgag

SEQ ID NO: 41765 - DNA, 509 bp, Arabidopsis thaliana columbia
caatgttaagtaaactgaaacaatgaaatagcctcagtgcattagatatttagatatatcagtgtttatctatatatacagatataataaacttctgcatacataaaaaaacatggattatttggtagagttttcttctttgagtttctttcccatccttctattgggccaattttaggcccatgatagcccaatcttacgcgtgtatgaaaagatttgacgttaaagcaaatttcaaaaaacgacgtgtagttcatctctaaaacgaaacaacggcaagacgttaaaatgcaatcttttttttgtagttgctccttcatcaaccacgtgtcttcaccttactggttcaaccaggaagcgaaatattgagctaaactgataaagctccttcctccgccatagccatttcttcctctctgtagttcacatagggggagagtaagagacagagctcaagcaacagtctcactcgagataaaataaagtcgtgattttgattggacccatga

SEQ ID NO: 41766 - DNA, 551 bp, Arabidopsis thaliana columbia
gagaggagtcgcagatcgcgcgatgaagccctggaggatgtgttattggggaaggatctagtgcggaaagatacaccttactaccgtagattggattgtcttgtataaatgccacgtgtcgctttgaccatatagatatctcttcctctacggttccggataaatgaaatttcatattttggagtcggattagtcttacgaactttttttttttctactttttatatcgaatctaattggtaattaaaaactgtacaaattttttaactgttaactagagctgttagctttataggaatagagcaaactgttataaagaattatacaataaaatatatcacagaggattgtgaaatcaagcctggaatatccaaaaatctaacaattgcctttccatgttcagaattgaatcaattatttaaacgaagcaacaacataaataaaatacaaacatattattatggaggtaagaatatagtaacagggctgtgagttactgatatgcaacaaacctcttcattggccacttacatttctcgcacgtgacaact

SEQ ID NO: 41767 - DNA, 584 bp, Arabidopsis thaliana columbia
ttttacccttgataaagaagaacaaaattcaaaattgaaatcaaaattgaggctaaattagacaaaaattcaatttgtacttctcttttaataataagaggataccaaatcaaatgtttacaaacataactccacacgattgggatagaaattacaggtattacgggcaggaatccaaaattttggatagctaagttcaatccttaaactctcactaatttgcgtaaagatcaattttgggacgattaattgtttattttgggaaattcagatatatcttaaaacgtaatgtgaaatatttaaaaaaatagaaagaaaatatggataatttccactaattttggagaaattgaatacaaaaaataaaaaatacaggaaatacctaaattaaaatataggctcagagcttttctgacccaaactcaaacatatacgggtattacgggtttcgggtcggaccgggatagctcgattgacatgcctactcttgtttcaatgaatcaagagttataaggagttctttgatgtcgagtatcgatagatctcgaaacaaagaattcaaagacttcaaagttttgagaaga

SEQ ID NO: 41768 - DNA, 520 bp, Arabidopsis thaliana columbia
agcgcttttcatgaattgtaatttgtgaatataaaaagttaatttacctcttcgtctctggctttcatctcatgatcatctcccctttgtgcagcttttagttccgcaatgtactcataataaaaaacctccctatcctcgtgcgcaacggatctatatcttggttcatttctcagactatccttcacctgataaaatatggaaatatatcatataggtggtatgaatatgctaaccagttataaatggtgccaatcaaatgatgtatttgataagagataagatacataaaattaatacttgtaacttcaataagtaaatattacaatttcctcaaacaccataagttcctgaaaactttagaaattttccatactctatctctcttggtcgcaaaggatagaaacaaatatgctacataccttggaccaatgtgaatttattgatatgtctctttcccgtagcattgtcttgaaatcagaggcagcagcagcgcgagatttcttgtgccttttgttca

SEQ ID NO: 41769 - DNA, 978 bp, Arabidopsis thaliana columbia
agtagaaatatagctgtacagtaaccagtacatcagaagaacatgtcatggtccttcaataaactttattgctatatgattactcagccaaaaactttactagtaattttgctcataaaccatagttttgttgcggtgcttggttacaaaatgatgattaacgtgctgaaagcgttatccatttcaagttgtaatgccaaaaagtgaccacataatgtgtgtatatgtctttttacagatcatatgcccatttatgctggatcagttctattgggcagaaaagatgtcttggcttggagttgctcctcaaccattgaaaagaaaccacctgcttctagaggactcaaatgatgagaagaacatcacggaagctgcacaagtggtagcgaaacgcatatacgatgcactgtctgcaaagactagggctcgtgccatggaaattgctgaaatattatctcttgaggtaactatttacgatcagtttactattcttctcctcctgatccatgcccccagaatcaaagtatcctttcttcacatggagtttttcttttcttttcgatgtagcgtagtcttttctctttcatagttttgagtaatttctggcaactggtagttttaaggtatccaaaaattaatgatttcaggatggagtcacagaagctgtgagagtgcttagagaagaggtgtgtgtagtttcaggcagcaaccgaatattttgatgagcattgtcatatatacaacgtaaagctcatatcaagtgatggtgatcaatgccctaccgattgttggcatccataaatttaacgtctattaatgttaccaagtctccatctgtcccaatataaaagacgtttaaggattttctcttttattccattttattagttttctctagtttctatgtacaatttatatcattttatgactacttaaattgtacaatatttatttctattagttgaaattttataaatg

SEQ ID NO: 41770 - DNA, 753 bp, Arabidopsis thaliana columbia
aactttgcaaaccacactcatagtcaatcaaagttataagccgcaacattgcagaatctctggtcagtaatagaaaaaaggtctgctttttgcacaccactttcgaaatataaaacaacaagtagatgacttgagataatctaacaagaaaagccatcaacttaagaataaaaagacacaagacaacattaaaaagccatcaacttgcatcaagagaactcaataaaatgcagaacaacatcgccgactcaagtaaagttccaacatttaaagtttttatccaaatgttaatgcaaacagagaatgttttattcaaatttacctcgcatccaagtgtcattctgataagtttttgaacatatagaatcacatctcttcgtcgatcctcggagacaagagttggatgaacctgctctataatttcacgggttgcttcctcaactctcatccacaactccggctgattcaacggagaccgaggcggcggaagaagcggtggtgataatgaggaagaactctcttgttccaaatcatcgatatccgcagccatgaaaaacaacaaaaacctaaaaactaaccaatcgaatcgattgatacaagaacacaccgattgatcaaaccaaggaatcagttcgttgtaaactacgcccaggaaatttaaaatccgattgagttcgaacaatacaagcgagtacaaagaatcgagaaatgtctcaggggaagaagaagaagaaagatgagttttttcttcta

SEQ ID NO: 41771 - DNA, 328 bp, Arabidopsis thaliana columbia
tcgactctaccgagaaaggtgaaaagctagggaaatttcgaatctgggtataacgagcttcaagacaacacaaatgtgtgaccatcaagcatgactcaaccattgatcataaattgaatagctcaaaagtatcatagacatttgaagtccaccaattgtgtaagcatcgcgttccaacaaccacatccaggtgtaagggcacccagctgtcagcaaagtgaaaacaagccttaaagatttctgaagtttcatcgactcatccgagaccatgtggacatgcaacccttgggaaggcagaccacccttctgacatgcaagacatgacgat

SEQ ID NO: 41772 - DNA, 509 bp, Arabidopsis thaliana columbia
acttttcagattatggttcgatctgtatttatttgacatggaggtttatcttacaaaaaaaaagttacattgaggtttttttgcacaaaacccttatgttttcaaaaacaaaatatcgagtgccacgtcatcactacacgagagggctgtattgcggatgacttttgagattgtgatattgacttgtataatttagatttggagagtaatcttgcaaacaagattcacttgaagggttattttgcagaaaacccttttaaaaacaaaaacccatgctacatgggtgttcatctagtagtaatgtgaaattgacatggttaagaattaagttaaattcttacttaaaaaaaacaaaaaacaaatttaataaatttcagagtgatcattgatatgtcaacataattaaaaaagaaaagtgtaaaggaaaaaacaataacaaagatatttgcgaattatgataaaatatagaaatattctgttgtttgagctaggaacaaatcataaaagat

SEQ ID NO: 41773 - DNA, 612 bp, Arabidopsis thaliana columbia
taaccctgaacaatttgacccccaaaatcctgactcatactaaaatgacagagacgatcaagagcataaacgatacacattctcatactttacctctttcattaaacgacgatatgctcgtaatccccaaggttcccggagtatatagcgaacaaaaagaccataaggctgataaaatgactcttgaacaatgtgtttttcttatttcttcctggtggatttctttgctttgaagattctgcggcctgacttatcgccacctccagtgctgcctagtgaaaagctcccacctccttggaactctagactctgtgatgcctggaaaggtgatgcgttctgtaacgtgcttgccattggttggcctccaaactggaaggggtttgccattgatggaggctgcgttgctgctcctccaccgaagcagaagtttggttgaggcatcgagactgctgcttgtccaaacattggggctaccatagatgctctattagcttggtctgtgtcttctgccatactgtcttccatgctcacttgttggttattgttgatacatttccattattaggtgcacaaatgcaaaccaggagttgagttacaacagagactgtgatg

SEQ ID NO: 41774 - DNA, 400 bp, Arabidopsis thaliana columbia
ctagaggattctgccaagaataaaaaataactaaattatgttgatttcttgtatttcattgccacgaggtcttccatctaaaaataggaagaacatacgtgttcaactggataagtatataattcgataattaagaaaatgcacagataacaaaagaaaaaacaacatagtctgatattccgaatgataatttttaatagattagttgaaatgattatcaattttaaaaattagtgaaatgattaccaaatactaccattacgagaaaatatggtctgaataaacatgtgtgtttatgctatgttttggccaacatggtccattagcctgttgatcatcttttatgagattagggagtgaactccaacttacgaggtgctatatgagacctcggcgaata

SEQ ID NO: 41775 - DNA, 402 bp, Arabidopsis thaliana columbia
  unsure (1)..(402): unsure at all n locations
nnnnnnnnnnnnnnnnnnnnnctaaagtcgcagtaaaatcctttggaatgattagacatatgatcatgaaagcgacatgtgtgattaagttagtaaacgtttttataaaggaacctgtctagcattttatgcacaataaaagaatgaatgaatcatcaaaatacaaaagaatgagtaaaattagaagacaaaagttgactttcatcgaacaatcaaaacttttccacacctctcaatagacagagagaagctatgaccaactgtatcccttaggaagcttcagctccatgtagaggttatctaagtcaaaagctctgtttcaccaactctaaataaacatcgtatttttcttctgagtgctactaattcagttcccacttgcatcatcgtcagctagacatt

SEQ ID NO: 41776 - DNA, 692 bp, Arabidopsis thaliana columbia
cctttttatacttaacgagatcttgcactaccagcttggagaacaagtcttggaaacagctatctctcttagacattgaccaaaatacccttaatcatgctctttttattttttcattttaaaattgcaaaagcattccatgaaatatgagttcgatctatcatctatgaattaatatagtttgttgttcgaagaaaatttaataaatgtaagatctcagtgtatcacttaaggtaaatgtgaaaatgaaaccagtttatattaatgttggacattattaacattttcttttactcttccaacattcattcattcttacgtcaaatttaagaaaacactacagtacgacgtaatggcaaattagtaataataccagaaaattcggagtgggttgtttgttgttatatgagagaaggaagtaaacgtgggacacgcgtcgtatgataattggattagtgctctaaagtaagtattctgaggaaaaaatgagaaattgccaccaatacgctacgtcacgtgcttttgtaacgcgttgccttgcttgcttccacaagtcacgtgattatttttttaattctttttcttgttattaaaatcatcatcgttcgttattcatcacgagtttaagaacactggcaaatgaaattgagaatctttatatttactttgactgggcagaaaaagaaggcagg

SEQ ID NO: 41777 - DNA, 178 bp, Arabidopsis thaliana columbia
aggttaacctggtaatgttttgaaaacattagcaggttcttgatgagtccatcagcaagagccatagttatgacaaaacacactttgatttatattacggctgaacagagtcgaattttcattagtcactgaattaagtcctctttgcatcggttcatccatagaaaaagtttcaagt

SEQ ID NO: 41778 - DNA, 452 bp, Arabidopsis thaliana columbia
gtttaatgaacggtccataatggtttatggtccaaaaacttgtccaaatccatgaaggataaccatgtccattggatatgtccatggtcgtccattactgtacaagcttcctgtttgattcaaattcatctcaattcatctcaaccgcatgatagtgttggattctaagagtactaatatcagtgatatgtgcgaagttggagtcccattataaccttttgccgaaaatatataatttttcactaataagaggccctagtaattattgttttgcttggagtcatgaaactcgtaaagccagctctggaaatagctggggttttgaagttaatcaactatcttcatacatcaaatatcaaattttgttttttgaaagaaggttgaacatgcatatataatttcaatgtttattctataaaatgtatttggccaggcaaaaataatgagtacat

SEQ ID NO: 41779 - DNA, 567 bp, Arabidopsis thaliana columbia
cgtatttaaacggtacaacttgcgaggaaaaaaactctaataggttttgtttcgagtcccaagttgggatcaaatgaagggtggtttaaagtccttcttgttaccaagtgtcttttaacttctgaagttttgaattttgctcataggactagtacaacactcacagtcttctatgttttccaaattaaggaaatttaaaaagcacacaacaacactaagaaatatgaatcgattaaaattattatacgcattttgttttctttgtatcagaaaaatgatagtctacatacatatggtaatttggtaaataatacaaaaagaatctacacaaccaagtgaaaaatcaaaaatgtgtctggtcgtggactccgatgggctttttgaggcaaattgaaaactgggccagaaatatgaaaggcccacgtaagtcccgaatataacctaaaaagcacactctctaataacagccagaattagggtttctctttgtcttcagcagtcagtgcgcatccgtaggagaaaagtgtgagaatctgcaccatgggtcgtatgccagtcgagggtttg

SEQ ID NO: 41780 - DNA, 348 bp, Arabidopsis thaliana columbia
gtcagtgtaattttatacacagtgagggaaatcatataactttagtgtcagatgatatgctttgttatgtgttttggctggttgcatctgatcttagtgtcaacatgttgtgttttacacttggtaatcgcagagatatgggacgcacttcgcgctgctgcagaagctgacatatctcttgcacaagcaattgtggacagtgcaggagtcattgttcagaacacagatctcacagtctgctatgacgagagaggtcaaaatctaaatcttgttttacttgcgtcatatgattgttcttcatttccctgactagtactgtttttgcgctgcaggtgctaagtatgagct

SEQ ID NO: 41781 - DNA, 580 bp, Arabidopsis thaliana columbia
taattaaaaaacattatgttttaattttgtttttaaaaaaaaacacaattggtttcttaatctatttaatcatcactaatattgaaacttaagaagtaatgttaaaacaaagtagccctatagggtttttatagaaattaatgtaccgttaagtaatagatttcagacatcattgactatcaaaaactaaattttcggacaaaaagaatttcattactattttaaatttgttgatgttaaagagaatagattggctgaagtgattgatgttaagctgaaaaacaatcacaaccatggaaaagtcacatcagcggcaagactggctagtagttgtgtgaggatgaaaggtaaaaaatggccaacaatggcgaagtggctgtcgaattggagcacattcgctcattagcgtagtcgcgtttttttttgtatgtttttttttgaagaaaagtaaacaggacctagtgtgactgtgtgaggtcattgattcatgctgatcttcaagaccgatcgaagtgtagcaaacaatcatcctgcatgcaggcatctggttccttgagcagtctccatagctttgatttgc

SEQ ID NO: 41782 - DNA, 588 bp, Arabidopsis thaliana columbia
cttctcaaatatcaacaggaaacctcagatgtcagactaatcctctcaagcaggacgatcttgctatctaaaaaaccatagtgccatagagaaataaatgatcgcttaacggacctcgttgatgcagaataagcaattaaaacgtaataatacaaatctgttttcctgcatacctgtgacaaaaatcgaggtagcatgagtttaagaatttgatcaagaacttgtgtcccagtcgcctctattgctcccactgggaagactctaaatgcaaaaggaatctcgatattgacctacaatcgccaagtaagtcagagataccacagcaatgcactgattaactaagcaaaaggaaaaaaaatgaagaacttagctacctcaatgactgcatctgaagtaatttgttgctctgatgagccctcctgagtgctatcacatgatacccggttcaccatagaagctgcatgactagaaaataataaatgttaagccacacaaccatcactaaatttaaataatttcagtacacaaaacttgacaacatggcagtactttcaaaacgggttacaaagtgaagcgtatacagggata

SEQ ID NO: 41783 - DNA, 640 bp, Arabidopsis thaliana columbia
  unsure (1)..(640): unsure at all n locations
gggtatttcagtaattcacaattccccactatgcatcatctaacatcatctgactgcatctcacaccacacacattccccgcatgagtctgagacacgcatctggatactccacccaactcatatgcaaaactctactgacacgcacatcaatttgcatctacggctagttgcatcagtgagatgagcaaacgaacatgaccatatatgacagtcctcttttctttaacaaactaaaaaccagcttgtaaggcaagacaagaatgtaaaacacagaaggttgctcagattcttgctgaaaaggttgacaaatatgaaaacagataagaatgaaacacattatcagacttagtgaatcagtttgcacgttaaggggtttgcaaagtgtgtagaggagaagagtacagtcaattgggtaaacacatgacgatgaaagactgtttgacggacatgttgagcatgtgtantaacttatatcgtgtattgaattttgtctgtagatgaaatacgtattttcatttaagaaatagatttaaatgtnntaaaagcaatctaaaacgttaataagtatattttgttaaaatgaaatgtatatatagatgtttgcagacttttttgagataatgtgaagatttgagtat

SEQ ID NO: 41784 - DNA, 592 bp, Arabidopsis thaliana columbia
tgagtgttgtgggtcaatccatgagataattgagtctgtacattgacaccacttatgtaaacaaaccgtggaccgaagacataatagttaataaaaccataacacacaaaggttaccgtcttgctgcttgtagatattatcaatgctgatgcggtgtgcaagcaatgtcgcattatcatcttcatcaattacataaagattgaatacttccgatcgctgcatgttttagcgtttccatttagctacaagtaattttccagaatgcgcagtgctggcccgcaggagggatccaggaatgagaacaaacctccatataatccatagtaatgtgtccagttcctttatcatcccattgaccatcttcattcaaacgataaaccttcactctctgaacaacaatagtaacaatggcaagtataatcattttcttgtggtttctgaatacatgtaaagatccaattggaaataaactcatgaatctcaaagattttatcaaatagtatcagttatctcctctcctacactaccaacaaaacgcaaatccagtgaatccatctttgagatctctaaaaacccatcactagtgaattga

SEQ ID NO: 41785 - DNA, 491 bp, Arabidopsis thaliana columbia
tgaatttgaaggttaaacaatatgacggtactattacaaactgctatattacatgtcatatgattcatataaccgtgcctaaagggttaaaaaaaagaaaggcttttgtctcgagcttccaaaatatgtaatgtttttagggctcccaaaaaataatttataatatatcacaatggtttttcacgattttttagcctttataaattgcatatctaaattacggcttggtattcaggtatgctggtcgggtttgggtaataatcggtcgaatacggatatgtcggatatgctattctaggacccaatagggtaaatagaaaatctcggttcggattcggttcggatccaatcggtttcagatcggtttatatccaaatacccgaaattttacccaatacccgaatttgtatccaaataatcgaaaattttacccaaatacccgaagtttctagttataagaatacatgactatatatccaaagtttgaaacg

SEQ ID NO: 41786 - DNA, 575 bp, Arabidopsis thaliana columbia
atcgaaactattctataaaatagaattgtttttttgttacaagaacactatgaataaagtaagttcccgaccatatatttgatgtgacttgattacatattaatgtatggtccactcatcgtctcgctaatgtttcttaatcataacgtttttctttctggcatctgtttacacaaagattaataactttttaaccttaattattttctcctaaagcttctgtttattaccctaatcactctttccgagattcggatttccctaaatcgatatcatgtctcctaaatgtaatcttaagatgataatattattaatttcccaaaaaatgtcttttagattaaacaaagaacaacactgtgccggagaagaatcttgttttgtcacacttgttgttccgttaaaagaaattcagattcgaataaacttgacctctttcaaccaaaaaatatatgaactttttaatcctttttgttcattttcgagttgactttggactagcttagatatatatcagaaaaaataaaatcattttcgaaaattgggaaggagaagaagaataaacctcaaatcttgat

SEQ ID NO: 41787 - DNA, 544 bp, Arabidopsis thaliana columbia
aggtcaacagaatggtgaacaccacaaaaagccagatattttggaaacctgaattagaagcagacacttatgcaagtaaataacccaaccatttcttactcaagtcaacaatatggttttttcaccacaatttatctaacattaaacctaatacaagtttccaaacattaaaattccattaggtgaaaatgaagaattcgaagaaaagaagtgcaaaatgcgaaacaaagaagcacctcagacaaatatatttcaaatgctttaaaattttctccactatttcttaatggattcgttacaagttttacagcacactttgtattgttacgcaggtaacaacattatccacccatctccaatttatttattactgattcttgatcaatagatatcatcaataaaaacatgaaacgctaaaatttgatatatacttaccacggtcacataggtactttatgcaatttacactgacggacagattaaacaaaataagacgaagctctacttaatgataaggataaatcactcctccaccaattatatt

SEQ ID NO: 41788 - DNA, 441 bp, Arabidopsis thaliana columbia
tatcagcttaataactacacaaatacacatgtatacatgcatatatatacaaaaccagaactaaaattctctcataaaatctattaaatttgttgcttgggttccgtatatagtatcttaaggtttagtattctgtaattcaaaaataattataagttttcttgaaaaagaaacaagaaattgatgtggactgaaaaatgaagaaggaagaggctcgatggagaagaagaagaggaatagaagacaagcgcaaatttatcaatttatagggtccaaagttctatttttcaaagcccaaaccgaaaatacctaaattcaaaatttttgccaaaaaagtttttgttttgacaataacccacgttagttatatcctttgcaaccaaaaatatatagtaacccgtagaacaagccatttgcttgttgtaattatttaaataactg

SEQ ID NO: 41789 - DNA, 586 bp, Arabidopsis thaliana columbia
acgtttaaactactatacttgagagatctggtccgtaagatttgcgtcccctggacgttaatctccaccatgcaaatgacctctactaaaaagacatacataacagcaaagaaccaaacaagccatagaggggcaacgatgagagtgaagatgggagaaacaatggagatgagcatgagagctgcaagagccccaaaaagatggctgatgtgtccaacgaagtgatggatcggagcttggtttctattgagctttacttcagtgactcggaggacgacgtagatcagaataaagacacagaaagagaggatagtggcttgacgatctgcagtattggttgaagctgaggaattctctgtgatctgcagcaaaccgatggctccgccgttgataacagcgataagcttgtgtactgcggaggaatgatcagtgttttcatcgccggagttagaaattagggtactgtgtaccggactaccggaggaagacatctatattgttggtgggttttttttcttcggatctcgaagtttttgtatttataggggcaaaagaggaaacaacgaggaagcttcgagcccagttt

SEQ ID NO: 41790 - DNA, 544 bp, Arabidopsis thaliana columbia
atggctatgtttgggtctcttttgaagatatggtttaccgattctacctgctagcaagaacaaagtgaactatgatgaaacccattctaacctgggacataaaaacctcaaacccattgacatccgtagtttcctttgctggtggaatctctgtaagcacattatttgaagtctctgcaacagatgccacattgttaaacgccttaccaccagtttctactgactgagaggcatccttcaaggacttgttttattctacaagacttgtgtctctagcactgtcagtccaaacaagagatgaagcctcatcatcgacatcttctttatttgcataatcattttcattgttagaaacctcagtcttagatgccacactgttacaacttatagtacccgtataaaaagcatcctctatggcattcagaattattcaaacagttttagtatagaaattaagtcggttttagtatttgatcatcagttgttttggttttttccctaaagttgaagtaaataaccaaattgttaacctgaacaaagtaaa

SEQ ID NO: 41791 - DNA, 453 bp, Arabidopsis thaliana columbia
gaggataaaaaaattaagataaaacctggtaacactaaaattctactatattatataaaggtaccaatccaaactgtgaaagagcacttacaagaggagcgcaaagaagtcaggatctgaaaaaattctggactacgagttaccataattcatgacacataaaacaagaatagatctaaacacttcataaaattaaatttagacggaaccatcggagcatccataggtaagaagtgatcctcttatagtagatttcctatagttgacagtaagactgatacaattatatgagatttcccttgaaagtaagaaagcaacgtaagttcactatctaagcttttcaatatacatcaaagaaagcatgtaactatcatctctcgtctagatcttattagggaaacattcatccgaagaaccacaaaagggaatacttatcagtcaaaattgaacata

SEQ ID NO: 41792 - DNA, 566 bp, Arabidopsis thaliana columbia
cctaataccaaaacgaatcgtttcgtctttaaaacgactgttcggcgattccgacgccatcccatctgagtcccggagaaatcgatcgtagctctctgtgcccttcgcttaaaaaaatatcgcttctctcgagaggggaaggaaagttcatttctttttgtccaattctttcaacttctcgttccaatcccctcaattctccgtttcaccgaacgcacttcgaacccttaattgctttttgcgggtcaagtttcgattcgagcgttttagggtttcgtatctgaatcggtcgacaagataaacccttttgtgggggtttcctctagatttcgaaaacagaggtatgttaaacgtttctgccccttttgaatctcgttcgagcaattattgagttaggcgttcgatgatgaacattgtgatagctaatctgcgaattgagcttgagttaggccgttatggttcttacctaattcaacacccttactgttagttttaggcacggaagtcttaaatagggtttagggaatggttaacagaggttaggatttagggtttcgaaaaagtgt

SEQ ID NO: 41793 - DNA, 574 bp, Arabidopsis thaliana columbia
tcagcgccatctatcaagctttcctgcatatacaacataaagacattaataaaggagctataccaagttaccaaccaaagtaacagtaccaagtataagattgttgccatgaaagctataaatttgtgagatttcagaaattcacaaaccaatactggatttcataaaaatgtagtcactcacataacaattgcaacaggatcatataactatcaaactattcctcgatacaaagttagcaattttaatcgtcaaaagcaaacttagaactgaagaaaaaaaactagctacagttactaatgaacaagtgaaagaaacttaacccgagtatcatctagttcaacagctgaagaagaagctccattggaattaacatcaatagattcgagaatctcctttaaccagagcctatcagaaactttagatatgaaatctccattttcttctctgtctttcatgaacatttgcaacacatcctcctccactagctcactcactaaaaacaaagcaaaagacatgaaattttcccaaagagcgaacatttgagtagtaaggtcaatgtagagagagagat

SEQ ID NO: 41794 - DNA, 1910 bp, Arabidopsis thaliana columbia
ctactggatggctctgtgctcgatatggattatcatcaatttctgacgaaactacagattcatcttcttgaacagagtcggcttgcacatgatcgaccccacgactttcagacgggccactttctgctatatgactattttctaaccggtccttcagatattgatctcctctatcggattggaaatcagctagaccattgcgtacttctgattctgctggtgctactgataaagaagatgtactaggagccagcggttctcaatcgacggccattcatctttaacaggggcctgatgatttgcactaactttgtgttcatgatttatctcagaacccatattgacattttgctttgttgtcttgttctgtggtctacccatcttcacaacttcagccatagacctctggcctggagctccaaaccatgcagtttgatgtccagaagctgactgtgatgatgatattccatctcccaaggtaacaggaggcaatttgttttccgtagcaacgggttcactgcaaaggataagtaggatacatgagaaacttgtacaacccaaatagaaacatgtacaaaaacataatccaagggaaaaaaatgtcaaattaaaaaggctaaaaaaaagagaaatgcggaatgaaaaagttaaggtcaacatggagcacacattcaactgtaatgcatgatcttgacaaaatgaccatacctaacctcatcatacaactccaaaccagtatgtaagttttcattgcttctagttagtaaaacagaaactgtacatgataagattctctagttattggctcaaatctttcacaaactagagacttgcaatgaaccagtaaaactaattgtgatattctactacctacctaaggtataggtcatataattactttaaacaatccgtcacagttttcgtatctagtgatatcccttaagcacgtcataaactgggaattctgaaacactactaaatggatcctactaatacaatgagtaaccatatgagtaaaatatgaaatcaattaattgattcaatacgcagacagaacttccactaaatatttcaactgcatcccaattcccatctaaaaaaaataaagaatcgctcaaggggaaacctgtgtggtgtttgataggtgttcgccactccagaagcagaagaccaagaacttgtataaccctgcgttccactttctttcttatttgtagattttccctggaagtttccagaatctgaacaacggaagcacataagcatgaatcttacggttaaaactaaatatatttgtgtatacaagagatcatgcttataccagtagagctgaaatgggtagatccacttcgtccggcgtaacgagcagaaccacctctagcaccacggttgtaggtgttattagcaccacgcggccgagaatctgatatatccctagtctgaatagacaaaaaaaaacttttaaaatcaccaaaattctagtaaattaaaacgataactagctaaaactagaattcatttcactccaacaaaacatcgaaagtcaggtactacataataactagctagacctagacttcatttgattccagcaaaacatctagagtcaggtacagcatgatgattgatgacagctagtaataaaaaatatcattgccagatgtgtcaacatagaaattgtgtactagaaagagaagttgattgtatcacacatggttgaagcatgtaatgatacagagattgtgccataagtttgcacataaaacgccaacactggacaccaaaagcacaaaacaaaacacccctgggtctattatccataagaatacgatttgtaacatggactcacctctttcttcttttctttcttgctctttacctcgtgaaatggatctgaataaggaaaaaac

SEQ ID NO: 41795 - DNA, 411 bp, Arabidopsis thaliana
agaggatcccctcgatttatttaagtaaactatgtcgtcgcttgtgttttaaagactttcttcacaatactctcatattaccaaacccaattacacagcacttgattccagtttctaaaatcttcgtctgatattaaaacaataccagaaaaaatctccgtatcataatttgacaagttacaacccctaacgcaagagtgggtagatgaagtaagaacccttgaattggcggggcggccggtcatgaacggtggtggcaacacaagtacaggctgtgggaggcgaagatggcagttgtgatggacaaggcagcattgggggaggaccaagtagtcacggcgatggtggtggcctatgcggtgcctgtaagttcctgagcaggaattctgtgccggcatgcaaatttgcacc

SEQ ID NO: 41796 - DNA, 526 bp, Arabidopsis thaliana columbia
gaatatctatgtttctttgtatttaaatcaaacttccaaaagaatataattatttttcttttctcttcttcgattccatgcatgttttctcaaaaaagcaattaaacagaatatgtatatatgcatgcactccttctttatttttttctttttgtcatcttggagctttacatagcgttcatattattttacattcttctattagagcttttctactaatctttattgatatccatttcttaacttgttcagattcacacgtacacattttttgcaataatcaaatcaaaaagcttttttcacgcgtctctacagttttagcagggtacactgatatagtacatgattttctatatcgaaaattacaatagctagaaaaatatataatttttttaaaaatatgcaaaacttctgcttgacgttaaattttgttttgtcatttgtcttatgttcacacagacgaaaaagcttctataaaaccgtcaaaatagctcaccctaaaacctaattatatatccctctttca

SEQ ID NO: 41797 - DNA, 483 bp, Arabidopsis thaliana columbia
tcatcaatgtcggctgcatatcaatgttaccaggattcaaacaatgataatctttaaatttatatagatttgtatgaactgagagagagagagagagatcacctgtgttatctttggaagattggcgaatcttctacccttatgcagagcttccacaagttctttcctttcttgaagatagtctttacacattaccttgcaacaaatcctcacaacatcagaatacaaatactcttttcaaacaaactactcttagtctagcttacatcaaagagtgatgcctttgaaactaaactaaacaactcaacaccataataatcacacgaacattttgtctgtaaaactcagaagtatgtggtgggcccatttaaatgacagaatacacaaaaggactaaacttattgatactaagcttcatcggaagattatttcattccatccctaatcaacaataaacgagcctatatatgaaggaatccatta

SEQ ID NO: 41798 - DNA, 527 bp, Arabidopsis thaliana columbia
taccaataaatagagagaatgtagttttaacctcgcaagtctcaactgatgatccgactcgtccaaagcatgtttatagatttaactagtttagctaccattcaaatttgatttttaggttaccgtccatttttataggaccaattctataagaagtggtttagatatcgggtagattttcattttccgacttcatgcatgatttagttcttaaaacttgcatgtttggcttctactaagacaaccctcgtttttctgacgactcacgtggtcaaacggtgcacaaaggtcacgtgaggcacgtgcgttctactgtttaaacgcctcttctcttttgcttcttttttgccaatttgaaagagataagaatacaaattaaaaagatgtttcttccactttcctcatcgccgttctatgctcactttctttggtcggattccaattacattgttaactattagtggtcacataattttttcatgacgtggatcaacttctctttttacatgtctatctccttaattagt

SEQ ID NO: 41799 - DNA, 643 bp, Arabidopsis thaliana columbia
  unsure (1)..(643): unsure at all n locations
aatacatcttttgtcttatcttttctttctccatttcttcttctttttagggtcccctgccatttctgtcatgttttaatcatcacgagttgtttcttttttgtcctcacaagtttacatttcccttagatttctaaaggctactcacacatacagtatatcaaaacctgccatacttaattccatattgattcacaatttattttaactgatttgtcaaatgacaacattatcattaaatcatagaacttactccatatagctttataacaacaaatgtatctgacaactttgttgtatgacaaagcacaacataaaacaaatcttattgctactacaacttaatccctacttcctcccagattcatatgtctgagatgagactttatttaaaagcttctgaggccaaaagatacccacttcccggctaagtaaaatgtgaacataaagaaaacacagaagatgcaccaatggagaaatggtccactgaaacgctgaccttacaaccgtgagctggcttgtttccgggagcgctctgtaatacaaatggaagaacaatcaggaatctgagttacattgagtcaactatgagaggtaactgggcaagattagatagatggtccgctagtatnngtgatatgta

SEQ ID NO: 41800 - DNA, 219 bp, Arabidopsis thaliana columbia
ccaaaagagagacttaagtaattatattattaatataaataacttgagcgatgtgattgatgcgagagtgataatagatgcatggataaagtgcatcttctgggacaatacttaagagatttcctgacagataggtttaagcaattcttagactctgatatacactaattcgctttttcatctctattagttagaactaagctaacatagatcaattaa

SEQ ID NO: 41801 - DNA, 536 bp, Arabidopsis thaliana columbia
gaatgcttttggtttgcaaggcaaatcaaagtcatcttttatttgttcataatcatataaaagcttggtgcttttgtggcagagttcaatgatacttcaactggaaatagaatagtaaaacaattatgagaaagcaaaaggaccccatgtcacctctaagaagaaactcttgtcaaaagtgttcttctctattttggtcaatctttttctttttgaaacaaaagtcaaatcatttttaagcaaactataagtgtttttttcgcaacatatgtaccgaccctgtggtctaatttggcgtagataacatgtgtaacactcaaccagttaaatgttatgacctaattaaagatgacgttttagaatcaaattatctttaatggacaatcgttttatacttggctctcaattaagaagaaatctatctgttttataaccaaccaggctataatacaaagcaaatcatgttttggtccatcttacagaagatacaagatatacaaaacgaaaagagacataaatcacctcccaaataggtg

SEQ ID NO: 41802 - DNA, 694 bp, Arabidopsis thaliana columbia
agaactataacaagtgaaattaagcttgagatcgacttcaaaattgactaatcaagtgaaacaaacggtggaaccaattcaattcgaaactccaaaacccctaaaatcgcgtcactaattgaagtaaagtctcgagatttctaatgggaacgaagagtaggaaaaaaccctagattcgattttgacccacaaactaaacccagaaaacgaaagaggagaatgaggaagattttgaaatcgaacctgttcggacacgggattcgagctccttgtgatgaaggagcttcttccggtaatcagtcaccgccgcggtacggcgtctagcagcgtcgtctccgtcgctcatcttttacagatctcagaatttgacactgaagcaatttatcaactttttttctgttttaaagtaattttgttttcttgaggaatgggttaagttagctatgaattaagggcttttggggctatttgggtccggctgggtggatccgttatcattcacttcatcagcttctgttcaattccaaaaattaaaataaagaataaaaaattaattaaagaaacctatcttcttaagattaaaaaatacgtccagaaatattttaatttgtagaaacaagaaataaaaactttattgcaatttgttctgcctaaattctgattttttgaaaattttaattatttttaattttta

SEQ ID NO: 41803 - DNA, 560 bp, Arabidopsis thaliana columbia
  unsure (1)..(560): unsure at all n locations
gattattcttcttcaaaatccaaccattttgnggaatactttttagggtcctactttttaatcaaaaaaggctgattgcaatataacgatcgttgattatttggtaactggtagggtaggcacccaaccatgtccattagcttctataatttcttatatcttaaagtatgaaaagactaattaacgtaaaggaaaacaaacaattctaaataatctctagttgctagataaaagagatttatacacataatatatgagtcctaccacaataacttcatataagaaaaaaaataaaaggggttcaaaaaagagaattagtttgtctatttgaatatttgatgattattttccacttctactccatagaacaggaagctcccgtccaccttctccggcgaaactcacctgcttctgcacatgtttaatttaatatcattaaaaaaaattaatatcattacttctttgactcttaattattaatttataatatatgattaaccagacaaaccgataaatcatttgatgatcgagaggatcttgatcattggtaagatatgata

SEQ ID NO: 41804 - DNA, 1011 bp, Arabidopsis thaliana columbia
cctaagtcctaaaccaaacttaaatttaaagcagctctctctagcctctactctaacgtagacaaactgcatttaacaagacatgaacaagcatgagatcaacaaagtactgatgcccaatctcgccgtctatccaccgcactttcgccggaggtcttccatagtgaacgccatcgttacaccggttatcaaaatgccacggatacgtcatgtcaaagttatcaatcacacttgagaccaatcctaaccccttcattttctctaaaaacaccccattgtacacttccatcttgctcgggttaaacgcaagcttcctcgcgtaaccgcccgtcgctatcgtgttcctgaaaatcactttcggaggtcgcaatccccgggctttcaccgagtcgaaaacgttcctccagaacgcagccgcggtttctgctcctttcgtaaatgctctaaggttagaccagtgaataccgtcgtgtagacccgagttaacgatcatcacgtccggtacaccggtctcttcgacgaaatagcttttaagcaattctctaaagctatcatcttcaagtgaatcaagacctagatagttttgagtctcgttccaatgtccattgaagatactcgtgatcctaactgtttccgatgagttcttcggattcgagaacttcaaatcaaacctcctaggaacagcaccaatctccggatgacccaagacaaagttcaacaagtttctgatcgaatcaacatgattagagtcaccccagaagaaaatccatttgttcttcaaacaatcccaagctgattcactagagaatagcttaaacgagcaatgactcgagtaaacccaaccattgctttctaacgccgataaagctccgtcgcaccatggttcccggcaacggtaaccatctggtaagcaacggtaacgtccatcattgctgatttcacactcgtcgttcttaccaagcctaatccaccggccagaccaaacatctctgtcgaaatcggacaattcac

SEQ ID NO: 41805 - DNA, 622 bp, Arabidopsis thaliana columbia
  unsure (1)..(622): unsure at all n locations
tccgtgtagatacacatatagaagatgaagattgggtttggctggatttgcttgattggatgaatagaaacgtatcgatcatctcatcgtcgccaacaacaacacatctccgatttggtcattgtctaaggttgaaactcttgggttctctatgtagtatcctcttagggtttagtattcttccattaaaaagcaattaattgtttattgggttcattggaacattgtcgttagtggcagatatattgtgaatcatagcaaatggattcatcaaagaaggagatagtattggatttaaagggtattttcgttagtttatctcccaaaaatgcctttttctataagcccatgataaaactgtctaatttttaatttttaatttaaaaagtgtccatttctgtaatagcccttttttttctgttttgctgaaccccaaacaaataaaaattgtgcctcctccgacaaaaataaaataaaaaaaagggcgccttagcttgtgggcctctagtggttgactgtctgccttcctagttaagccgacaggataagccatgctttggatggttggttgtgcaatgaatgataaaaagaaatagaagaattggaaaatgtnaacataagt

SEQ ID NO: 41806 - DNA, 118 bp, Arabidopsis thaliana columbia
  unsure (1)..(118): unsure at all n locations
cacccgcaagtgatcttccagggcgtgcaccagctngatgggcagcgacctgggccctgagtgggcgcggatgaaaaacgacagagcaagatggtcttcatcgggattgacctgccgc

SEQ ID NO: 41807 - DNA, 521 bp, Arabidopsis thaliana columbia
tcggtcatcataaaaatcattaataactattggtttatttttgtaaaacaagcaatcatgtcgatgattaaagggccatatatttaatcttgaatcaggaatgacaattcatatattaaactaaatgtcacgggccgtatatacgaatacgtacgaacctccgtgataacctatcgcttgcgtaaggtactaaggtaaaataataggtggtgcaattttagtctcaaaagacacatatcacgtaaccatgatttgcgacgagatatatgcattttgattatcaaaactatataataatttgaaaaactacatttctctctgccaagaaatgcacacaacaactccgaagtcaacacagacacacaaatacatacgaacacaaaaatgaattaaagtcaaaagctcgctagttctctttttattatattgttatacatctcatctagtatataatcaccaaccatcttcttcttccattttcttcatcttcataatctcatttcctctacgagtttctagcg

SEQ ID NO: 41808 - DNA, 524 bp, Arabidopsis thaliana columbia
gagagatagatctcatttactagcataaaagatgaagctaagtttctactgcaatatgattttacataacaaataaacccatgcatcaaagtcaaaagcttcaatcgaaacattacatttaccgcaactttgcacgatttgggaataaagaagagttaaactgacctcagttcctctttctaatcgagagatttcgcaaattgaatctgtacgagtataattgattcactagttgagctaatcgtcttgttctgttgcagattcttgagcgaaagaatcttaagaactcacacgtacggtcttcagcaatcccttcgatgatgtgactacaggaccttctatctctcttgtatctctctttctctctgttacagattaattttacaggagaaagaagaagaagatgatcaacaagaaagaagacgactctcaactctgtaacggatcaattagtttgtttatattactaactgatatgatctggtacgggcccttccacagtaactgaagcccacgcgcgtgta

SEQ ID NO: 41809 - DNA, 583 bp, Arabidopsis thaliana columbia
tgcgtatctgcaatgaacaaaagaataaataaaccgtagaaacataacttaaacagatcgttatttaaactaggaataccttcaggtagtgattggatccggaaagcatcctcggcaaatggtaaacgcacagggattgctggacttccagggcttgtacactgtttcttcgacagatgatgcattggccatactagaattctcacttttgtcggaagttcacacagaagatctccatatctaaggctcaccacgaacttgctataatccaaaacatatctggttttttaaaaggttataaaaacaaaattttaagtggcaacatggccacatcaatatctagtgtagcagcagttaagaggaagtatatggatctatgaaattgctaaccagtcacaatcatccatagaaaattcaatcatgtggtaaggaagactgtgataaatctcactgatctgatgtccaaagagctctttgataagccggacctataatgaaattcaggagaagcatcctggttaacttgtgaaatttaagaggttcctacactttagacttttggtgcatatttcccgacagtggt

SEQ ID NO: 41810 - DNA, 637 bp, Arabidopsis thaliana columbia
  unsure (1)..(637): unsure at all n locations
tacatagttggtatagtaactccattcaaaatctagtcaaatgattcttgtattcaaaataatattattttgccatttggttttgcagattataaatccattatcagcgtagtcagaaagatgaggtgcgtttcatatttctctcttcttgatatatttctgacactaaacacggtatctttgagatgtttccagatagaggcagtagtgatgagaagatatgggaaagaagctttcagaatgttcagatacttatcacaggaagggcgttttgttgagaccgataaggttaatgactgttctttatgattcatatagaaacatgttaagtcataatgatttcttaacttgatgattttcctctgtgtgtaagattgatgatgctgagctgagtgaaaagaaagatagattggaattcattttaaagatgtggaaagacggatacttagatatggaggtattgacagtttggaaactaaatcattattagaagtataacgaattggttgttacgagattcattgttgttatnttatgtctatttttgtagaaattggcggtanagctcngggtatgtatacatgtttctgttgtggaaggtaaaaagttgattgtgaaactcaaatgttggatgaga

SEQ ID NO: 41811 - DNA, 498 bp, Arabidopsis thaliana columbia
agtaaagagcgatttgtgagattgacatgcatctccaagtgattgatcaattttgtgtgttgtatgtaaagcggcatttgataggaggagatatatgaatgtggtggtgcaaagagccaggcatcctgagctacgcgactatattcactctgctgcttctggacttcttccttttattgataaggtctcttcttcttctttttgtcctgctttaagtgtaacatgatgtatatgtgggagtgctgcatttcttatgcatgatcactgaaacagggtcttgttgagagagtagcagtcgtgtttttctagcgaggataatgttcctgtagagaggttcatcttcaagatcacgattaaaccgtcttgcgctgctttagtagaagagggtcatctggagtttgcgcttaggtccttcttaatcaagctttccgtctcaaaatccctagtcaaacctcttgccctaagtagatacatctctagctcactcaccctctgtac

SEQ ID NO: 41812 - DNA, 588 bp, Arabidopsis thaliana columbia
ctagccctcatctttttgactagtgttcaagacagcgttagagggacctgcaagatatattcaaaggttggtgagcagaaatcgatcaatgcgaaaacaaaaactggatgcagagacacgaaagattctagttaataatcagaaaaaccgaaactgcttaatctcatcagagtaaatgatccaagggcaagtaaattctaaattcagctgttgagagttgagacctattggtaaataccagcacataggtggaatgatcggttttacgcagtaactcgcacaacttgatcttgtaagatgcagattcaaatgtgccaaggcaagaaaactaaaaaacacaagactggttccatttcctctggattaactaaaatagttcttcatgcagataacaaaactaaccgagtgaactatctgtatatagagcttgtgaggatatcacctgaaacaaagatctctggtatagatctaactaaacaaccaccagtgaactagattgagaagcaaaacaagtgagtaatatagagaaagcaaaatgctgaacctgatgagtacttagaatccattatctgaaaagatgctgatgag

SEQ ID NO: 41813 - DNA, 553 bp, Arabidopsis thaliana columbia
taaatgctgaacgcaatgcttttgagtgctgagaatctttttggtctgattcaaaaatgatgtattagtactctgaattcaatcttaacttctgcaacgaatcaatgtattaatttataggagatccggataaaattatggatatatgcacgctacttctttcatttttaattaggtaaatggttataactttattttatatatcaattaaatgattttggtatgagattactagtacactttctttgcaaatgttttaaacacgacaagacaaaaatattacaagcatattttggtaaaaaatatcataagctttcatatcaaaatcattagttatgatgttagatttttttttttttttttttaacactacaaaaagctctggtcttaatatgttagaaattttagtccaaaccagcctacagaggatttagctaaacaattcccaagcaccttttaagtgttaaccgaaataacgtaatatgatgttaaaggttacataaaaacaaaactaaagaattttcatatgaaaagttaacgtacgtgtcttagt

SEQ ID NO: 41814 - DNA, 584 bp, Arabidopsis thaliana columbia
agaagttgtcctagtgtgggagtcgttaacaaaagtgtggccaaaagaagacacctgatggagttagtcagtctatgagtattggtaccaatgaaggaacaagccaacgaccaagccaaccatcacagaattctcattttgactaaggtaatatagggttttttcaagataattgtgcttgtcggttgctctagttaatcatgtttttttttgggattttggcagaatttaagtggaatgaagaaaagtaacgagacggaagaatgtaggcttttgtttaagtctgaagagattgaaagtttttgttataagctcaagtgaactcttaagttgtgtccgaattaaatgataattattcgaaacttggtattgctatttaaggtttattttggtctattttaaacaatttcgatctcattccaatttcaagtgatgaaaatactaccagacaatctcataaatattacaagttcaagacaagacaatacaatctcataatataacataaatattactagatactcgtagcttaatatatagaatttagtgggttttgttccaagccttagatgcttatggttttg

SEQ ID NO: 41815 - DNA, 430 bp, Arabidopsis thaliana columbia
gcctggaacctgtttgtgggatctgcctactgccgtataatcctgggttaacgtatattcactgtacaaaatgcgaaagtaatgaattattcactcaacgacaactgtttccaagtgtaatttcttgaaggcgtcttaaatgttatattatctaatatctgaatctcaaatgcagagtggttccacactgaagctgttaagctcaaagattcacaaattcctgaagttggtgctttcaaatgttgcaaatgtcgacgtatacgatcccctgattgcccttacatggatcccaaactcaaggaacagaagcagatcaaaagaatagtcttcacgaaccagaaacagatgcaaggaaattctaggttggattctgattctgaaagaatgtctgaacaaaaagactcgagaccttctactccgttacctgcca

SEQ ID NO: 41816 - DNA, 129 bp, Arabidopsis thaliana columbia
acttcgtagtcaaccgcgaagacgccgtggtcatgcgtcatgcgccggagcaggcggtcagtttcggtctcgatgcaccgggtgccgggcactacggattgatcgagcacggcggcgcgcggtggctcg

SEQ ID NO: 41817 - DNA, 599 bp, Arabidopsis thaliana columbia
cattgttctgtgtttctctccatctctgatatctttctcacgactcattagccttactcggtttctcctaagtccaaaggtaatgtctcatgacacgttttagcatgcgcaaatggatcaatttattataaaatatgcataagatttttatataggttcaaatggtccttatatattgtttcttttaatttcttaatttttttcggaatatcaattaataccggttgatattacgacaaaaaaaaaaagagatcgacaaaaaaagtcaataaaatttaacacactaatcgaaatatacttcatctgacatacctggttgaataagcctgtttcatcatctaatgataatttacattctaaatttcataaataagagacacataatgttaccattgacatatatacaaaacaagttgtaaccatgaacccaatttaccagaacatgttgtagatggaagaatcttttgtgcttctattgctctacggacacacattatcatctgggtgtttataagaggtgttagctttgcagtatctgctgatgagcactgcgtatatggaagaattcgggttggttttgaggtgagcgagaaggtgtt

SEQ ID NO: 41818 - DNA, 639 bp, Arabidopsis thaliana columbia
cccgtcatgtaaaaatctgcaaaagttttatcatttgattagaaaaaaataaaataaaccttcacaaatcagtaaactattactccgtattaattaatgggcggagatgaggctttaattccttactttgagcccaattatgaggctaataacaatgtgtgagcacgtgtcactcttcagcttcacatgattatgtattgggcctgtaataagcccaaacttcgtaagctggtcaaaaacaacgacgaagagaaaaagctccgccgcagaatctgagatcggatctttagagagagagagaaagatgcagagggacgtgtcgagctgcaacacttacaactatggagacgctctctattgggacgctcgttacgtgcaagacgcgctttctttcgactggtaccaatgttactcttctctccgcccttttgtccgcagcttcgtctctacttcttcacgagtcctcatggttggctgtggaactcccgtaattctctctccttttgccaatagatttgaagaagtctgtaccagtgattgaatttgacttgagcagcaaccaaatttaatacactgtgattgccctgttcttctctttggtgtagtgatgtcagaggatatggtgaaggatgggtatga

SEQ ID NO: 41819 - DNA, 545 bp, Arabidopsis thaliana columbia
cctttgtctactcattaaatttgattgaactcataaattctttcatgagtttttttgatataggaataataaaattaaaatcaagctgatatgctttttcttaaatatttaaccaagtaaattgtttatttaatttaaattattataatacggaaataaatttcttacttcaaaagtttttttaaaaatttagtttacattaaaatttcaagataaaaaatacatggtttatgtttaaccgaatttaaagtgaagtaatattaagtaaaaaaaaagatatcttaactgtatattgtagatttactcagaaaagatatgaaattatcttaattaagagataactcattactatttatactcagcaacacaagcttacacgtgtcaacttgacatcagagaaaacgcagagaaggcgaacactaacagagaacgtggagagacgcaacaaagcctggatcaatcatcatcttcatcaatttccagattcagattccaaatctccgaagcttaacgaaaacaatggcggcagaacctaccctaagaat

SEQ ID NO: 41820 - DNA, 552 bp, Arabidopsis thaliana columbia
gttcatcactaaaatgctaatgtcatctttcacaattgtttcttcctcaagagtgtcaaaattcaaactgcgagatggaccttttactgactggagaaggccatcttcttcatagttgattcctttatcatcagattcgttaccaatatcatctttctcaattgcatcttcctcaaaagtatcaaaattcagactgcgagatggaccccttgctagactatttgttgatctaagagagttatcatcaccaccctctggagtcaactcaatacatcttttagatagctgcaacgtcggtgtagcactcatgagccggattggcgtggacaagtctttggagggagtggataaatctttgactggggtttcaactattcttgattctatgtgtgacaaagtagaatcaggaatgactttgttaacatcttgttcttcttgctctatctcctccatatgaacatcaaaccctccaacttcaagtttaggttccctaagcctacgcttactatacctgaataactatccctttgaggagaattgaatggttcagga

SEQ ID NO: 41821 - DNA, 525 bp, Arabidopsis thaliana columbia
tactagtttgacaacgagaccaaagaatacatattacaaatccaaatccaaaatgtcataaagttgactaaaaaatagtaattgtataataattaaatcaaacctttcatgaaagcttttaacaactgtcattatttctcaaagctttatcaacccccacttataataattaatttttaaaagattttcttaaataacttgtacaaatatagtatcaaattttaaacctatgttaagtactacaataacacgctttcctctgtattattaaatcattaatacgtatatgtgacgagaccaaaagtacaaaaagtccaaagtacaaaactctcaatccccaaaaagtctcaaactttgacaagaaaaaaacagtaaacagagaataaaatgaaaaaatcaaacctttgcatcaagcttgcaactttccttttcaacatctgtcttcattgcctcttaagccccaattatgacaacaaacctcacgcgtactgtcttcttcgtcttgttcttcttcatctaccatga

SEQ ID NO: 41822 - DNA, 522 bp, Arabidopsis thaliana columbia
ttcctcaactactaactaactattcttttactcctttagcaaatcccccattcatcacaaactcttccaaactattgctttcattgataaaaatacatggaattgctaaaatggcaaaatccctcattgatgctaaggttttaccaataatggaatctcacggaatcacgatttatattccccttttttgtaaattatattcttcatttcatttttgtgcaatgcttaccattcataataatacaaccaaacaaccaaccttctgtaggaggaattgaaaatcgttttggtttttcttattggcacatgtatgaagtgatcaacatacaccctcaaaactaactaacaatctaaaaccattcactcccgctaacataatataaacaaaagactatataacaactttgaagctttcctctttacctttgggaactctctattgccatgtaacttccctggaagtctcaccgccgctatcatcagtcatatctgatcttgtatagctgattcctgctccttgaa

SEQ ID NO: 41823 - DNA, 527 bp, Arabidopsis thaliana columbia
gagacaggaggcgtgttagttactaataattgaaaggatgtcgttgaatagtcttctgagttcttaattacgtttcaatacaaaagccatgtatcttcactagttttgatattctattattctgagttcttaattatgtttcaatacaatttgttcaatgtataggtattctaaaaaactagaacaccacgtacatgaaatctaaccagtctagtgtcagtatcaacaactttgttttcgttcacctaatatgctcatgttaaacaattggagattctaattgcaaatcaagataatcattatctaaaaaaaccaagaattttgaaatatatgtgatattattgttactagtcagttgtgtagttatctgtctgttatatccaaaataggtgacatttgtccatatgcgttgctactgatgtttactaactatatgatatcgagttgaataagtattccaataactttgtttttaagtttcgaagctaagatatatatctatagaggaataactaaccggagcattg

SEQ ID NO: 41824 - DNA, 672 bp, Arabidopsis thaliana columbia
  unsure (1)..(672): unsure at all n locations
ttgtcatttggattgtataaatggtttgataaacgaagtctaacattagtatgtgttagtcttctaaattcaaataataatcggagttttggtctcttggacgatgcttcacagtgatattcaaaagtttaccgttatcacccaccaactagagaagccaaattaggtcttttaccaactgtagggtaaagaactgtcttcatgtaatcattataaccaccaccatcttgttatgctttgtttcttcttcaaattgcagctttcaatatacaacccggtttacgttctggtttacactttagacgtttcaatttacaaaattgggccgattgacagatattggacctggcccatcaatctaaaaatgcgctattttgaatcaaagacctatttaaatcttccgacgacgactccgttcacatagcagaaacagtggcgacaaaccctatcacggagccaacccgcattttcctctagctttcgaccgcctctcgctctctcgcccaccggttcgtctctgacattttgtgcttgatttggccgtacaaaattctgattgctagttcatgagattcctttttgacaggtgacataaagatggatggtagcttgtatggtgagtgtggtacatatatggacctgagatgatcntgcagagatagtgatgatagt

SEQ ID NO: 41825 - DNA, 522 bp, Arabidopsis thaliana columbia
tattcggtttctgcatgtgcttttctttatactgagtttttagactggtagatgaatggttttaattgggttttttttttttttaattggtttgtgatcatttttcttaaagtgcttcctcaactaagaagcacaacatcaatggaacttggttgtgatgcacggggatactctcgagctggttatgataaagtgacgtggtactgtgccatccttgttggaagacaaagcgttgaactcaataagatgagggaagtgagtaaaatcttttttcaacatcgtccatttttatctgaagttcttgtctccttcctgattagagttttgtctaatcttacaagtttgtagaccatgtgcagggtacaagatgctttgtcaaagtatgacgattcagatgacgcttccaaggatccatcaataacgccagcagcttctgcacacaaaagcaagcgactctcatttgcgtggctcgacggagaagcgcagaatgtaagtatactggccagaacaccattatttaca

SEQ ID NO: 41826 - DNA, 477 bp, Arabidopsis thaliana columbia
tcgagtatgatttcgagtgatagaaacttcaattacttcttggtgccttcagggacgacgaatcgctcatatcgttcgggagcattcatggcttaatcggagatttcaagcttcgctctctttttcgccgcagagagacagtcaagagttcttcagtttctttctggcaaacaaaatataatacgacgtcgtttttcataaaagaaaaaagatcgaatctccacgtgttatattattattggtgtatacagtttgggtcggatcgggccgataaaacataatatttccgtttaaggacctctaggtttatattatttacacaataaaggacgagtgatttaattcagaaacctaacaaaaaattcaggagaaaaagaaaagaagtcagatccctaaaaatcgaacccgaaagcgtaaaacttgaaaaccgactatggcctttcacgtagcttgtccaattacatggtatgttttttt

SEQ ID NO: 41827 - DNA, 572 bp, Arabidopsis thaliana columbia
cgctcgttatgatttacaattttcattttctacttctgtaaaatatatgaagatggatataaaaagaaaactcttgagtgactcacaataacgttgagattaatgactgcgtttataaagatctttttaaaatgatgtttacacttcttctttctttttttcacaattttacacttctaatgtaggaatcatatttgttttgtctgattaaatatagtttaatatatgtaaattaagtaagaacatcaatgaacattaaacatagaaaatattaacaaagagcagttaactatcaaggggaccaatttgattaaagaaattattttttgttcccattagaaattggcaataacgttgaggttgttctctcaaattaaaaaaaaaatattttctattttgttggtgtgctcttaaattccccattgttacattgaggttgcctctaaattttaaaatattttattttttttgttggtgtgccttaaatccccattcacaacaaacaaaaaaagagactaccaaaaaataattttataattaattttgtttcttcctcctacaagtatttactt

SEQ ID NO: 41828 - DNA, 730 bp, Arabidopsis thaliana columbia
cagtgatgattgatgaagtgcggtccattttatgaaaaatgacgtaacttaaaatatcacatggaaaagtacatataaagcttaattagtttaccaacattagttaaatagttaattaactccatttttgattcgctttttccataggtgtttgattccactaagtcgtagtatccgtgtagtaggaattggttataaaacgatcaaatatattaaaagtaaaaaagtttaccaacattttttaaatactaattcttcttccttaattagaaagcacagcaaaattgtttgaataagagttttgaaaccctcgttcatgtctataaataccggaactaacttcacactaaacatatacaaaatcaaacctttcattttacatttgttttctttttcattatctttgtaagctaagcgatggaaacccaaacacacgttttgtttctcttcctactcatcactctattgttaaacaccaccaacaaaacccaagcaagactacataaaaaccctagttcctcctcatcttcctctcttgtcattaccttgaccaaatcaagtgtttctcttcccacaccaaagtctcaaacccaagaaaggatcaagaagccattatcatcagtagatgttgtaatggaacccttgagagaagtgagagatggttatttgataacattaaacattggaacacctccacaagcagttcaagtgtacttggacacaggaagtg

SEQ ID NO: 41829 - DNA, 536 bp, Arabidopsis thaliana columbia
  unsure (1)..(536): unsure at all n locations
agtcgacatcccttgtgtttatcacatattgtgcattggatattggaagtattgcataaagcaaagaaatagtttttagtataaggattggaaaaaacattgtttgtatctaaaatggggtcaagaatgtagaagatggagtttcttgggtgtttttcttggagttatactagaaagaagtcgggcaagtgatatttacgcgtgggcgatttctctctcaaatttttttctcttataatcacaatctcttgttccgtcaataagttttttcgttgactccagcgacgaagaaacccattgggacatggtgcttcaaccgtgatccgctacatcttctcggcaattcaatctattcaaaatcaagggagcagtggagggcaaatgcggcattaggggagtgcaagaggagcaattgcacaggatccaaaaattatttgatcaaaattaaagggtaaaataaaaaaatttatcaaatttgaggtcaaaaagataattttgactanatatgagggccataataaaattttaactaaatg

SEQ ID NO: 41830 - DNA, 630 bp, Arabidopsis thaliana columbia
ctttatattactccattgattgattcaaacaagattcaaacttttaactaaatttgatcatttcatagtttgaaagtaaaaccttccgggcatggatgcatcaaatgtgaaggagacaagaagtcgattcggattctccgggtcgggtatgagcgttaaagtcttcttcttcagattaacatcgttacgaatcgtgacggctttctggtggacgtacgtaggaggcggcagtatagggtatctaccgccgtgaaacaaaggatgaggtagttggtaactgttgggaggatagtgatgcaaatggttgaaattgtacggtagcatcggcggctcagttactggcggaggaaggcagttacctggatactggtcaacgtagttagggttagggttcagatatggtggcacggcggcgaatacaaatctgttcggtgggagttcaagaggagccgtttccatcgccggaggaatattgctcctctgccttctcccgcagcagaagatcaaactgatcagattcccatgatcggaaaaagaaaaaaggtgaggtttttcggtgattcagttgataaggagtagaacgaagtaggttttatgatcattgagaaaggggagtaatgagattggaga

SEQ ID NO: 41831 - DNA, 834 bp, Arabidopsis thaliana columbia
tgaaaaactatttaacgaataccattatggatttatggtggatattttacgtgaactctttattttatttttttacgtgaactctttattttattgttttacgtgaactctttagtttagttacataaaaaaaagattgcgaatgtaacgtaaacatttgacgtgaacgttggacaacagaagaaactatataatgtaaaaacctaataacgacttttaatgtattatacttatcggtttatcatatcactaaagacgaaaacgtcgaaaaagatgattggctaaatggttgaaccaaactaaaccggttgtttaacttaccggtttggttcgattactcaatcgaatcggatcgtgcacacaccaaactctcttcaccagcttctgacacagactttgcaactctcatgacggatctttgcttctaattcactatttctcggctagatctgtggcaaaaccagaacctcaatgtttctagttcctcgttaatcgaatcatggtggagaatttgtttccttctcgatttcaatttcatcttcagagacttgacccgaagcgtcgtcttacttctctccttgcttctcacaaaacactcttcacatttctctggatcactgcctttggttccgtctttctatggcagcgaacggcttacatcgaaggcggctctggaactggtcctgtcggaggaaagttcacaattttcggtaagatcaaaccgattcagccaattccccgattgagacgtgtggtgtttgatttgaaggattttggaggtgttggagatgggttacgcttaacactgaagcattcgagagagctgtgatttca

SEQ ID NO: 41832 - DNA, 2062 bp, Arabidopsis thaliana
caaacccgttccccaccatgagacaacccagtccgccatactcgctaaactctccctcacggtcgctaagatccaatccattgagatccgcattaaatccgcgataactgaaggtggaacgaatctctcaacctcgctagaccgcacatcatcttcgccgagctccgcttccggctcctcaagctcgcctcccaaacgaatctcgccaactcgtcgagcatactctaagccgagctccacacttaacggaattgtcgcaaaggatagctcacggtgatcaaagtaatctgcaaaccaaacttcttctatgacgagctcgcttctccctatgtcgatctctccacaagcctcgatctgctcaactcattgagatctaaagccgagctcatcgcctagcatgaaaacgacccacccagtccctaaacccaacttaccaacgtcactaatcctctttggcagatcaacatggctaagcgtgacaagccttgtgttggtttcctgaacccgaatttccgcgacgacggatacgctcagctctaagcgcgcacatcaaaatcaaaaaaaaaaaaaaaaaaaagaacgctcgcctgccgagctcatttgctatatagacaacaattggtttaatcccttctacgtgatacatatgcaacttcttctaaacgttattttttttaacgcgcacacaagttactattccaagtctaacttttacgagtaacacttgtcatccccacatcgtctccctggcgaggagttcgattctaaaacgcgttcccacatggatgcagtggtgctcgttagataggtctaaaaaacctgttttcgaagaaataatccacatctttacttaagtaagctaaaacttacacttaaagatttaaagccgacccagattcgaactaaataagctgatagtaagcagaacaatataagccgagtccgctcgcacgttctcgcttacctagaggcatccgcagggtaagccggacaccagcgtcgcacctacaaagtacgacgagtcagtctcgcatacttcatacgtaagccttgtgattcgagttcaacgtatacaggataagtcaagggacgccttgccccataatacgtttcgaaaccaagcttaaacgccaaggaaaacctcgcagaatataagccgaggataaccttgcacaaaaaactcaagaacaagcttcaagtcatcactaaattctccgtctagctcatcattgtcacttcgtctctaagacaaactcctattgcgtatttagataggataagccgagctgcagatcgcaccgaatctaaatttcacagcataagccaagcccaaccttgcattcataatctgaagtcaagcttagtctcgctcccaaataacaaacaatatcaagctgaatcaaactaccagttacggttaagccaagctcgatctcgcacatacaaagatcatttcctaaaacgcatgacaaagacacgatccacgacataacttaaagtcgtgccgatctccccatgcctagaagaagatccgcaaaatcaacatcatcactcagtcttacgtcatctcctcgctcgccaaaacaagtttgtcgcactcacggccataacaatccattgtaatgccaaccaagtttggtaccacgcaaaatcaatcaacattcacactgatcgatttcgacgattgtgctaagcggacttacttcctcgctactcgacacggatccacgaaaacctaatgtcaatctccataaatttatatccacaaagcaagtgttcccagccaagcgttccttgcagagcattactcaccaagcgttctttattaacaaaactatcaaacgttcctagctcaaaaacctccaacgttcaatccttgcctaaccagcggagcgttacttaccaagcgttcatcgcagaaccaacaagcgtttctagctctaaaatacggagcgttcagtcctcagcgaactacaaagcattcccatccccgaagcaaacgattgagcgttcttcactaagctacaaagtaatcctcatcaaatcgccgaactaatctcca

SEQ ID NO: 41833 - DNA, 639 bp, Arabidopsis thaliana columbia
ccattgttcagtcgagagtacagacttttccgctagagtgaaaaaacatattgaagaacctattaaagatatagaagtttctagcgtttcacctactgaaaactgttatcaatcagggagagaggctataccctcagttactcccagtactcctctcacggcccttagatacacaacatcagctgagaaacctgcaagtaaaactactggctcatcaacagtaaattcgaagcgttcttcgtcctggggaagaggcaacgtaagttttccattgtctggcatgaaaagtcgaattctgttgtcctagtctctggagctgacttgctatgcatttattaagtatttataggatttttttttgtaatttttgtctgtccttgtaactctttgatcaccactagacgaaattagttctcctgatctctatcgttgtcaggtcatgatatgaatttcccttcagttttcttaatgccatgcttattggtgctataggctagatgagctgttccacttgcataatcctataagaaaactaaccatcagcgtcttaggaaaattagatgttactggaagtccatctatttggaataaattacttagtacaagttagttgcatgtatgatgaagtaaatagtgtag

SEQ ID NO: 41834 - DNA, 378 bp, Arabidopsis thaliana columbia
gcttgtgtttgtatgctttaacagtgaagataagaggaagagagttttgttgaagagagagtgtttttttttttccgccgaagttgcattatgtgaggtctgagtttagtgccagctttggccatttaatcttttatgtaggactatttcatcttcagtatataacacgcaccaaagggaatgaaacttttaactcttaatttctttagttttctcgtatataactgaaccaaagaaactatcaatagtataaacataccaaaccgacattaaaacggtttcaaattctaaatcattggggaattgagagaaatatacattgtttaacggtgtatgaactgtcgaaatctgctcttagtttgttgggtttaactatgg

SEQ ID NO: 41835 - DNA, 588 bp, Arabidopsis thaliana columbia
gagagaaatgtttgtatgaagaacaaacctgtccgttttggattcgttgaatccacctaggaacgaaagatgattaaagagaatggaaagtaagaacgatattattgtagacgaagagtagaggaagaagaagagtaagaaccctagcaatggagctgaactcttgtatttggtgaagtagaattctgacaccgtcgttaactctgtattcaacaaattccacacatttcaaaaaagaaccaaaacaacaacaaaagatcaaattttttgaatttcttacctgattcagaagaagagatggcatccttgtatgccaaaccatcgttaagctcaggccatggcaagccgatacgttgcggcggcggcgacatcgttaccggttggtcggcctcagttctggtttctcaaatccggtaaataaaaccaaacagaaattgaagtgaaggagactttaataaaccaaacctgggatagaccaatcacatccgagtcaaactcagttattcaaatcttatttatacaactttcaagagtttttatatcttttcctaatttcaagagttattaactttaactcttttagttttt

SEQ ID NO: 41836 - DNA, 143 bp, Arabidopsis thaliana columbia
gaaaaggttaatactttctcaagtgtataatttgctttccttctcttgataacaaataaagaacaaaaatttactttaactagagattgtgaatatgcttctgcaaatgatatagactttaatcaagcgtcttctgagttgca

SEQ ID NO: 41837 - DNA, 517 bp, Arabidopsis thaliana columbia
tttgtacttcataatccatttctattgtaacaactaacaaatttaagttataaattttttcctaatgataatttgtctggtatgtttccagactttttatttgcaaatgtaaaaagaaaatatttgattttttcttgcttcattacatcgaattttttttgtttgttctttaccaatataaatacaaataccctttgaaagctcagctttcaaaactggaacacaaaaattgaaattaagtggaaatgaagaagaggaagattcatcatagcgacgacgaagaggacgacactttctactatcgctattcctccgtcgcggcaccaccaccttcgaaccctaaacaccaaccttcttcctccgccaaatcatcagctcccggcggcggatctggcggcttagctccttcaaaatcaacactctacgtctccaatctcgatttctccctcaccaattccgacatccacactctattctccactttcggcaaggtcgcgagagtcactgttctcaaaga

SEQ ID NO: 41838 - DNA, 213 bp, Arabidopsis thaliana columbia
aatcgtggaatagaatatggatgatatttataattgtaatgtaaatgtttcaagacatacagaaaagtataggaaactttgggagatatgaggaagaagactgattgacttttgaaggtagaaaaagctatacaagaatgagtgatgatgattggtgtgtgtgtgtgtgtgaccaccatttccttctctttttctctctttcaatccataccg

SEQ ID NO: 41839 - DNA, 515 bp, Arabidopsis thaliana columbia
tgaatgatagtatagataatgaaaaatatttggtcgagattataactgtacgtacggtcgacgaacatatgactcggcaatgtatagtagcatacgttaactacgttgcgaactcgatgattgtctacagaacaaaacgtataaaatatgttcgaatctttcaacggcgaatactttcagcaaacaaaacgtttttattaaattataaggtacaaatacacaaatatatctccagattctgtgacgtcgcatgtgttatacaaaataaatgaataattactttagaatatatgattgcgacaaaaacaattccaagattttatccaaatttatttttcaactttaggatggttgattggttatatgggcgtttacacgtaaacatgtctctaaatgtaaatttcacgtgatttaaaacaattttctgatgatttaagataaactcggtttttcagcgtaaatttcacgtgatctagaaggatgtacggtggcgtctagtcctggtttggactatg

SEQ ID NO: 41840 - DNA, 582 bp, Arabidopsis thaliana columbia
aatcgactgccgattgtctggtccaccaacatacccagctccaatacaacatatcttcaccatctttcacttcttctacatatataaatcaataaagtcaagaacattattcataatcaaaaccaaacatagatcaaaaagaatcaatcattataagcaaaacagagccagatcttaaatcaaaacattactaaacaagatatcattaacgatctaatcacaaatctagcttcatttcataacagcactataaataacggatccattggttttgaatcagaattatgaacttagaaaaagccgatctgagatcgagaatcaccgatcgatgattcagaacgaagatcaggagataattgacgataaatttacgagaaaattagcgatagagatagagatttgcattagcgagattattaccttgtgagattcagacagagatgagcgagtgaaatttgtctgagggacaatgatgatgatcttaagaccaaagtttcgttttataacaagtagatttccgattttgccctgaccgaccagagagagcttaaacaaagcgaactgcaggtcggtgatggtgga

SEQ ID NO: 41841 - DNA, 592 bp, Arabidopsis thaliana columbia
catatgagtttaaacatcagatcatgagttctaatactaacttaataatgcaataagttctataaaatgttttatcacagaaagataaaacaaaatgaagatattaagtatctgcctacttcgaataaagtggaagatgatatatactaaggtctctcgaacaaaatggatggtaattagaggtcttgaatatattaactctatatataaactaatgagactacattacaattatccaccaagtggagtttgcattagtaaacctatatattaactaatgatatagttattaatctatcaaattaatctgctcatcaatagtgatgatgacgataaaatgagctgtaattggtaacgttgcaccatcacgataaatattaccaatttaccatgctattcatggcactagttatactatattgtggtagaaagttgatccaaaatagaagaattgactgtacgaaattgtatactaccacttttgtacaataatcatctgagactgtatatagtatacttacgtattatagtttaagcctagtttgaaattttagatttccttcactataccaacatatttactaatcaaatt

SEQ ID NO: 41842 - DNA, 486 bp, Arabidopsis thaliana columbia
taatctctaatcgatgtgggatgagtttcacaatgacctgattcaattttttatttaccatggagatctttgggttggattagggctgggcgaaaaacccggacctgatacccaacccgatacccgaaccgaaaaaaccgggttggggcgggttagggttttaagatattactttattgggtagagttttagaaaacccatgggtatcgggtcggtctgggtattatccgttacccaaatagggtacccgaaaacccgaacataaatttaatatcatgaatattaattatatttaatcttaagtataatgtacttatctaaaattaaaattataaatctaaatatatcactccattttagatctagatactcaaaacaactatactatttataaattgtttgttatgtgtatcgtgtaatatattccaatctaattaaattgattatcgaattacgactatttaagggtttttttggtcccgctat

SEQ ID NO: 41843 - DNA, 330 bp, Arabidopsis thaliana columbia
tctagtaacgtccgctagtgtgctctagctctacagcaattcaggcttccatagaacatatataaactgcagtatggagacatatgttctatcacaacttacctaacataactatagtgtcacacctagatctttcttctacctttagtatccatctcctgtcttcatagtcctttacactcctctccttctgctatacacctctccaatggtaagatctctcattcactaactttcgctgcatctctctatctttctctgtgcataccgactctaaagtctctcatcattggcggctcgatcactagggtcgttgtaacgtcaatactt

SEQ ID NO: 41844 - DNA, 585 bp, Arabidopsis thaliana columbia
agaggtagtcaagccacaagaatgtcttagtaagaccaaaatcacacaaagataccaatttaacgatcaaatcaaaaccatgatcataagccctatatatataagtcattatcgaaccaaatgtgatacaacacaaacaacgagtaaaagacatacaacaacttttacgcgacaaacagaaaaaaagattgtttcttttgttcactttgaatacatacaaaaaagagaaagaaatgaagaaacaattaatacttggagtgattttgctcggactattcgtgattttcttgaacaccacacaagtcgaagccgctaggccgcttcaagccgacagtgagatccgattcgtgttccagttgctgcaaaggggccaggttatagggtcaggtccgaacggttgcacaaacatcccaggaggttctggcacttgtcgcccgtgagcggtcacgtgagtctgggtttacattctttaaattttttcaagcctaatgtaataaacacaatattgttttgtgtattggttctattttgacgcagttgtagcacatgtgaaagcaaatgtatgtattcattaacttggtaaat

SEQ ID NO: 41845 - DNA, 536 bp, Arabidopsis thaliana columbia
atctaaaagttatataaatcaggattataatatcaaaaaaattatattattaaagtttggtttaaatttttttattaacttacatgatcaatgggatccaaaatcagtttacctctcacattgttttggtgctgaaaagaaatatatagatgggtttttaaaagaaacttaggcccatttaggttgcaaacaaaataactcaggcccatttagatttacaaaaggctcaaccactaaatttttatacctcacaagcatagtggtctctctccgtcattcgctctttactcggtcaacgaaccgtttgaagacgaacacgtgtcacgttttagtaggacttacgagaagcgcaacgagtgctatataaatgccgttaagcgtcgtaacggttttctaattccccgagagtaaccaacaacccaaagcgatcaaagaacttttcccgctagagagagagagagaagaagaagaagaagaaaagttacgcagagagactgaaagaagagtgatcgatcggagaaagatggcgatggaag

SEQ ID NO: 41846 - DNA, 136 bp, Arabidopsis thaliana columbia
tttattcattaaatcaacatttcttttataaaaaaagtatgcatcatttatctcatcgaactgatttctatacatgctaaacttatccgtgtttaatttttgcagtagcgaaaagctccttgagcattgtgattga

SEQ ID NO: 41847 - DNA, 606 bp, Arabidopsis thaliana columbia
  unsure (1)..(606): unsure at all n locations
gtttcttcccctactattgccgacactatatttatatgttttggtgaatttatagttcacccaacattttatctttcaaatttataaattttatagagcattttgacactacctttaaatttcaatatggaaaatcatatataagttataaccattgaaacaaaaacttcagaccaagtttatatcatcaacaataccatcatagttaaaaatttggaattgagaatggttgtagcaaaactgttttaactttgaatttttttaagataaaactatactgttattttatataattttgcagtttataatggcatttattgcagttgatgtctaaacaaactttccaatcaaacatacttcagaaacctgtctcatgacgttgtaataataataatatagcaaaatcaagaaacaacataattcactaaaaataaagtaagtaaaagaaagaaagaaagagatagtggctcaagtctcaaactcaatcaaaagcaccaaaccaaagttaccaaacttctcatcaccaaaagagagaagaagaagaaagaaacagagaatcgccatggcagagaaagagaagaaacaanaaagaagaagaagaaagag

SEQ ID NO: 41848 - DNA, 527 bp, Arabidopsis thaliana columbia
taatgtaatgattacgtgtggataatatgatgattatatttcgatatttaattattattatcttaagcgtatacatgacagggtgtactaataataatttaaagaaagaagatatccccgaagatatgttcgcaataatttatggttcggatagcataaaaaaatatgaacacggacagatggagcttacaaaaaatatcaacagtggatgtattgaagccttggtttttttaagtgaagaggaccccgagaaatatagcgattatataaatgattatcataaaattgcagaggggtatcgttttcttgatgataacagaacattcatgaataaagattcaattgaattattggtaagagggttaaatgttaaaaaggatgtcctctgctcaagagtaaagtttgaaagctttcagcaccttaaaaacaaattccaataatagaccaaacaaatgccaaggtaatgcaattcagttattgcagaaacatatctttatctatcatcctcacattagatggggatgatt

SEQ ID NO: 41849 - DNA, 459 bp, Arabidopsis thaliana columbia
gaaatgttcataggaagcaattggtggaagagaagggtcaagttgcagggagatgaagaagagtatgtagagcttaaaaacaaaaaaggctttcacttggtttttgtttttttaggaacatggctgcttccaaatttttaaaaatttagatttatgttaatcttagatctgaaaaattactaaaaaaaaagacacttatgtgttgttgacggagatggtttatttcattaactgttttccactacacatgtttcatcgattcttctgagtttttatcttgttttttctttttcttttgaagggtgtgagtattagatctatctttgtcgactatttggaatggatgtagtttttaccagtgagattgtacaaaagaaaaaaagaagaacagagtgtgagtagttcagaaaatttaagttccagttgttttttaaaattgaagcaacgcatatgtctatt

SEQ ID NO: 41850 - DNA, 394 bp, Arabidopsis thaliana columbia
tataacatagtttagacttcggtagaaaatctcctggtattctcgttatattggtaagttactatttgaggtagtcttagaatccttcaaattacattacaggctgttaaagaaatagttccacgttcatacatcgcaaccaataacactaagggcgaactagcgcatgatatattcacggttcagcacgtcaaacttacgcaaagactgagagatatggatgaaagaaaccgcgacacatgtatgctcggagcaacgctgatagcaactgtggtctttgcagccaccattactataccaggtggaaatgatgattcaggtgacaaagcagatacgttgggcttccccaattttagatagagattattgttcgatacattcaccttatcagatt

SEQ ID NO: 41851 - DNA, 584 bp, Arabidopsis thaliana columbia
tcctcctccaccgtcgttggctggtgaagaatcttcagctcctccgcgagctcgcaatgataatccgaggacaagttccggtggtttcgatccggagcactggagcgaggtgctaaagccttgaaagagattaaccattcctcttacgcgaaaaaggtcttgaacctttttctctctttctatagttagaaattttgtgaaatcgaatcatgcttaggtttaggaaaggctacagaagaatgtttcaattaggttataatttgtatgatgaacctaaaagtgattgaaaatggtagcatctgtgttggatctcagaattgttctatttctgtttgtttatcaatcgtggttaagctcacagttgttgtgtatttggttctggtaggtttttgaaagtattaagcagcaagaagagacaaagcaaactgagtttgcaacgaaggcgcaagagtttaaagctatgcaagcccaagctgaaactgtgagatcatctaactttaagtttcttaaccaatatttggatgtctgtttatatattcttgaacaattggtgttacaactaatggctacgtaatagaaatgag

SEQ ID NO: 41852 - DNA, 453 bp, Arabidopsis thaliana columbia
tttttaatatgatctttgaagaaaagtcaggtttccaatgacttgaacaagagaaaaacttttacaaattggttgtttttgttactccatcttcgttgtctaatggtgctaacctaaacttgagaatcttgtggagtttggcaacaggttcaactgtcttcttctgtggcgtctggttatcaccttgtgcaaacagacaaatgaagaaaccgcaaccccaaatcagcatcttgaagggacagaataattacttgaaacaataacatgtgtttccatgtttgataatatagaggataagtgaaactaacctttgtcagagaaagcaaggcatgtaccaatcgttgctatatattctcctacctgagagatcatcaaatctaacacgattaagaatggtttgagcaaaaagagtaactgaacttggaaaattgtactagttgccagtaagagcat

SEQ ID NO: 41853 - DNA, 525 bp, Arabidopsis thaliana columbia
catactagaggatcccccaagtgttattgtaataacaagaatcaaattttggtcaatatacaacgatatataccaatttcctatatattgtttttggacaaagccaacgatatataccatttgatccagtcatccagttatcatcactaaaatctactatagttggtaatggttattcttatcgtaatttacaaataaagaaacagaatcacaaggatttcattggaggattttttccttgaggcatgagtcaaatatttatacataaacaaattgaaagtttgtttcattgtcttgaaagaaaaagatggcgaaacgagattatttttgtttcgttgtcttgtttttgagttcagtctcagcagtcatagatgatcctcaaaataaacaagtgagttctcataacttaaaattatcgagttttttttcttttttcttttattctatgtaatatatcttgtttctctctagtatacaatccatcctacatgattataaatatttgtaattcatgaaggtgtatgt

SEQ ID NO: 41854 - DNA, 537 bp, Arabidopsis thaliana columbia
cctgaaatattttttttttttgtcaacaatttgaatatatgtgttcgttaaatcagtttttatatatttcgataaatggttttatcgattaaatcactgatttcaaagatactattcacactattagcaagcgaatataaaatatcatgcaaatagaagtttagtcattaacaaaaataaaagaggtcttgttttaatcttcatatttgtacctcaaaatgcatcatttagatgaaactactaaacttatatgaaactattagaaatcaacctgcgatataccacatgataatattttatacaaaaaattgagttatatttattttgtcactattgtttatttgaagtgtttaagtataatatttgaacttaatacaaaaaatgacactaatgtttaatttcagggaatatggttatatggtgagataagtttaagtcgttattaatacgagatgatatacaataggtgaaatcatagatttaacaagcaaaatacaattatcgaccgaaacttcgtaattctatttttattgttat

SEQ ID NO: 41855 - DNA, 477 bp, Arabidopsis thaliana columbia
tacaagcgatatattgaaataaataaatagcaatagtttgaatatggaatgtgataatcactgatttgaaagttttctaggatatgataaccatgtgcgcatttttggtcaaattcgaatgacatatctttgctaatatgcgtataaatggttaaattattgtttgagaatattttgaatggaacatatttgtaatcaaccgtattaaaaatagatcatgcatgtcgaaagctagagaaaaagtctggtttaaagacgtagaattagaattggtcttagtatactaaaaccggactaaaccaacactagatttatgtagctcatagacatttcctttaagaccccgtttatagcaaccacaatgcttaagaggattcactctcttaactaaaccaaactgcttctatttcatcagcaacaacgacgccctttaaccccaaacgttgaagtaccacttgtgatggtttcctagtacat

SEQ ID NO: 41856 - DNA, 628 bp, Arabidopsis thaliana columbia
gttattaaaatatcgttattaacattatctttatcaacattaccacttccaggatgttgtgtatgtgatttgctaagctcggctaagtagtttatcaccacgtcaagtttgacaaacgataagaaaatttttagggtgacacactttttaacgagtaataaacaagtaggttgacacacttactaaacaggaccgtgagatacaaaatgtaacaacgtgcttaatatagctgctaccaatgacaatatcgatatgttaccggataataagacgatagattcggtaatataaatcacgatggaaacacgaaaacgttaacgcgagaaggtattgtcagttatctgacacatattaacgactaacacgctttttggattcggtaatgcgataacacagacaatatacagagttatacccctatcgttactaacattatctttctcaacattaacacttccagggtgttgttcatgtggtttgcttagatcggtaagtagtttacacgacgtcgagtttggcaaatgacaagataatttgtaggttgacatctaattaacgagtaataacaaggcataatatttgacatacgaaagttggatgggtccgatatattacatttgggacagat

SEQ ID NO: 41857 - DNA, 517 bp, Arabidopsis thaliana columbia
aaacccaattttcttcgttccttcctcacaaattcactttccacaattaatctatctctctctttatctccctcacacctcagccttctgtgttcgtctttatctctctcccaaatctcaatttttgactcgtctgcttttgtttatataaacacttctcttcttcttcaatctccacacacaccacacaaaaccacctaccttcttcgatttctccagaaatcctactttcaagttcatactcattgaagaagctaaatgtaaaatcaattacgatcctcgtcgcatttttgttagtttctcgatcgagatcggagtatttaatctccttagattttgcaatttctactcgagattcgttgtttttgcttgcatccgtttgattatacaaccgaatcgatcttcgcgattttggatgattctatttcgaatcagactctttctcaagctgattcaatgttcagtttccagatctggattctagacttatttcttcattctaatttcacatgcagat

SEQ ID NO: 41858 - DNA, 143 bp, Arabidopsis thaliana columbia
attgaatttgttatcttcgttctatccattttacaccatttatcttactcgttttgttttgtctttttataaaacttactcggtttttttgataaacctaactcctttggttagtagttaatttccttcgttttgcttttcca

SEQ ID NO: 41859 - DNA, 517 bp, Arabidopsis thaliana columbia
taaagtcggattggttaatcttttttttttttttgggttttaatgttatggttatcttttcaagtttctattatgttagtataatatatatcctgaattatcttcaatattatatttgttctttttgtgatttctgactttctgtcatattttaatcacatcacttaattccaaacctattagaaaactcgtaaccagccacattgggtagtggcttcacttcacatggagccagagaacaagtgaactagtaaccgaccaaacacacaaacacttttattaatctgacgctgatttttattcaatcaaaactaaaattttaaaataaaaatcgcagagaagcaaacagacaaattatttacaaaacgttgcgtcgttctcattaatctttaacacttctttttggcgttgaatctttcgtccgtcctcttaactttaagacaaaaccgtcccaaccaatattttctctcgtcaaggattccatcagcccgagataaggacgtcagcgtccaccaag

SEQ ID NO: 41860 - DNA, 411 bp, Arabidopsis thaliana columbia
ctgtccactcttaagagttcgaaaagtgacacaagagaaattccaagcatggtgtatacatagaaagaaaggttaaaacctaagctcttatggaatactcttgggtttttatgaaatctgatgataattgataacgatagtttttcaaccactaaaagcaagtgaacacatctattaacttggattgaacattttagaacattctctataaaagagaaagatggtaaggttttttccatataagagaatagtgaattaagcaatatcttttgctttttggcaaaaaaaaaaacaaaaaacaatatcttttgcatagttaaaaaacaggccatacccaaattaaaaacaagagccaaaaaaatggaaaattgggttagaagccaaaaccatgtagcacactttggcatggtt

SEQ ID NO: 41861 - DNA, 549 bp, Arabidopsis thaliana columbia
gagtgtttcaggggacttgatcagtgtggtgaatgactgtaaaaggatcaacagtgagacagcatccggagaatatgaacctcagattatcaatggctctggagatccacaccatcatggaggaggacgaagcaaaccgaaaattgcagttgttggtggtggtccatctggtttgtttgctgctcttgtacttgcagagttcggtgcagatgtgacattgattgaaagagggcaagcagtagaagaaaggggacgtgatataggcgctttggtagttcgcaagattttggatatggagagtaatttctgctttggcgaggtttaaaaaccttctcttcactcttttgctagttttctttgttattgtcaaagtcatattttagcacttatgcatcgcagggtggtgcaggtacttggagtgatggaaagcttgttactcgaataggaaagaatagtgccaccgttctagcggttagtattttgagactgccaaatgttaaattgaagcacttcatgtttgagtacaaaaggaaaaattgtgacactgcg

SEQ ID NO: 41862 - DNA, 527 bp, Arabidopsis thaliana columbia
cttctattgtattgttgtaatactaaacaacttcctcttgacatcaatttcttctattgtagctacaattgatacaactcccataagtctttgtagttcttgattccactcttgacattcttcatttgcataatgcaactcaagcagtatactatcttcatgttcttccaccttttggtcgcttccattacgactcatatttttgacttccatagctattactccttccgatgtgggaccatggtactatgctgtgtctatgagcagcatggtactatgctctatcttaacttctccattattttcttgcaacttctttggactcttcaactctttcatcttcttttcttagctcttggttcatcctcctcatttaaaggttcacttcatcttcctcctacttgttgtgatattgacctcactcttagtttattaccctcctccttgacatgttgtaaactccctcccctttgacttgttgtacaatcctcccctttgacttatcaaccactttcccgcctttgact

SEQ ID NO: 41863 - DNA, 529 bp, Arabidopsis thaliana columbia
tttacattcactctcatcttgaaaatcaatatttttcagtcacagacattttagatctttattacagttcgagtttcgtaaagatgaagcgaaagaagaagacgatataccatacagctatggattcttccaccttgtgttctccttaggagcaatgtactttgctatgttgtttatcagctggaacctttcacattccacagagaagtaaggaaaattccaatctgcacattctcatctgaaacaacaatactcagagtcatgactgtgaaattgtattatttatgtaacacatagatggagcattgatgttggatggacaagcacatgggtgaagatagtgaacgagtggtttgccgcagcgatttaccgtaagttaaaaatgtaaaactaaatggtttcagctcttgatctaacagatggctctaaacgagagatttgcaatcaaattatataccaactaggccagtaaatgacatttgtttactgagtatgggtatttattggtttgatacagtttggaagttga

SEQ ID NO: 41864 - DNA, 102 bp, Arabidopsis thaliana columbia
ccgcccgcctcgatctggacgaacgcaccccgcatctgtcgattttcgcggtcccgatttacatgaaagaggccaataagccccgcgccgatgtgagcgagg

SEQ ID NO: 41865 - DNA, 601 bp, Arabidopsis thaliana columbia
tcaacgcaaaagcaatggtttaagagtagccaattgcaaactaaagcaacttatagataaaactgaaacctgaggatagaatggatgcttctcatctctcatcttctgcagaatctgcaaaagaaccggagcctgtaacatgaaaaatccaattttgggatctgagatactttagtgaagcaaatgaatttagcagagcattgctcggggacacgaagtagtaggagaaggaaacctcacgaaaggcaagaaatccagggacataaggaacatggaggcggagaagagagaagtcatggtggactacacggagagaaggaagctcaagaacgacgagacaagcgcatgcgacggaagaatcttctttgcaaaagctcatgtctacacctccaacatacttaagtatctccgatccctgagacagttccgttgatgaagataacttccatgtgaagtcatcgtacgcgatcagtttcttcttcagctcatcctgctctctgaaagaagtcaacaaatcatcaactgatttgattgtgcggaatgaaactgaaatcaaatgtgaactactctgtcacttctcgagctgatctccagaagaaga

SEQ ID NO: 41866 - DNA, 568 bp, Arabidopsis thaliana columbia
ctaaagaaaaagaaaagaatgtccacggtcccacggagcctgtcgtgaatgtgatgatcgccctcagctgcaagcaagaacgcccgctcccaaaccccagctcacgtagcctttattggatctggcatccacatccaccaaccggacattgaccctctgaggtattacacaaggtactttgttcctaaacgcaacccaattttcttcccacagttggcgtgtcgatcagacagcgatgcactgcagactagccagactagctagccaacatcaaccactgcaagtaagtgccctaccgaatccgagggcatggacggggtatccctgctgcacatcttcatatatccgatcaactcccagttttcatagttgtcagcacgcaaattgcctattccttggtcaccgagatagcgccctcatccaaccttatcctccaaccaggttgtggctgcagacagaactccgctgctgttcccttctcaagttgatcttcactgtagatggcgccactattcacctactacccggggactagcagctagagcctagagcgtggaacacccagatg

SEQ ID NO: 41867 - DNA, 526 bp, Arabidopsis thaliana columbia
tcttaatctgatcggattcgattcggccttctcatactatgaaacatttagttttgtttgatgcaagactacatgttttcaatcttaacttaaccattttgttatttatatattgttaaattttggttggcttttaggataacttcaaagcgtatgaaaatatatatcattaatgaaaataggaagtataggttgaatttgtattcaatttctttacattcaaatttacgtttagactaatgtggatttttaaaagtaaaagatatatatcattgttgaatcttaaaaacagtttttgttaattaaaaaaaaaaaaaaactgaaacaatacaggcttaccttgtagctgttatcggctggatcatactttaaaatataagtccaagaaaatcgagcatgatcaaaccaaattcaaaaatatacaggttttacgagtttgggccgggactgaccataatatcttaaatctcttagaaatatatatgttggcatattgttggaatgatcgtgtcatgccgatgatgtg

SEQ ID NO: 41868 - DNA, 147 bp, Arabidopsis thaliana columbia
  unsure (1)..(147): unsure at all n locations
tccccacagttatcaggcgagatatgttatctttaaggctaactgttattgagaagacgctaatccttcaatgaagtgcctcccgttgctccgactcagcgcgcgtctgctggacctgcatgacgcgcaggngagccaggcaattcg

SEQ ID NO: 41869 - DNA, 550 bp, Arabidopsis thaliana columbia
gtgataatggacgttagaggttccattaacgactgataaagacatgtttattttgacttaatcaacgaattctcatgtctcaaaagttagttcatgttttaaacgaccactcgggaaattaaatgacatttttttgcttaactcctaactgtgacttttgtattgcctcaacgcgtgggccagtataactaaaataagtagctccctcacctgctaatttcatatacgtatactcaaaactagagaagattgatatattccaatgacaacataataagataaaccaaactaaaccgagtcaaaagcaagattacatcccattcctgcattgcccataccgaaaccaaatgatggttatatagttccaaaagattattacctctccatgttttcttttcttcctttacttctataatatggctaccaaaaataaagtttcttcttaaaagtgtaaaaagaggagggtggttcaggttcttaacctgaccttctgtaaatgctgtaagcacggcaacggttgcgacactgaaactactgctgctctcaagag

SEQ ID NO: 41870 - DNA, 430 bp, Arabidopsis thaliana columbia
agaggacccccgagccgcacaacctctggatccgctacgtatttcccaatacgagaaattacaaacgtaacgacggaaattttgataaatgatctacactattaagagacaaagattaagaaactaaccattgtttgtttggaattgctgaaaacctaaaaaacgccacagagcctcaaacagtgactgcgcaaacgacaaacaacttaacttaagcgacaaatatatacttgggctaaacctagtaacatttatttactattaggtacatgtattttggattttattttctttgaggcccatatatttggagaataagacgtgcacaaactttatctcaagggatttggtcattggtgagtgaatctcgggatttgccgttgagtattagatggagaaacctcataatccggatttaattgcctggtaa

SEQ ID NO: 41871 - DNA, 544 bp, Arabidopsis thaliana columbia
atacgatacttgcgcaatcggagaatggaacaactgacgaaagacacgacactgaaatcggaggatcagaatttgaagccaccgcatagtagtgatatgaaacatgtggatcaagtggcggcaaaaggagccgaggatgcgagttctgtgattgctttatctgatgaatctactacgctacacgtcgaaatcgattcaaaaggcgatcgagcaccgaatcgaacatcgtccggatcgagaaaatcggtccattggaatcccgaattggtttctgaatctcccgcaccggatgagaaggccttatcctcatcttctgccgcgagatctaatccgtacgtcgctcgtgctcctactgaaacttcggatgcctcgttgaaaggtactgtgtttaaaactgtgtcagtatctttttggtttatgctatgagatgtgtaagtaaccgttggaaaatctctttgaaattggatcagaaacgatggaatctgtgaaaggtgtgcttgggagatggggaaggagggttggagaagctgcaatgaaggcagag

SEQ ID NO: 41872 - DNA, 597 bp, Arabidopsis thaliana columbia
  unsure (1)..(597): unsure at all n locations
tctctgaagtacctttttaattgagttcttcgtgatgggattgaaagcaacctgagaatacatacctggacaatcaactagagttgaaaaaatgatatttctaataagatttagactgtaaatagtttgataaagcaacctttaaagcccctgctcgctcaagagatgactgtgtgtcctccatgcgtcgtgcagtctggtcagaagagtccgcgttattgtggtcagtgattaatatcactgttggaatctgcgttgatttcaccaatagtagtaggcaattttgcagcctttcaaaagcatgcctcccattggctagaggaaggtcatcaatcaaaagaacaacgggcgcctttattccgtcagtacttgatgaagccattactccgtatttcctagtactctcaacaaagttttcaaactcatccagcttcgacgtgtacttcagtcctagaagaattaatgaaaatccagtagattataaccggattagtcaacaaccatcctctggtctgtaatagcagtccaaaactgagtaactacaactataatccttcaagtactgaactagtgttgtgccatgtcntgccagatggt

SEQ ID NO: 41873 - DNA, 447 bp, Arabidopsis thaliana columbia
ccctgaatatgattaacaaaatacttatttattgtccgtacgtttcagtatgaatggattattttggtgtaacttgatgttagatagttaataataaacatcggagaaatgtcaatgtagtaagtgctctcatttctatctttcgcttttgatgcaagaagaacacaaactatataactcatacaaaaataagattacgtatattctcctctatatcggtgtaccaaaggttttttaaaaagattgaagtaatcaaaactcaagtctagtctcggtggcaagagagatcagacctcttttcccgcttttaacattctttgatcttcgttatcccgtcgcttatgtttttatactagcgggaagatatgtcatcggcgccgcctcccgcgtggtactccgtctacctcctccacagtctctcccaattcctcctccgcctcagcctct

SEQ ID NO: 41874 - DNA, 489 bp, Arabidopsis thaliana columbia
aagctgttgaaggcaaaaatgaagtttgagagaataatagctatagtttgtattgactgacccatggtgttataagtcgcttactgtgattctccatggttgaaattttgttatctactgttatatacagtacagatatttcgttcaacagtttataaaaaacttttcattgctattaattttgtccctttattttttacacaagaaaatatataattatactacttaataactttccaatacaagcaaaagtaatcaattcaaatgtaatccaacaagatcatactttacaattactatagtttgttttagtggtcctctcgctacagagttgatatccctctttcccacgatgcatgataaaagacaccacacatttttttttttggtcaaaagaaagaacacacatatcccatgatttgattataataataaagacaaaaaataggctaaaaccggggagataaaataacatttgcatgtccttaa

SEQ ID NO: 41875 - DNA, 455 bp, Arabidopsis thaliana columbia
cgtattcaataatcctcgttagtcgttaagcttgtcgttgtacgtaaaatgacgtcgtaccgacttgtactccttggtcaagtcagccatgccaaccaaaatttgaatgtacgtcgaatgaatgttttccttattaatgccacatggacctttacacacgtgcaattccttacaatataagcggtgaacaatgggcctaataaaagccccacaatcatacaagcgtgagtaatcgcatgctatcccgaaccggcccatatgatacaccagggcccacagttaccggcagatctcgcgtaaaaagaggctgaattaatttcacgactaaaccggcacgtagcttacgtctgatgatcaacaactgcctgatcacccagaattacaaattaatgtgaaatttgatcaaacagagaccacaaataggagcactttgtgacgaactgacgtatgttttg

SEQ ID NO: 41876 - DNA, 396 bp, Arabidopsis thaliana columbia
ggatttagaagaccgggaatactcaaaccggcacgtatccggttaataaagacaccggcaaattgaaattcatcttccgtcgccttcgtaaagtcgccgcagctcaaaattcgagaacaatgttccttgcccgcgtgaaccccacgcgtctctctggcattcgtagcatctcgtcgtctcgtctccgcctccgcctccgccgcttctcttcagcaatactgcacggagaagcgaccgatcaaaccgtggccgcagaggctattcccgtagcgattagtctccatgatcacccaacagcaggacatcgatctcgctctccgaatatttctctacgccggtaaatctcatcccggtttcactcataattacgatacgtaccactcaattctgtccaaa

SEQ ID NO: 41877 - DNA, 606 bp, Arabidopsis thaliana columbia
cccgttcattgtgatgtcttatttgtattgcatatcataatttaataacttgattaaaccatagtacaatacatgtattgcaagctttattataggtgtatcttctttattactattggaaaaaaaaaaatcttctatgttgccatattcgtcattattactcttatcacttccaataatctatttttttctttctctcttatcattattatcgtccttggtgccttgagacttgtggtgagaataaattaggaaacactccttgacttaagattgtttagtgtgaggagatattggttgtttgaaaaaacagataaatagaatgagatttgagtgtggtcaagaagaaaaaaacgttgaatatatataaaagtatatttaggagatattcatgtgaattaatgtgtgctttactctgatttgagtttgcttaacgtttttccaaaatttaaataggtagcattttttaagtaataaacaaaagaatgaattggtcttactttatattaatggattcttgattaagtttcacgtgttttttcactttggagcaacaataatggcagcgtttatcagcgttgactttcagaactgtttcatcttcat

SEQ ID NO: 41878 - DNA, 575 bp, Arabidopsis thaliana columbia
gaatgtgatgttgtgggttaaaatcgagatcatagttattgctctctctctatctctgataatctctgtacaagagaggaaagcatctcaaacagctcaaagctcattcattggttacactttaatgctctccactattatttttcttgtaagccacgtgtcctgaattctctattttccattagcagtgtcttctcgtcgatgtatctatttgatcaccattgaatcattgatagaaacgagaatgagaaaatggaagaaaaaataacaaaagataatgtggatggagtggagagacaaatatggtgaagaagatacagaggttgaagcggcgccttttctataaatactagatagtatgtggttgttgactatttatttcttgggcttttaatgttttttttttaattttttaccttatgtttttgaattacgcaataaatagtgtgtaagagaagagtagtaaattagtagtagtataattaaccgtctaattgagtttcatagcagtcacgtatgaactggtagtaacagaaacgatatagtaaacacacaataatgtattgatgttattg

SEQ ID NO: 41879 - DNA, 565 bp, Arabidopsis thaliana columbia
tgaatcttgacctagttatcgaaaatgactcaaaaaccactactatacgaataaccaaaaaagacgcccactattaataaattgagataacgatatgcttattgtctttcccctttgataatcgtcatgtaatcaaaatgtgttgaacaattttgctcctcaagatttaacggcacgtgtcaaattagttccccaatacttcacttcatgtcttgaagttgcgtatacaaatggtgcaattccgaagctaatctttttctttattactttttgattcgtttcgtcaacatgaaaaatcaatatatatattataaaaatgattttatccggaaaaaatatagacatgtgcgataattctatatcggattattataatacactctagaagattttttttttctttaggcaattaaactaatactgatccaaagcaggtcgcgagtctcgagctggtaagatggcgaacgttcaattatttatttactagtcaaattttaatcgacaatttttaggtttagttagtctctttaaatttaaagactcgtttgagaaaatggtggcatgt

SEQ ID NO: 41880 - DNA, 549 bp, Arabidopsis thaliana columbia
gaagttataactagtcaacgttggacgttagcaaggcccaatggacattaactcagcccataatagcacgcgccttgtgatgtgcaccagtttccgtctttggtcgttgaattcaaggaaaaaaaaagtacatcacaagcaatttcttacttatctgtgacttgaagctatttctccaatttcgttttccatcgacactctatttcattttcaccattcacgtcttccttctgaataaaataaaccctaaaacctaataccgaagtaaactcgtcaaccactgcgcccatgacctcccaacgatactcttcccttatattcttcctcttccttcttcctttctgcgatccaaaccttcaaacacatctccggtagatatgaaaatccactcttgcctctccgccattcttctgttcctcttcttctctgcttcttccgctaaacaaaatgttcggacagagcgaatttcaggtacttgttcttcttgctcagcagattggaatgtagagttgaattgattaactcttgagggtcgtcaaataagtttga

SEQ ID NO: 41881 - DNA, 449 bp, Arabidopsis thaliana columbia
ggtagttcaaatatggtactatgtgatgaggttagtggacactttcactaacacacaattttcatgattgacacatcttttgattcaccggtgtatcttcagattgcgtaaacttcgatccaaaattcctaattcagacaaagaggatcggaatacctaaaccttgcatattccatttcacataactttgcgaaacaagtgatttcattgctgctactaatgatggctcaacaagtacgtgactagtttaagtgatttcactactggatacgtaatgggctcataatattatagggggtggatgtcatggcgcccaattggacttagacccaacttcgtacaactatgctaaaagccttaaattatactatccctcgaaaccaatttcggttaactcttaaccggtcctctagttgggtatttaacgccttttgtctttttaaccgttt

SEQ ID NO: 41882 - DNA, 508 bp, Arabidopsis thaliana columbia
tggagattttgaggatgcacctgtaggcaacataacggcataaagaaaaccttcgtgccacaattttaaggtgactgaaaatgttaatggtagcaactagtaagcatctaatggacaagttaagttaggagatatactatactttttaagatcttgctataacatgcatgtacaaaaagttttaataccttgctgatacgggatgctatcctcttctacagtaaatggtcttgtaacctctttagatgcacattccgcctatataacaaacaaattcacaagagatgtaatcaacaagagatccaaatatgttagtacaaagtcccgtacagtgaaggagaaactaaccagcctttctagattatcagtttcttcattgatttcagcatcattttccctgtcgccagtgtttctatttgccccactttcactcatgggcacatctacctcttttccttctgttcgcatatctacatttttctgtagcatggctgaacttcggtttgaa

SEQ ID NO: 41883 - DNA, 547 bp, Arabidopsis thaliana columbia
  unsure (1)..(547): unsure at all n locations
nnnnnnnnnnnnnnnnnnnnnnctaaagagattatcctttttttctcttggtgaatgaagtacagaggctgtaatgcctcaggcgtcaacaacaaaggcatataacatcttctctaattcttgaattttctgctctgccattcataacttgtcacactgagctcttcacatccctgctgggtggcaatgatggctctctatcttcacaccgcagctagctcaggcgcggcttgtgatggccttcagggccctcgatccccgacgccagagtgctctggatcacttcaaacaccgtccaaaacttcacctacccccccgtcactggacttaccggagagccaattgctggagccacaggggactcttctccgctgaccttttgcaacgtctcaatggttttgacccacccaggcgacaacgacaccgtcctcgtctccgtctggctgcctccccatgacacctggaacactcgctacactgcaacaggaggaggcggtcttggagccggctacgacttcaacatgatcagtcccttgctgctggattt

SEQ ID NO: 41884 - DNA, 596 bp, Arabidopsis thaliana columbia
ggtaattctaaggaagaaactgttgtcgtcgagaggccacaacctattctttatcggaatcttgagatcgtaaactcatcatcgccgtcgtcgccgacgaagaaaggagataatcagacagagtggtattttggtaataacagtgataatgaaggagtgattagtaataatgctaatacaggaggaggaggaagtgaatggaacaatggaattcaagcttggactgatcttaatcagtataatgcattgccttgaatcttggtaagtttaagaaactatataatctataatttcatataatctatttgctatgtgttgtgatgtaatgccaaaactatttatgtttgtagtttttttttttttttgtattctttttgttgtcgttgttggttactattctagtattttaagtttcaatttgtaaacaaaaaaacaaaattgggggagatattcaagaatggagagagatacttacattatatactggtgatttgtctgtattgaattgaaaggtggaacagaacttactgtgtttaattatcggaaagctcttggtttggtgatgaaatgttcacttaatgacttattggatggtt

SEQ ID NO: 41885 - DNA, 533 bp, Arabidopsis thaliana columbia
taaactattttacaaagttcatttatgtggaaattgataaaatgacaagaacatgaaaaaaagacaaagatttttagttgaaatctgtgatcgatcgaacagaatcggttcagctactgtttttgtaatagaacaactgtccatttttataccaaaatgactaaaccacccttagaagatgcatgtgttgtgtggtactaaaaactcaaaaaagcattgaaactttacacctttgtgtcgttttctcaattttacccccgcttcatttggaattgtcactctcaaaattggcgtattttccagttcatatcttcattcatctatggccccataaaccataactctttgaaccatatttaataatgttacctgcatgcatatacattcatataaaacatgtattcattatcatgttagatatgtctagtctattatttcccaaaagaaagacacctaagagagcaagattcttgttattcatgataacatttttgaagattcaaaaaaaatgagtgattgatgaattatttatg

SEQ ID NO: 41886 - DNA, 606 bp, Arabidopsis thaliana columbia
tataattagaagagttgttgggtaagtcaactagtaatactcctacttgtttgtttgttttttgtctttatattctcgaggggccacttattaatccgcacattgctaatacgaattacgtaatagtacatccgatagagaggttaacgaaggagtgtatagtaattgactaaactctctcacacgtacgaaacttcgtaacaagaccattatctcgtcttctcgacctattcgtatatatatctaaagagagagagacacaatggatcacatctctaaacttaataaacccacagagcaataattataagtatttactcaaaaaaaaacaaaaaaagatgaactcttgccaacaaaaggctatggagaagttgcttcacgggcatgggtgcgccaaccagctgctcatcatggaccagaccgagtcagactcgtccatggaaagggaggatttggccaagtccgtcctccattgtttctcagatgcgctctccatcttgatcgatactaatgaccaccaagacgatcaatccaataactcatctcctcaggactcttctcctgtggttgagactccaggaaaccactcacaagaggggaaggtat

SEQ ID NO: 41887 - DNA, 792 bp, Arabidopsis thaliana columbia
tacaatggaaaaaatggggttgtcaaggtgattgccgttatcaatgtatggttaatagagagactgaacgggaaactctcggtcaagccccagtcaagtaccatggtaaatggcccttcaagcgtgtacttgggattcaggttagtttttttcttcaatcgcttttttttattctggttgtttccatataatatgagttttgacttaccttgttctttgccaggagcctgcttctgttgctttctctgtactcaacctagcaatgcatttccatggttggctttcctttttcatcatgatctactataagttgcctctgaaacaagataggacagcgtactatgaatacgttggtttgtggcatatctacggtctcctgtccatgaactcttggttctggagtgctgttttccacagccggtaaatcatctacacattactctattatccacaatctgcatcatatattcatatgtgattttctggtaatccgtctctgtggttctcagggatgttgaccttacagagaggttggactactcatccgcagtagcgattctcggattctcactcatcttagccattttacgaacatttgatattcgggttgaggctgcaagggtcatggtatccgctccaatactagcttttgtaacacccacatactctacataaacttctacaaactcgactatggtacctcaataactttccgttgtctaaaaatcgagtcaatatttttggtgaattcacagttgaatgtcgtgacaggctggacatgattgtgtgtgt

SEQ ID NO: 41888 - DNA, 420 bp, Arabidopsis thaliana columbia
tcatcatttgttcaaatagttggtagtttctaatgtaaatccaattctattttcttcaaaaaaactggatatgtgtacatcatgcaaaacgaaacgtaacaagttctggacttgaagttcagcaattcatgcatatatatatatggggggggaccaagaaataattaagttcatgtttggaggatacctccacgagattgataaaattatcggtctcgatgtcccaagtcccaagaccgttctcagtctcgtgtctcctcttgtccttcaacactaccttcactttaaataattaatgacaatgaaacaaaagatatggtaatcacaagtgataatgtatatcacgatcgaatgatatgctaatgtttaattatgataaatctaagatcgagtatatcaaatactacccaatacatcatc

SEQ ID NO: 41889 - DNA, 543 bp, Arabidopsis thaliana columbia
ccttgttatagtaattctcctaaataaaagtcaagtacacatccaagagattgtggcctagtcgtgaatctaaactactccattgttaaagatctgacatttaaaatcaaatagagattttcctagtaaaacaaaggatgtcgactatcacttcactaaatcttaactgattgtgagatgatgaactttaaaattctgtgtaagaggatctgataaatctaaacaacaatcaaatgcaaaattaggttttgtcccaaaatgaataaataaaagagactatcagtttgtataatgcaattcttttacttgtaaacatctcttgtacagccataagatccatatgtaccatgactttaacccaaaagaaaattatatgctcattcctcatctctttcaatttctcttttgttccttgaaaacatgttaacatacagttcatagcacatcccaagttgaaaacactttgaagaagattttacacattaaacacaagttaagctcgcaattagctttctcttttttcaaatcaaagaaatatgattt

SEQ ID NO: 41890 - DNA, 488 bp, Arabidopsis thaliana columbia
gtattcatgttaaaatccaaaattgttttcaaaattaatagtcgccgtatgaattttgctttagaccaaaagacgatgaccaataaactatagatgatcaatttatttagctaaagaaaaggagtttaattgttgtgtttagtggttcatactttaatactttatacattgtgcatatatattacatgaatgtcatgttagctggtctgcaacggcgcatcgctatgtcttttggtttgtgcaaacgagctgtgactaaactttattattgggctttattgtagcccaatatgaattacgcggcaaaagatggattgtgaacttgtcaagatataactacgaaaatttaacctaaataatttgacaaataccaaagtcgacgatggtgaaaagaggtcggagcggcggcgtttcaaatcggagatttcaaaacctagttctccagtcatctgagaagggatcaacggcagaggaaatagtcaatgagc

SEQ ID NO: 41891 - DNA, 616 bp, Arabidopsis thaliana columbia
ttctacagtgggttcccatggacaggtcaacatccctaaacgaacctcctcttcagcgagtctctactcaacttcagaccattctagattaggaagcgtgggcttatctgatgtcaatattaggaatggaaatattaatggaacagacttctccacagctggtggttatatggcaaagaacaagttgaattcattagctgagcactattccgctgaaggtttctcaccccttcctctctctttctctctatatctctgtctctatctctatctctcactctcatatacacaaacagaacatcgtattgccttggattgaaccttttttttattccttatgattcaggctcacatttgactggggatggggatagacaaagcttgaacagattgataaatcaagttgcttctgagcttcactctccagttatggacccacattacagccagtatctgcatacggcatcttctactgctgccccaatcgatcattctcttattagaaacaatttcgggacttcaaacggagatacggctaacgaatacctcgcgatgttacttgctcaaaacaggcaacagctggtaacctcaatgctgcaaattctagattttttga

SEQ ID NO: 41892 - DNA, 971 bp, Arabidopsis thaliana columbia
  unsure (1)..(971): unsure at all n locations
ggtaattctctgcttaaaaactcaaaacagtaagcagaacaaatcgagaagataagactgcaagagaaaatcctcaactttccactaggtagtgactaaaacgcacgttgccgggatgacggattctcttcaggaagattgagtatttgctgaatctggtaatgagcctgcaatggtaatttaacattaatacttatccgatgacactttcatatatccgtctgatgcagggttcctacgcaatagtgattttctagtccaattcaacctcataagacaaatgattgactactatcacaaagcaagataagaacttgaacttaccagtttgatgcgccctttgatctgcgtaataacaccagtatactcttctagttgtctgttaaaaacaaaaaaaaccacatttatattgcatcaacattcagtcactatactgcattccaccggagaactcattcatcatatacaatgatacaaccatattttccttgtacatggagcaagaaaactagaaaagcaaagatttctcttacttttgagttctttcctccctttgtgctatatagtcaagagcttcttgccgtgtgaactccacataaaagccgaggcctacatccatgaatatgtgccgagtatctggcctgaactcaaacaaacacccaagtcaagtgaaacgaaatcagaagcaaacctggtagaaagcatctcctattttaatccccatttattaaacgttttctgctcaataatacataactagcttctaacatacagaacacagtaaaagcacacttcttaattgcattaagctgtgtatggagacagtgtatttcattgtatgcagacaatgcatgacctttcatagctaaatgacttgactaaaattatacgaaagaaccanagctataagtaacgtacacttcagcttgcatgtaaactatctgaccaaggttgacccttgttttgagact

SEQ ID NO: 41893 - DNA, 525 bp, Arabidopsis thaliana columbia
tgaacaaaaaaaaatctatcttttaatttctattttgaagtggtcaatatatgcctagaattggttaaattttactcatcaatctaaaaactaaattgaacaagaaaaactaaagacactattttacatgtgatcacaccccgaagaaatagttatacagagtaaaaaaacgggataatgagtggaacaaacaaatatttgtatagaaattgtctaaaattgtacattttttgttggaaattgttacacacactctttctctctctttatctgattgtaatgtgattagtttgccaagttgggcaaatggtagaagagagacaataacagaagtactaaaatttaagaggctacaaaaggacaagtccaaacatattcacacactctctcatatatttttgttctatatgtgtggtgtacctctttgactcctctcttcctaaatcactcactatttatgtatctatctctccacacatctctctccatcccacacacatcttcctcttaacacattactatata

SEQ ID NO: 41894 - DNA, 585 bp, Arabidopsis thaliana columbia
tcccctgtatgaaatttggtttcggttgccctcattattttcgaaattgaaaacacataagaaaaatgttttgcaactcgtgctctttttgtcggcgatttgatccgtacgtctagaaaaattcataataataatacgtttattatttcctatacgtacgtatatcagtatatgtatattcgtctcaaaccatctgttcaaacttcttttaaataaatatactgatttgatgacattgataatgtgtttaactataagaaactccaaatttatttatactaatactatcaaataataaaagtaaaataaaactgcagccttcttaaatgtaacacatgcactttatacgttatagaagataaattagttagaccaaatatcttgttttctacggtattcgtgatatgttatatgtttttcaaaatgatggagaaattacgatagaatggtaactaaaaaatcaactcgcaaacaaaaatataagccaagtcacccactcaatcacacgtataaataaaccttaaattaaaataaatgttatgaccttactatggagattgtatcgacacatttcttgacacttga

SEQ ID NO: 41895 - DNA, 187 bp, Arabidopsis thaliana columbia
tacgacacgttgacgtctgtcgtgcgcatgatcttgagctcgacgttgttttggtaggagctcttgacgatgttctcggacgattcggagcatggcagctcaccagtgcggcctgactggtggctacgcatcgacggccggcccccgtctatgggcgggaaccgccgatgccggcctttggatagct

SEQ ID NO: 41896 - DNA, 555 bp, Arabidopsis thaliana columbia
tactagaacatacatgatagaaatttcctctctccgcatagcccaccaacgcctctctgccttcctagcctccataccaacggcggaacctgagaaatctttctcctccgtggagccgatgcaattaggagaagaagagaaaggagaggctgagcctgctgaagaggagagatactcggcgatagagaaggtggaggagaagatgagagagtgtttcattagaaacaagagactcaagcggccactgtctccctcgtcggctgtggtggagacttcggcgacggaagagaggagtggccgtgattatgggtttgattccgacccacatgccaccaagttgagagctttggatcttatctaccagtttcatgcttgattttataaattgtagatttccagtagagagattcttttgtgattgtaaagactatttgtcggtttggtattacaaaatcaacaatttacaaagatcatctcatagacagaaaaattctaacaataacaaaccagattgggactgtattctcttacccctgattcctgctgtatggatat

SEQ ID NO: 41897 - DNA, 486 bp, Arabidopsis thaliana columbia
tgtgacttcgcttagtttttttttttttttttttttgctgcttattttgaatttcccgctcaacggtcgacagattagttggacacctagacgacgacaaatataatacatctatacactcgcttacaacaacaacaaatacatatatcgaaaggcagttttgtcaattatatatagacattttatttgaccaaaaaagaaatagacacttaaatgtggaaatctgatgatactccagttgagtattatttttttctcttatacaagatagatgtaaaattttggatattccagcatgttataattagctagagtcatccatgttgatcttgtttgctgtacaaaaatatattttattaaataattagatatatcggttgtgaattagattttatttccaaaacaaatatattaagaatttcattaataaagttataaacggcaaaaaaaaaaaagttataaacgggttaaagtgtttgaattgta

SEQ ID NO: 41898 - DNA, 538 bp, Arabidopsis thaliana columbia
gttgagttcttctaaacactccaatttgagttttagattccgacgaattgtgaatttagctacagaagtcgctttatgctgtttagctccagtcaatgtcacgagggcagtcaacgaaagtccgattctggtgaaaaggagctggagtcgattaaggttttgctgaaacgtggaattgtgataggagctctagtctgtggagttttcttgtatggatgtcagaaagtgttggcatcggctggtgtggtcgaagcaggctatgaggtgtttggtcagagcgtagtgttgtttaagaatgctttgcctaaaatttaccaggttcttacggttcttagagagcaaggtctaattttggctgcgctgctcagcctctcagcattcttctctatggcagagacgtccattaccactctgtggccgtggaaggtaaaatcagaacattcattttggtgtgatttagtaatgctaatgctgtttagttgattttggaacacgagatctattggcaagaatatgttgtttaagtactcatttgaaa

SEQ ID NO: 41899 - DNA, 575 bp, Arabidopsis thaliana columbia
tcaagtgcttaaacaatgcagcagcagtagcttgagatttaggaaattgccatccggaccacaattcaataggcaggtaaacatcaactaacaccacagctctttcttctccattctcacctttatcaaccttcaccacacgacatataatcttcaagcatttattagcaaccaaagcatgaagctgctgcactacacttatacttccattcaccatacctatactctttaccctcttccttccctgtacagtcttctccttgctcccggataaaactcgtctcttcgatttcggagtctttcgcttaccactactctctccctcaacgcacttacggcgtttctgcggagtctccaatcgaccgtcttcaattgttccggaattctcaacatcatgatctccttttgacgaaattagggattggagattagagatgggattagtgagggataagatcaagccattttcggatttgaaaccggtgacgaaccatcattgaagatgaacaagacgagccgattgaagaagacaggcgaatcgcggaaagaacggtcagagaaacacagagtttgtg

SEQ ID NO: 41900 - DNA, 463 bp, Arabidopsis thaliana columbia
gtagtatttactggagtaagtcttattttttgttacttgtattccagacaaataatactagtttatgcttagctgtccctgcctcaagttaattgtttgatttcttgttgcataatccttttcttaagcctgatatagcaagcttattaattgtttctagtgttagttagtatttgaattgagggaagtattcactattcaatgtgagtttactcaattttactatgtaacaaaatgatagtcttggctgagttgatcagtttccagtttgcttcttgcgctctagatatataaacaaacatgctttgctttagagaaatttagcctgagatgagaaatagatagaaacagcgagagatttagctatttttaattggtaaagttattgttgcgatacacaggtgccaaccatgtacactcggttgatacaaggttatgaagcaatggataaagagatgcagga

SEQ ID NO: 41901 - DNA, 507 bp, Arabidopsis thaliana columbia
tgtggtctaatcgtcaacggaacacaaatccttccacaagaacaggtttaaatcatcccgaagtttcagctcttccctcaaaaacacctcgacctcccttcacggtgagctttgccttttgctgttctccgtgtttgatgtcccttttgccgtcgtcaaccgccaccgccacatctcatccgcctcgctcgaattaggtcagatcttcactttttggaggaaagttttaacttgggcttgggcctttgttgggtcttgtggatatttgggtggccctttaagcttgttgggctgcatgattgtttggtgcatacatgttttttgggcctgccctattgtagtgtacattattccatctgccaatcgttcgccactttgccaatctttcacctcttcacgtttcatcactcatcggttcaccggaaatttctccgggttctctttgcctatgtcggatatttcttcggtaggctcaatctgctactggtttagcactacttttgctgg

SEQ ID NO: 41902 - DNA, 482 bp, Arabidopsis thaliana columbia
ggaaaaatataaaagatagaaaaatatgctcatgcaatgtttgaacaatacccaaattcaaccaacagagagagatttgctgcaataagataacaatttcgtacattttattagcttcccatatctcgactttgcatttccaacattggacaaaatacttaatattagaatggtaaaaagaagatcccgcagaaaacaaaacattggataatacctgcaacgactggttagcacttctctcaacaagaagagagtcgcgtcttttaccagcaaaggactcctgtttgctgatgtctctctcgagtagggccttctggctatgcaagcgttttaactctctttcagcagatgctttctcggcctttgcaaggatatcagagtcaattgtacaagttagatgggttatgcgacaaaatatctagtactacttaagttaagaattgggtcaccgcgtacctctagcttggttttacttgcatgga

SEQ ID NO: 41903 - DNA, 549 bp, Arabidopsis thaliana columbia
tcatcgagcgttgaactcatttttgtttgatgcagctacccctttttgccctaatgggcatgtctccccattctctggcccaccaatcctactgcttctttaaactttcctttcccggctaggtgatcgattgcgtttgtttgatggggattgggaagtcgccggaatttcctctatccggtgagagataggaacatcttgctcagagattgtcatctcttggctatcatcatcaatgattaaaccctcaatttcacctgccaacatttcttctcgaagcaagtcatcgttatcaaggaatccatctaggatcatctccttttcgagttccttcattaatcggaaatcctcctcagtgatttctttctcatgttccacctcctcatcaacgagattctcccaatcagaagggattgaatcgccaccttgagtacactgtatctcaagattttgttcagaacccctagctagggtatcttccacagccgaataagccaataaacttatttaagaccggttttatgtgtttactgaacctgtgtatttttg

SEQ ID NO: 41904 - DNA, 260 bp, Arabidopsis thaliana columbia
gccagtgtgctctaaagcagtggcgaagtcctcccctagtgttttcagaggtccgcctctccccatcgatgccgggaatgtccgagagctagaaacggcattaggactgcgagaacgacaatagcgctccagctctagcgatggctctacatacctgatcgatgcctgcaaacataccatcctgcatagcagagccttgagattgaggcggtgcgaaattccgcggcaatggcaaggagatagtcgagctgcgtcttgtc

SEQ ID NO: 41905 - DNA, 1321 bp, Arabidopsis thaliana columbia
tggagcacttaagttatcggaagcagttcgatcttatcctgttttaactcaagcttcttctaagcaattgcttactgcaatggttctcaccagtaagtcctttaaagacttagtgtcttgacttatgacttttggatgatgttttgatgggttacgaaactttcatatttacaagcaaccagttgcaattacttggcttcttcttataaggtaattttatattgttgtcagggaatctggaaatggttgatgatttattgacatttgaagaactggagttgcacttgaagtctcaaggatgtcatgtggctaagctttcatctatggacttctcagccaagagtggtgtaggaggttgccttagaggtttgttacgccagtttgtgatgccaaccgtagatgttagtaaatctgcatagccttccatatcctttagttttgtgggctacttgaacaataattgtatccactgagtcattttcttcactatgcgaattttgaacaggtggctgatgtgaccattctcgcatcatggtacagagaaaacaaaaaccatgagaatcccgtggttataattgtggatgatacagagagatgctgtggtcctgtactgtcggatttaattcttatattaaggtattagttcatctttatgcttgctacgtttgcatcatatcatgttgaactttatctacttccacttttgtcattaccatatcagagtgtggtgacctgctctttcattttttcttgtcagcgaatgggcaatcaaagttccaatttttctgataatgggtgtgtccacagcacatgatgcgcctagaaagatattatcagtgaacgcgctgcagagactttgtgctactaggttcactttgagctccccggctgaacggatggatgcagttctcaaggctgttttcttaaagccgtgttctgggttcactgttagccataaggtggcactttttatgagaagttactttttgtgtcaagatggaacactgacatcttttgttagaactctcaaggtttcaagctctattcttaatgctgtattaggttttaaccctgtttcggattgctaactctttgttattcatttggctatacattcttttctcagatagcctgtctacaacatttctcattagagcctttaagcatcatgctcgagcacttttgtcatgatggtgttaatcaggtattcttgatgcacctgtctaaaacttccatattttgttacagaaccttcaactttctcagatatcatatttgactttggttaagttgcactgccatttctatattagcgtagttg

SEQ ID NO: 41906 - DNA, 520 bp, Arabidopsis thaliana columbia
tcttagaattataggctaagatggatatcagactttgaccattcttaagagcgacaacatgtttttcttccctagttgcctggtctggcttaatagaagaaaaacttctttggcctgtataacgataaaagagctgccaaaaagaaatagaagatgaagccaatctactaacacctatgcagaataatactaatctattatccagaatgatttagctcctcaagactacttctaccttaagatttcagctgcaaaattgatacaaactctgatctctattttcatttttttcttgtagttgtctcatctcaatctttagctaattacagtgactctatgacctaaacacactgaatgcataatgaaaccgcacagagagagcaatgtgcagtgttaaaggcataaggaagttagactctcaccgtggaatgaagcggaggcggatctataacaatggagcgaatagacatcctagcgatctcggaaatggcagcctaaccacatcaggtacatcactggt

SEQ ID NO: 41907 - DNA, 520 bp, Arabidopsis thaliana columbia
gctacgaacgagaaagtcaatggcgtgtagttaatgaagaaatgggcttctgtagcaataaatagtcaaacagttgagagtgataagaagatgttgcacaagtggtgattataattcaatgtcgaatttgaatactcaaaagtcaatgcaagtcagctgtatctgtgtgtgacacgcggccccgatccgaacggttagataacgcccaaactgctatttaagacacaccactaggcctctttgttccaacaagacctcaaataaaaacacaacaacaacattcaagaaatggccatcttctgtttccttgtagaccagagaaagaaagtccgggggaggaagccagcggccgggttgtgctcaagatgcggaggaggagcagttgttgccgacatgagaacctccacaagattctgtggggtccctttttaccgcaaagcttggaaagctatcgtctgtcatatctgcggtgctgtcctcaaatcataccactgagtctgatgaaccacaacgttttttg

SEQ ID NO: 41908 - DNA, 362 bp, Arabidopsis thaliana columbia
gagcaattaggagaaagttcaaagaacgagagaaaaaatgagttgttataccatttgggaaactggcatccacatgaacataagagttgctgtccatccagataaagaccctacaaacctaacacctttctctgaaagtttcccagttcgagcctgcattcttaccagtaggtagttaagagaaaagaagaacacttatccatataaacaactacacatcttaacagttgttttgaaggatctacgaaaccaggaattagttgtcagagaatccttatacagacttggaggaaaagccataagggcaacaatttttttttccattaaaaaggaaaatcccaatttccggacaaagttttttt

SEQ ID NO: 41909 - DNA, 460 bp, Arabidopsis thaliana columbia
tcagcttgtgtataggaagaattgtctgtagttggatatgatgttgattatgacttgtgattaagtattacccataactagagtatatcagaatccgtaatgtcaagtctgtcactgaaaatgtgctagttcgtataaagtttcgtacatggattactctactcacatgctagacgatgatatatgtagatgatctcctacactaggcttcagactcagaatctgcaagtatgtctgcttgaattagcatgccgtttggagacttaggctcactatctaccttagctggcgtaagcggccatatatagccattaccgataattgtgatctgccccagtttgagcctaaatcgtcagagaagatcgtctgttaatgggggagtgctgtccatactcagtgactacctgacagtacgatgtacaggatcatagtagtaggaatatttttctcctgagtacat

SEQ ID NO: 41910 - DNA, 590 bp, Arabidopsis thaliana columbia
  unsure (1)..(590): unsure at all n locations
ctggctccccaccacccgcgcccccctccccccccccccacccccctcccccccccacccctccaccccccctgcacacctgctactcccccctcacactcacgttcaccttgacaggccaccctctcatgacatgcatcgcgtggtttctatagaacatggtgcggttctcctttacaagtcattaacatgggtcagagaattaataantcattttagtgaatcatgatgcttacaaggctatttcctcattatggcctatgcatatgcaanaatcgtatatgaaacactntagactngattctaaatgtaatgcaactaaatgatcantgtgtttttgtggaattcattttgaaaaaatttgaaatatttttgtttttttctatganttagatgatatgnagantnaaatgatatananaaaaaacaagttaaatacgtcttgaaccctcgnccaaagttaaattacacagtnncttgtgtacataaaatttgtgaaagaagtcaagataaananagaaanaaaaacaaaagcggtatttaaaagggttttggtgtgttactcagtagaatatcctgaagatgtagta

SEQ ID NO: 41911 - DNA, 434 bp, Arabidopsis thaliana columbia
ccaaacgagggataatgagtgcactttgcgaacatgttgacgtgtctgaatctgtttcggtgaccaaaaacccatgaatgttctgtcacagctgtgaataatagaaacagcgacatgtacttttgcatattcagacgaccaagtagaaattctttaacacaacttattattaacgggcgttgatctcgatcgttggatcatcacggtaatagaaaccgttgatatttgattaatcataagaaccaaaaggtgataaatttattatgaataatatacgtataactttttattcatcttttaccaaaaaaaaaacattttattcattatcaattaattttgagtttggaatctcatattttcaaaatagtattagaacgagttccgatttctcattttaggaccacaattagattttcattccacgcaacttcgtg

SEQ ID NO: 41912 - DNA, 533 bp, Arabidopsis thaliana columbia
cgttggcccgagctgttctgcaatttgcttgtatatcggccgcagaagctgtgtgtaccagaaaatcaatgcattgtaaaactatgattcagcaccgcagaagcagcattagctatagagtttcattatatgttcatgcaaacccattctatagaaaatctaatgttttctcatcacttatatggatctctcttttgttgtttaacttattcggatatgagtctcaaaacagaaactagaaaaccattgagacttacgagacggccaccagcaattatgccagtgatagcaactgctgctttgattgcagctagtccaagagcttcagcaatggcttgaaatccaatctgagaaaagtagttagcaacttagcattctcctcttacaaaataatttataggcttccttgagaaatatgcaagacagcaaatattagcaacacatgagcatgagtattccttaaaagagcagaggaaatattgaacttacgccatctgccattacatcacaataaacacaacacaaaagggaaa

SEQ ID NO: 41913 - DNA, 804 bp, Arabidopsis thaliana columbia
caaatggcgttggacatttgagtttaacacagtcagaattcgtcttgcaagatacatatccagttcgtgccataatcgatgtacctgctaaaaatcaccgaaatgatttatagaaacgctcatgacatgataaggatgatgaatacaattggtacataaatttagttgtgaaactcacatgttgaaaaaagtagaataccgatgaatatcaaagctgacttctccatttttttctgtgctcttttctatttgtataattttgatattgtttgcacaattaagatgatgtgtttacaaacaatatataattgtgagaaaacgaattgtctttttccttttataccatgaataaatctgttcttttttcacttgagaacaaaatattttgataaatgcgtttaactggtcgagattttattcctttagttttgtcaaatgtcaatatatacatttattcttaattgatacttctttgaatttaaagtgcttaaaatcttcttataattagagttcttagatcaccgacaaagcgtttcctgtcaaatgtgtttgtaacatctactttggtttgttactttcagttacataaaatcacttgacgggctaattgctctaatcaaatttttgattttaaaataaaaatcgatcggtatttggttcagttaaccatgatgattagcaaggtttaaataagtttaagaaaaacgaaaagaacaaaattgttttctttttaaggtctaattaccaaatcgacaatgaatccaatgttacaagaacacaagtcttcgtcataaataacaagtt

SEQ ID NO: 41914 - DNA, 881 bp, Arabidopsis thaliana
taaatggaataaaatattccccgaggcgccgtgttcttgttgcttgctacttatcttcttcttcaatcccataaatcggatttgcaaaattttcttaacctaattcgtttcttcgcgatcaaaccacaggtattttctcctatcgattcctgaaattaaatcttttgattttgtagttcccaagattctctgtgatttttgtaattcctcgtcttccgattcgaattcaaatcaaagctacggcttctttattagggtttcaatagttatgtagttttattagaaacttttgattgattgattgattaggtcttcgaaaatctgcgttttgatataaatatatgttctacttttgcagatttttcaattttagtgaagtttcattttttaaggcatggctactctcaacggaaaagcttctccgtattctgaagaaaacatcaaattcaagtatgatgattatgatgatgatgatgatgatgatgatggtagtggtagtggtagtggtggtggttatgaagatggacctaaatggtctgttcaatcaatccccacaaagaaagaggtggagtatccgattatcgactcaggagattacgttgacgacggatatgattcatccggcgagctctctacaacgacgacgccgccgattcaaggaaatgagaaacctgaagttaacttgaaaaacgttttaactgggttgattgctattgttactggacggaataagaatccgttagatcagaaaaacccgtcttcgaatgtatcgtttcttggctctggcacgaacggggatacttttgttcattcgtctgtttacataccgagtgctccgctctacttgaacctagtgggataactatagtgtttcaaggagt

SEQ ID NO: 41915 - DNA, 546 bp, Arabidopsis thaliana columbia
tattactactaatcattggtagattaatcattattgtataaaggaaaaaaagttactgcagtcgtataagttcggaactcaatctaatcaccaatattatatattatatttaaaagtttaaatcacacaatgtccttgttcaaagtcaaattatttttgtttttgtccctacaaactataaaatatctgcatattcaaagaacgatgtggaatttgtcaaagacagactacatatatgcgtaggacttttgagaaaagaaaaaaaaaataaaaaaagttagtttccagcataaaagataacatgaaatttagatcattttttatattttgaaatttgtaaatatcttaatatggctttgcattttaaccccataaatatgtaaatttgttacatatttagtttgcatacttgtatttcaaagtcactagctaaataaaattaacatgtaatttgttgttgaaaatcatcaatgatacatgtttcaagtaaaacaacaaaataataatcgattgaatacactagattagaaatcgattcaaagaaca

SEQ ID NO: 41916 - DNA, 521 bp, Arabidopsis thaliana columbia
ccaggattttgagtccttaggttaataattttcatgattcgtttagcttgtataggggtttttgaagcattcaactgttgattcttctcaattcgagcgtaattttgcaacaccaagcgagttctgtgaacttgagctaacgctatttttagtatatagttatcaatttgcattgtcatcatttgatattttggtgatttgagatgtaaagaaacatcttttatgccatggaagttagtacaagtcaactggtagttagttcttgaaatatggaatctcatagtgtcttgaagcaaaactgttctcgtttgctgtatcatagttacaaggctactttgattctcctagctacgatagtctaaaatatctctgcgtaggcttgtctcttgtggtaaagttttatgctttagctgatcttgatgacatttcctgattagaaatttatagatggatggaatatgtatgattttgattgtgtatctgtcaaattgtttcttagatcgcttgttattgattgcaga

SEQ ID NO: 41917 - DNA, 625 bp, Arabidopsis thaliana columbia
tatatagtacttactaaatggaaatacagaggaggtgccaaatttttatcatacaaactgatttcttcggtggagttgccttgagcgaaagaaatagttgtctgattgttgttgttggaggttagctggcgacctcgatcacgatgaaccaaggccttgtagtagtctaggctgcccatttcaggcaaaccatggccacctagaacggttttgacttgctctgagaatctatggtgaatttcaaaggaaagtgatcctgaaacagaagaagccaatcccaaactcatagcacagaggaatccaaactgaaacatccatctcaacttccaattactccaaatcattctttgatcttcctatctttctctatgaatctaaagttaaagaagaaaaacaaagaataggtgtgttgattcttgctagttgagtttccttttactacacgaaacttgtttgttttgttttgtgtgtggaatatgagggagaaggtcaacgttttgtctggtgcttggtctttgtcaacggatttttaaagatcgttattaaaggaatatgttgccaacgaaattatcgtatttaattcaatttttgaacatcaactctcatatttaattattcatagaaa

SEQ ID NO: 41918 - DNA, 223 bp, Arabidopsis thaliana columbia
aatgtttgtgttactctgttcttgcagctgaagggttgaaattctatgacattgaggaaggcaaaggtccagtagcaacagagggatcaactgctcaggtctctctagctaatgattcacattttaatttctctatatcgaaatcgagttctcgcctttacaatgtaatggtgtcggtatattccacatttaggtgcattttgattgcggttacagaggcatc

SEQ ID NO: 41919 - DNA, 574 bp, Arabidopsis thaliana columbia
taagatctgctgctttttagtggacctacacttttgacctcttctttcatattttattcatctttttcttacttttctattagccacttccaatttcactctctttctctaccaacttttattagtttatcatttcttcacttactcgtaatagtttagtttttagtaatgcatttaaggttgagtggtattgattgaaagaaatcaatgtttgtaggacttgtttgtttttttgtctactgctttgtttcattgcacagccgaatatactttctgtctgcaaacattattatgttctcaacattttatttctacaccatgagaatatttcatgaatgcacaaactatgattctgatttcagaaagacatggattcatcgttagcataacttataaaaacacatttgtttatatttattgtaacatcaacatacatatttagatgatattgcaaattaaacacagagtcacaaaccacctaagaggctgaacatctgaacacatgtctatatccaaaggagtgttaaaagggtgtatttctcaagcttgacactgaagtcacattgtatgttca

SEQ ID NO: 41920 - DNA, 598 bp, Arabidopsis thaliana columbia
tgggtcatcattgtggcccaacatgaatagccacttcttgctctagctcaataccatctagtgggtcttgaagaggctcaacgtgaactaccgtttcttgttgtaggtcaataccatctaatggacattgatgaggtgcaataatacaatcttgtgactcttgatctagcacaatatcatcttgaaggttttggtcttttccatctgatgggtcattaagagccccgatacagttttgtgactcttggtccggtccaagaacccgattggtttcttgtgggacgagttcttgctctagctcaataccatctagtggctcttgaagaggctcaacatgaacaaccattccttgttcaagctcaataccatttaatggaccattaagaggctcaatagaatttccagactcttgatccggtccaagaactcgataggcttcttgtgggacgagttcgagtccggctgcgaaaagcgggacacagactagataatgtttatgagaaacgtaagagatcgtggaaccgatgacgtggacaatgcataacatcaaaagatatgcgtttaatgtgtgccatagaggctccatcgtttgtgtaaa

SEQ ID NO: 41921 - DNA, 554 bp, Arabidopsis thaliana columbia
  unsure (1)..(554): unsure at all n locations
atatggcaggttattgatttcatatatgctgattgaatagatttctcacactcgaaaatgaaattaggaaccagcaaataaaccggagtttctggttaattcaggtttttggaagatctgatgagcagtgaggtgaagtatccggtgattatgacagctttctgggcaattgaagcagtgtatcaagagagctttgctcattgtttagaagacgggaacaaaactccggtggagcttaccggtgcttgtcatcgttgggggaatgacgggtttaaacagtattgttcgtctgtcaagaacattgccgaacgttgtctggagaatgcctccggtgaggtgctcggtgaagctgaagatgtacttgtacgagttcttgaactagaggttgccttctgggagatgagccgtggaggacagtagctaatgtttgggtttgaatttctcatttcctctaaatgccanagagaaacaagttccaatctttatgtttggtgaacacaagttgagattatggtttcatacagattacatgaatacggatttgccctgactgg

SEQ ID NO: 41922 - DNA, 365 bp, Arabidopsis thaliana columbia
aggaatggagttcatcgccatccataccaacaaaattacatctcgcgttcgagtgcgatcgattgaacgtgatcacttagatgtgatcactgcaaccgcatgactcccgggtctctatgtgcatactattcaacggagaactggttgagacgggtccatgctaagtataatggattagatagggttagagcatcgggatgatatggtgaagtgtgaaccttcgctatgcgctcgtcacgggatgaagctaagcgaatctcttataatatgctcatagttaattcgaatactccattcaacatggtcgttaacaaacaaacacgggttcacccgataatgcttgtcaagttggggcgttggttagg

SEQ ID NO: 41923 - DNA, 505 bp, Arabidopsis thaliana columbia
gccaactataaatagcttgcagattagattttcttctgttccacaaatttctaactaatatgaccacttatagtaaaaaacaacaacctgctttatatgtaactttttttcttttccttgtccttaaagagataattcagtttttttctttctcaattcatatgaatcaaatcaaaccaatataagactatattcactgtaataaaataattttctaaatccgacatgtggcagaatagaaccttttgccaataatttccttttaaaattaattttcttcctattaataaccaatccggaaaaaatgaaaatggaagagaaattaatgtgaaaagttggcaaataattcgttagagatcacctgtgttacacctcaccgtacctcttacttatcaaccgttgatcttaattctctaactccaattactccacgtggcgtgtttttataggtgaattcaattatgagaaaaaacgcttcgtgtatgttagaacacgaatcacccca

SEQ ID NO: 41924 - DNA, 1052 bp, Arabidopsis thaliana columbia
acccacaactgcagttaactaagttgaagccaaaatatttgggaactctatgaattacaatcgcctactctaataagtgagataattcatcaggttgactattggtcaccgaaaaaaaatagatactgaattatgtagtccagttaggcgtcctagtcatattataatcatgttcatccacctaatggcagttctcaagtctccatcagaccaaacctacctaattaagagcatgatgggtttctgtttatggaaaatagcatcaaggcctaaacaggtaaacataaaacatatgctcttaaggttcatatacaataaccaaaaaaaaacttttagtataatgaaagtccaaatttccaaagaagggtcactggcagagggtgataaacctagaaaccttggttgtatggtctacctagcaatagtatgtatagaaaataaaggtttaaaatgttctgctgcaactatgaaagctagaactcaaaatacagcacccaccaccttctcggtttaaacccagatgaataagactaggcaataactgaagatgtcatgtctccttgtgtgtaaaaagggctccaaatagttgctgacacaaaggccagaacgacagaaaaatccgggaaaataatacagaggatatggaataagggatatcttaatacttacttcaagcgattggccccaaatcgatcagcaaactgactaagttcggagacagtgatagggttgaaaccagcagccgaagcacgattacaggcagttgctaagtcctgtctaactgctgctagccgtaaatcaatagctttcagtaactcctttctggaaatttacaaacacgggaaagattcagcgttacacattataagactatttaaatcaggcgactttgcaagattaagagactttactttgtcacatcagcggctggagtagtatctgtgctatctgaaccaagaaaggtttagttagattaagccatcgcacaatttctcatggacggtatatgcaacggaatatcaactaactagaagacaagttacaatgtgcat

SEQ ID NO: 41925 - DNA, 476 bp, Arabidopsis thaliana columbia
agaagtttgagcagaatctaaactcattacaggggagatcgacgagagttagttacccgaaggagagttacagctatcttgtactgagcacagattgtggcttgagctttgatatctgcaccacgcgattgatccttagccagagccaagaatgcttcgtcaaagcaagacagtgcatctggaagctggttttgttcaagatgggcaagtccagtcttgaaacaaaccggagctgcagctccaagtggaacctgaggagaaaagcaaacaataagatatgcacttttacgtgttggatttgatctatatatgtaataagaaacatcagaaagattaattagtgaattccaaaatcaaattcacatttacctgtccaggacgaactgatgcaggaggcgattgaggttgtccaggaggcttaccagaatcgccggtatttggaactccaagaacgctaagatcaagaggctgtgtag

SEQ ID NO: 41926 - DNA, 515 bp, Arabidopsis thaliana columbia
cccatgcacgcagcagcattatccaaacaaagataaacaaatggatcacgtagatttattaaactattcaaaccaataacatatcataagcaaaacaaatcagacaaacaaaaacagagagagtggtggatggtcgtgcttagcacgattcagtatattactgaggtcagagggtcaaatcaatgcaaggtgtaataaggttgtcatctccattaccattttttattacaaagagaaagagagattcttatttactctaaattaatgtcttaaactttattttgccaagactctaagacatattaagtagcatataatccataaaactatagagtagagagtaattataagagtgttaatataaattcggtataagagaaataatggttgagagaagagggaagaggtcaaagggggagaaagagggaaaatttccctccaaggaaggggggaagatgatgacgtgtacaactgccaaaataaaagcaaaggttcctcttttttcggccattttt

SEQ ID NO: 41927 - DNA, 580 bp, Arabidopsis thaliana columbia
ggctgtacctgaaacaaaacaaacaaaaaatccttcagaaatcaacagatctgcaacaaatctcagcaaatttcaactagatctaactatttcatacacaaacacccaaaattccagtttccgatgtatgaaattacctcaatcggtttgtatctgtcaggccaggtactcttcgcttcagattctggaattggctcgtctagaaacctcgcaacatgcttttccccttcctcgaccactgtcaccggctcttctttcaccgtcttagctcgcttaggagctctcttcttcggtttgggaatggatttggtagtgtcatcctttgtcgcaggtctctttcgcttcggcgccatgattgagtcagagaatcgaaggaagctaaagagacgaaggaagataaagagacgaaatgaaaccctaggaagcgggggtgtgacgagtgtgaggactaaataatctgagattgagggcgaaataagcgcgtcacataagcgccaaagtgatgggtttcgaaattttcgtggaattgttttatttttataatgaatttaaaacgtttgggcctaataaaagttttgag

SEQ ID NO: 41928 - DNA, 458 bp, Arabidopsis thaliana columbia
gggttaaggatttgacatcagcaactggtaggagcccctgaaattagtagaagatgcgttaactcaaggcagaactttgtatccttgcctgaaactatcatatatcaaaagagttttttaccatgttcgtcatcgaatgcaaggcagtaagctttaagctcgcgatctgtttctctgttcatacgttgaccaatcaaaaacgccgaaagcaatgactcgcttactcccgagtttaaactaccttccgtttcaagcggaagaacgtctcttaaaacacccttaacctcctcataacctaagtgacctccagccaaaatctctctaagcgcaccaaccaatctcatctcacgagtttcattaccaacaaaagttggtccaacagaatttcccgtacccaaaagagagccttcaggatcagcaataaagagcacatcaggaggtagtgcctaaccaagagt

SEQ ID NO: 41929 - DNA, 493 bp, Arabidopsis thaliana columbia
aacaaataaattaaaattttccctattttttttgtttcgtaaactcttttaaaataatgctaacagtaattataaacagaagaatctaattcacaagaacaaatacgtttcataataatcgccataatatcaataatatgattactattactattaccaccacctctttgtattatatcatgattctttatcgacgaagccgccgagtttctcgtccttaactcagccagtgaactcgcttccggtaccaccgactcactcgtaaccacttcaaaattcttcgtcatgtgaacattcccaacgagttggctcaacaccaccgattccgtaaccgagttcttcttcttatgctgctgctgaatcgtcgctctcacgatctcagtgtgcatcgagctcgataacctcctgattcctttagctccaccgatcagaatcgccggattaacctcggagcttttcttgctactactactgtgtttagagcagaagagga

SEQ ID NO: 41930 - DNA, 493 bp, Arabidopsis thaliana columbia
gaaatcttttcttcacctttatttaaggtttccaactaaaatacttcagtacatttactatcacaaccatacgaatttaccaattaaaactacaaaaaacatgcataatacaatctgtttgatcaaaaagaaaatgcataatacaaatcagtctaacagttttaaaagatactatattaagtcgaaacaatgatttatatattttcaatttgcaatttttaattataataaccacagtttacttgggatttcatttcaactaataaagcaataattaaggaagttatctctattagactattactgaaaaagacgtgaccggagataaaaaaaaaaaaaaaagagtaacgcagttccttgctcttctttgacacgtctctggttgtttccacagctgacgaaagaaacgaaactcaatgaagaaggctaaacaaaaaccaaaaaaaatatagtattttaaagaaagtcatcgaaaacaaccttcattcaattt

SEQ ID NO: 41931 - DNA, 557 bp, Arabidopsis thaliana columbia
tgtttataattcaacacacaaaaaactaggttatgtggaattcgtagttgtatatctaggattccaatattctattggatgtttaatttcttggatccatcttcataatactttttttatcatattgctaaagtaaagaaatgttgaatagtgggagtggagggagatatgaagctttgacttttctcacgtgaggagaactgggaagtggagaaagctttgtctttaaacgtatatctttgacagtttcgtgacataaaacattgaccgaataggcacatgagatatcgggtcgggtcgggcgtatcactttacgtacggctaatgcacggcgcaatacgtggtccgatgaatgcggcaatatgggtccttaattttttttgctttctctttttctgagacttgttgaatttgtttctaattaaaaattcactttcttctatgtaagtgggagtctttctctacctcctaaagcgaaatctcttaaaatttagggggtaaatacattggcggcaatcggtaaaacatttttgaatggaaacatatatctataaagt

SEQ ID NO: 41932 - DNA, 603 bp, Arabidopsis thaliana columbia
caactctcccccgcttttattggtgcttaaactcgatcactccgtctcttcctcatggtggttagtctcttttctctctttcaattctcttttctctgaaattgactgcatgattcaaattctttgcttctgatttgttcaatttcgattttcgtttttggtgtggaggagaatcatttccctgatttcataatttggggattttgaatttgaggaccttgtctttttgccccccgttgaatttcgaagctaaagattgtctctttttgtttaggcaaagtatcagtttttgtttttgagagaattgaaaaagcagatcctttaacaatttcccgattcattgtttctatttgccgttaatagcaacaaaagcaatcacgtcaatagtttttactgtataaagtttttgcaaattttggtaagtcatgtatgcattttgtatcctagtgtgttaaaaagttacatcctttagaggtatgcatttaccaatgactttcacgaaaccaaaaggattcagctttttacttgggtctgataaaaaatatttctgtatttggggttagcaggatggtgttttcccgctgtgggcttttcatgcagttg

SEQ ID NO: 41933 - DNA, 572 bp, Arabidopsis thaliana columbia
tgtatcaacaaaagactaaaaatggacaaataaatccacgcagattgtaaatcagccaccactaaatactaacttctcacaattctcactcttttgctattgtttaacctctttaagaagatggataaatcgtatcgttgattaaaaaaattagataaccaagaaaaaaaaaaaaagtgtgagcaaacaaaaaaaaccctaaatcgcgcacaaacaaaacgaaagcccagcgtaaaggcctctttaatataaatgggctttctaagcttatatatatttacgggctttatgtgtgtacagagaagaaaaaaacagacagaagcagaagggataaacaaacaaccaggcatttgtccacctttcattttaagcattaaccatcttatcttttcgccttggaacttccccataattacaccacagactagtcttgattatcggttatttttcttattacacgagggtaaattagggaaaaacacttctggagcctttatcctcatgtccaaccaaaatctttacacaattcctagttcttaagaaaaaagtggaaattttcctttaaatttagt

SEQ ID NO: 41934 - DNA, 488 bp, Arabidopsis thaliana columbia
atagaaattttggggaaattgttgcacctctccactctttgccagtctcgtgtgatcttaattgactcaaaatgaaagaaaaaaaaacatgaaattaaagcaaatattcctatttgaattatgttcctttaagatttttaacaatatttttaaaatgataaaaactggtctcaaagagcctaagtgggtttcctagcaaaaaaagatactcaaagtaatttactcctcaaaataatgcaatgatctaatgaagatctgttcaaatagtattgattttccaaatttaattatactcaaagagttttaaaatctgttcttgttattctatgctttgttttacatgtaaagtacttaaattcacttgatatttgttattactataattaaagaaatgtgtcacaatttaaaggagcatgcgtgtaatgccatatgccttatgtacgagaacttgtaatgcgtttgcaatttgtagtgacatgtaatgtttt

SEQ ID NO: 41935 - DNA, 264 bp, Arabidopsis thaliana columbia
ctcgacgctcccctcgtctgttatcatcctacaataagtttactcccttgacatatgctgctatatacattaattaagtggcctagctaacatggtcccatctattgatcacagttcttcagacagagtttgacacaggtatttagcatgcatgcactcagtacagagatgcttcagctatatatgcatgtccttgtgcatgtgactcttgctctcttgagtcctatgtgagtacaacttgtaatgctgtagcttaaaatgtcg

SEQ ID NO: 41936 - DNA, 584 bp, Arabidopsis thaliana columbia
ggtcaaaagtatgagacggaagggacaggaaagtccagggataacgattctgcgctgcagaccaccaagaaccttgtcattcgttaatgtctttgtcatgatggagcaaacaaatccggtggcagcctggggagggtccaccgtgataagaacagggacccgggaaagcaggggtgacccacactcaggccacagatctctgggctttgggaaccgtctctctaaccagaaaagcttgtacgagatcactcggggccggatcaccttggaatcttccacaccctccaaggaggctagtgcctggtgagcagggcaaggcggaggcagacaaggtgccaggatgcaggtacccggccttgagaacgggcagccccttcaatctgcaccacggtcacatgcgggcctgctgggttggcagccgggtgggcactcgggggcccttttctctccctcatgctgcctgatggatgtgccccccacagcaggtttctcagcctgtttccaggtgttgggacggatgtgatgtccagcctctcaggtgcccgcatccagccatgtggaccaagcagtgagtggctctggaa

SEQ ID NO: 41937 - DNA, 531 bp, Arabidopsis thaliana columbia
tcccctaataacacaattcattattgattgattaaaaagattatggttttttaatttatatgtaagctgatataaaaaaaaaactcagttttaagcaatgattttctctaagtttgttctaaaatatcatttttcaatacatgaaatactaaaaaagaaagtttggattcatttcctacacaaatttatggttttataaatgtacaaagaatattgaactaatatttcatgttccgattatatataagttcccattttcaatcgatgagattaataaagaaactttctggagtatatatttaacattttcgattttatattatgaagctaaagtatgtacagtatgttggtgaaaaaacatggatcgttaaataaaaaaacatattaaggaggagaacgaccgagcatcttctaaagaagattaaagcataagaacattggaataaggaaggtgaagtattgtcgtggacattcctgagtgggaagactcaccattacatacataattaattagtaacaaagacattggcg

SEQ ID NO: 41938 - DNA, 465 bp, Arabidopsis thaliana columbia
tccccatataggaagtaacttggagtgtcactcattacaagattccaaaacagaatcagagcagagtatataaccaacctgaagctattaagacagaaacgacagcagaaactgtagcggtagagatgacgaatgcagcaacggataaggctccaatgtaaacaccagtcaagcagagaaagaagagtgccaagaagccaccagcaacagcaagtgaaatcagaagagagattatgatagcattggctgttgcagctacaaagaagagtgtgaatacaaccaaagccattgttgtcaaaagaactattgttcccatctgcaacaacaataacaagataataactaatcaacatatagtctcagacacccacgaaatttggctcaaatgggttcaataaagcactaaacttttcaataaagtaccaaacttttcatcaatggtaaagagttacagaaccaagacga

SEQ ID NO: 41939 - DNA, 314 bp, Arabidopsis thaliana columbia
catattcgtgcgattggctgcccccaaaacaacggtccacatttttactgaaccaggaatttaaaatttattttatttttgaatgaaggtgccaaagccaaatagcctgcttagtgctgactgcgtggtggcatcatgttacgatgatgacgacatctttcatgaaccgactttcgaatttaatgacatcttttaatgacaccttggtgaactgttttgcataaatttcaagttagttaaaaaaaaaagggaagatagttctgtatataatgttgcagttttgatttgtttctcaaacactaaaaaccaaaatt

SEQ ID NO: 41940 - DNA, 228 bp, Arabidopsis thaliana columbia
caccatttaccattcattaaatattaaatgtatacattggttttatttacctaacctatgtttatatgcaactagattaggacttttaattttattaaaataaaaatagatttagcaaaatgatacattaaaattatatagggattagaacctttatgtaataaaaaaaacctatgcattaatatttctgcatttttagttttaattgtcattattttgtaattttaa

SEQ ID NO: 41941 - DNA, 536 bp, Arabidopsis thaliana columbia
atcacccctttgttttattttaaccccacaaaactcgaaaacctttttcccattttctcactttccctcttcttctcctccctcaaagcttttccctctcatttttctctttccgctttcaagcttcttttccctctctcaaaaaatggggaaatacatgaagaaatcaaagataactggcgatatcagcgtcatggaagtctctaaagcaacagctccaagtccaggtgttcgaaccagagccgctaaaaccctagccttgaagcggcttaattcctccgccgctgattcagctctacctaacgactcttcttgctatcttcagctccgtagccgccgtctcgagaaaccctcttcgctgattgaaccgaaacagccgccgagagttcacagatcgggaattaaagagtctggttccaggtctcgcgttgactcggttactcggttcctgtagctcagagctctaatgaagatgaatgttttgacaatttcgtgagtgtccaagtttcttgtggtgaaaacagtctcggttttga

SEQ ID NO: 41942 - DNA, 588 bp, Arabidopsis thaliana columbia
tgtttactcttctagcaatgctgttgatgagaaacgtcctggatattactttcttggctcagatagatctgaaactatgaatgttgtctctgcttctcgtgtggagccttacatgtgtgatacagattgtaatccttcttttccaatgccgaattttataacacaagctctctttgatggaagtcagactgggcttcgtgtaggagatgggagatcattcccgagcaacagtgatgtttgtagtcatgcgcctcagaattttttaggagctcaatccagcttgcagagttcctctgttgaaccagttaacttcgatgtgttactgggatatggtgaagctactggtcatatcaagcctttgcccgagaatccaaatcttccctatccggtagttggctcgcaaggttcgagaagtccgcgatcttcctaccccttaccatctattattaattcctctgtgtcactgattaaagatgaagtagaaggtagtggtgtctcctcctttatcagaggccttatactttggttgctgacagtgagaatggtgtttctgagagctccttaaagaatgcaactgaggatttaaat

SEQ ID NO: 41943 - DNA, 266 bp, Arabidopsis thaliana columbia
ataatcaatgctataattaacagtacagtactcatcattacatgtttgtaaagagtaatgagttctgaaacctcgatatctatctgcttattctgtaatcacgtacggttgttcaaattcagacaatcatagtcccttttcgataaattaggtgaatgtcgcacatcgttcgggtagaataacactgcagaaaagggacacaatcgcataacctaaatattagcagatgcagagcttagcatctttagtcaggaaaagcatagcta

SEQ ID NO: 41944 - DNA, 534 bp, Arabidopsis thaliana columbia
caaacacaactaatataagtaacaccttgatacaataagaaatactttctgcagtagacattgtaaagtgattaacgcatgtcagcttcagaatagaagatggaaaaccacttactctcctgaatgctgctattactctaacaggaacccaaccttcatcattcatctgatcccgtaaatgttcatctctgctcaggttatcagcgctgcgtttaaaaattaacaaaggataaaatttgtaattcacacttctgatagatgcatctaatggagcattggggtaaccataaacaagtagaaaagtgcaaacacaaccaaataaaactgaaacgattacctgaaataatattctacttgtgtcaatatcttattgtacaagatggcatcaaaattgcgaaaatacatgggttgaagtgggaagggtcaactaaacccatcggatctggagatggatgtggcataaagacatgctgtgcataatctgaagatgtaacatagcagaatgaatgaattagaaatgggaatgtatgagag

SEQ ID NO: 41945 - DNA, 597 bp, Arabidopsis thaliana columbia
ttcttggaatcatttggtttgtttgttcctcaatgttttccaattggtatcttttgaagggtacatcttgtctttctttacaaagtcgatttctcaatgttcgtgcaggcttctcaaccctgatctggaaggttcaggatctctctttgctgggaagtacattctgcagcttatcttgcatcttccgtcagagatggcaccccatgtccaggatctggttgctgctcttgtaagacggttgcagtctgctgaaattttggctttaaaaggctcattgctactgatttttgccagattggtaatcttcacctttcagttggatagttttagtatattaatggttcctatcttctttgtaaggtgctgtcaaggctccaaaagttcacaaaaattttttatcagtcctgcgctgtaaccattgatttttgcaggttcatatgagttatccgaatgtcgatcagtttatcaatctgcttgttagcatacccgctgatggccatgaaaattcctttacatatgttatgacagaatggactaaacaacaaggcaagcatctatatccgtgttgtctagttgtatactctatttgtatacgta

SEQ ID NO: 41946 - DNA, 518 bp, Arabidopsis thaliana columbia
tcgggatttctttccgttgctcacacattttgttacctatttctcgtttttatttatgctttggctcttctctcaatcatcccgaccacattttcaatcgattcattttttcgactgctcattgaccagtgacagagggcagaggagttggccggcgacccttccttctcctcagcctttgtctgcatcgacctttttgaagtgttctccaacagaacaagcccatctcttccgatctaaatccgatccgatctcatccatcaccacgcttacctccgatctcttttatgtgtgtacctcgtcgttgatgatctcagtcccaacgacatcgcttagctttcatcgggaggtcctatctgtcagcacagatccgtcgtaccatcaccgtcctctggtcaagggaagccttgctacggtttctcttaatgggccactcatgtgtgagcccaataaccaattctaggcctatccccaaaagcaatgacccatctccttgaatgacttggcccggccctcca

SEQ ID NO: 41947 - DNA, 574 bp, Arabidopsis thaliana columbia
gctaatcttccggtacagaatcagtagtcttatttttcattattttgtataaggcattcactaaaagaacttctacaattttttgtgtttgcagactctctcggtgaagtatgagatactttgcaaaacttttgattccgaagctaaatctgtgttggaggtttgccctttcgctgcaccactcacatttatgacaaaactgctgatctaatataatatgtgagtgcttcttttgctttttatcttggtattgtattattaagactgctatgattgctttattttgcaagaagaatgatgaagaacctaccaaagattgagtatcaagcatggaatagcacatatagattcacatgtaagtttccactttggtctactggagatatcagcaatcgtttattgtttagttttctgaaaaatctgttgcttgaatctgacagaccacagaggggtgtgataagatgcatttagaaaacagacgaatccgatgaagacttggttccccaatgacttggttccaccagaggcagatacagaccccaacaatgcctacaactgcaaattgccattttga

SEQ ID NO: 41948 - DNA, 432 bp, Arabidopsis thaliana columbia
tgggatatatgtttcaaacatcgttaggtaacaacatatataggctttcacaacattttgtcgttttatgtctatgcataaacagccggagaatattatacgacaaacaaatatcataacatacatacatatttacatatatatatatatataacgcatatggatattttccccattctcaccaattaagaaaaaaaataactaattatttatagatgcataataatatatgaatacaacaaacgtacgtatcatacgttaatagattaccaatagagggtcaggtcaatcaattagatccatgtgtttcgagcctgtaattccaacgttaatatgatcactcgatggtaatattttatttattttggcatacctttgtacagtttttatgattaacatagacatataccagtttatatacgccctcatata

SEQ ID NO: 41949 - DNA, 561 bp, Arabidopsis thaliana columbia
gtgactattattttgtcttcttactaaaagtgaatcattcctctaataattaaactatactttaccaaacttatatgtacattggttttgatcagcaagcagctctcgtagctcagttggttagagcacccgtttagtaagcgggaggtcttgagttcaactctcaacgagagcatgcttatttttatttttattttggtaaaaccaagtaatcaaattctagactgtaatttttctttttcttgttttacaaatttagttgaaggtacataatttgcatggctgtattaatacccaaatatagaccctacaaaaagaagacaataccaatacagaaacaacagcaacaacaaagatttgaaagcatctcttttaaaaataggatttgaacacacacaaagaggtttttgtgttttctctctgttcatctctctctctatctctttctcgtaaaaaacaaaaaaaggagagagctttacaaataaaatcatatacaaaaagaaaacaccgaaagagagattatggcggaggggcaatcccggagaattcaccgcgtcccta

SEQ ID NO: 41950 - DNA, 496 bp, Arabidopsis thaliana columbia
ataaggggtaagtaaatgagagataacatgtttatcagatgaaatcaaccaaagttttttttttttttgttgcttccacatgcgcatatgtgaatacgtaaactgccgacaaaaaaaaaaaacattctttctttattgcgttttctaagcgagaatgtcgatgtgatcagttaatgcgaacgggtaaaattagatcagtatttataaaaacaaaaaggcagtggaaaatctagggtttctaatattaatagccttgtaatcagcattaacttagagatatttaaatctcaagtttcattgtcaacagaacttattagttataataactgttgagtgatgactgatgaccaacaacgagtacttgaactttattgaagaacacgcaaagaacaaatagctctcgtagctcagttggttagagccccgtttagtaagcgggaggtcttgagttcaactctcaacgaaagcaattttttaaacaaatttacattttaca

SEQ ID NO: 41951 - DNA, 687 bp, Arabidopsis thaliana
  unsure (1)..(687): unsure at all n locations
tgtatgatatatagaaacttgattataatagaagtatgacgactacgcagaggctatgagaatggttgagggtgatcatataaaaaattggcaggcttctagtgatagtgggatctttggttcacttgatatggctgttgaagatttaggattccttatgaaaagaaataggttggatagtggtgatcaaaccggtaaattccctagtagaagcgaaaccngccgcctagcatggaaggttcctttgcagctcttaggaatctcttgaaacaacaagaaggtagtagctctgaagttttaagtagggctattgagaattatgactcggaagaagagatacgtagtgatcctgcttatgtagcttactatttgtcgaacatcaacttgaatccgagactccctcctccgttaatctcacgggagaatcagcacttgttgcgtcattttggtgataataatcagagtccaacaacttcttgggataatatggggataagatcatctttgcattcttctagaactgctctttcaactcatagagaggagcccgaggatgaggcatcatcgggtgaacaacaatcttatgcttctttggctggtcgtcgtaagagggtagctgatatgattcaggtacatggttccttattttattactaaaatagtaattcattttacataaaggaagat

SEQ ID NO: 41952 - DNA, 1043 bp, Arabidopsis thaliana columbia
aaaatatctattgaagctctaatcatcttcggattagttagcggagctacttggatcgaatcctttatttgattctgttacagaggcagagaatacaggttcaagactttcgtttatgctctttgtttgtctctttaccctttttgtcctctgaggagtatcttcaccatttgcttcttcctttgctttctgaggagctctagctttcggatttgaagcagctctcctctgcaaatcaccatacataaccatatgcttttagtatatatactcaagccagaagttatcaatttagcaccaagacaagctccataagtagaccaactcaagttttatttgcagctagctaggccttgtatagtgcatagatcatgaaccgaacgaatattgatacagacttttggtaatgagaaaggtaaaagaaaagagtgagtttgtagcataatatacctttttattactggattttggcttttccggttcttccaaaggttcctgtccgttatcctgtcggtcaacatcttctaactcttccaaagttgcatctccttcagcatctattctgatacgtttcgtctttttcttctgcctgtcctttacctggatgatgtaaagaatttatgagtggcagaattctaagttcgtgaaatattaaatgtaagaagcatgtcgtccccacctgtaatggtagttctctgaatttctgctccagttgtgctgcctccgcatcatccattagcagagataccacatccgcagctccaagaaaatcatcaccctgaacatgtcctccagtcataacaagctgttgaactgtatttttctgacttgccctgtgcaaaattttctcttccaccgtctccttacagatgagacgataaacagtaacctattaagaggtttcatttcagaaaaaaaagatcaggaaaataaccccattggcagatgcttgttcacttgtatgaagctttggttatataaggaagcaacaaagaaattggttctcaatgcacagtttttttttgggaaatgaaagcgattag

SEQ ID NO: 41953 - DNA, 662 bp, Arabidopsis thaliana columbia
caagaataaaggaacgcaaaaagagcagtgattttgtgtagccatgatatacttggaccgcgaaagatcttccatcctcttcctcaaactgctttagttgcattaggccactggtatcttatcattgtttttcttcttaccaaatttgtatggtggagactaattaagtctattctgatctaatatttttcacattcgatttatatatactctaatgggcactgatttatccttgattcaaaagtacgctctaaacacaacatcacaaaggctaaatctgtatatcgcccgatataatgttaactatcaataggtctaactaataatgatgaagccaacttatacattacatcttgataattagaagacgagttcatgcatgtgttggccattcacatttttattctagctactgtcagtgtatgtgaatatttctaaataagaaaatggtttgtgtgtagcctccttctgataccatgttaaaaacagacaagtataaacggtttcttgccttattatatggaaagccctaaattactcaacatacacaagagatcgttactaattgtgtgggaaaaaatgtaaaaatatcaatactattttcattagcataaacagagagtcatacatcaacatacaccagttgattaactaaactgaaa

SEQ ID NO: 41954 - DNA, 547 bp, Arabidopsis thaliana columbia
cctgctcctgctctggtttcggctcctctgcaacttcagcaatcatcatttcctgctcctggtccggctcctctgcagcctcaggcatcttcgtttccttcttcagtctctcgtccatcagcccttcttctgaattttgcggtctgtccaatgcctcagcccagacagcctctcatatccaacatagctccaactccatcagttactcctgcaacaaatccaggtctgcgttctcctgcaccacacctaaactcatatagaccatcctcttcaactcccgtcgccacagctactccaacctcgtcagtgcctcctcaagctttgacatattcagctgtgtcaattcagcagcagcaagaacaacaaccgcaacagagcttgagcagtggattgcagacaacaatgaagtggtttgtctttctgacgacgagtgacctaagaggagagatggttagggtcttagttattgatttttagagagttaataatagtatatatatatatgtataagtaggttactaatctctgtcgttaactaatttagtga

SEQ ID NO: 41955 - DNA, 566 bp, Arabidopsis thaliana columbia
agtttcttaaccggtttatctgaaaaaaacttcgtccattattttgtgtgtgtagctactgttaattcgagtttcgatatggacgcaaatcttatttcaagctagtctccttatttgatagatacaaatacataacataaaaggtccaagtacattatttgactgatataagaaagagaccttgaacagcattacaacaccaacaatctcataacggtgcatagtttcaagggttgaccttgggagcccatccagagatcacatacttttcctcggtcttagttttctcaaaagagtcgagcgagaacagagtcttcatgtagttatggacatggggaaagctctcagggacagaccagcttttgaaatggccaagagcaacttgaaggtggtaaagctttggtgctaagcttagatccactgcggaaactctttctccggcgataaaaggaccatcgtgactcttgagatggttctcaaagcttctagctcaacaagaaaggcatgctaagattcatcattggatctttgctcttcaagaaagtccgaaagtacgaaaatgttgg

SEQ ID NO: 41956 - DNA, 549 bp, Arabidopsis thaliana columbia
tccctaactttgattgacattttaagaatcaattttggatcgacatttagttgttattagctaacatagatcttatatatgtactgttggaagttggaactaataacaataattacatttgtgaaagaaagtcttgttggaattggataactaaggaacctccaaaacaattaacctttatttagcaaacgccacccacctatttttataaagcatcaacgcaaaattagaaattagaaatctataagaaagtaataaataatcaaaagtaagtgtaaatccatttagtttactttgttcgttttgaaaatatggcgatgttgaaggcaatatcggttttatgtgtcgctctactgattatttttgttgttaaggcggatacaatcaacagggagcaagttatatcatatgagtcaatgcgtgtgaatcatgcatggggatgttctcaaaaatatcctcagttttgccagaaaactagggcaaatccatatacgaagccacccccaaaaaacagtgaagcttcataggggttggaatttttgtgatatg

SEQ ID NO: 41957 - DNA, 619 bp, Arabidopsis thaliana columbia
gatagataacgatggagaggctcatatatatcaaattctgattttgggagttctgaaacctgcatgtgatcagaataatgcgtctctgtttcttgtttgttgctaaatgggccgaccaaactaaggcccaaccctttaagtcatacatttttgatttgaaataagaatactttatagcaactaggaccaacaaaaatgaaattatcattcctaataatgttttcttacaatttggttatataatttggcacacaaagcgaatctcatgcacatttgtcattgatgttgctagtaataagcccatacccttcaataagacttcttgccgctattcgtgattcccatatctaatggattattgattattgcactttgcaactcaatgcgcacataagacgagggtgatttgtcttgaacaaacaagctcaaacaccatgtagtactttaatatagatttttgttgatatgttcgtattgcattgcatgtaataacacgattttgaaacaaatatttagtcaaactatagtagcatgactttaaaagaaattattaaagatgtgttaattaaatcataactctaagttatgatggtttagtggttaaaagttcgtgtgcaag

SEQ ID NO: 41958 - DNA, 625 bp, Arabidopsis thaliana columbia
gctctctattgggaaatccgactttatgcaggtcttatatcgttggtccggtctctactagttctccggcgtttctgatttcgagtcgtaatggtgatggtgttacgggattgtactacccgatacgtcgtcgtttcatcgggcacactgcggaacagttctcggatgatgagtacgagtgtgaattcgaggaacataaggttcgtgttttgttcatgatgctaaattgtttagataaatggaatcaatcaatcaacatttgtgttgatctccagagtaaaaagtttctcaaaatggaatttttaggtgtttgtcgattagattgtttggtggaatgactatgtaaatgagagtctttgaacattttctgtttgatcctttatacttgggaaatgatttgatcctaggcgtgaattggttttataggcttcatcttctgtggccaatgttgatgagtggaagtggaagttaggaattttgttggccaatgatagtgaacaagaaattgtttccagagacaaaagggatcgaagagattatgagcagacccaaatcttgctaagagaatgggactttacaggtatagaaactgacttttattggaatcaataccctatgtgttgtg

SEQ ID NO: 41959 - DNA, 580 bp, Arabidopsis thaliana columbia
tggtgacatagcatttaaagttagtatggtgaagtggtttctgtaaacctttaattgtttatgttaatgagtttgagcctctagaatgtaatataactttttctataacttactctttaatggagggtaaaacagacattacataatcatcttcttcacaaagtttgtcgactttgtaaccctaataatgacgactgctcggtttttagacatttgacatcatttttaactcgttttggtcttgtttgtgcacaaatatgatagatctaacatgtattttatccataaactacaaaaaaaattcctctatgaattaagcgatttggactccataaactaaaaaaaataaatcctctgatgaattaagcgatttggacaaattctgacggttaccggccaccgagtgcttaggcgaccagggaggccacattttttaacaaggataagaaacaaataaaatttttaaaactgtggaagatccagctttcctactgatataaacagagccgactcaacaaaactttagtcctaagctaaaagaaaaaataacgttttccctaacatttttgaaaatattttt

SEQ ID NO: 41960 - DNA, 486 bp, Arabidopsis thaliana columbia
caagtaaggcaagaagatcaaattttcttaaagtgggtgtctcaatctccgacgaaatctccgatgccagttaattttcgatcttggtttatttggttaaagagagaactatgtttatgtgtaaaatcatcaatcatgttttattttgtctttctacgtcgtttccccatgtcggggcttagtgtcggggtttcattcctcgccggcttgtgtaccggagattatatcctgccggctttgtcgtcccgtaattcactcgggtttatgtatctgatatggtttgtgctgataataaaattagctttgtgaaaaaaaaaaaaaagtaaacaatcaatcctttaaccgtatccggtcggatattttctaagaaatggtttagtcccaaaatgtcataaccagttgaacccattcaagttctgtagtttacatatatatatggatactatctgattgatataagattatataacttaggtgttttagaaa

SEQ ID NO: 41961 - DNA, 360 bp, Arabidopsis thaliana columbia
aattagatattgcacaaaaacaccaaaacctaaaatcaagcacaaaatacaaatcaataacagtaagaaatctagatcgaaacataacaagtactcaaaatcaaatcgtgatagattcagataaatatccaatttcacgaaaccctagatatcaaaaagagcctataaagcttctcaattcccagattagatctagcacgaagcaattcactattaagcatcggaaaacaatccgaaatctcaatcaaggaacacgtagagacgcgagaacagatcgagaatggagagaaaagacaaaggcctcacatttgccaagcggagaggctaaagagagaagcgaagagaactcttcaacgcgag

SEQ ID NO: 41962 - DNA, 1029 bp, Arabidopsis thaliana columbia
attgctcccttacactcaattcttatgtgtgaattgaagcttgggagcaaactttttaccataatcccattgatgatatttgtcgtttgaggagaaagaaaacaatctcaacttaaaagtgtcttttgcaatcttattgatgtacacataaacgattaaattggtccaaaacttaaaagtgtaacaacattagtgtcattgaagagttgtattttatatgaacaaaacaccactttaaaaaagtttattttccattagatcacaaaatttatgactgacttgtgagattcagactaggtttgttttttctccaagttgagagactaggttagagctaattctaattttaggctgatacagatcaaatttaagtttgcattaaatatacccctctctctctcgtggcatgaaattttaattttctgtttaccgtaaagagactacaaaactttgaaatatgtaaccaatatttttttttccttggggagacaaaacggtgtctcgaaccgtaaagcaaaaacgaaggaaaaaaaaaaaaaactgaaccaacaccaaaagtttgcaactttgaaaatgccttctcatcttccaatgatctctctctcttcttatctttagccgttgcttttatatcaaatccgttcttctctttccatctcaacacccatttgaacagagaacctgagaagcaaccgcgattcgccgccgccgccgccgtaatccatcatcggcggcgcgagcggaacaaagtaccggactgtcagtgcttgattaagacaacattctctgtactctcgacattgatgatgtacgcgacagtgactgagaaaagagatttgggtcgttcctatgtgaaaaaggcagacaggttggagccaggcataattgatttctatattttaatttgactaaaaaaaataaaaaaaaaatctacttttttgtttttggagtgacatttgcgaatggggaagaaggagatgaagatttagctttttttttgtcctttgaattttttcaccagaaatgtaa

SEQ ID NO: 41963 - DNA, 529 bp, Arabidopsis thaliana columbia
cacgcaaataaaaatgcgaaaaccccaaaatcgtaatcagcagcgatcgagattttcgccgctgaaatctggagactgattattacaaacttgttcgtcgtgttcttcatcggagagacactagatcggaaaatttaacctcgatttgattgccgttgccgtaacatttgactgttgttttgtggtggggaattctagggttcttgtttgatgaagaagaactgaagtgaaaatgaccattaaaatctcccatgagatgattgtgtccgttcattcttcgaaatcggacaacggaatcgaatgatcgtcatattctgtaagagagaacgttagatcttcaccgaatctggaactcgagatccatcgttttgttcgattttctattctttcgcacaaggattggtctgagaagaacaagttcaagttagaagctgttgtgttctgtccggtgaacttatttgagctgctgaaaaacttcaaaagttgttactttttctgaaatacttaagcttcttggtattttgagact

SEQ ID NO: 41964 - DNA, 596 bp, Arabidopsis thaliana columbia
gaggataacttcaatattggtttactttctccaccactcaacattttgtttgttcgtgcatgttgttttgtgtccgtgtattatctattaatctatgttagacatttgttttcttcttttttcgtcaaggatattcctttttatgtttaaagtattgtgtacatatataaaaaaatattgcatattagattattgacttgaatcgaaggatttttaaaaaaaaaaaaactgtttgtagagaagaaaaatcgaaaactacttgtattcatcagaattaaaaaaaaaaagtcagtctaaaaatataccctaataaactgacatacctatttcaacgatacaattctataatgagttattaaattgatttgatttcgtattctctaaaatatactcatagacatagcagaaactagttaatttgcttatatgttcatattcttgtacatcatgtgatctcacgtggaataaaaataatgtgaccatctctaattctctacttcacttagtatctaagtatccactgtgataccttgttttctgctcaaagttgtacatgcgtagattaataaatacatttcacccttcaattgatccaa

SEQ ID NO: 41965 - DNA, 535 bp, Arabidopsis thaliana columbia
cgatcctctagtaacggccggagagaatatggccacaagaaagagcttgggccgaagcaaaacgagactgagaatgaaattcacggcggcccaagatgttctcccaagacatatgtagattagatttaaaattcggccaagtctcttttcttttgggctaattcacttttcgttgggccaattaatatttttaattacaattgctttttgcgccaatttttgagcaaacatatttcagaaaaaactaaaaactaaaaaccaaaaatatatatgtatatatatatattacactccctttatgatattcctcttttgtcatcaactttttattagaactcatatgagccaaacctgaagaacgttgtttacataagtgatgtaaagcgggagattaaacatttgcattacgagagattaaagataaagaaaaattttgtgaactctttcttgtcgctatgaaattccttcaaatatgctgagaacccagtcattcattaagaaagacacatcttaccaggtctcacaatttgtaaaa

SEQ ID NO: 41966 - DNA, 822 bp, Arabidopsis thaliana
cttcctgccaagacctaagtatcctaatccactgaaataagaaaacgaaagtgatacctctgctttagtgaaggttccgatttgaccggtgatagggcttttgctctcaacaacatcgataacaacattggtggtaccaggaagctcaggaggaccagaatcaagcgtaattttgactgaatcgaagatatcaagcgcttgtagattgaaattggcaaccttagaggctttgagaagctcctgcaacgtagtggcttgcctcacaacatccacctcagcctcgatgacatgatccttagtcttctcgtttcccttgacgatcacgtcgtgaacacgcacagcgaccggagttgctcgcatacgacggaacagagactcagctttgatcctatccgcgattgcatcctctcgcgttcgaggtttcccatcgtcttcttcctcatactcttcctcttcttcttcgtcgccgttaatatctcctagttcttctctttcatcttcagattcgattttgggttttgatggattcgggtcgggtttctccgccggattctccatgagaaggagcaaagcaactgagagtcagagatgagcaaatcggcgaaatcaatttgacggctcctccaaaaagcgttttacaattcctgtcaataccttactgaaccggttatctgattatctggctaaccggctgagtgattagctggttatctgattatctggttaaccggttgaccgattagccggttagctttacgcagggaccgtggagcctcttgctgtatcagaacgtttcaaaatcaaaaggtgcactcttttttc

SEQ ID NO: 41967 - DNA, 689 bp, Arabidopsis thaliana columbia
aaatccaaaaccctattaaaccgatcggttcatggctaatggaatctaatttaacggtttgatatgaggaccggaaaagaggtaacaatttaagggaggtgtaactttaggccttttttttttttttttttttttttttttgtgtgtaactttagtcttatcccgaacattttgctcaaataagattttatttttctatataataataaatctgagaagataaatccctaaattaagattgttcatgcgtggagcataacctaaaggtctaagaatgtggagtgcaaattcaataatgaaattgttggttctcttgcttttggtggacgcttcattaatattgaatcgtatcctaagcatgaaaacatatccaacacataattccgaggttttccaaagcagacgcttcattacgtttgacttacgtacactaactggtgataaccagcgaagcggtgtggatcctgcttgcataccaaaatcaaaatgtgatgatagagtgatggaaataggtaatactccagattatcacagtagtaagttcattgatttgttggcacatctttaaacttgtaagctttttataattactttattttgtaggtatatggaggagacgcgtactctttacagacctaaaaagatcgaccacgagattcatgacgaagaagaattatgaagttgttggt

SEQ ID NO: 41968 - DNA, 696 bp, Arabidopsis thaliana columbia
cctttgaaccatgattaatagttttggctttgttccttatgttggtgtgatctgttaaactgcaaaggaaaacaactttataaacttaggtgttgtttatattattatatattgtattaaacttaggaataaaaaatcattacgtcatattttgttgctacgaattatgactagctatttttgttttttactttgatttatatagaaacaaaatagacgaagcaaatgggaatcatggatctctttcaaccagtgaagcaaataacatactgatgaatcctctattacgtatatgttgtttttctggtttgggcaaagtcttgagtctcatcatcctgaaaatcctgacgcgcagcacatgacacattcgccgcaaccctggatacaactgccaatagtgtaggcagacagatcattaaaagagagttgcacgtcggatgaacatcttgctaataattagagccaaactatctataaagaaagtaagttaaattagatatgtactgtaatattaacattacgacttcgcagcagcccttggaatttgtcttctctgctgctgccggaggatcacccaccgccttatctctggttggataaccgatcggcggacttgtgtccggtcctgatgcattctgtgaacgtttttgcactgtggccaaaaagattagttaattatctagcggtgtgtataga

SEQ ID NO: 41969 - DNA, 547 bp, Arabidopsis thaliana columbia
gtttaatcagaattttataagctgggatctttagagcccattttttttttgtgtccatctcatctacatctcattggggtccatcatcactgagatgtaggaattctacgaatgcaattaggtgaatcacttatcagtaaccttgaaaatgtattattacattatagataatgttaagaaagttaaattaattggtcaatttactagaatttaacccacattagtttaccttttcctaaaataaaataaaatttcataagagatacacaactttacatagatctcaaatatattgttattatactcgttgttagggatataaaataaaataaaaataaaaaatggtaaataaaataaatgaagttcatcgtgtgttatcccatgtcgaaattagcatattagtaccacgacaattgcaaaatctttgggcattatgttaaatagactcatgtttgcaagaaaattgaaaatgggccttgaattgattattgggctttcatttgttattagagtagcttacattcaacgagtatcgtgattgtaagta

SEQ ID NO: 41970 - DNA, 522 bp, Arabidopsis thaliana columbia
ctaatcaaatattatttttgaaaaatcgaaaaatttagtttaaaataagaaaatcaaaagtgcaataacattttttaaaccaaataaaaccatcttatgtaagcatagatgtgtataagattgccatggcagaggtgttgtgttcctcgaagcatctctgacagtatacatcctcacgtgccttgtctacatgattttgcatcatatccatttgtgaaccctaataacgttcgcattaatccccacttggctaatgctagacctcaacttcaggtaaaatccaattatgcatggtgttcaaaaatagtaacctatttgagattcatcatcaacatgtggttcagctctgtttgctttacgtacttgttttttatattacaagaaactaaaatttcggaatggaatttttatgtctggtatagaaatctgaaatgggtctatcaaagttcgaacacatcatccatgtttcttgatttcccataggtggtggatttggtgaatagatttgactcagagctatag

SEQ ID NO: 41971 - DNA, 450 bp, Arabidopsis thaliana
tactgataataaagaataaatttagttggggttctcctatattaatgcaaataaaatcaactaatccggcaaaacaaaagaaattaaaactcttgtgtttcacaatacatatcatcaatacaatccaaaatcattaccatcctcttcttctttctcgtcctcttcatagaatttctcgccgttttgaaaatctgtcttcatgtcgtatgattctacattgccttcttcttcatcctcttcatcttcatcttcattttcaccattctcatgttcattactcttcatttccttgtgctcttccttcttcttctcaatgtctgtctctgttttcgacctcttgggtgatttctcaggtgcctgaaagaagaaaagagaagcaaaattgtaaagacctcaaaaagtgatgagaattgaggatacaagaagaggtaatcaaaaacttacggatgt

SEQ ID NO: 41972 - DNA, 637 bp, Arabidopsis thaliana columbia
  unsure (1)..(637): unsure at all n locations
cttgtttgcttcgttatgtctctaattacctaatgttattgtttatccatagattgaaaaacctttacaaaaacatggtggaaggttggaacacaatgaaacatactgtggttcctgttttggagcagaagcggtaagcttccctaaattattctaagaatatgctctgacaagcgatattggactttaagttgcagtagagaatattcaactgagttctttagtgttgattcagttaatttacattttagtttcttctatggtggtgaaatgttttttatccttgttacatgttgtggttgtcattgcttacatgttacagtcagatgatgcttgttgtaattcatgtgaggaagttcgcgacgttaccgaaagaaaggttgggccctctcggaccctgaatcaatcgaccaggtatactgacgttccttcactaacaacaaaattgggttgatcttggtacttagtttgaaacaaatagtgacaccttgtttggcactaaaatggatatatctanagaaaccatgggtatctggtcttcgtttcagctatcccacatctagttgtatgatatcttaccatcatttcattcagtgtaaagagaagcattgtcaaaaggtaaagatgaagaaggtga

SEQ ID NO: 41973 - DNA, 912 bp, Arabidopsis thaliana columbia
catctaattatgtatcctatatacaagttgctagaaagagaataaatcaaaatcaaagcgaggttaattacttaattacaaaaacatattaccactacgctccacaggatagtgccgtgtaggaaaaagcgaatttgtggactagtgtaagtcaaataacacattcgcatttcattatgactatatattgactaaccataattttcaaatgtattaatataaagtgttcacaccaaccaaccttccttaggattcgtgtgactaacgtgcgccttacgaaaaatataacagttttcggctatcatcgaaccagaaacatccaggtcacgtagaagaaatgcagaattgcttgaaggcaacgcttcttcaaacataggtatgttgtgatcggttagtttgaaacaaaaatcacatgtgatatatataaacaaaaacattttatctataaaaatgttaatttcatttagaaaagttgtcctagagtacactttaactcgaccaacatttggacctacgagtttacgacgttgaattcatcttctgtactcgctatgcaataaaaaaaactatactatcttaagtcgtaactctttttgttcccaactttagaaacatctatttccgacattcaacaaatctaatattttaactaaacttagtttccgacccttgaccaaaaaacaacaaaaaactaaaagtaagttgccttgttcaaactcaaactcttttatttaagttacacaacacggacgcgtattttattttgaaccgctcatattgataggggaaacggaaaaaaacgttcaaaaacgccaatagaaaaggataaattttgtaaggttagtaaacgattcaaactagatttcatttcgatgaaattaatggcaaactccacttttgacggattttttt

SEQ ID NO: 41974 - DNA, 453 bp, Arabidopsis thaliana columbia
agctgttattgcttctgttttctgcatagaagctcatacgtagactgttgcttgaactggaatttcttcactccagttagaaagcactgcaaaaaatgaatactttaataacaagagttgaaatcgtcattgattgaagactgagagtgcgttaacgtaaggctgatagtagtaccttgatccttccttgaacaaaatgtatggtatctttcataactgcccattttggagacaactcggctaagtatgtgaaaggtttctctgtatttgtagacagcacagaagggccttccaaatcgacaaccatagtactgaattctgctgctacaccgcctgaatctgaaccatatatatgagtcgttgtatccttacacgaccagtgtcaatatgcatttcttcaacaaatgaagtcacgttagaatgtttgatccagtgaatttccgcaacgttgtt

SEQ ID NO: 41975 - DNA, 577 bp, Arabidopsis thaliana columbia
tgtttaacagttgtatttcatttttatttagaaaaaaataaaaatccataaaaatggaaatgcacactataatatatgtgtttagagaattgttcaagcgtatttagctgtggtgtctttgcatatatatttgtagattgtgaacatagactgcaatataatttaacatcagacagtactgtttgatttatattaggggttaaaaagataataaggcatagaagtcgagatattgtagaatttgggaagcgaattaaggaaattatttctctcttctgccgttcataaacatgggaagattgcgccggtgggaagactgcgcattaaatgctcgtaaaatctctgtggaaagattgcactggcgttatggggaagcgaaagaatttaggaaacgcaaatgcttccggagatctttcacgatttgtgggaggagctgtatacagagttcatatatttattatggccgtagagcgtgcccaaacaacaaaacaaacacaccataaaggttctgagaccaaattaatcgtgcgaagaacaaagtagagataggaagaatctcgagatccgggatcctcta

SEQ ID NO: 41976 - DNA, 574 bp, Arabidopsis thaliana columbia
taaagattagatttttgttttatcgtaataagtctacaatgtgatcagttgaaatggctaagtaattttatttcaagtagttgatactaatattcttcttcaatatttgctcatgagtcatgaatcatgatggatgttgacaaaaaaaacaaagcttgtgagtctgtgacagacgacagttcaattatacagttgtttcggaatatgtacagaaccaacaaaaaaagtcaataatttcgtagtttaattatggaagcttttgataaaaaaaaaaacaaattatggaagcatgtcgtttttgtggcgacgagttcatgaaaaacgtcacgtagttagatattcaaaatgatcaattgccataaataacagttatggcccataagtaacagagatagtaagggctgggccaaaaattcaattaagaaattagtaagagtgtcagtaatttttaccactaagaagatgacatgtgtaatcacaacgactaaccttcaaatcagacggtcatcaatgctcacaccaatcggtccgttcccatactctcctttaatggcttctgagagatatttaagtt

SEQ ID NO: 41977 - DNA, 584 bp, Arabidopsis thaliana columbia
ttataggttcttcatcttttgatgaaacgaccaatagacctgaaagcacatttcgaattatttggaactcaacagaaaactctatgagacatcatagatcagaaaacctagtttaaagacctgaaaacaacgattttctaaaatccatttaatatcttacatgccacaggatgatcgaaagcttcgtggtctgaaaacgacaatgtacgtataagttctttattgtaataccgaaaccatgagggtgcaatttcagactctggatctgcagggagcgaaaatacgacagcattagaaaagcaacaagttagagaattcggcttctcaattatttaaaaattgttagtgcacgatgttaaagagtttaaaaaacttataaaggcattttccgctaatcacagaaacaaatttggagtagtgacttactagagagtatatcagtaatttgaggagggtcagatttcaaatcctgaaaatccttctccccagcttgagtaataacacgttctagccgttgcttagcaccgtagccataagtaaatcaatcaaatttgagctcacaccgaagatgcagaatggaggag

SEQ ID NO: 41978 - DNA, 676 bp, Arabidopsis thaliana columbia
ttctgttgcataatttgcatttggtcacgacaaaagcgattcttttctcacttttctttatctttgttttacttcgtatcgtaccttgtgtcctattaaatacaattaaattatggttggtccatagaagcaaaaatgtgtagattttgtaagggtatctataaacttcaaatacttatacttaatactagcttttattaaataaaaaacagttaggcaatgaatttgaagttaaatcaagtccgtgaatagtaatgtatacacaaaattggttgtaacaatttgttgcataaagtactctaatctcataacgaatatgtataactatcaaatatgtgtaactatcaaaatagccgtattacacatatatatgtacaaaaatagtatcaatcacataaataatgctatagtttcgacaaccatgatagtcactaataattatttattttatttctatcattactagtcaaccatgagtcatcactataaactgtgacatctcaaataattttgtttaagaaagtactactaattataacaaaattcttcacatcaatcaaatatatttcaacctatcatcaaatacaataatgtgtatttttggtttaaaaaaaaagcccatgatgttctaatttatgctacattacaaaaaaacacctaaaatccaacaaaaaaa

SEQ ID NO: 41979 - DNA, 943 bp, Arabidopsis thaliana columbia
  unsure (1)..(943): unsure at all n locations
gggtaccgagctcgaaatcaagtattgactccataatgaccccaagcgtaggcgaattagacacttgtagcagcacacatgccagcactgagccgtctgaatatgtccgtggaatagatcctaaaatgaaacgcttgtcctctggaagaagagatgttacggctgagccagaggttattcatcctcaagcacagtcaacaacccctaattggccaaggacaagatcaaagtcaagaatggataaaggatggatggggttaacatccgtgcaggatcctccaactcgatgttcatgggggaataccggtggtcaagacagggaagatatatcatctactgtatctgatccaggtccaatctgggatgcaggacccaaatgggacactgaaccgtctgcttgggatgtagaaaattcgatcgagctgcctggtcctcctgaggatatagagacaggactgaggaaacagagcatcactccaatatttgaggataaatgggtttcgagaaagggacatttcctcggcatcatggtctgtaaccatgcttgtcggactgtgcaaagttcccaagtcgtggctcccaattcagaacatgatgatggtacaatggatatgctcttggttcatgggtgtggaagactgaggttactgaggttttttatacttttgcaaacaggtcgacacctttctcttccgtatgttgagtgtgtaaaggtaaattatctttcctattttcttacattacgaaacctgcaactcgctatgtgctaggaaatgctaatcaaacggtcaaactcaatgcaaatattataagtctagaatagaatgtagttgatcaaatgcatgacaattgcaggtgaaatcagtgaagataaaggcggggaaaaatcgcatgacagttgcgggatagacggggaactgtntgcgatgcatggagaagtgat

SEQ ID NO: 41980 - DNA, 983 bp, Arabidopsis thaliana columbia
catccatctcatcgcatgacttgttgactgctaagttcgtcactcaaactgcgtagctcgtcgtccagattgactagctcttagttattgtaatatgaactacgaattatttgtccatttctatgaatatgtaggcagccttttacaatgcacatctataaactaaataaactatgtgttcgtcatgagaactacttaacttctgaacttcacagttgtcatgaaattttttttccttgtaaacaaacttacaatattttatcaaaatctatgcataaacattttcgattcttgtcggctttatgtctggaagatttcgttcagttttccggcttagtatagtttttgttttcttttccaatttttcatttttttcattttttagttatatatatattatacacgcatatttgtatctctattttattatgtcataaacttttgacatatagattttagtggccataatatatttttaaggacattttgtcattagtgctgaaatggtgagtcaatttcatagaataatgtaactttctaattgaactatattataataaaaatacaacactaattacatatcagcatgtcgtaccattacttcttgaatttgggcttaacgtggcccagagttgacataattgcatccacataatatttttttctccgatcatcggaaaaagcagtaatcaagatgcagaagctcaacgacatcttctccggtggaggagacggcgacggaacaaccgatagtttccttgaagatggatcggagggtctctgtgctctctccaccacccaggtccctccccgatgtcgatttcgctatggtttaatatttggtgtctgtttactaatcaatcctcttcgattttgcagagaatgtacggattcgccgcgtctttaccactggtctgctacttatgttcgtggtaaaatacaaatttcatgaacagaatgagacatttgtgattgattagaaa

SEQ ID NO: 41981 - DNA, 876 bp, Arabidopsis thaliana columbia
ttctaaatttttgttactatgaataacataagaaagttttttttttgttttggtagtattttcgtaaataggtgaaattggtaaaaggttagagaaacaccatgacatctttaccatttggtgtggacgagatgagccaaaccctactagatgcatcattaaaaatacgtaagtcaacaccacctttctatatttctctatcatcaaaaatgttattgttatatacatgattaagatcctatgagattattttgctccatctttttgatctctatacggattgtcgttgtagattgtattcagtgctcgaatctccccttgcaagttttcaatttggaactaatgtcaaaccatctttttcagctgacaatgtttttatgtcaattgtagaatatataacgatgttctattattgttgagtctgttcctgttcaaaacaataaagtttaggtactctatttttgaaatttattgttgtattttagcttaatattatttttaaaatacattaatatgcaatagaaaataatcttcttcttacaatccagagagaaatcaaatattgataacatgagattttaaataatatttaatattcattaacaaaaactataaatgatataaaaactatacctctataatagcttggcatgcagtatttcaaactagtcatcttggaccattttaacttaaagttggttattaaagcctcaactcacccaacatctccgaagggaattaaccaaccaaacacctatgtaagagagaaacaataaaaaaaacagtcaacaattggtgtcttggaaatcacaagtgtcccataactcattcttctctctcacacgccattactaaaacccctaaaatcttcattca

SEQ ID NO: 41982 - DNA, 673 bp, Arabidopsis thaliana columbia
cttatcatcatcttcgtcacgacgagttctccgccattttctcgctaacttcttcatttgatttttcttcagattgcagaagtagaagatggagaaattaggaaaacttcaatgagcatcatcgtttcttcaacgaaagtgtctccagccaaaacgcctttaagctacggcctattaagaagcccagcccatagtttagcaagattgattcggtttcttatctccggcttggtttgctgtgttgaaataaatgggctatttaattcaacgcaagtgggcctaactagaacaatttagttacactactttttttggtcgcaaaactacaagagtacacgtaacgaatgatttaagggattagggatatttcagaaaggtaacacatatggcaatatatgccatatgaatcaaacattcaatgcaccgatttaatccgtgagcaaacataaatattatgaattatcctcgtttccatattagttaagcattttagattcatttttctatatcctctctgatttaatccatatgcgcaaatatttatgatgaattatacttagttccatatgtattacaatttttagattcattcttctttatccttttcgatttaaatcttcgtagtcaattactcccttaaaaaacgttatcaagagttaaaatgtttcaaata

SEQ ID NO: 41983 - DNA, 534 bp, Arabidopsis thaliana columbia
ctgtttatctaattttacccttattaaataattagatagaaatttagtattatttttaaagtgtatataaaggttaaaattgtcattatatatcaaaaaggagaaaaagtgaaattttaattaaaaaattcttagaaatgaaggagtattattaggattttattaaaagataggcaataggataatttattatgagagtgtgaatagtttagccatctcctttgataagattgtcaatcgcgactttattgttgatctgccctctaccgtgctctccgctaagttacatttcaagtcttgatgcaagctaaaattttttttaaaaaaaaagcatcgtgtcactacgacgccgttgaccttaggcgtggtcgtcataggaactttgtcaagagcatcgtgtcatcatcacaccattgacctttagcccactaaattcaccgttagattgcattgcaccgcgtgatgatttcgaatttaggacaatattgcccactttcgtcttcatgaaaaagggccaagttattgatcgtgttt

SEQ ID NO: 41984 - DNA, 805 bp, Arabidopsis thaliana columbia
ccgctttttcttgtggtttctgaacacgttcttgttggaatttgtaggatgttccagatggtgattggttctgccagtcatgttgttgtggtgcatgtggacaattctttctaaagactactagcacaaatgccaaggaggaaaagtttatcagttgcaagcaatgcgaacttaagtgtatggaatacttccctaatgctaatataaagagtcaacaagatattttaaatgatatgaagttttgtttgctatgtggttcatatagatcaccctagttgcttgcgttatgatggtgcctgtgattcattggataaaatcttgggagaaaagtggttttgcagcaaggactgtgaagaggtacataaatccaaatcccatgttccatttgtgattgttaacagccatcagaaaactaactaagcagcctaagaaaataaatgctgcagttaagataatatgtatactgcatgtcatactcagtattgctcttacgtaaagaaaaaaaaactttcgttacagatatttgtaattctctatgaccttattggaaaaccaagagaggtgagcgtggagaaattaacttggagactggtgcagtccttggaaccaaatatgtatggagatgacgcttctaaaattgaggctgcggcagaaaatcactgcatactcagtgttgcccttgatgtgatgcatgaacttttcgagcctgtaaaaagacctcatggtggaagagatcttgctgaagatgttatttttagcagatggtaagagacaacaattactaccataaagtatttcatgtaaa

SEQ ID NO: 41985 - DNA, 729 bp, Arabidopsis thaliana columbia
catatcaggtagattatggaacaacaccgagctctcaacacccttataatgtaccagagtaaaatcggaaaataaatgctacatctattgtcaatgatccaaattattattaattatcattatttctcagacatgaagaaaacgaatgcagctacattattattttaagatagtcagtataaaattgagttgatccagcatggtagtatgaccgaagcatcaatgagacatgcaaacgcttataaaacgtttcatgcaccatgcacctcagaaaaatatttaacaaaaaaaaatgagccagatttagagtcaattattgctccattatactctatgacaatcatattaagagattcaaaagagccggcaaaatgtaaagctggtacaaggggcaacgataactagatatgcaagcacaaaagaagagcttaagtgttgaagtccacaaataacaaagggttgtgctgaggatgaatacctgtagtgcagcctgataaaccagcctttcatcgttatcaggattcctatcttcaccaccaccaaacctgtgcattggatcactcgaaccagcatgatgcaaaacagaagcagatgttccatgcgtcagagatggaggcaggatcctaaccccattcacgccacgttgaattcctatctcagcatgggctccactataatgatcccaaaggtactcttgttgcctacagctgacacagctggatgactata

SEQ ID NO: 41986 - DNA, 1026 bp, Arabidopsis thaliana columbia
tttctgcttagaatcaccaaacaagaacattttgcaggtcggaagatagttgcaggtaggaagctaatcaaacaagacaccttagtttttcacgacgagatgttgaacccctgaagaatgttggacaacattttgatggataaaacattttcataggagaaatgatgtgagtaagctttcagatcattatgatgcatgccagtatagtcatttctctcgttactcttacaaagtcctatatagtgtcttcagttcaaggtctatttctttcatggaagtcatataaaactatattagacaatattcataacctgaatgttagtagtaataccttgtgataaggttgaagaacaattgcagaaatgggtaagagatgacatagtgacttactcaactaactctcataatcttatttctgaagtcaagaacactagcctgcaaagttgcaagttttgtttagctcatactgtaccttttactgtagttgtagatgatcttggtttcttactaaaaactttgttgaaatttcatattacttccttacatgcagagagttcaggggaaaagttgtttagcttttcaagccttgccgtgtgcatggacaaatttcttattcactatctgtttttgtgtgtagtaagaatctgaattttatgggtgaatttgtacgggtaaacagagaagttcatatcctatgttgagactaatgtctgctaaattcggacacaatgtcaaattctcaagctcatcgttaaagcaacagagagaatttgattgactttttttcattattctgttttgtagacgaggttgaagctaccttatcagaatctcttcccaagtgaatcttggtcatctgcctatttatacatatattaaactcttttcattgttttcttgatgtgtgtgtgtgtgttgtataatcgatcatactttatgatttatgttgaagtatcatgacagaagaacaaaaatatttatatcaccattggttatatgtttgctggtttgactgatgatgatatg

SEQ ID NO: 41987 - DNA, 560 bp, Arabidopsis thaliana columbia
gaacatcaaagcatccataaaatgcgttttcgtctaccaaaaacaatagctacaactaaaacatgtcgactgaaccagaagcagagagacaaagaactttagaccagtcacaaaacaaggaaaccgacacaaagaaccgatgtgtaacgctctaacaaatcaaccgcagcccacaattctcaaaatcagctcgtaaataacattttctagtcgtccaaaagggtatccaccagggcaaattgatttggataaagcaggaatgtatgatatatgttgtggcagctttattcccctgtctgatacgatattacctcatcgctgctcctcatcgggtagttcttgaccaattgcctgtagtgcgagtctgtagtataaaatccccattgttgccatacacgctctgcacattggtcacatagatttaggccatggataatactgattgattctgcaccaaacatttgacatataacgagcagcagaagaaagagttacactgtaaacaaggtcttacatgagagctatgaaaattagtatcttccttatatccatttttgatg

SEQ ID NO: 41988 - DNA, 753 bp, Arabidopsis thaliana columbia
gctgttatgacatttgtgaactcaaatgcttgcttaaaagcgttacaaggttttaactttcttccttcatttattatattcaggaagagctggagcagcttgagaagatggacaatgcatcagcatcctgcaaagagtaagaacttgttacataactgatatccggttcacgaataatcattccacaagcttgactagtttctcgaatggatgcaggttcttagacagtgttgacagcaaacccgatcctcttcttcccgagtaattcttcttctgttttctgatagtttcatttcaatagactgtgagatgattaggtctgatatgtttgcttttgtgactacttgcagaacaacaggtccggtgaatgcgacatgggatcaatggttcgaaggccctaaagaagcaaaacgatgtggctgctccattctttgatcttcctttccttctctcaaaatatttttgtctctacttcttccagaagagtgagtttgtgtttttacgttcccgcggcagtgaatttgatgtaattggcaaaaaaaaaaattgattcatttgtgcagtaaaaaatctattgatcttgatgtgtctcttaatttaagaagaccacagtgccaaattcacgccaccacaagaaaatctagcacagtggccgtcggtgagtgtacaccaatgcatctcagttccagattgtcttggaaaagttctcgtttctcgatggtttacatgtcgtgttcgggcaagttgttgaag

SEQ ID NO: 41989 - DNA, 764 bp, Arabidopsis thaliana columbia
tacactttttttttgtctttcttattaattgcatcagaacatcttcccacaccgaatatatttttggaattatttgttgataaagagtattcaaaactttatggaatttgaaaactagtacattattttatttccagttttgacatatgtaattttcttatgaaaactctatatttgaaataactgaatgtttaagttaaatgtaacagtaaagctttttgttgacaaaatgtttaaaatacttattattttgtatagtaaactaataaagaaaaggaaaaaggacaaaaagagtttatgatgtaaacatgaacaagttgacatgcaattcagtatacagcaacactcaggctggcaatttacagattgttcatatcaaaccttaaccaaccaatcaaatcggcatttttcagctttcatatatataattgatagttatgtcttattattttctgttttattcttgattttattcttatcatcattgttatttaagtataatttaaattcggcgcaacatcacgtatcctctcaccttgatcatgtcaccctaacaaacttcaaaacacacaaccgtacgtttatatatacgtttataaagattacgagatctatagtattatttggaatcgattacttagattttcttaacttaatagggccgggatgtgttggcgaatagtaatcttactgttacttatatctgatgtccttaaaaatttatcaatatgcaaacatagtgtaggagttcataggtactaata

SEQ ID NO: 41990 - DNA, 568 bp, Arabidopsis thaliana columbia
ccactggtaatgctccgcaaactccttgttgcaccagcatcttcaggtttggttggggatcggagaattttcttaggagcaggaactggttctgctggccttgctgctaagttggagcaggtttatcgtcaagcccgtgaagctgttcgtgggaatgatggtataaaaattcttttaaaacttcttcagcccagaatatatgtaaatcctcctgctaccccagattgtctacgagcgctacgttgcagggtacttcttggtctggctagagatgatacaattgcacaaatactgactaaacttgaggtagaatagcaattttctttccccgtttatatattgtgaagttgagcaggcatcgttggtgatatatattgacttcccaagcattattctaggttggtaagagtttatcagaactaattcgggattcaggtggtcagtcaagtggcacagatcaggggagatggcaggctgaacttgctcaggtggcgcttgagctaataggggtaatcactgaaattgatttaattttcttgtttaatgtggttatatgggggtctttttg

SEQ ID NO: 41991 - DNA, 1170 bp, Arabidopsis thaliana columbia
catgctctatattatatatattttggctcaatattgataaaaattgattttgtttttagttagtagtttgttattcttgtcgtattttagttagtagtttagaaactatcattcaagaaatcaaaatttgctttaaattgataaaattgacaatgaagtataaatggtgaactaagtctcaaaagtcaaaactagcattcaagaaaatatcaaaaaaattctttagattgataagaaacagcgtaggagaatgagaaaagtggatggaacaaatacttcaagtttacttaactgtttgaaccaaaatttctgtttaaaaagaaaaacaacatcgttttggaattttaacagaaactgttgacgactttactttgtttaattagtctgtcacttgacttaacaataccctaaatttggtaaagtcaaagaaacttcataattaataataaaattaattaaaattggtaatttaattcacccaaaacaaaattgacattttttttcaaactgatgttttttgtcgtcaaacttttcattaaaatccaaagaggattacaaggtgataaagagcccaattacacaaaagataaactcaattagcccaaaattacaagaagaaacaagagaacataggtctaaaagggacacgtgtgaagatacgtgtattgatgcatgctggaagtggaaaggcacagccaccaccatctccaccgagctgaaccaccgatcaatccttcgactttcaccatagaaaagctttttctgaccaaggattttaccgatcttcagcttcaaactccaatcaccttgctttgctaccttttgctaaactctccgattgtaaaaaacagagattagcaagccatcagatctatgaaacacgggaagacgcagcgggcgagagggcaaatcagtcgtaaacacactctcttgatatgttctgcaccagccaacgaaatcctctcaacacgatttgaaaccttgaggtgataccttcttccaattccgattacggccacgattaggatatgaaggatttattcttctcatgatcgaaatcgagcagccaatgatcttaaaaactctcaattaaacgttcggattttgattcttctttactggaagagaatttagattctgcaaaaggattgaggaaacaaaatcaaaata

SEQ ID NO: 41992 - DNA, 628 bp, Arabidopsis thaliana columbia
tgggaagtgccaatgtatgtatctctgtaagtgtcaatatttcgtaactttgattggtgactagcaaatatgttgaagtagctgaagtattatccaaagagttgaaattgcataaggatattataaagacacactgcagaaggacttcatgtgagaggtgaaacaatcacattgaagaagacacatatgaatcatgatttaatttcagcaacagcttgatgaagggttttggttattttgttaagaatttaagagttgcaacttgcaagtgaataacttaaaaccgacaaagtttgtagttttttgttgtgattaaaaacttctctaattgagtaaaactcttaaaaacaacaaattacattcaatttcttcagcgtgtgtgacacaaaattagaatttttttctatcgaaaaccctaatttcaatctttttctaacttctaatggaaaccataatttcaaccttaatacgaaaattacatgaaattttcatacataaaaccctaatatcaatctttggttccagtcatcgatcgtagagctccgtccgacacaggggacaagtgttttacgcatgaccactccaagagacagggattgtggaagcatgagacaagtcatgcgtgtga

SEQ ID NO: 41993 - DNA, 712 bp, Arabidopsis thaliana columbia
ctaatgtatccagagcgtaggcttgcgagacattcagagaaaagcttaatttcagttaaggttaaaggtgtgacttgccttgttgagtctcagtttatctcaaaccaagactttcttgaggtatataataaaatttgaccaattatgtcaaaagtttttaaatttgctaatttgctaagttttcatctgtatattttgcattaatttatctgagcaggaggagttaaaggcctggtggcagagcgcggggaaaagtgccagaacaagcggctacgacggcatcccgtcggcggaggaacttagtcggaaaattcagcagagaaaaatgttaggcttttaggacatttgttcaagtagataaatgtttttaagttataggttttacgattacccgtgtattttttcggttgaaaaggagagtgtaaatttcttagttcagagggcatcgaatgtctcaaaccatacaacaatctaaaactggatgtccaatctatttagatttgcgagttttattcggatctttatgtctcgatgactatttattgtgattgttaagcttgtatagtctatgtgtgaaggatcaaagtatcatggaagaacaaagtacattgatatcaagagagatattgtggtgtcttgctcatttttcatgaggtatgtttgatagaagttgatatttgtcctaaatgaactaatctgttttgacatcata

SEQ ID NO: 41994 - DNA, 498 bp, Arabidopsis thaliana columbia
tgacacattaacttcaaatatttcagaaaacaagtagaaagagtccagaacattagatttttggtcctttttttggaaccgatatccgaattttcgggtaaatacccatattttcgggtaaaatttcgggtttcggataaaatttaaattttcgaataaaatattcgggtattttcgggttcaggttcgggttcggtttttcgggtagaggaatttaggatctaatagggtaaatcttcgggttcgggttcggtttcggatctaatttttcgggtcagttccggttcgggtaatcgtttccggtttttttgcccagcctcaaatgcgcataagaacgtttgacttcgtactagtgtaatcccatcgtattatacatctcgaatcaaagaagtcgttggcgatcctctgatagcgagaatcgaagtagcgtcggctatcgatgtagagcccagaattgagaaaaacccaaccatggatttgttacaatgacattctcat

SEQ ID NO: 41995 - DNA, 532 bp, Arabidopsis thaliana columbia
ctcttctcccccatcagttaccactagtcgatgtcgtcttgctattgcttgactagattgttccatccttttgattccatgcttttgtagctcctctagggttctttgaattgaaccgagagattgttgttgttttcattcccctcagacgaagactatgcgttcaagcacttctttagggcttctaagacaacttttagctacatttgctcgctcgtcagggaggaccttatctctagacctccctctggtctcatcaacatcgagggaaggcttcttagtgttgagaaacaagtcgccattgctcttcgaaggttagcttccggtgattctcaggtctccgttggtgctgcctttggtgttggccagtccactgtttctcaggtaccaatcaacctctactcagctccctatttccctgatttcaatatatatatgctgtatcctgacaccatccatttgttccccaggttacatggagattcatcgaggcactcgaagaacgtgccaagcatcatcttagatggccaga

SEQ ID NO: 41996 - DNA, 892 bp, Arabidopsis thaliana columbia
tttatgaggagggacaatgtatgatcaaagattagtggattagttttgattttaatttttaagatttgtaatatctaaattaaattcttttgacaaaaaaagaactaaattaaatgattttattctttatgctaacaaaagtgtatagaacaagtgaataactaaatatcaacatgtatcatgtgttggtttgaacacgtacaactaaatatttttgtcaaacaatttatatgttttagattatatttgtacgtcatgttttgatctaaattctaacatttggactcaaacttcttttagtagcactgaatagtatcattgtaactaattgattgaacaatgaactaaccaggatgtggataatgatatcgagatttttttataaaaaagcttttgttaatagtttaatacattgcaaatatcttacatcaaaagtctaaagactgaagcttaaattgattaaaatagacttagaacgttaaatcccattggccgtgaagccaaagcttccactggtctcctttccgatcccaccacacccattaaataaactctttacaatggaaattcgaaactttttctccaagtcatttttatttttagctttccctaacaatttagttccatttgtggaaatttacaaggattatctccttgactcctcatgaaatattttttatttgttactttcatttgtctaaaaccatgtttcctaaagtggagcttagactgatccacataaaaataatgttataaactcaatcatcggatcgatcaaactggtgactcatgacttacaaggatcaatttcatcttatcgtttcaacaaaatttaataatatatcataagaaagtacgtgtatgatagaactcatgaaactacgcaacgggt

SEQ ID NO: 41997 - DNA, 668 bp, Arabidopsis thaliana columbia
aaataatgtttgaaaacttttccttgaagctgttcttgtagcatgaacccgtgacatgagagagtttgcaaagtttattatgattcgatatccaccgaaaagtgtacaacatagcactcttgcttgaaagaacatcaaagttctcttggattgtcaagtcagagaaagatgttttagagcaagccaagttactttatacgtcaattcaaacttttagatttggatatctcaatgggtggggggacctgaacacaaactgcatacagttttgcaaagaatctctgaaacagcttgccgtttgtttgatctcctgctttctttttggctcttattgtattgagggaatcttgaaaaggttaatgagaaaaggagagacatatagatgggtcctttagaatgcttcctatggctacaacaaaatttcttttgggtctatgtggaatcatcacatgtttgcctttctgtctggttctgtaataataatgccatgaaaaatacagtagcatcacactcctagaccatgccagaccatgccacccggaccccaccccaacgtaccataccggaaaccggttaagaccaatttttatgggaagaaagaatggcagaatcttcaagtgccgacgagacaagaagagaagaagcaaatagttttggtttcataagaa

SEQ ID NO: 41998 - DNA, 570 bp, Arabidopsis thaliana columbia
tgacaaagaaaatgacacggaagatttgaccacgtatatgtcggtttttacactaaccactaatcattagcctgcaaaagaagtattgcattaaaaggatattgaacaaataaagtgttacaatattaacttcaacaataggacatgcaaagttactgaaaacgtttatagattcaagaaggcaactctcccctaatccttgctttgttttaatttgttctttcaaaattcttgcttcatgttcttcacaacgtcaacaacctttcgaagtctataatgaacaatatctgcaacatgtcttacaacaaattctacgtttctaactctcagagaagatgtaggcttctattacgaggttttaacttttaaggacggacctcgtataaattgctcgtggtaacaacgatgaggaccccagttattcggtcatgtggcaacacgtgaacttccgggattcgtgaactcgaaatcggtgttccactctcgacttagccttgtttgcttagttatgtagtgtactttgatctacttctagaattttctgtaacttttgcacaaactcaaaatggg

SEQ ID NO: 41999 - DNA, 536 bp, Arabidopsis thaliana columbia
cctaaaatcaatcgtttcttctttttcttaatgctcataggtcacatattgctcttagctcgacctaacactttctttccacaatttgttggacaatatttttgttttcaaaccagtcacatagtatgccgttgggtaaataatgcgggtatggggccggtacttatatctgacctttatataagctttttccgagacggattcaaatcggatactgatcgaagacgggtcatgaatattatgtccagcccctataactaacaagttaagttaatggccacatggtttgggtgcctaagcatcagtgaaatacgttacttatacctgtcaacgtgacataacgtctgttttgttttgagttaaagattaccaatgttaccgttgactatggcataacagcgacctatagaggaggcattattgcgaagaaccttgaagagacgcaaaccataagcaaaaacacattcaatacaacactgcttaaattaataaatagaaacagaggaagtaaattattcgtgtacgttagggttttt

SEQ ID NO: 42000 - DNA, 1169 bp, Arabidopsis thaliana
ttttgtccaagatcagttaaccctgcgtggctgcaggctgtgaggatggccgtgaatgttaagtggtcgagtttctctcccgtggcttccatctgatcaaatagctcaactgctttgtctgcgagcccgtgattcgcataacagaagatcatcgagttgaaagtaactgttgtcttctttggcgtcttgcgaaacaagatcattgcttctgatatgaagccacatttgccgtacatgtcaagcaaagcacttctaacaaacccgtgatcttctagtccagtgactaccgagtaaccgtgaatctccttcccgtgcttcatatatgcaagtgtggtacaagcaggcaatagagttatgatcgtagcagagtttggatacaacccatgagttaacatctgtttaaaagcatcaaaagctttctcattctgaaaattatgtacaaggcctgatataatagaagtccaggacacaacgtcgggcttgtaaccatccaaacacatcaactcaagaatctcagatactttttcttcatttctcatatgcgagaaccctgaaattagagcattccaagtgataacatcaggttttattcccagtagtttcatatctttcaccaagttcaatgcttcatctgcttggctattattagcataaccagagatcatagcattgaacacgaccaaatcctgttcacccaaatcactgaacaccttcctcgcattccccacctccccaaacttcgagtacatatcaataagcgagctaactataaaagcatcagactcatacgaaaacttcagcacaagacaatgtatcatcttccctaattctctatcaagcagattgcgactggctttaagaagactaggaacaatgaaagcatcaagttttaaaccgtctttgtacatttctctgaagaaatccaaagactcctggtaatacccatttcgagcacaagccccaatcatgacaacacatccactaatatctctcttgggcatttcatcgaacaccttcctcgcatctagaactttcccacattcaacataaaaagttacaagcttagctgcaattctcgtcaagcgagcaataccagatgtcactaaatgagcatgaagcactcttcctctacaaaacagtcgatctcgaccgttggcttcgatgagttc

SEQ ID NO: 42001 - DNA, 542 bp, Arabidopsis thaliana columbia
cattgaagattgttaacaagtagacaggaaaaccgagacgagacagatttgagatgttagcaagtccggtggttccagtttagcaggaaaatcaggcagcaacaccggagaaaatctcaggcaaagggaagcgagaggaggagaaagcttccgacaaaccatcaagagagagaaatctcaccgaaaaccgttggaagagctttagtgactgctggaaagctcgagagagttgagactgaaccgattaggagggagggacgccggagaagcttcgccggccagggaatgctattctgaaattcttcaagcgacgcctcgtaaattgtgactgggagaaaactagggcgaacgcaacttgatttctatctccattctgaaattcttcaagcggcgtctcgtaagtctatagaaaagtatctaaggttggtcttgagtatttgaatctcactggttcactcgacgagaatactttgaactaatttcaccgacttaggattcttagagaatttttagtcaacctattttattacattaattgtaaa

SEQ ID NO: 42002 - DNA, 545 bp, Arabidopsis thaliana columbia
accgatctctgaacttgcaaatgtttatggcaagggttcataaatcaacaaatgaatattctaaaatatcatcagaagccaaaaaaacgtacagatccaaaccaaagaccgtgatagacagttccacatgagcctgcaatatggaagttactggagcatgtcagcagaagatggactctatattacacaacatcagtaaaatgtatgatagatgttataaagagtggagtagactggaaaacatgaatctgtttaagagattaaaccaccttgtccgatttgttctccgattgtcaaatcatcccacaaaatttcatactccaagcaattactatttgtatccaccttgttcatagtactgtgactgataattccacggctaatagcgctgttcgcatttatacaagaagaccgcaaaccagaagccttgttattggtaggcttattactttcagaggcatggcttttagacttaacaccagaatagcggttgatctggtgagacttatctttattttgttcattctgtacacaaggccatacag

SEQ ID NO: 42003 - DNA, 770 bp, Arabidopsis thaliana columbia
cccgtacacgtgttcaaagaaaattattggcgatggaaaattgggtgtatctgcattttcgtcattaccgtcctttacatggaattttggtagatcctgctttaaatgccttcacttctgcttctcccaaccataataaattgatatggatgcgatccattggtatttggtagatagatggtattattgtcccctcttaatggatttctttttaattttaaatatctaaattttgcctgaactatacataaattccgtaactatgtctataattatcatctcattgtttcaaagtgatacttttcttctgcaaacaataaaattgttgaagtcagttgttgactcaaggtttattagaacaaaagtcaggtttttagctcattaaagtcaaccggataaagacgaccggtctaattcggtttgggatttagaaagactctatatcgctcagagggtctaacgcagacgcttttcaactttcgagatatttttcttaggtatatatttccaaatgttacggcgtcgttttcaaaaacatatttttgttgttgcgtagtagtccttcggaaattctttgcttcctagttgaagcactcacaacacacagcttttgtaggaatccctaagcttaaagtctctattattctctaatctcttcttcgccgacgacttctctcaccaaggcgacgttttgatcaggcgatgatgagtatccaatggagttaatgtctatcagaaaccctaattccaccttgctctatagagctcac

SEQ ID NO: 42004 - DNA, 509 bp, Arabidopsis thaliana columbia
ggatcccctatatatatagcaagaataacttttcttgtcataaactaaagttatcatcaccagtgccacacccatcaccggtcttacatccttgattttgagaatagggtacatacacttaaggccttggtttcagaggaaatctcgaatggactgtcaaatcgcaataaccgttttgatcaagatcttggtttcccctaaaatcaaagacctcagccctaaaccaaaactttaaacgaaaaccaagtttctaaaccaaaacgtctcactaattcctgtccattttcattaaatttggcccttgctctttacacactctcactcttctctttggactttgtggattgttaagatttaagacaagataatgacttatagatatctttctaaaaaagcccagttttggctaggtccaagttagaaaagagataattaaactttaaggaaaacaaaacatgtttttttttttgttaatcagcaacatttattaattattaataacaacatgt

SEQ ID NO: 42005 - DNA, 496 bp, Arabidopsis thaliana columbia
cacaaatattcctgattctttcttttagatattgataactctgatgattgccgacaaaaaaaaaaaagtctgatgattaccatgaatttgcttaacactcacgaaaagagcgaaatttgggttttacggttttaccaatattcctgaagggttacttaactaacacaccctgaaggttataagtacctaaagttgcaaattttctgggcaaaatgttttcttttaaacctagcagatgttgtagttcatcgatatgttccaaatctaactatatgatgcaaatcacactgcctatatgtaattcagccacaacatcagatcgacgttaaaaaaagaagagaactcaatgccttaaaataccaaatctgattaagcataataaagtatcaaccaacagcgcccacaaaaaccgacagaatataaagagtatctcctcaatgttaaagggtcgacgaaaaacaaaagaggaaccaaacccagagaagagtcacaaaag

SEQ ID NO: 42006 - DNA, 950 bp, Arabidopsis thaliana columbia
attataaatcacaagtcactttccaaataactgcagctctctccatttgacacatgtcgtaagtctcaaattctattcttttacttttctttttctttttatccacatttacgtcaaaaaaacataataataataataaacaaattattattcttccccatctcccccacgatctctaaaatatccaagcaaacaaaatacaaaattgttaaatctcaaaactacaaattataattggaacagccattcacatctttcaagcatcttcaacttctcctttaagtttttaacaaaaattctcaatcacaaaaatcatccgcgtaaaagcgttccgtgtcgacaaagacttcaccgtcatcgtcacccaataattttgcagaaatatattgttacactgctttgaccgcgcaaagcgctggtattaaactagtcttggggataatatagttgattatttttaaaagtttttagaaataatatagttgattatttttaatatacatcgctatttctacataggatcttagaaattatactagggttttgtagtttgtattcagctaactagaaacttcatatagctctctaatacattcaattatatggctcatctatatacttaatattcaatatattcaaaacttgaaataggtctctgatgtaatctattatatttctcatccaactatatctatcatatatatagctttcaaagcctactatatatatcatatataaaacctcgcaatatattattgattaactccgtcatcatcaaaattatttaaagtgaaaaacccattagattcttcagaatttaagttcattacctgaattcagcattataaagaacaagagtgggagaagaggtaaaaaacttaaaagcagcattgtaaaggcaaagtagctaaccacaattcaaccaatagtaaaatgtactacagagtaga

SEQ ID NO: 42007 - DNA, 589 bp, Arabidopsis thaliana columbia
ggtagttgtcagatcgttcccttagtattaaatgtgcactgtttcaatcctaacgttagttcgtgaatttgacgtggagcgcgcttcatctctggcgtgtaaccaaagctagacaagagaggctaaagcgcattgaataaacagattacattgacatataatcacaacaccttgcaagttgtaacaacaaagcttttggaaataaaagttactactcagattttggcggggagggactggctcggatctaaccttatgagttgttgaacgctttgcttttcagtttgattcggaatttgggaagcggtctagcttctgctgttgatggttcagtctttggttcaaccttaatcaacatggcaccatcacttggttcttcttctttaacctccgcaacactctctatcttctttttagctggatccgtagtgctgctcacgagcttcgccatttccttctcctttcgtttcttctctttctttaaccgtttcttctctagataaacgggatcttctctattcctcgtcttctctttcttttccttgtctttctgcgcttcctttactttaccaatcgaaagtgtttggag

SEQ ID NO: 42008 - DNA, 525 bp, Arabidopsis thaliana columbia
gagtaagtgattatgatgaaactgttgaatcaaaattttataatataaatttgagtacgaaaaggaacctttcattccaagaaaggatattaaaattcatagtttcatttctctgtagaccaacatgtagtggtcaaaatcaacttgtagaacttgcatatattaattttaaaatattttatttaaaagttttaagtcgatggcaaatgctacaagttgaatttgaccaaataacaagcaaaggttagtcgagttttcattgttgatgccgtttctaacttctctcaaatacacaccgcgtgccgtttagtgctctgcttattggacaacgtgtggtataacagaacgtgaacgcttaaacatttttcaactgggccgggctctttggcccaactctatgacttgaatgataccatcagtgaagtcaggtcggtcggtgttcgtcgtatcaaagaagtttcctttagagctttttctctcattctgtcttcgtctaaaaggtgaaatctttaacaactgatcata

SEQ ID NO: 42009 - DNA, 962 bp, Arabidopsis thaliana columbia
cctacgtattacacataaacacatgagatgtacacatcgaatggatcatagatgcatatatgtacaacactcaagacaggtgaaaacgcacaatttttttttttgagatgataaaaaacgaacaatgttaagtataatatgatttttaattaagcattgttgtatttacaatgatgtaattatagaaatgtagtccttttaaatctgtatatatagatagagtcctttatataccaatccaaccacattcgatgttagctagttccctaaacccttccatttataataaataaacaacttctgtggatgattataaattgcagactattaagtacttacttagttaattacttattcttctaaaattccaatcataaatcgaataacaaaaacgcattctcttttgagtgagattagaacatacttctaaataaacttgtttctctccatttcattaaacgagaacaacctaaataaataagcaattaataactaacacctaaattcttgtaagtgagcccataaaccatcagaaacacacgttgaagacatgacatatctttgaacttgaaacccatctattgtatatatatttgatgatatgcaaagtatttaaacgcatagtcatatcaagtttggtttataggaaccgttgtcaatttacattagatggattacgtagcattttaaatatcaagagtatatatatgcatgatatatgattcacttcacagtaaatttaacattttgatgatagtactctacattatttcaaaacttaaaatatgactgtttcatttaattcaaaaaagactaccattcaattatatctttttgttatattacattaatacttatttagattttttttcaacaattcgtatatataatacgacgacaaagacatatatgaagtttttttgctggcaacataaatatgatgagatgcattttaaaattgg

SEQ ID NO: 42010 - DNA, 592 bp, Arabidopsis thaliana columbia
tttccggcgagcatattgagcaaccagatacacagctgttacaagaaacaatagccatttataaacaagtcacatttgacagaaaacattgaacataacaactaagataacgggagtgaatggcaatacctacagatggcaagcagacgatgatgaattgcaccacatgccaatcaaacctaacacaaagcaaaatccatatgagaacatactacaaacacaaagcagcacaagaactcaacttactatataagagatagtttcagaaagtcaaagagacactcgcagcagaagttgaaaaccagttcacttgtttcagcctaaagaagctcacattccacaattctacaattctgaggttttgtagcctaaaattaacttcaaaatatacaaggtaagtttaaaaaaatagggtctttccatgatttaaggccgatagaagcatgaatcaaacacattatagcatctgataaactaaacaaaggacaagatcagcgaagagtgtgtgcacgcattcgagagtaaaccctctttaaccccaaatctcgatagaaattatcaaatttgtcttcttgggtggtcagtgacaaga

SEQ ID NO: 42011 - DNA, 391 bp, Arabidopsis thaliana columbia
tgtggcggggaagaacttattattttgcatacctcttagtgtacattcttataggattttctttttgtatctcgaccctttttgactgtttttgtattctttaataaaaaagatcaattcaattcagaaatcatataatatgttgataagaagacaaaaaccaaaacgaatattataagttttattgaaatttgtaggggaaacaaaaacagaagacgaaacagtacatgctattgtgtaaaatgccaacatgtcacatgtgggctctaataggaaaataaaactaaaaatcgaacgggccttttagatgaacgttacaaaaatgtgttctaatatattattagagattgatggtgaaaggcactttggtaggcggtaaccatgaagcaga

SEQ ID NO: 42012 - DNA, 1359 bp, Arabidopsis thaliana columbia
atcccccattattttagattttatgagcaatccacatacgtcgtcgtaaacaccttaaattacttagaaaaaatataataacaaatttgaaccccaaaaaatcaaccaaaaatagaatcgggtcgagaaaaactcggacccttttttgttccgacaagtatccatttttctttctaaatattgacttaacaaatctgaggttcattttctgtttctctcaataccaggtcaacatgcaatagccataagaaaaaagagagacaaacaacaacagaaaaagagagagaggggaaaagaaatcttgaattgacagaacagaacagaacagaagacaaacccatcaccaaagtctattgagaatttgatatcgatttgagaagagaaaaattaattgttcttgttcttttcattatttaattttgacctatttttagttgttccttttttgcatttcttcttaacctagtttgatcataatgccattttgtatggaactattgattcaagaagaggaaacgcagcaaaagaagcttcctatatctcttatctcctcttaacaatgttgtcctcttctgtaaatacaaaccattaagctctgtttcgttatatttctatcttcctgcactacccctttcttggggttccattgattgttctgtggcggggtttcggttctatctagaggtggaaggatggcagataatccagtggagaaaaagtcgcgttgtcggtttttggggtttgtgtttaacagacgtggcttgtggtccaagaaatgtcccgcggacaatggtagccataaaagcacaatgagtagcagcaatgcctccaccgcaaccgctaccaccgctaacattcagttcaccaaatctccatgtaccgaatttaacccgaggaagcttcaagaaaataaagttttacctgagccgatcgaggtccagaaccaggtacaaagacctgtttcaaaaccctcatcgcatcaatacccaaataacaatcagttaggcagtaatgggaataaccaaccaagtaataataatcaaggaccagtccaacaacaacaagcgaggaaggttccgagggaagcaattggtttatcaggtgagctagagagcatgatcatcgataatcagaaagcaaaagggaataatggctctatggttcgagcttcttcaagcaatgtgatgttgtttggcaatcttgggaacttgaagcagcctggaccatcgggtgggaatcaaactactatccagaacaatggatacgggaacactggtggagggtatggagtgaagaagacgttagaggaggaaagaaaaacatcggttgcacaaataccggcttcaaataccaagacca

SEQ ID NO: 42013 - DNA, 1035 bp, Arabidopsis thaliana columbia
  unsure (1)..(1035): unsure at all n locations
tttcgccctcttcactctctctatctctagatttgataactttcttctataagcatttgttcgatttgcaaaagtgactttatataaaagtggaaactcgtgagattccgtcgaattggaatcgtttttttatggttcggacgagttgctgactcggtttatgagtcaaccgatttacctaattagaagatataggaaaaaaaaatgttatggttggttcattttttgatgaatagtctctcctacccaaaacaaagaggtcgtctaaaatatttgttaaaatcggttttcctacatttccgacatatgtaatggattttgggatttcttttgacaaatgttaaaaattccataatttagactatcttgtatttggcttgcccaaaaataaaagactcttgcatttggcatttttatgactactaatagaatccgaatatcatccaaatagaaataaaaatgttccgacactaatatttctaggaattaaaaattatataattgagggtaaaaagaaatatatatacataccgtagtagacaaaaacaaaagaaataataaaaattgacatgagaaaaaaaacgaaacaaaganatactacaatttttttttggatttgggagcgaatgaacaattaggtggatcatccgaatccaaaatctctttaacaagaagattccttgcccgattaatagtcatgaaacacaagtaaatatgttcttcaagctcatcaagttcttcactaaagctttcttcacatctcttcaactctcgagcaacttcttcactgcctcgaacccgacccgaccctctaccaacccaaaactcagccatggctcgaacatggttcacttcatcgttaattcgtgtcactactctgcttatcgtgtccaaatcacggcttaaaatgtaagtacctttggcagcaacgtcgagccgagccgctgtttttgttaacttattccttaaaccggctggtttaaattgagaggctaaaagagtcggagcggctagaaacaaagcaaaaagcgtgag

SEQ ID NO: 42014 - DNA, 194 bp, Arabidopsis thaliana columbia
catcctcgcttgaggagatcagaagatctctccttgctagaaacggttgcatagttaatatgactgctgatgggaagtctctcacaaatgtcgaaaaatctgttgcaaaatttctagatttactccctgagaacccgtctggtgggcttgtcacttgggatggtcgacttcctctgagttcactagcgcagtaa

SEQ ID NO: 42015 - DNA, 576 bp, Arabidopsis thaliana columbia
aactcccatcaagtttgtagccactgctgtatatatttcccgcttttcccacatagttcacctgtcaaaaaggcaagaatagaattgtggagtaagtagaagacgggtgaagagaaatacacgccaaaggacacaaaatatatagaagggttttcattttatttacctgggttggtattactatagcttcatttctcaaaggaagtcgagcatcccaagtgacgagttcaccagacggattttcagggagtaaatcaagaaattttccaacatatttttccgtgtttgtgagggacttcccatcagcagtcatattaactatgcaaccattcctggaaaggaaagatcttctgatttcctcaagtgaggatgaaattccttcccagtcttgatccaccttctgttcaagagtgtgtagaaattcaaggtaactacaacaaagatcaaagcaaaactctattaggctctataagtataagatcaaactaagaatatgaattaagtttcttctcccacagatgcaatcaaatcaagagggcaaaacaaatggtaaaaacttacaatgaaagaaagagt

SEQ ID NO: 42016 - DNA, 534 bp, Arabidopsis thaliana
aactgtttgacccaaccaaggaaacaaactcatacgaaccattgtcttttgttgttgttgttgttgttgttgttgctgttcttgcttgattcatgtaatgagcctttgtgatgaaggtggtttcttttttggtttcctatcatgtaacttgtgctggagaaaacagcacacctttttcatataataataaatttactcggattatgcaactgaagattgaaactgaaaagtttgatacaagcaccatcataagcgaacagtaacccaaagattcaataagcataacaataatcgatcatcccaaacaaatatgtctttagaaagtagagatctcaacttctcaacttatcacataaaaaaagtctcctgaaaacatgcattcttaaacaaagtcttccactagtagcatgttgttctctagatagatagatatttcttgcttaatcgatggataggcgtggacacaaaagtcccaagcagcacagatggccctacgcccgccaaataaaacatcctgctcaaagccactttgac

SEQ ID NO: 42017 - DNA, 602 bp, Arabidopsis thaliana columbia
tatccactttatcctcatcttgttaatataagaccttttttccttaaaaaaaggagacccccaagttctttttttctctcccaggcactacttacgagataactaaaaacagcaaatggtttcaaaaaaagtagattttgaccatttcttttagccattattggtaatttttgttcttctttggtcgaatctttctttttctctgacgatgctcccctgtttgtctttgtttctcctctcttttatgccttctccagtcctctcttttctctgctcagtgcctcttctcagcctcttcatccttaattgagtagaccaaatgatgctctcactctgaagaccttcctgcataagcagagcatctgttcccctgtttttctagctctaagctaagataatttctggtgcttctgaatatctagagatctctcttttctctttttctagcactaagctaagctcttttcaaattcatttgttcactctttaaaccttctcatggcaaaatgagtcaggccaagttggtattgagattctcctcccaaggaagcaccttttgcttttgaacctgaagacgatgatgatgtggtggttcttcctca

SEQ ID NO: 42018 - DNA, 594 bp, Arabidopsis thaliana columbia
tcagaagagtggttgttgttgttgttgttgttgttgttgttgtgttgagtgaataaaacaacagtgatttgggaagacaaagcgagccatgaacgaagagcaagtaaagcttggctattttcttccaaggaggagacattgagagaagtgaaaatggtgattcttggagcagcagtagcaatggaatcgccagagtatctaaatgggtcattgagtgaagttggagatagaagctgagtgccgtagaaagagagagcgattagaagaaacccagatagccaaatagacaagagcccagctcgaagaccctgtaagattgagtcatcaacaaagtcaaaaacttttcagaaaattgaaacacaagatgtcgaaacaagttgagaatggaaccttaagcttcatgggacatcgaaagacgaattgttgaatgaggagaagacagttcagacaataaagacaaaaattagcaccctggagctttaacggaaaacggaagacaatggagaaataccaaaccttcaaaatggtgatgaagcggaaagccggcgggaggaatggtgaagaagaagaagaagaagacagagaagacatgtg

SEQ ID NO: 42019 - DNA, 514 bp, Arabidopsis thaliana columbia
tagctatgttaggaaataagcagtacagacgccgattactccaccgccgcatacaaagacccgcttcgaggtttcttcaccgatttgttttttagccgccattgatttcgatgagttggagcagatcgtgattgttcgtcgggttaacaccggagggaataataacgatgagatcaccgccatcaccgagatgagatagatgatgactcaccgagtccacacgttagttagaaattatttattgggcttagtttctttttgggctgatcttttgaagcccatttattgtataatctctacgctattgtgtgttactgtgtttcctatgatatttagtagctgataagtgataactgatattctctgtatgaatttcaatgaatagttttctgattctagatgttttaagaagttgaaaaggacttgttgaaataaattatgggggaaaaggacaaatgaccaactaacaatcagataggccattccaaaattgggctccacactttgacgacaa

SEQ ID NO: 42020 - DNA, 405 bp, Arabidopsis thaliana columbia
gccagtgtgctctaaagcgctttgcagacacccaggacttcgcgtcctgggcaaccgtcttctctcccagcgtgaccgcacaattctgcgatccccagggctctgtcgtcattgaaaacggagccacatattcattcgacaacagagaccaactagtaggtttcttcaagaggcgtttgcgacgctgcagacgatccatgtcgtcggcagtggagagctgcactttgtggatgggacagacgagcagggaatcagtgcgatctggccggttatctatcatgctgcgagtcatggagtctcaggaggctggagcggcacagggggaggccattattatgagacatggggagtggaagacggcgaatgggttatcaagagcttgaagtttgtgagaaggtactggag

SEQ ID NO: 42021 - DNA, 542 bp, Arabidopsis thaliana columbia
acaaagagacgaaacgcgatgaaagtaagatgtggaagaaggagaatgagcttgttcatcgtggtgtttagaagaaggtttcgatgatactgaaaatggaactttattcgggatagtgttgaaaggaagagaagccattcatgcctctctgataaacgtctctgaagataaaacagagttctttcgaatcctcgtatttaaattattttatttattatctcctcgacttcttttcgtaaaatgttctccaccgttgattcttgtggcaaatacagacacgtgtacggttttcatctgttactcgatacatatttgtaccgatcgcgattcgtatgtgtaccaaccggttttcgatttgatctcggtttagttgaattataacgttgaaaaatatataattcatttattagaatatacttcaaaagtaacgacaaaaaaaaaatacttcaaaagtatataaacaaaaaatttgagataataacagaagaagaaggtgacattttttataggcttttaatatttatctgaaacctatgtatgac

SEQ ID NO: 42022 - DNA, 373 bp, Arabidopsis thaliana columbia
tctagatctctagtcagtgtgctctaagaggctctaaacggctgcatcttgtctagtttgcagtcgattcgcgggatcatttcatgtgaaccagcagtacggatagatttggctgggaacgactcctgactgccgcggttgcttcccgtcttgactgcaccgtcttgctctctcgattctcgatctctactgtacaacttcattcttgaacgagctgcatcaatatacgacacctatttgccctacaagacaagatctgatctcgactcagcagtcttggactatgaatcgtcgtctcgaccggattggtcgagaagcttccttccattgttccgtaatcgttatccgagccagagacgctgctgtgggagtg

SEQ ID NO: 42023 - DNA, 373 bp, Arabidopsis thaliana columbia
ctcccaagtctcctctaggatacatactactcctttattttcaaaatatttattttactgtatgcttttcttttttgcaaacattacttaacaatttataacagatgaaacataccttgaacatcggacgtcatcggcgttcgaattgtagtctggagaagcgtcctcagcgacggaccgggcctaagttccctggaaaggggcgccatagaaagataccacgccgaatgtctctctatatgggatttgaatgtacaaacggtgtagtttgtgtaaataaaaatttgatttatatagttggtagcatttaaaaggtggggggaaatgtgtatttcaacctcaatttttcgtacggtatcattctcatcataat

SEQ ID NO: 42024 - DNA, 996 bp, Arabidopsis thaliana columbia
taaatgaatctaaaactatgaaacaatatttatgtagaaataacggagttgttgtcaattattgtttgtagtgggaacgtgagataattagatatagaatcttatacatttgtcgtcagtcgtcacagtaagtcagtgactactagtattaaataagaatagaatattaaaccttagattttaatatatgtgtgtaaaatatcgattgaatggttaagccataaaacaaacaatgagattatattagaggtcaccactatatattctatcatttgtgttttatacactcataatattttcagggatctatcttcaaaaactaaattcttaacaacaccaacaacaaaaagtagtcatgacatcagagtaatcacaagaagccattacgtaaacctaatctcaaataattcagaaaataaaaaataatcgcagattacaagcttccaaatggattaaactgaacaatcaaattaaccaacccaaatattataaatataatcaattataatttggtattttatttattcagttaattaaaaacacatgtgaatagatgaaatttaccaaaaataagaacatgctcatctttaatatcctaatttttttaaattgatataattttcttaaaaataaactccaacggccggactagacaatcatcatgattatttgattcaatacatattcagataatcaaaactgaagttgacagtactagcaaaaaaaaaggggggtaatcaaaactgttgttgacactaacaaaaaaggggataatcaaaaatgttaagtctagaaaagcatactgtatatttcaaatgaattaaaagctatttagtggccgaataaattttaaagacatagctatggcctcaatcagtgttttcacgcccgacccgaaccgtccggtccgaccggttaacccgtaatccgaacatttttccggtttgggtttagtgctaaaaccctaacaagctatttgaagaaaagcttatggga

SEQ ID NO: 42025 - DNA, 888 bp, Arabidopsis thaliana
aaacatataactgatttgcatgcatgaagggatcacactcattaacatgtttgaagtttattacagtaacgtatttataaataaagaaaagacattaaaatgggaaactttctcttttgacatatgtatccgtttcaattctcccgtcaacgatcttgtgtcttttattatatcaccaaacgattctttgttttcttgtgtatcgtcgtcgactcctgcaaaaatatatgagatatgttaacataagaaataataggttactagatttgattgaagtgtagcattgtaaagtatgagaaataataattaccattagagacgattaagtaatctagtagtgaggaggaggtggtgatttgtaaaggtagggttggtgtggaggtgagtagtggtgtactggaggaggaggagaatggtataccgtagggggagagtaatggaccggaggaggaggagatttgtattcgtagtgcttcttgggtggtggtggggagtggtatacaactggaggaggtgagtagtgaaccggtggtggtggagagtggtatacgactggaggaggtgagtagtgaaccggtgatgctggagagtggtatacgactggaggaggagagtagtgaaccggtggtggtggggagtgatatactacgggaggaggagagtagtgaaccggtggtggtggggaatggtatactacgcgagaaggagaatagtgaaccggtggtggtggagacttgtaaactggaggaggggagtagtacttaactggtggtggaggagacttgtaaaccggaggaggcgagtagtgcttaaccggtggtggcggggacttgtaaaccggaggaggggagtagtatttaactggtggtggtggggacttgtaaaccg

SEQ ID NO: 42026 - DNA, 587 bp, Arabidopsis thaliana columbia
  unsure (1)..(587): unsure at all n locations
gagacacgagagagcgatattaaactgaaacttgttattttattaagacaagtcacacacttatatacatgttcacgtaactactctacattaccgttgataagagttgtaacttctccgacaagttaggtgtcttactcgcatcctttcgtagtaagtataccacatgactagcaattcggtggtttccaacccttggctagcatggtggtgaagcgtcgagaggtctcgctacgctcgacgcaagggacagttcgcctgatttttccggtgagctcttgaatttggtgcttgttgacggtgctgtttcaggatccttctccggtgagcttggctacagatctgtcctcgtgcggcgtgtctctcttcggttatggttgtggcttcggtgaggcgtctattgcagcggttttctcctagcggcgggatctttcactcgatctgagattgtggtggtgcatcacgtgattcttcagatatcgttgtgccctcttgtgtgttgggtctccggtaagcatatggtgagacggtcttctcttctcgggcncncttccttattttcccaaactccggtggtgttgtgctgg

SEQ ID NO: 42027 - DNA, 651 bp, Arabidopsis thaliana columbia
acggtaactttcgaaatttctcgacctcgttgcgttttcaaattcagtaatgaagttgatatgaattgggtattactattaggttttgaaatcgagagggcaaaaactcgagaccaggcttttagaaattgctgaagaagaagaggctgatgaatttataattgggttgccgagatcttctgatgggaaagagacgattcaatcgaacaaaattcgttctgttgctggacggctcgctattcaagccgccgagaggtgaagcacactcacactcacacatttatatatcgatgaagtgtgatgaaattggtaaagttctgtgctttgcaggggttggagagtttatgtatttgatgaacatggaacaacgtcagaagcttcagatagaatgattgtaatgttagtttcgtttctgaatctctctctgttcttagtttagcaattctggttttgatgtctataaagtttttttttttatgtacattggtatctatctatcaacaaccttaaatcactgaactttcatgaaaatttcgattacggtgtgtctgaattaatgtttgagcattatggtatttcaggggacttagcaagagtgaaagacagaacagatcagatgcatatgctgctgtggtaaggcgaacagtaaac

SEQ ID NO: 42028 - DNA, 424 bp, Arabidopsis thaliana columbia
ttgatttctttgttcttcaggtttcctttgtgttatgcacagtacttggcttagtccaattagttgcgtatgccgtgtattacagatcgactcagatgtctgatgagctcggaatacaattatggttgtgtgtttgcttttggttttgagttatgtgcgtgatttgttatagatatttgtatttttgtgtcgatcaataatgaatgagtcacatttacagacataaatatcagaaaaatagtacaaatacacacaaatgcaagaaaaaaaactcccaacgattgataactaacgacttaatagatatagtttctatgatacattgatagtacaagaattttcctcaatttcttctaaagtttgggtacttgtcagcctttctcttctgatattttatgtgtttgtttatatgaatataagtaag

SEQ ID NO: 42029 - DNA, 610 bp, Arabidopsis thaliana columbia
ttcgattttcgtatagaccaacaaaattaggaatattggggttagtagtggtcaaagttgctatattgagtgaactttttaaagtagcaccctaaaaatatagtatttcgtaagaaaatttgcttcttacttattagatttaagtttgttttatcataacaaaataaatgttttgaatgcggtagttgaaggctcccagaaggcagtgttgtgatatattaccaacttcttcaactggtggcaacataatggaaattggactgcgagagtgcaaagaggatgagctcatctatattcatccctaatttcaccgtaactaattatattatacctttacaatattgccatccattaattttgaacctaaaaatagtttttttttctttcctttttgtaaatttaacattaagttgttaattggctggttgcctttcaacatttggagcatttgagattactttgtgacaaaaaactgaacatgacatgaatataatctagggtggaccttcactgaaattgatgaaaatgacattatacttaaaattaggctacctccaaattcacctagatttaatatatttctattggttacactttactttaagatata

SEQ ID NO: 42030 - DNA, 566 bp, Arabidopsis thaliana columbia
gcatcagtaactctctggatcagcaagggaacatatacgatcagaagacattacattaacaaatcaagagcactagaaaatagaaagagtaatcctctacacatcctaagtttatgcagccagaactaaggaaacaaagtacattccaaattagccacggagactcaagtcttataggtctaacaaagctttcaaaatggctgcgaacgttttatttggaattgaaaacgcaagttaggtttccgaggaaatacacaataaccaaaagcaactacctttttctgctcagccacggttttgaagcgccagaaaatggtacttagctgttcatcatctaattgataaccaagctggaaatgtacaaaagataagagaacattagtgtctcccacaaagatggcaatacaagtatttgtatgtgtaagattgctgtgcactcagtcaaacggtctttcagcgcatgacgccactgcataatatataccaagcaaaagtagagccaacagttagacttctggtttcaacacatatgtagtgtcactagcttataaattggaaaaaaaaat

SEQ ID NO: 42031 - DNA, 726 bp, Arabidopsis thaliana columbia
agaaagcctaatttaccagtaatttatatccaagcttttgtttctctgctattgtctcgatcatgttccaagcttctgtatcaggaagtcccaagccagccttcaaaagcgcataaagtaatgtgaagacatattcaataaagagaactgtaactatcacatatcaagaaatgaaggtaaagaataagtcaactctcaaaataagaaattcaccatatgtgatgccactatgattagtctggctgtgaccaaagtagcatagttcacagatctgagaaaatacaataaagagttacacgaattagtaattcccatgatgattaaattaattggcagtataatgcaagagacaataagatgatgtatgctcaacagggataaaatttcaagtatgttgacaacaatggaaaagttgatgaagcatcctctagggcaaatcgaaaaaagataccgatgagtgacatggaaattacttacaatctacgagcattacaaatatttaaagactgaagatctaaaacatagacaaagtaaattcctgatcaatctctttttttttctccaaaattttctttcagcgatctagttagagaaacaaacaagaattatggaaaccattataaatagctcattgcgagagcgaatatatcaagtatgctacagatcgacttttattttcatcacaaaacgtgataaggagcatttatacaaacaaacaattgatat

SEQ ID NO: 42032 - DNA, 744 bp, Arabidopsis thaliana columbia
ataatacttatctcctttttttggaaaagactattcttcaagcaacttcaaggaccaagcactttggtattcaacggaaagccttacctcttgaaccatctgtccttctacgtgtggctaacagaagaagggcttctctttcaaccggaaatattcctgaaatgtttgatgggcgcccaagttttactgaagcgtaatgaaatttgtaaaattcttttctttagcccttcttgttttcaaatttgttagtactttaatctcatatatcttcgaagtttccaggaagtattgcaaatcatcaccttctgttataaggaactaaaatgatatctttataaatttcgacagatcaggtttagaagcgtctccgagaacaccttcatcacttaaagtacaagcacctcccatgtcaagaacaaattcttcaccaggaaattttgagagtcccctagataggcctatgaggcttgctgaaatttttgttgcagctgagcacgctctacgacttaccatttcagatcatgatttgttgaagacattgtcatctattcaggatttcgaggtagcctgctaataccatttacataaggacaatgaagcttctgattttatgctgctctttattctagcttctcatgtatataaattttgttgtggcagaataaatatcttaacctaaccaaaggtgctgccgaaaactatcaccgttcctggtggaagagacatggagtcgtctcgatgggg

SEQ ID NO: 42033 - DNA, 560 bp, Arabidopsis thaliana columbia
tgggtatttcagacccctttcacccgttttaccagcaaaggcttacccagtaccgttctctgaatcaacaagacgaagctaatcttgattatgatgctactcttgctgcttacatgcgaaaggctactgaattccgttctcggattcaacaagagggacctaatcttgatgatgatgatgctgatgctggtcaacgcattgttctgccacatcttctggactatagacttccaaaagggatgagtgtcaagaatttagaactatcaagctcacaacacagtttggggcttggtatgggaatgatttttggctagggttcaaggaaagagatggatttgagtttacgaatccaactgatagtaagttcccacgattcactctatttgttcttgagtattcagaagtatttaaggcacctaaagatctgaaagaaaaggtgagcaagagtgatgcttatatgtcagccattcatgatggttttctctgtctcgttcatcagtgggatcgcatcatgatgttaaatggagggatggtggggtgatgtctatggttaattggca

SEQ ID NO: 42034 - DNA, 401 bp, Arabidopsis thaliana columbia
ataaaatttaacattttactaaaaaaaagagattgtaaaaaagaatatagagatttgttttattttatcctttaatcagtcattttataaataataaataaagtttcaagtagtacattaattttaaaaattattatagatttaatatacagatcattctagtatacacaaaaattaggatctatattattatttaaaaaaaaaaacagcagctcaagtcgatgaactaaacatgggcaaaatcgtcattgaactaaacattcatagtttcagcagaatccaggaaaaccagcagctacaaaacccactttttgtctgcactttcaaactccaaaggcacggcacttattgtctgcattctcttcttttgtaggcaggcccactttgattcacttctcatt

SEQ ID NO: 42035 - DNA, 623 bp, Arabidopsis thaliana columbia
gcttaaggatgatttaatgagttaagttggttttatgtaactctaactatagcgtaaaccctaaaggcttaaagctaaagaaaaacaaactgtgttctgcttttaaatcactaatatgggccgttaaggcagctaagagtacgtatgaatccaataatggatggttgaccaatgaccagtcatacaaagaaaattaaaaaggtcaaaatttaccaaaatctcgacaaagggcaatttcgcaattaaatgcaaatctgcagcgtctctttctctctctccgccggcgaatttctattgcttccttctccgtcaattttatcaccgaccgtctgtactctccgaccacatatacaccgtgactgctcgaaccattggccttaggttagtcaaccctctttagcttataaagtcaatttcttttttccgtcaaattttgggtttagaattaaaggatttgaattaaaaaatttccaaacagtgcttttgtgttatgttgaattgcagaaatgggttgatttgtcttgtctgggtttaatttgaatgtagaatcgaactccgtttggaactggtttgttgaatgttgtccattgagaaatggttgtgtgtgcttgttttatgttttg

SEQ ID NO: 42036 - DNA, 621 bp, Arabidopsis thaliana columbia
ctagaggatcccctatatattttcttattttcaaacactaatcataagaacataccaaattttagataaatggtcaaacttataaatgtcaaaaggtgtccaaattctgtagtatattatatagtagaagtttcttcttattttggagattgaatataaaggagccaaaaaaatatggattttgatagcttcttagacgtttcatttaggaaatatatgcatggttgggttgatgagaatgccatagaagtgaaaaacaaatgagaaaattcatacaaaaggaatctacatacgtagaataaagcaagaggaccacttcacgttttgcagctttcccacttcagttaaccccaaaattgaatattgtcttggcttacatgtctactactcttttgctttgatgcttttcaatccatttctgtatccccaacaagttgttgtgtttctcctcctatgtagttatcagcgcctagctattaaggaaagagtatcatcatatcacatatgattactcaaatctcatatattattgaatattatgttatgtacttatatcatgtttcattacgaccattagggaagttgtagtcattgaaaatcttgaagattaagagaaagtgt

SEQ ID NO: 42037 - DNA, 614 bp, Arabidopsis thaliana columbia
  unsure (1)..(614): unsure at all n locations
cgaaatgtatgttcgtgaaggttcagttgaaatggcgataactacctttcacgtgaccgccgcaagctcttccttattcgtcacattgcttattgtaaagaacgaaatttggggtttatatggtcaaatatatccacgtcatattagactttttgtttgtttgtcaagttggaccgtaattgaatacttaaatgtatatttttttgttcatcccatcacccacgtaagtcgatttatctatcaatgctggatagaaatataagaatctgacctcacacacaaaaagaagaagactgaactacattatatttgggaaaatcgcatttttaaaaagacagaaccccataatagttacttgtttaacaaattaaatgttccaagtaaacgacgtcgtaggttcaactactattgcgcgcgacacacgcatggcgtatgggaagcaaagttaggcgatgcacgtgaagcttaattagagagttaagcacatgtgtctcccgttcaaaaaatatgaacattgttttacttgtggaaatttgatttatgacatgggcgacatttgaattacacgcggtcaaaatttcaatgtgtttacttttaagtnttacacatgattg

SEQ ID NO: 42038 - DNA, 263 bp, Arabidopsis thaliana columbia
cttcgatcatatgagagacatatcttaacatgtacatagtttactgacatatacgacaagttatcgtaagttgctctgagaatcaacatctttcccctggagtgagctgaagtagaaagattgacatattcatgagtgtaactgttagtccttaaccctgtctctgctaaaatcgagatctttttatgagggttttagatagattggaccgagtaattacaattttcttaaaaaaacttttgaatgagtcacagatcgcgaga

SEQ ID NO: 42039 - DNA, 218 bp, Arabidopsis thaliana columbia
atcccctggagatgctttgccttcttttttacttattatttgcttgggacgagttggaagatggaagtctaaactggcttaactcagggatgtgtttccttgcggtgttcaaaacagaagcagatggagcttccacccaaacggggaacgaggatgatgcgattccccccatgtgaatatgaatgtgagagtgtgactcgggctcatatggtggatca

SEQ ID NO: 42040 - DNA, 632 bp, Arabidopsis thaliana columbia
cgtcatgtcaaggctggaagaactcttttacatcgtctttaagccaaaatttattaattttactttccttataatcaatgtcagtatctttaagccaaaatttgactttttttttttatcatataaaattttgaaattttgggttaaaaaatggaagcatgggagtatatatatatttcttttttttgtcggcaattcattttcattcaaaggcccaattggcaattacagaagggattaagtccagaggattacaacaaagttaacagcccactaaaaacatcagataaacaaaagttgcacatatgctttagtattagacacgtgtagaagacgtatattgctccagcccacgcgtccactcctcaagcatcaccgttaacgttgccggacatcgccgtattctgactaaccaccgtcgatctgtcctagaacgatgtaaatccttttcccttccgccgatctccaatccgaaagatagatagcaccgaaattcttttggttcgattctataaagttgcttcaaaattctcttggtaaaccaatccggggaagctccacaccagttaccccaatttggtgtactaagatccactttgctccacgatttgagcaaaagagagtgatgaggg

SEQ ID NO: 42041 - DNA, 520 bp, Arabidopsis thaliana columbia
cttctagctttcttgggactttcttctgtatgtagctcctagcggttcgtatgtctctggctgttttggcttgctacgcttaactgacggctttgtcatttatttgtgacaggtcgctgataaatcttccccgacgttattctctatcctttttttttttactttacaatgcaatataaagtatcacattcctatacttttagcaggtcatataactgaagtctatgtatgtacttggtacggctcccaaattttgacgctttatttatttgcttttttcaggtcagaaaacagaaaatcctttgcttttacttgggcagtatagtgatgatgaggtggaagaagattcggataagaaggcagatgatacctctgcagatagtttcttagccaataaaaatgagcaggtaacaacaactaacttttataaatcggagtaatgatgatgtatctgttagtcttgatgagttttatttataccaggttgactggattaattcaaggaggacacaaagatacg

SEQ ID NO: 42042 - DNA, 525 bp, Arabidopsis thaliana columbia
gagtagaagaagaagattgaaatgaaaaagcgtgtgccgattgttctaaggaaccagcggagagcacacgcacctgagagttactgctttgctcagaatgaagaaaaaaaaagagaaacgaatttagggttttctgaattatctgttttagtttgacccgattcgcttttttattgggcttgggtcggttacagtttggtctgagcaaagcaatttgtcggaaagcccttcacttccgtaataaaatcaaatttgttttctcattttctgactttcctagttttagagaaaactagttaaaaattgtcttccaaaatttagtttctttactctcaaggaattttttttttttatctattcatttggattaacaaatattattgcatgtcaactattcaataatcaaaattaattcagtttgttctctgtaaaagtgaatcagtgaaaaacagacactattcttgcacgaccttaagtgtttgtctcgttattgcataagatattgttgaagtactttggaatttg

SEQ ID NO: 42043 - DNA, 457 bp, Arabidopsis thaliana columbia
taattgttattgctttgtcgattggcatgatcctatctatgtcttttgtttgcttgtcatgaactggatttttccttggtattgtttagtctgaatcttatttgtaaactgttgctgactctttgtagataagaggctcgatcccgttaaggtcacgggtgtgaagatctcccctgaccctgttgtgagtggtgcagccgcaacatttaagatttttggttctactggtaaatgatacttcctgcttccttaagaagtttcagcactacataatcataacattctttaccttcttgacatttcttgataatattattgtgtgtggtgtgtgtactaggcgaagacatctctggaggaaaagtagtgatcagggttttatacgttgggattcctgtccataccgaaactcatgacctctgcgatgagacggcatgtccggttgcacctggcagctttg

SEQ ID NO: 42044 - DNA, 507 bp, Arabidopsis thaliana columbia
tattatgggctagttagttactcgatcataagtattaactaagactacttaaatctgtaatagttatttaactttttgggtattagaaaattttctctcctcttatggcgttgacctaaaacatttcaagtatatttaaaagttcattcgataaataattattgtaaagccgtgaaccggaaaatcggttaggatttgtatttaaatcgtccggtttaatcggttgggttaattggaaaccctagagtgtgcctataaaagaagaaaactcaaaattagggctttagttagccacttttcattttataaaggagaaaaagagagagaaggaaaagaaccagaatcgttagggtttgggaggaaacggtttcgacatatcaaatcgtggtcaaagttttgtgagacacgttttctcatacgcgaattaggaccagcgaggattttaactgagatcgtagtctcatctggtttccgatcggcacgagtttttgtgggaagctttgtgat

SEQ ID NO: 42045 - DNA, 532 bp, Arabidopsis thaliana columbia
gttgaaggatctataaagggaaagacagaagcagactcagtgaatctgaaaaacggattctggaatggctcaaagccaacaaatgattatgatgaattgatgatgatgatgatgataaattgataatgatgataagtttttgtttgtctatgaaacttttttttaaaaagggctgctcagtaatttatatatcttgctctgtatatgtttttgttgaatcggttttgcttttctcaacaaactttattttcgaaaacggagtaccagaatccaagctcaatcttgtggatgcaataacatagtcaggagagtggagtggggaagtgaattgaagctcatagtgtctcatgggagataaatatttctaaagagcctacggtttgtttccagtcaatggtgtgcttaaaacctctccactcgtagataagcttgtccacggcgtttctggtcgctaaagttcttgattttgtagtaccttatggttccatgtggacagatgagaatcaatgcctttcacttgtgtgcgaatgtg

SEQ ID NO: 42046 - DNA, 564 bp, Arabidopsis thaliana columbia
tagaaagcaaattttgaacaagtggtttaatttaaaagactaattaatgggacttgaataatataattaaaagagagggttatggtttagatccataactaataattatgcaagagttccatcaaaaactaaagatatgatctttatcaatgaacgcaaaaaaacataattcaagaactccatactaagtaaaactatttagaaaaactagattttaaatcaagcaacttagttccaaatattaaaaaaggtagcgacaaatttaacttgacataataaatgattgaatgttcaatattctcaatgttaagatagcctagttgtgggctgggagtctaatgaactttttctacaactattacatgaatttaaaagtaatatttctataaaattcaaaaagagaaatgattcagtttcctacagaaacagatttcgtacagcctttagaacgttttctttagttcagaatcgaagttttgtgtagattttgaaaacaaaaagcagttgttagtgttaagagcttttggtttaagagcatcattcttgagggttcttaggttgatc

SEQ ID NO: 42047 - DNA, 519 bp, Arabidopsis thaliana columbia
tatataaatattacttttagattcatgtaatatatagttgtggtagtagttcattagactgccaacccaaaactaggctatcttaacatcgtgtatattgtccaatcaatcattttttttatgtcgagttcaatcctttgctacctttttcatttttttgaatgtattttctcgttttaaattctatgttttccaaatagttatactttagtatgggttctttgaaatattgcttccattgatagagataatatctttagtttccgatggaagtcttgcataattattagttatggatctaaaccatatccctttcttttaaatatcagtattcaagtcccattaattagactttttgattaaaccaattgttcaaaatttgctctctaatatggctaacatcattaaccaaaatatgagtaaggatttttaacgctataatgaaatatatttcgagtacataatatttgaaccttgtagctattttacaataaataatcttatctatatagactttga

SEQ ID NO: 42048 - DNA, 576 bp, Arabidopsis thaliana columbia
atatcagaagaaccgttgaggagtttaaacacactgtcaacgcttacacattgtggattccagggatggagattagtgttggccatataaaacggagaagcttacctaattttgtgtttcctggtggagttagaccttcacatacctctaaaggaacatgggacagcaatcgccgttcagagcacagaaattcttctacatcaagtgcaccagctgctactaccactactaccgaaatgagttctgaaagtaaagctggttctaacagtccagttgatgggaagaagagaaaatggggagatagtgaaacactcaccgatcagccaaggaactctaaacacattgctgtttcagtgcctgtagagaattgtgaaggcgggagtccaaatccatctgttggatcaatttgttcaagtcctatgaaagattattgtacaaacggtaaatctgagcctattagtaaggatccaccagaaaatgttgttgctttcagtaaggatccaccagagagtcttccgatagaaaagatagccactcctcaagctcatgaaactgaggagcttgaagaaagttttg

SEQ ID NO: 42049 - DNA, 624 bp, Arabidopsis thaliana columbia
ccgggtctgaagcatttcagtcggaagtaaaggtccgatgactttcttccgtcgagctgcttcctctttgagcatcttcttccttaacctctttctctgcgctcgactctgtttctctgcaatccccaattcgtctccgatttctttgtcttctccgtgattagatgaatcgattttcaagtaatcctctgaataataaacaaatttgaatgtgacttccaaagtgtaaataacttgttaagattacattaatcgtacctgggtttatgagtgacacatcgaatggttcgttatcaacaacctccacctgaaacaatggcgggaacatttatcgattcataacccaatcgagaactaacaaattgacacaaatagagattgagaaaataccggaggcggagaataggaaggagaagaaggtggcgatgaaggaggatacagtgtttgaagaagagcttcgtgaaattctcgacgcttttcttctcgccgtcgcatcgtcggcacttggcagcgaaatctccgtctaattcataagatgtgtaacttctttttgttctgttgttcactatgccctagactttagtgggaactgtattactactcccagttttttggatatagtat

SEQ ID NO: 42050 - DNA, 619 bp, Arabidopsis thaliana columbia
agaaatttatgtatagagttttagtaaacccccgtttcatatatatgattcatgctaaattgcatacatgattcatgctaaattgcaggaaaagaataatgtgaaaagcatactagtggattgaaataagtaaacaaaagcttatggaaaatggcctaattatgagaatctactgtattttaataatatgtgaagtgcttatttattggaagattagtatgttacaagtagatataatctccccctcctgagaggagtgacagctgatgcatgattctcaaatccctgacaggaacgtaacaatccgaaacaaaaacaacgaagaagaaagaaagaaagaaaacatagtggaatcagaatccgatccctttctaacatcactcttccttttttgaaaaacttgtaaaagtttccaactttcctcttttcaacaagttgtaatttcttcgcttgttgcatgttgaaacacgttattctgcaattaacaaagataaaatcacatagattttgcattataaaaagctcgttaatgtcactatcttctctgcgcagatcacctttagtacttcccaaggtgacatccatggcgaagaactcatcatcgcagagtagtagcaag

SEQ ID NO: 42051 - DNA, 878 bp, Arabidopsis thaliana columbia
caaacagaggtgacatgtgtcgtggacgagagatgttcgtagaagtaatcacacggaaccatgatcattgcccatatctacgcggtattttaatgatataaaagtaagatttgtgggatatgaatatggtcggtttgagaacatttaaggacttacaattattagtggaaaagatggagacagacaagtgaaagtgaaatactatgaaagtgaagttatgaagtttcctccacacactttttagtgaaacacagtttgcatttttgttgagattttagaatcaaattttggaattagcaactctgctattaacttatgcaatggatgtgcgtctaggaaaaatagatttcggattttaacccacaaaaagacaaaatgatgatcactaagttaccattatttagtactgctttaaacaattttcatgtttgataatgaggaaatttagtaatttagaacattgtacaaaagttataaagaaactcttagaaagatttagaaaaatgggctttgcaatgactattgagacggtacgtgtatccaatagtggggttggtggtctatggaagtggtgtggtgcatcattgcatggggttggttaaatttaaaagtcattcatttgtgtaatcatggttctctgtttccaccgtaacccaaactaaattgttgacaactaagagtttttaaacaagtaaatcattattaacttgagatcatcaaaggtaaaacaatttctatgcgtccaaacatttacattagtatggttctaaccattgttctcagaggatctgacataaaacttgatattgtgtaaccggttcgcgaggcttctagtgctaaattacatatgtatgtcgtatttgttgacgcaaattgaa

SEQ ID NO: 42052 - DNA, 546 bp, Arabidopsis thaliana columbia
cccttatctattaatatttgtctaccaaaatctaacacttaaaattagcaatttatcttaattaaataaatattgttaaactttgtcttttgtcacactagtcataactgagattgatcagttcgttccatttctatagaattcaacttatacgttgaatccgatagaaagaaaatagaaaagtaatttgaattttttttcatccacaaacaaaacttgttgaaacttgaaacattgaataatctaataaaagtataaaaaaaaatataaaaaatatatgtttaccaattatccaatttatttctgcatattttgtaaattaaaaagtaattcaaatacgtttcatgtcgacaaaatgttgaatgtacaagtggtttatgctaatttaatcactgtcaattcactgaaacgaataaatcgagtaattacttttttaattgacaaattacaaaactatagaaacattaagggcataattgaaatttccaataaattgaagagcaaaaaccctagaaaattgacacggactataaaaaggtgacgaag

SEQ ID NO: 42053 - DNA, 627 bp, Arabidopsis thaliana columbia
tcattttctttttctggttccgtgcagaagaagaggaggaaatcgaaatgctcttggagaactatctgcaaaggtcttgacttttgctcttgaagcactctgatatgtttcattgttatgtagtgaaactctatggcttcgtatgtgcagatgtgagtcatgccatggacaagcagaaagacttctggattctgcaaaggaaatggaagactcaattgctgtcaatctaaggtactgaagataacaaaatactcctttctcttaaattcttaggcactcttaccatggtccattgtttgtttccagttctcggaggcttgaggtcagcaggttcgagttgcttcttcaggtcggtacattttgtgttgcagttggtgctctcatcgcaggtatattcacaaacttttgatgatttgtatccgctttctctgaaacctttgaactatagtagagcctttgcatttaaactaccaactaccaagattgaacggagtgtccacattctccattacatatgtgctatttgaatttgactacaaagaaccatttccctatgaacatgatctcaaagccaacaaatcctatttttccctgttcattgtaaatggcttatcccttttgttttgg

SEQ ID NO: 42054 - DNA, 625 bp, Arabidopsis thaliana
ttcatcggccggacggtgtgtggttcaaacacctctggaggtggaggggagttggtggactcgggcggcggtgagtctatcggtggagggaacacgatgggaatcggcggcggacatctgggggagggggagaacttggcggcggggttaaatcaggcggcggaggaggagatggatccaagcgctggagaagaagggatgagacagttggcggaggagaaaagacagctggcggaagagatggaagagctggaggcggagatgaatcagccggtggactaggaggtggtgctgaatccgtaggtggaggagcagcagatccgtcggatgaggtatccggcggcggacgggaatcagcggatggtgctggtggagaagaagttggcgagtccgacatttttttgccttgtttgaatttgtttctgtataacagaaacaacactcaaatccctaaaacccagaaatctctctgttttagggaatcacttcatacaaggcaaagcagagagtttattcatcaattgattaaaacaagtcaattgaataataaatcaactaatataatttttctgttctgcaactggaaacaactaattaaaatctgaaattaaactcccaaatcaac

SEQ ID NO: 42055 - DNA, 462 bp, Arabidopsis thaliana columbia
cttcacacttgtccctcgacaacccaatccctcatcgcgtcatatgcctttcatgctgttaaacagagtcgagacaccattgtaccagtggaccaaagtacacatggcctatggcattgaacagacctcaccttgacgctagattaccctcttaatctcaacttaagactatcatcagcgtatcacatgattcgaatttacagcagtacagctgaaacttgtaccatcatgagagttaccacctcgcaacaatcagctaactcgagatgctctaatatcacgataatacaccacaatccagacttgtcataggtcttagaaactctactagcagtgcaactatgagcgctactagagattcatcaatgacccactaagtagtagaggaatcactcactaatcagatccacgcttcaaatctgacccttagtcctcatgtacactccggatctgagagtaacg

SEQ ID NO: 42056 - DNA, 514 bp, Arabidopsis thaliana columbia
tcccggtgttccaactgcagggcatccacaatacgtaagtgggctatatattattgtgaagtgtgaagtcttctaacaaacaaacagaatttcaaaattcaaattcaaatccaaatcacacgagcgagagagagcagataatcgccactcgccagagctattgatttcgcttcatcgaatctcacactctctaagtttcgtctgcaatgtcgtctaccagaagaggcactaagagaactcggccagagccgccgcaatcgctcaagaagccaacaccgaaagcaaaactcccggacgaattggatgtcgatgtttctaggtccgttctcgtgttttcttttgcttcgtcttcttctttttcttcgtttcttctgtttttttgctgaaatgtgactcgcgattgtgtttccgtgttgatcgtgtagcgatttcaaaggaatcatgtcggcgttgcagcaattcagagagaaagcgcacgaagatggccgtaagaagaaggaagaaagcatttcca

SEQ ID NO: 42057 - DNA, 557 bp, Arabidopsis thaliana columbia
tataaattgtggcggtgggagatggagttactaaaaacgaaacgtacaagtattattcatagctctcgtataaggggttagtccttagatctagatattttcacttttctttcatttatgtcggagcaacagacactagctggcgcttcaacgtgcatgatcttgattggctagtaaattccaagcatcaatacctaacacatgcccaacttggttcattagtattctttcattggtaaaatacccttacctttcaataatatccagaaataaatatatgaagccatccatcaaccggtgcatttcctcaaggcatggatatgatatcagaacatcgatgaaggtgggagggggtaattagctgagtgtcataaatgaggatccatgtggagatcatcgaatggtagtagtacatgtttggtcttagctggccccaccacaaggaattggactggtgggaagataggggtggtacgtcatccacatatctccaattaaggagtttaatataaccttgctatataatgtccttggctccaagagttgaagagcacagt

SEQ ID NO: 42058 - DNA, 561 bp, Arabidopsis thaliana columbia
cgacgaatccaacggctcgtgagtgaagggtgcatagagatcggagagtagagaatcgaagcaggcgtaggatatttgttttgttgacgtcaaccatagaaagatatacacgtggaggtattgagaagagtttcggattaataaatgcttttcttggttttcttattaaaaccagtaaaaatgcttttcttgttaaagaaaaaaaataaaaattccttgactaatccttcacgccgcgtctagcccattaaaaattttcggacaacaacaacaacaacttcgctttcctatctctttcagctttgctacactaaacttggcttatcattgctaatatggctcgactcggcttaattttgactaaccacaaatgttttgtaaaaatttcagtaaaaataaaacaaaaattaagcgaaataaatatctagggaaactatattacgcaatgtctaattaggaaactaaatcattatatttacccaaagatatccaaaagatgattaccactagatattactgattcgttgtaggtgaaaaagaagaatgagaaagaccgtgaag

SEQ ID NO: 42059 - DNA, 598 bp, Arabidopsis thaliana columbia
gggtatatgtggagctccagtatgcaagtgataaggacatcagacaatggatagaatggtctcagctctagtagttagaaatgtgttttccaagtaacacaggaacatgtttgaggaaatttttatttggttgtgtgaactggatgtatatatacacacatatatatatatatacacacttatgactgttatgttgggatattaaaaatgtatacattacagtataacagtttatgcacagtatcatttggcaatcagagctttctagcctatattttacttgccttgtggttttatcttctgttttgatgatactgctaggttaggtggatatttgatgtggctcatgatgcgttgaataaattatactgcttgatcttatattatgtgttgctctttagatggatatagaacttatctcatggttatcaattgtcatgtccagtagggggcatatttctagtcactttgaactatcaaggttccttcatctgtttgatagcccttcagtttacttagaaatactgcatacaaactaatttgcacttctgaattttattcaaaaagtagtaattcctagcagatcttgtttgttgac

SEQ ID NO: 42060 - DNA, 460 bp, Arabidopsis thaliana columbia
gtctctcaatctccatgcctggcgactcgaaaactgattcccaagaaacctctcctctcccaacaacctcagatttagatgatttcctaagaaacgtcgatattttcttcctccgtagttcaaaaacgactctctgttgcttcaattctttgacagctgcttcgtccccttgacactccagaccaaaagattgatcccacatgagttggtctgatttcgaagagagctctctcgtgtttacttcgatctttctgttgtgtcctgcagagagatagaatctaacgaacagagtactagcttgtgacttgatctctacgtttcttgcttctactattctcacttggcattttagtgaacgaagtttcttctccataacacccattttcttgcttactaaatcgaatcaaatcaagaatcaaagatgaggtattgttgattgatatgtttgcttgaacaaaga

SEQ ID NO: 42061 - DNA, 622 bp, Arabidopsis thaliana columbia
cttaaaaactataaatcattatatctttgatctgtttcacaaactaatcatattcgttgcaaagtgagaattcgtcccactttactctttacaccgatactagtattatagatgtacagcatagtattccatatctagttatttagtcaaaactctatatattaagaggtaggttaattaattaaggagtaattgaagattatagaaagaataaaaaataccatttaatggacagaaccaaagataactaactatcatactataatgttgaatttcttccacgatccaatgcatggataacaacatcaatcaaatcatacattcatgctatataacatagttttcagttacaaactctcttttttatttatttcagttgttccttttcatgaccatattaacatcaaataatgcatttttttcaacgtctcttgacttacacccactaatattgacaaattgaacatctatacgactatacacacataagttaaaaatgcatgcaagtgctaagggaatttataacatctaaggttaataagactaagaaagtataaaataagaatacgtattatgaatttatgatatactttactaatctttttgaaaaatactttaattt

SEQ ID NO: 42062 - DNA, 850 bp, Arabidopsis thaliana columbia
tgcaagtttgttttcatgtatatggtttaaatcttgaaaaatgttgtgtatggatagagctttcttctgaaagtagtcatctcatttagtgtgatattgtctggccaaccttatttttaactaatcaccaactaatacaccaaactactagctataagaaataatattttcatttcctacaaaaatgggtagtgaaatgtgaaaactactgtgatgtaaacaatcctcgctagacttggttaatgttttactgaagaaaatggtgttttagtgagatattgattgcacggctttaatcaaacggcttttgtctattttaccaataacggatcaaactggacaatgttcttttctcattatcatattttatcaaatttaaatctttgattatttttgattaaatgctctacgtggcaaaaatattccatattttacaaatacggatttcaatttaggatctatccatattatacgtccacaaaaaaaaacagaatttccatactaaaattagtttcataaaaaaattaaaatttgttgaaaattttcataaacttttgccatagttttatcttttttacttataacaaatacttgctgtgatttaaaatggtaaaaaaaaaaaaaggaatatactcaacttcgtttgggacctttggaaatgggccgaccttgcattcataaccttatattttaattttcttatgcagaattaattttcaattctttctaataaataacaagttgaagccaatggataatggcggtggctattttcttacgaatgaaaggaagacgaagcaaaaaattaggtttgaacatgaaatcggagccagacacgtggatggtgagg

SEQ ID NO: 42063 - DNA, 558 bp, Arabidopsis thaliana columbia
ctgacaaggaacaatagtttagaactggaagaaaaaaaactgcaaactttaaggttttggagcaattgaatgaactttaggtagaacgcatgaaactacaattacatgaataaacacatagacaacaaaattatcagggtgcagatttttaaaccaagttgtaattctagcaaacccatcaaccatcatcttccgctggattttgtgttttctgaagaaaaaaaagagatagaaaaaggagagagacaagagattgtaaccgatgtaattaaagggtaaataagtaaaattgcccatacaaagtgcctactccttgaaaagtgtctaatcacgtaaatacttttaaaaaagtgctctacactgtaatattctctaaaatttaaccgtgggttttgcgtgtatatataaaaaatctttacacatagttaagaatggtatgtcttagtcgagaagttgaacgtcgcctgacatcttccactacacctgggttcgagttccctatgcgtcaaacagaagatttttaattttaatcttttttctgttttttctttgattttg

SEQ ID NO: 42064 - DNA, 744 bp, Arabidopsis thaliana columbia
gtattattatattatgccaattttgtaaaatttgaatatataatgggcttgtaggtccaattaaatttcggtttggtttggatttggataaaaaatggttcgagttcagttcttggtttggtttgaaaattgatatggataaaaaacagttacattcatgtgaatctttagtctttgtaacgacgccgaaccaaattacctttcgtaactaaacgacgtcgtatttagttattggataaattaatgagaatattacagtgtagagcacttttttaaaaatatttacgtgattaaacacttttcaaggaataggcactttgtatggacaatttgacttatttaccctttaattacatcggttacaatctcttgtctctttcctttttctatctcttttttttctttagaaaacacaaaatccagcggaagatgatggttgatgggtttgctagaattacaacttggtttaaaaatctgtaccctgataattttgttgtctatgtgtttattcatgttattgtagtttcatgcgttctacctaaagttcattcaattgctccaaaaccttaaagtttgcagtttttttcttccagttcttcacttgctagatcttagaatttcagataccataaaatatggagaacaaaagaaaagaaagaataagtgaacgagcgaccgagtgaaggatctcgtgtagcagtagaagccgcgatctcgtttctctggtttttggtggcaaatcat

SEQ ID NO: 42065 - DNA, 1654 bp, Arabidopsis thaliana
gccctcgagttttgcccaaaacttctgttctggaatagccaacaccggtgccgaagtggttcttgcaaacggtttcggtacatagggtttctcagcctccagctcttctatcaccttcgcaatatccacaatctcatccatccccataggtctctttctcatcacctgatcctgtaaactctttttcattccattcagaaacactgctgacatttcctcaaagtcacatgaggaacctcagctgacatttcctcaaagtgatctctatactcagctatagtcccttcttgtctcagcttaagcatctgccaaatcatgttacctctaggcgttgctccatacctctttctcagcttggttttgaaatctagccagtctcttagtatgtccctcaactgaacatttcttacccatcgcactgcacctccgaccatacaagctagggcttgttcctgcttctcttcttcaggtgtctggttaaccctaaaacacttctccatcctaaagatccagtcctccggggtctgacagtcataagctggcagatccatgagcttaccaggcgattccaccttagaggtctgcggctcacccctaggttccgtcctcgtggtctgaatcgtggcctccaccgagttttacggtatagcaagctttgggagaggtaagagcgcgtcacgcctctctctctccgccggcatcgtaaacccaggtgtctcctccaccgtcagcacattgtcgcgacttcccccactttgattcgtcagacaaagttgatctaaccactgatttatcttctcctggttagccatcaactgcatcatcatcttctgcaagtcactcgacacggcttcagtcttctctaacctcgcctccaccattagcgtcttctccaacctcgcctccaccattagcgtcttctcaggtgaagctaggcttggattgttcgggttgtttctttgagccatggctctgataccaatgatagtccccgactatcgatttgagacttagatcagatttagatgaggaaagaagagttaagaagggaaagagagttgataattgtcatcgattgataattgcataaggaaaccctaagatggactgtccctttaaatacataggtttagttcacgacacataagaaacgacaacgcattacatattctacttcgaaccctcttctccaattagagtctctcagccacttagagtattcttcttctgctcatacttccttgcgactctgccagctctcgtgcccttccacatgaaagccaatggcactgagagtgtatcatcctcctccggtgactctcctccttctacgccaaacattttctcgccggtcatcaaatttggcgaatcgagacatcctcgttgtctctcatcttggcctctcgttcatgatacatcacagccatcttcgcctctaatctcctccgatgaacaaacgccttcgttcctgtttgtcatcgtctcctcatttccccagagagctctcttgttctcgacaaggagagatgaacttgcctttcgatgacaaaatcaaactcagattccgactacttcgatggctagctccagcgaaagcaattgcaaaccttcacctttttttttggttgctctccgttttggtgaaacaagagac

SEQ ID NO: 42066 - DNA, 537 bp, Arabidopsis thaliana columbia
ttgttcttaccatcattaatccttcgtaacgcttttgtaacgcctttgtcgctaattcttccgccgacggttgttgcgttggtgattgcgtttgcgtttgctgttgtgtcgccgttgttgttgcgtttgtcgtcgtcgccattgtaaagtcaaaaaacttaaacaacaaccctgaacgaaattaagctgagactagtggattttgatgaaattgaagagaaaatttcgccggcggtcggagataactccggcggttcctcataacagagaacagaaatagaaataaataaactttgtctctgtttttgcttcacctctgaaaaaaaaaaaaaactttgttcctctctgctctgctatcacactgatagtttctttcgattctattttttaagagactgagaaatttcaaaaaggagaagaagaagaaagaaagagacagtagagagagacagagagaggaaggagaagaaaataagggagacaaaagtgaatccacgcgcataaggtaagcgcgtgtttgtaacattgaatgaaacg

SEQ ID NO: 42067 - DNA, 508 bp, Arabidopsis thaliana columbia
ctagaggatatcgctcgtttccattcctcagttgatcgctcattgttatacaatttttgttaggtaaaagcaaacccaggaccgatcacgggaggcttggctccaatatatggagcagcagggaagatgccagaccgaggcatggtgaatgagcttctggttagtgtcatggacagtcaatattcagtctcttgaaggttaaagcatctagtgggtaaattgatatcacatttcagttggagaagcaaaactttgtatattcacaaccacattgtttcgtttgccctactaataaaatttcattacaatcttcataataaacaactcttagttcgttacattacaccttcagaacaaaaaagatgatcaatcagatttgtggttagaaggttttgatctaggaacttgaactggcttgtcttcttggcttttcgccaagatctcgtctctctctctgaagtattgctcgaaagcacgaggcaggaacttagggatcaagaaacagagt

SEQ ID NO: 42068 - DNA, 500 bp, Arabidopsis thaliana columbia
tacatcatcataattcataacatttgcatcagaccaggctcaactagatgcaaaagaaccaagatgggcccgttgaagtaacttatattttggactgggcctgtcacttggcaactgtgggacccacatgaacatgtgccgaagataggcctgaatctccgagaacaaacctccgccacaaaaacagaagacttgttgcttgcgtatcataatacgacgccgtatctctacttgctcgaacaaacccaaaaagatacatatcaagagattaaaccttatccaactaagagaagccattttaatatttatagggtctctgagttgtgtattgagcttcatctccttcaaatggcttccttatcaaccacttccctaagcttcaaagctccgtccaccacaatttcacaggtaatttaacaaattcttctcataaatctcagtgtacagtttgttctcattctttttttttggaaggagtcttaatctcaacatatatagtt

SEQ ID NO: 42069 - DNA, 566 bp, Arabidopsis thaliana columbia
tcattgtgttcatatattgttataattttacacatgtatcaaatgcaatagtacagttcgaccttcgctcagttggtagacaggaggttgtttctttgcgccaagaactgtgcaaaaaccacatgtggatggatcttttggttttgtagtctgcctagtcaatggttcaaacatcataaggtgtcaagtatagtgaaagtaacctctgacatttccactcattccctataacaaacttggcatgtaacgtaacttaaccttttaccaaaaaaaaaaaacttgacatgtatgcatttctcttattgagttctcttttgataacgattttgttgtaatactcttgtcaaagaacactgaaaatggaatgaaacaagctttagaaaataagatctgaccctaccggattcaaactattgacctaaggatgttctgcttcaactattgttttcattcgaaatgcaaagaaacaacctccgttccaaaaagctagatctttggcctccatagcttgcagaattcacttgattaagttatgtccccatgacattataatccacaggcttata

SEQ ID NO: 42070 - DNA, 455 bp, Arabidopsis thaliana columbia
atcatatggtaaaaactatattttaaacattgtttgttttccaagaaattttatcaattttgagtttttatttaattataatttgttatttgttaatattaactaagatatatatttgatatgatatatgttacttttatataagaagtttagcacatattgattaagatgaattgtgtagatttaaatcaagtttattatgatgaaatagatagtgaaatagtattgccaaatagaatgtaaaatattgaaattgggtttaaaaatagttaataaattaaattaaaaaaatatgtgggtgactatttaaaattcaaatatcttagtatataaagtatggtatgtattcgttttgtaagatttttttttctgcaagaatgaagaatgatgtaatttggtaagatataaacttgaaattgatgacaaaaaaaaaaaaaaaaaaaaaaacctggaaa

SEQ ID NO: 42071 - DNA, 601 bp, Arabidopsis thaliana columbia
ccctatataatagatcaacttttagctatcaaaacccccaggtcgtcttcactgccgccattgctgggcacccatctgcctcctatccttctctcacctcttcttctacgtctccgtcgctcaaactctccgttgcatcaacggcttcaagtaccagcgtcgctgccataagctcactctcggtctcgccactcacaagctccgtttcatcaagtcaagaatcgctgccggagatttcctcggtggaggcgacggtgatgaggcctctgctgctgcttgggatctggaagttccgtatcaagaaccacctgatagctactttggcaagtttaagagaaattgggctctctattttgggttcttgatccttctttacactttcatgatctctttctctgtcgttatcctctgtttctgagatctctagagtggcattttcgtaaattttgcaaaacccatctgtttcttattattcattagtcctcagctttagaatgatcaagaagattgaaataaaacaaagttagaatctttgacatttgattcaatctggttactgaagccctagtcaattacttgattgagagatgggattaagaca

SEQ ID NO: 42072 - DNA, 232 bp, Arabidopsis thaliana columbia
caggtggtgaatatgccctttcatgatcatcttcaacaagctcagtaccagagacagaaccatttttcaacctttcagcctctgcttcagcgtgttaaatggtgctctaccatttctcaaattcaaccccattaccattttaagctacaataacaacaaaccctggtaagcaaggtcgacacttttgcaaattacaacctttaagaattccttttctacataaataaccaac

SEQ ID NO: 42073 - DNA, 480 bp, Arabidopsis thaliana columbia
ctaacttatacctgggaatactttgatctcattgttaagttgctaccggcttagtgtgatttcttcaggtatggtagtaatcttgttagaaaaaattgaatgacaaaagcttcctagaaagcatctgtatctattactcgctttgtgcacaatgtagatcatggttttgtgtttatgactttgttggaaccactagttttttggagtttctctattattatgtcactgcaactaccaatatatcttcagttttacgcttttggatcagtgatcgatgaaattcattcattttgtggggcgactcatgtggcttgcttaagctctatgcatatcaacatgtgagagttgcgacaaatcgacatatatacaaattgatgaagaagatgacaacacagtacagcaaacaacgaacatcagacaacaatagcagataaattgacaatctagaagctacaagaaccgtatcgaagctttagtttt

SEQ ID NO: 42074 - DNA, 506 bp, Arabidopsis thaliana columbia
taacaacacaatggtgtattcattaaaattacacatacgttgaacaacaaatatcaggaaacattacaggaaacattcttttatcttcttagtttcgtcttctaactcttgataaactacataattccctagctatattaatgcacacatttatcttacatttccctttaccaattgacgtaacaagacatgagttacaacatctcacacccaaatgggagtaaaacaaggttttaatttaccgggtttggtccaaaagagttcccataagtctggaagaacgaagctgccgcccagaacaaccgtatcagcagaatcaccgtaaacacagttcctcctagattgcatattaccttccataaaagttagcaacacatatccatgagatcacactcaactaaaacaagttactctaattcataaacgctcataaatagtgtatgctacacatacaatccaatgcaactatcagatcaaactagcttcaacaagaaagctcaaaaacc

SEQ ID NO: 42075 - DNA, 609 bp, Arabidopsis thaliana columbia
aaattcagtcatcatcaatacatgtagagaaacatgctaaaccatgatgaatacacaacgaacagaacttcaaaatgaaaacgatggctcgtctttagtgttttatagcaaatttaaactgtcgggcaagctctcaacatccagttagtcaagtatattaatggtatcatctccatataatgacatgtcattattattcatgaccatcaaactcaaactcaccacaaaaatttataatcaaaataattggaaacatcatgtggatctaaaacacttgaatcgagaaatatctctaaaatccgatcacagagtctgtggctcctcacatttcatttcaggtcagttgcaattaaatccacaaatcaagtcacatgctttcaaaaatctaatactgttagcgttaagtaaggcccctcttgatgtttgtggatctacgccgaaacactcgtattaaaagtccacacgcttgcactacctaattatctaatgcttagttttaagtaaaatatcgacttaagggctatgtaagattatacaattatatatctcttgttttcgtgatcgtggttggacaaaaatgaagtgtcgtgacaagaaaccgtgatgttg

SEQ ID NO: 42076 - DNA, 574 bp, Arabidopsis thaliana columbia
caagcatgtcttgtaagccaaacaactctttggcgacatctagcgagagtctcatcctacgatctcgtgtccctttggccgttttgatcttgctgtgcctgtccgttctgctgggtttcttggcttttttcatttttgggtcttgagaagttgagattctctgggaatcttctataagggtttatagtttccgagggctcagtgggttgttctacaatggtgttgttcaagggaaagtgaagtgatggatgatgattgtcgtttgggatggtttggttatcatcatggccattgttttctgggtggaaagaggtgaggagggcgcagtccggggcaaattcgaagtgagaaaaaggagaaggttgttggaattgatgatgatggtcaagatgattgtttgatgtgttagaggtggagtgaatcaagatgtcgttaatggaagaagaagggctaaaagggagcaatggttgtgaggaataatggtcattataagggaataacatgtagtcgtcattgatggtggtagtagtactgaaaatgttgttgtcatgcctttttaggggttttgaagtac

SEQ ID NO: 42077 - DNA, 604 bp, Arabidopsis thaliana columbia
ctacaactataagctcttttttcgttttccctttcaataatttctttttctttttccgtgatcccaacgtttgaattgatcgccgtttctgggtttttcttttaaaagagaggtattcatcatggacgggcaagagcatgccgaggtccctaattcgatggttgaggatgaccaatcagttgttgcggcggaggcgattgcagagttggcgaattcaaccggcgaacctaatcctgaagaaggagaagaacagagtgttgaagacgagcttatagcgaaggcgcagaagcttatggaagatattacttccgttgccaataaccctaatcctaatatccttcacgctcttagtcagcttctcgaatctcaggagtctctgtatgttcctttctagctcaacaatcagtctctcttcttgattttcttttgtagttgtctttagttttgacgcttacttgtattcgcaggttcttagaggagaatgggcatttctccaatgctcgtggtagtcataacagtggcaagctgtgtatctcatccgagtaagtttatttagaaaagattgttcttttttctcttgtgtgggttctttcttcttattttg

SEQ ID NO: 42078 - DNA, 592 bp, Arabidopsis thaliana columbia
taaaaaaagaaaagtaaaagggctaaaagtgtaatatagagtatttggctacgtggtgatggtggggtactgtaacgaacttttataaaaaaagccaaagaaaaagggctttaatggctccaatgaccatttactctgattttgacttctcttttcagattctagagagatagagagaaaaatcgcaactctctacagagaagcggaactacttcttcaacaacgcggctaagacggagaagaaaggtcgtatggttttcgccggagttgtagatcaaatctgttaccgattggtacggacattgttccgcaagtttggacctttaaattggggaagaggaagatagatacagagagagaaggagaaggagttttgggtttcgatgaaagctctacgaagaatacaaacgaagtctacgtttccaaatccttcttctccgtcatctccgtggactcatttgcgttctgctttcgtccttgttacttcttcttctccagcttcttgttcttcttcttctgatccgttagtctcttttgatctctctatctcattctcagtttctatatgatttgatttgtgcttcaaaggggt

SEQ ID NO: 42079 - DNA, 509 bp, Arabidopsis thaliana columbia
taccgcgggttaaaatctagtttagtttatttgaaatcagatattatcggatctagcaaatatattttctcttgtccaattgatatttttccaacaagatagacaattttcgatgttgtagaggattttttagtcatgatcatactaataatcgtaaaagttttttaaggaaaatctttttttaatacaaatttcttatagtttcgattcatcgtgattgtactatatatcagttctttttcggttttgttttagtttagtttttatcaatattatttcagttacgggcggtgtttgaaactgatcagcctctctacaaaatatttcagattgacatctaaactactgatttatcctttattatattttaagactgcttgataaaaaataataataataaaaagtatttatctatagcataatttcaacaataaataatgattttgacccaacaaaataatataccaaaagctttttgatttggatgcaaatccttaaaacgatatata

SEQ ID NO: 42080 - DNA, 708 bp, Arabidopsis thaliana columbia
gttaaaaaattagtatttgtagcttagagtcatataacatgtatctctacattaactctttatcatatattggatttgaaagtttagtttcttagatagtatgcttaagattgagaagaaataataatggttgttaaaggaacataattagatccacacgaaaagctaaactagaaaacacaaaatcaataatgtgaaaaagagaaaaagaagagaaatccagtggagccaaagggtcggtcgggccccgacgacaactcgcgccagagcgtgtggttcaaacaccatgtaacagcgcgtggtcactttttttcatcccagcaaacaaaagacgagaccaggcattgacaacaaattataatcgttttcttctttctctttttgcactctttgggttttctaacgatgatggcgtgaaagaaagagagagagagaacaagcagtgttcaagaagagagagagagaggaacaaaagtgtctcttttttcttctctgcattgcccatttatcctgtcgtctttgacgcttttgtaaaagctaaaaaagaaaaaagatgccaaacgacgacgaagactagagagagatagactaaagaaccagttgtctttattcttcttcttccttcttccttcttcactcttgagattctctgtatcttggtcttgagtttatccgtaagtttgtttgtgtttttcttgagttgattga

SEQ ID NO: 42081 - DNA, 498 bp, Arabidopsis thaliana columbia
cgtacctttatagatctaatcgaattaccctacacacacaaaacttaatagtttatcttatcaacttctttttggttagattttgttattcgaattaagaataactttatagcttggatcgacttgattgattttttaagattcacagtcttagatttacaggaatcgttacttggagaaatttatatcctctaatatctttcacgcaaaaaatgaaaattattaaagcacaaaaaaaaaaaaaaaattaaagcaattaaggtggacacacacacttttcagccatataacgcaataatagatttttttttcatcaagacaaaaaataagagttttttttttatatatatgcactttaacatcaccatctcttccaataatttcatttggatactacaaacaaaaaataagagaacctaagaaattgcagaatgagcaaaacaaatttcaagattaattatcgcaaaattcaagtttaatagtggcttttgctgaaat

SEQ ID NO: 42082 - DNA, 2899 bp, Arabidopsis thaliana columbia
gccttgatatatgcaaaatattggaaaccaatgtccgaacatatcattttcaccccgtaatatagcaaagatcacgaaaaggcccaaaaaagtacatttaggtcaaaatttggagtagaaaaaaactaatagaagaattccattttccttcctcattcatcagagagctctctttgggctttccgaaaaggtatcacatgccaagtttggcctcatggtcgaaaagttatagagtcatacatttttaacaaaacaaaatagagaaaaaccgaaaaaaagagggatgcaacacgaggactttccgggaggtcacccatcctaatactactctcgcccaagcacgcttaactacggagtttaatgggatctggtgcattagtgctggtatgattgcatccgttactacatacaatgcaatcgtatatattcttttttgaagactttatgatctatttgccatgggtcccaccagccatgtaagaatccctatcttgtttagaagagctttgatacatgcaaaatattcaaaaacaatgtccgaacgtataattttcccccgtaatatagcaaagatcacgaaaaggcccgaaaaagtacatttaggtcaaaatttggagtagaaaaaaaacaatagaagaattccattttccttccttcattcatcagagagctctccttgggccttcccgaaaaggtatcacatgccaagttttgcctcacggtctaaaagttatagagtcatacatttttaacaaaacaaaatagagaaaaaccaaaaaaaagagggatgcaacacgaggactttatggaaggtccccatcctaatactaatctcgcccaagcacgcttaactacgaagttttatgggatctggtgcattagtgctggtatgatcgtatccgttactacatgcaatgcaatcgtatctattcttttttgaagactttatgattcatttgccgtgggtctcaccagctatgaaagaataccctatcttgtttagaagagatttgttacatgcaaaatattggaaaataatgtccgaacatataattttcgccccgtaatatagcaaagatcacgaagacgctcgaaaaagtacattaaggtcaaagtttggagtagaaaaaaacaccaatagaagaattccattttctatcctcattcatcggagagctctctttgggctttccgaaaaggtatcacatgccaagtttggcctcacaatcaaaaagttatagagtcctacatttttaacaaaaaaaaagagaaaaaccgaaaaaagagggatgcaacacgaggactttcctggaggtcgttcatcctagtacatgtctcgccaaagcacgcttaactgcggaattcttatgggatccagtgcattagtgctggtctgatcgcatccgttacgacatgcaacgcaatcgtatatattcttttttgaagactttatgatccatttggcgtgggtcccaccagctatgtaggaataccctatcttgtttataagagctttgatacatgcaaaatattcgaaaacaatgtccgaacatataatttttgtcccgtaatatagcaaagatcacgaaaaggccagaaaaaatacatttcggtcaaaatttggagtagaaaaaaagcccttcctcattcattggacagctctctttgggctttccgaaaaggtatcacatgccaagtttggcctcacggtctaaaccttatagactcatacatttttcacaaaaaaaagaagagaaaagccaaaaaaaaagagtgattaaacacgaggactttcctggaggtcacccatcctagtactactctcgcccaagcacgcttaactgcgaagttctgatgggatctggtgcattagtgctggtatgatcgcatctgttactacatgcaatgaaatcgtatctattcttttttgaagattttatgattcatttaccgtgggtcccacagctatgtaggaataccctatcttctttataagagctttgatacatgcaaaatattggaaaacaatgttcgaacatataagttttcccccgtaatatagcaaagatcacgaaaaggcccaaaaaagtacatttagttcaatatttagagtagaaaaaaaaacaatagagaaattccattttccttcctcagtcatcggagagctctctttgggctttccgaaaagttatcacatgccaagtttggcctcacggtctaaaagttatagagtcatacatttttaacaaaacaaaatagagaaaaacggaaaaaaaagagggatgcaacacgaggactttccgggaggtcacccatcctagtactactcttgcccaaacacgcttaactgcggagttctgatgggatgtggtgcattagtgctggtatgatcgcatctgttactacatgcaatgtaatcgtatctattcttttttaaagactttatgatccatttgccgtgggtcccaccagctatgtaggaataccctatcttctttataagagctttgatacatgcaaaatattggaaaacaatgtccgaacatataattttccccccgtaatatagcaaagatcacgaaaaggctcaaaaaagtacatttagttcaaaatttggagtagaaaaaaaaacaatagaaaatttcaaatttccttcctcattcatcggagagctctctttgggctttccgaaaaggtatcacatgctaagtttggcctcacggtctaaaagttatagagtcatacatttttaacaaaacaaaatagagaaaaacggaaaaagagggatgcaacacgtggactttccgggaggtcacccatcctagtactactctcgcacaaggacccttaactgcggagttcagatgggagccagtacattagtggtggtatgatcgca

SEQ ID NO: 42083 - DNA, 600 bp, Arabidopsis thaliana columbia
gaaaaagataactttgttacactaatttcttaacacttttcaaatcagtaagctctagaacacactatcaccccccattatctttatcgtagctcgcttcatataccaaaacaccattactaattaaacagtcacaaaatggatgtatgatgagtctttgcttctgttatatccatttgaagtgttaaactgtcaacttggtggattgtatgtttgttgttacattttaattagttttatattgccaataattagtctacatgattattgagatggagtccctaccccaaaagatttctcagtgactacatggtaatacctagaggtcgaaatctatctaccaatattttattacatacttaatctaataattgataaaggtgctcttttagtaacataaacatacaataatatgcatctgtcgtaatattccactcaaataggtgcctccctatcatatgaatgtagtagacgtgtataatggaaaatcgccttgcgatggttaacatttacgattatgaataattgacatgtaactattcaatataatactagtaatccatgtatactatatatgaagaagaatgaccaatattttaa

SEQ ID NO: 42084 - DNA, 313 bp, Arabidopsis thaliana columbia
acctatcagattcccgcttccgcttcttcgattctactatcttcagtcgattcaggattctaatcgcctcatcaatcgatttcacggtctcaacgcgatctttaactcctccgtcgtttaaattctccgtcagtaccttcttcaactcccgcctcagtgtgagagtatcggcgtttgtatccgtcgcgtgcgccgtcgaatccgccattttcagcccggagatttctcgataaacgtctagaaatcaaagcagagaacactagaagcttcgagaatcagcgaagccaagaaatgactgttatgtaaatcagtt

SEQ ID NO: 42085 - DNA, 551 bp, Arabidopsis thaliana columbia
cacaagtcatggatatacatcgattttactttgaatccttctaagttcatcatcactagtcttacgaataaacttctatacatcactagatatacatacgacatggatatatatatcaatattacgtatgcactcaaaacttctatatacccttaatacgtcacggcaatgtatgtaattctttcgaggtttgaaaaaaaaaaaaaaactttattttattctttctcacttcaaacgtttgatgaatcacgtcgttctttttatatatatataagaaaacgtcgatcttaagacttatgtacgaattatataacaaacttttgcaggatttactgagttaaagtagtttacactatatttacaaagattgttgtgacttctctgatatcaaattaaattaaagttataagtaactttttatgaaagagaataaaagcttacaacaagaaagtagctagcaaaactaattaaatttggctaataatagtttattattcatatcaatagttattttcaactcttctttaacttgtataactattgatatttat

SEQ ID NO: 42086 - DNA, 552 bp, Arabidopsis thaliana columbia
tgagggtctttatacagtacactctattttctttagtatttgatcatttaccaaagactgagtcttgtttgttaaaacgaccaaaacaaaatatatctatgatattgatggacaaataaataggagagttaacaaagaaagggtatgtagatttctaccaaaaaaaaaaaagggtatgtaggcccattatggcagaagcaaaaaccgaaaataagcctttcttaatcagcccatctcaaaatctctttacttctctctttcttgcacttgtgtgtataaggtctatgttttgttcaccgtaagagtgtggtaagaaatacatacaagttgtatgcaaaaaggttttagactcgtctgagcaagattttagtgggttcgaaattccattcctgaaatacgtagggtttcgagctttgcagcctgaattagtaaattgtggcgtcttaaattacatttttgttaaagctcttaaacacatgagtgacaggccaaggtagagagagtaattaaatgaacagagctggaaactaagtaagagcttgaacctttttt

SEQ ID NO: 42087 - DNA, 593 bp, Arabidopsis thaliana columbia
atccaatgtgacgaaaaaaaaagtaaccaatgttgaacatgcatcatctatcaaccttgccgaatgcactcaacaaaccaaaatattgatgattaagtgaatatattaaacctctccccaaaaaaaggtttttagttaaacttaaactgtttttaggtacattaatttttttattatataaaatgtagagtttggttgtatattaatataaaataacaaatcttgtttaagtgctcccgttctgcatgctaaaaaatatattgtttaaaaaaaaagatatatattgttcatcaaatattcaaatatatgtattatgtaaggtttcatgaaagtagaaacagacaaattctcttattttaaatgtttaattttattgactaagataatttaaatactgaatacgacattgtcgtttcaaaaggttaatcttatcatacaagaaatgaaaattgtgtttttggaacttattactttcctagagagaacatataaatcttcagacaaagtaatactagttcacttgtatgaacaaaatagtttaatcaagaaaaatatatcatgcgttgatgtgatgagatatatgtggctagaat

SEQ ID NO: 42088 - DNA, 452 bp, Arabidopsis thaliana columbia
gattaattagtgtatcatgaagtacagtgtttttgttgagatttacactgaatagtcattttcaaggtctctggaaaaagtagtgaaacaatttaacaaacttaatcttaattttaatgtttttattaattaatcttcattaatgtttttataaattgatattactattatttgatatcataatcattttaaaatgaattcatgattcatataatctggtcaaagatctgaagcttttcttttaacttattattgattacgagacgataatggagtccaggtaatgtcaatataatgatgataagaatattatcaaaataatgggcatgatgctactatagatcttgcaaacaccaataatgtctggaactctactcggattttgttttttccttagctttattaatttattattttattaccttttgcattttatggcagtatttggtggc

SEQ ID NO: 42089 - DNA, 544 bp, Arabidopsis thaliana columbia
tacaacatcaacctaggtattaaccagaaaccgagtctctaagatttcaagactatcaatcgcctaaagacaaatgttacacatcaacctatgaacccataagaaccataattaatggtgtttgaatacaagcagagaaaccaatgcattttcataagaaaagatcaagaagaacttgcgttccaatcacgtgaccatacaagctctattaccattagcattctaatgactaaactagattctcttacgcaaattccaagactccatgaacagggtaagcccaacaaagacatctattattaagtgacatcaattggtaaaaagatacattgctcctttagcttaacattattcaacctcatgaggtccaatttaatgatctaagctcatctcctcacagaaaaatgcaaacttttttcattacacaatcatgaaaattgaagaatctcagatcccaaacaggaaaaaaactgataaatcgagagagaagtaaaataccgcagatcttaacaggggcagcgagctcaagaagacaaggctgttg

SEQ ID NO: 42090 - DNA, 807 bp, Arabidopsis thaliana columbia
gcttacaggccttgtcccgcgtttgttgaggccggagtagataccgccgcatagggcagacatggacgaggttgcatttggtcgtggtgactctaaatcctccacttctgtagacaccagtgattcactactacggtatgttaatgcctagtattatttatatacacttacaatcaacaatgaaacaaattggaccgcaacaaaaaccgtcttttggcatgtacaagaatgtcaaaatgggtttgagaaccttgcagagtaatgatgatcatgttcttctctctttgtttgttttgcagccagacaaagccaacaagttctagcaaaagttcaaacaagtgatatatagcccagtttttcaagtccaagaagaactttttttggaaatgtgtaatgatgattgggcctaaacatattatcggcccatttataattttacggctcaatagttaagaaaccctaaagaaggttttatcactcgtaagaaaaaacaaaacaaaaaccctttggtttctctctgtcggcgagacatcatcaatggaggaagtagcgagagaagaagtagagatcgacaaggatctgcggaggaaaataaagaagacggtgaagaagatcttggaaagttcgaacttgtacaagataacagagattaaggcgcgagaagaagcttcacttaaattggatcttgatctgtctcaagatccttacaaggtaatcgtgaaagaagaagttgaaaatttcctcgaagaagcagtaaagttgatcggcaataaacttgcgatgcttcccgaagagaatagagtcgac

SEQ ID NO: 42091 - DNA, 977 bp, Arabidopsis thaliana columbia
ggcggtatctacctccggcctcaacaaacgcgggacaaggcctgtaagccttaattggccaccaaccgaaaccggggacagttgcaatgccaccttgaatccgtccgtcaccattacacccactctctttctcttctttcccacacgctctgcaaccactgtttcattcctcatgttatgatctattgactatagagagatggatccatcacaattcacaaatgacaatataaccaatcgctcaagccaacatgagaccacaaagaaatttatgaggttagttattgtagagaatcattttaagagattcactagtgtaacaaaattgaagattcatataacactaacaagttaacagcagaaaagagtctctatgatttcatcatttacgcaatccctaatctatcactaactctaaaatccttaatgtcaacgaaattggattagctgagaaaggtttaagcgatgcaatggaatcgatgaagagaagcaaaagggtacctgaaagtgaggtcgttgtcgtcgtcattatcagtttctacgacggaagacggcgaagaagaaagagagagtagtggatgaggatgatgctttgatgatttgttgagaaagaaactgcttgagcttgccatggccttgatttgtgactaccattgttgaagatgaaacatcgagtcagagatattgatgaaatggaattcgccatttttctttcctctgtgagctaagagaagagagtgtgagaagataatggccacaaattcagaaacgcaatacaagataataaagagtacattacaaatttttattttaaactattagaatttttttcttattggtaatcatatttaaatattatactctttttttgggtagaatgtttaatattatactattgttacagaaaaattatcatatgcgaaaaatacattttatagtaattaaataccataaatatttttcatatttttctcaca

SEQ ID NO: 42092 - DNA, 477 bp, Arabidopsis thaliana columbia
tgtagtagttcacagttgtattagatttcttacgataataaccgaatctatgtttctgaaagaacagaaatgaaaatgttttagtaatgatatagaataagaccattcacgatctcagttcaaacaatatatttgtatgaaacagtaaaacaagaaataaacaatttatatcaatgtaacaagattagatgtaggagctgatccaagaatattccaaagtttccaactacatgagtacagaagttaactgcaaatcaaagctttaagcttatttattcagtgtgtataagttgttagaacccaaatctcttaccttttttcacgatccatgttcaaggtttgttacttatagggttttatatctctgtctttggtaatgaggaagaagaagaagagatgtcattttaatttggttagctgactccagatcgtaaccccgggaagaaactccagctgtttcctgcaaccttctcgata

SEQ ID NO: 42093 - DNA, 453 bp, Arabidopsis thaliana columbia
caaagttcgatgaaaatctatcgggttcgcttaactctgaaagagttttacatctttttaacattcttctactattacatattatacgacatctctaaatcatatatagtacaatatcttaacattctcaactagaactgcatctgcaaaaaaattcacatttttacgtaatcaatacagactttatgtattgacaaaaacacatatcctaaaaaaaatcatatctttgaccccccaaaaaaaaaactaacatatcaacagaacctctaaaaacatttaatcggaatatttgtatttccctctatactcaaatggacatatgatcacacaatctaaacataaaccacctttggtatgtgtacaatctatctggagcatagagaatttgacccaaacgggtgagttctgattctctacgacgaagtcacccgcatgatgataaacccactcccg

SEQ ID NO: 42094 - DNA, 578 bp, Arabidopsis thaliana columbia
caatttgcaagatcacatgcttacgagacctcaaatatttggtggatatataagataatttcccacatgttttacgaaccatcccgtaatgagtatgaattatccggtctagcaatccattcgatagatttactagttgaaacttgaaagtagggttttgctcacttgtatcctttattcgtagtttaactataatgcacatatggaagaattgagccacaattctcaatgaatttagcgagggtgagaaatgtcaattcaatgtacattctatgtcaattcaatgaaaacaaatgaagaaaagagacatgaaatatgtttccaaattcttacttagaagaattagaatcaaataatacaatatctacatatgccatgagagacatatggaaaaccatgttttcggatgataaacttccaaattgatttgatatatactataaaccggcaaataaacaaattgaggttaaaatataacaaaccggtccggtctgatcgaacggctgatgtcataaaacgtggggaatatcgattacaatacaaagactcggttacggtcgtaaataagtggtgtgaga

SEQ ID NO: 42095 - DNA, 493 bp, Arabidopsis thaliana columbia
actccagatgcatgccaaaaagaattttcaaattccaagtatttctttttttttggcaccggtgtctcctcagatcataggttttgtgaggaactgaggatgaaagaaattcctctcacttgtaagagttgtcttaactctcatatgtccttatctttggctcattcttttggaagagtatgggtgttctatgttcactctattctatgtctatcttggttacctccttatgtttaaccagatattatattaaaaagattgctcgagtaaattaacgtgatagaaaagaaacgaattagttagttatatatagattacaaaattcacaacttctcagttattctaaaaaaaaaaaaaaaaagagataactaaatcaatgtcaattataattagaaaatcattagtagttgcattatgcatttaacacgcgcaaacgcaaataaattgtaaatacacacaaccactttgcgtatcagaagttgccaaagaaaga

SEQ ID NO: 42096 - DNA, 537 bp, Arabidopsis thaliana columbia
cactcatcttgtctgcgactagtcgacaaatgtggggagatgagttagcaaaaaaatatggtgtgaagtggctatgaggtggggactccatagttgtttgacgacgacgtttcgtgaccagccgatggaacattgttctttctcctgtttcttcttccgccattgtttttccctttcttgaactcttgctgatggtccacctgctgatccaccaacaccaattcatcattcatcaagaagagtattataaagtgactctgaaaaggaagagtttgaagtggtttcagttccttacccctaaagagaaggaatgagctctcgggtcatatccgaaaggatcattattcatccccatcgaacttgtcgcaaacgaagatgaccgctgagaatttgtatcgaatacaaaactacgagatgaagtgaaatttgaagtggagcaggacgatgatgatgggaatgctgcagcgtctccttgaaacatctcattaaacagatcttgtagttgttcaaaactgtcccttgtgttattacctgcaa

SEQ ID NO: 42097 - DNA, 619 bp, Arabidopsis thaliana columbia
  unsure (1)..(619): unsure at all n locations
ttgctagaagctgttcttggaaactccggcacaatcttcacaaaactcacctgcaatatttttgcaaaatccatttttaagcacacaaaaaatcttataataactttgaatttatagaaaaactcatcaaagatattgattaccttgaagagaggattaagatctttttgaatggttcttgaaaatttcatctttagctcttctccactctgttgcttgaacccttctttcaagactgcgaatatgaccagcaactctggaccaccgttaggtgtgttaaggtgactgcagctgtctcagagatgcactcatcagcttgatcacacacacgttcgatctcaatagaactcgtctgcgttataacagataaacaaaagatgaaaacttgagaaaagttccaactctaatcgaagttgggtatatagacatacaatgtatgtagtaccttaatgcctccaaggttcatggtatcatcagctctaccttgaacattgtaatatcctcaacagttcgcttcacaatgtcaccgtgtcttctaagtcgctgcagaacgcaacagaacagaggaatcgtttaactgacgtaagtttgcaattttgtntagatgtaaatatagaag

SEQ ID NO: 42098 - DNA, 510 bp, Arabidopsis thaliana columbia
gcttttcatcaacctacacagattagaaatttttgtttcacaagcctccaaggaaacgcatatggaaatgcaactcatctaagcttaaatatcctgatcaccttttcctcatcagctgctgcttctggaagatttgagcttgcagaatatccattacctaggtgattagcaaaaggagcatccaaaactggcgcttgattccttggctgattaggtggtataccactgccaggttgagggcctggtgcaggaactggtggtctcataccagtcgttggagtgattggccgcgcacccatccctggttgctgtacaaaaccttccaatacggaaatttgacttaaagtgaagtaccagggaaagggaaaagatcatcactaaaatgcatcaaatctgggcaataccttgaccagatccccatccagcatttgcatagccatgactgggtgcgcctgagatagatagcagtgtttcacaaacatgatgctgctaggaagtgcggtcgggaga

SEQ ID NO: 42099 - DNA, 498 bp, Arabidopsis thaliana columbia
actctagcctctgatgaagtcattgacctgttcagtggtgacattgaatcattgcttcagcgtatttcctctccttcctagattgaagatcagacagaaactgcaaaagagcttaccctcaaggccaagagattttccactgtttgtgtttactttgtcgccaaaatccctgattccattgccaagttgctcacttcgctctctgtttccgctctctatttcaggagacttgaatctcgagtttctagagaacatcgtcatagcattgcgcatattctcgacttttgagaagaataaaacactacttgttgaaaaccctcttgtgctccctgcgcttggaatgtctatgaaggggtggtcagttgtgacgagaagaaacactacattgactttagtgtcactcttagacattgattcttgtaggagctaaaattcgtaaacactacataccggtaattgacattgacactacaaacattaaggaacacacatgggagg

SEQ ID NO: 42100 - DNA, 451 bp, Arabidopsis thaliana columbia
ttggccttgagggcaagctcttttgcagcttctgtctgatcttcaaccgaggaaggagaggaaatacgctgaagcaatgattcaaggtcaccagtgaacaggtcaatgacttcatctgatgtttttggccgatcaaagttgtgaattagacaccattccttaataacctcgttgatcaaatggtttggtatcataaaacggtggtaaaggacttgtttggttctagggcatgtacgttcatgcttcagccactctaggatatagctcttttcaaaagtctgaacgaaaaacaaaagagtaaaatcagcatatataaaaaccagagaatctgtgtcttggatcctaactatctgtatttgcataacacataaatgaacacaccagaatcatatatatatatatatggatctttctttttctttgatactgaaactttaaatggaactttata

SEQ ID NO: 42101 - DNA, 565 bp, Arabidopsis thaliana columbia
cccaaatgaatttcaagaaagggaaagttcttgaaccaaaaccagaagattccactacaacatcgatcaaattcaagaagatagttgttcaagaaccaaaactcagaacaagtgatgtgaacaaaaagaagaagagcctgaaagataaaagagaaggtgttgggaagattaacggtgaaggtaaacgagagaaagttgttctgagacacagaaaagtggaagtgaagaagaaattgcagacacttttcaataatgtgattgaagagactgtgaataagcttgaagaagtgaggaaaagtaaagttaaagcattggttggtgcttttgaaactgttatctctcttcaagataacaacagaacatctcagaagaagaagattcagagcaaatccacatcttcacaagtcgttgaaggctgctaagtccttgagaaagagatcaaagttgtgaattggtttaaaggaaaaatggtttgtttttggttcatgaatctttataatgtaaaattttcaaagaaatcatattttctttctacgatgctgagtttatgagaggcttgaagatg

SEQ ID NO: 42102 - DNA, 514 bp, Arabidopsis thaliana columbia
agcacaaactcacacaagcttttcaagtattcaaataggaaaaaaccacctaccaaacactttactttgttctctaactacttatatacctactaacgcagttgatacgtaattttatcttacatttcaacctttttcattaactcataatggattattgtccactcaaactacactgacaagagaattatttaagtgaaactgtgaattggtcctcctacggtacttttatttagtcaatggtaacttacgcgttaagtttcaaatttcatataagacttttcagaacgaaattatgcctatgatatattgcgaaatttcttgaaatattttattgatatgtgattctattaaaataaatagcttaaataagaattgtatctttgaaagatacaattgctatcaaatgatctagtataaattaatcattggtaccgcgtaaacatcttgataaaattgcatcaattagtttttcgaataaaacacttgtttttaaaaatttatgtgtaatata

SEQ ID NO: 42103 - DNA, 572 bp, Arabidopsis thaliana columbia
aggattttgcccaataattttaatttctattattaatcatcaatttttgcaaacataaacggttacaaatttaatgtgttccataaattatacgggcactacaaaacgctgcgtgtaaggaggatcaaaacgttacgtgttaggaggatcaaaacgctgcgtttgaaggtatccttttcctttccacttcatattaaagcacagactaatctccgcataaaacattaatttctcatccaacaagtactaatctccctctaacatatcataacatctgattacataagaaggccaacataaataataaagttcataactagtcgaattacttttttgctcaaatggtttgaacctttcagtcttgttaataaatccgatgtaattgtgacattgtagacagccaaaaaaaaaaacatcacaatcacaaatcaagaggcctaactaaaagattaggaacttttaaggtggtttaaaacaatctaaatgttcactacgctaaaatttagaacaaaggaacaaagctgaacaaagcttcagctatggagtagagaaaaggagagattaagattaag

SEQ ID NO: 42104 - DNA, 511 bp, Arabidopsis thaliana columbia
gttttttcagatatggtaatatgggtggaaacatgactttgaaacgtttatatagaatcctttccaacattttaatctaatcagaaaaaggcaaaatatctaattggtgagaatccacagcaaaatgagaaacctacaaggtttagtcacagacagctaaaaaccaaaccaaattaaagaaaaaagcgccaaagtttacgaaggaaacttaaagcccattgacttcaatatctcaacacagctctgacttttatcaaccttgtccttgtcttccttaaccttgtcaccggagtttcgaagcagagcttcaatgatttctttaaaaggtataatctcttctttctctttctctttcttcttctttcttccatcttctttccatttcgcacgacccattcgtacgacggctccatccacgtgcggaacactctcctcgctgctgcttcaccggcgactgttgatgtggaactaatttcttgtccgaaaccctagtttcaatctcttttggtgg

SEQ ID NO: 42105 - DNA, 448 bp, Arabidopsis thaliana columbia
ggttttgtttgatttatagtactgtttaacatcagaaaagacaaatgagtttaaaaaaataataccaaaaaaagaatttactagatacaattttaaagtggaaatatttttaataacttggatcctcgtctaatttattcataacatttatgtgatatattatatatataggaaatgatttattagatagttgactaaaactatatattagatgctattatttgcataattcatatagttatttattatgaaaaaagagaagaataatcagttatgtaaaagtagaattttttttttttttttaaatgttatcggaaaaactgtatacagtaataaaaaagagaaaaaaaaaaaaaaccatatctttgtcgatggattaaaaacaacattttcattacgcagggtttcttcgccctcagattcttcttcaccttgaaagaccattaac

SEQ ID NO: 42106 - DNA, 608 bp, Arabidopsis thaliana columbia
  unsure (1)..(608): unsure at all n locations
nnnnnnnnnnnnnnnnnnnnnnctaaaggtgtgggccgctcagacttgcatggcggcctaaccgggtaatttcatgggccatggctggttaccctgcagcatgaaccttggaaggaactgggccgcgttctagaaaggaaatagtggttgacactgacatcttggttgagctcatgattgcgcggttcgattctgaagtgcctttattatactaattatagctgatctgatataccagagtagacaaaaggattggtttattggcatgttatttgttaaaaatacctcggtcatgatatcatgttttgcgtcagaaaccaggatgaagaacctgctggtggaaccggcggcgctggttgacagcggtctgaaggtgtctgaaggttggacagagttggacagagcgtcaattagaccgtttcaggtgttctgtttgatgcgccgtcgcctagatactgggaatctgtacgcgaaggtcatggcggtcaacagtgagtacagtgccggagtccgcgacacgcctccggatcatgtgctggttccggaagatccgaccatacggtttagggctatgatatgcgttgtctagacgataatattggatgaga

SEQ ID NO: 42107 - DNA, 527 bp, Arabidopsis thaliana columbia
gagaaaggcatactatactgtagaatctaacggaaatcaggtaccaagtatcaccacaggtccgtagacttcagaaaaaagagcaatatcaaatttaggccttaccataataaggtcttgaacagtctcaaatgcaccatccccaacaagatccagcagatccccagctatctgcagaacaaatatttaaaatctcatctactttcacttgcaaatatgatgctctaggaacaggtatagtaggttcgaaaataacatacctcctcaccgggtttatccgaatccagaaatctgcatatagccatagccaattcttcacgggaaagttgtgaattggtttctctaaccatccgaccacatgcatctcttagccaacttaaattgaattttcctgcactgagattatttttcgtgtcgctaacaccactccatccttcagaaaacgatgtatgagcatcattgctttctacatccacaaacccagtttcgtcaagagatgcttcaccaaaaaacgagctggtagattg

SEQ ID NO: 42108 - DNA, 526 bp, Arabidopsis thaliana columbia
  unsure (1)..(526): unsure at all n locations
nnnnnnnnnnnnnnnnnnnnnnctaaaggcagatgctcaaaggtctccccgttcgggaccaggtgcgagtttcgccatttccttcacgaaaaatacggcagactggacgttgttgccggctcggcacatggcgagcagagagttgaacatcggcagagtcgggttccgaccgcagagggcgtagattcccttgtagatgttgactccgtcgtcaacaacgaacggatcccgggccgcggccttctcgcacagttcgattactaaggcggcatattcgagctggataacttttcccgatgccttcaacgccttgatcgtgttccagatatctcgcgggtggatgttattctcgcgacaatggactcggatcgacttgaaacacctcattcgcgcaccgcgggcagtccccgtacatatttctaacgcggaatacagatcgccggccgcaaggtgtcccctgaccaagctcaagaaatctttatatccaagttccagctcattgtgttcgagcatattgactacagcg

SEQ ID NO: 42109 - DNA, 521 bp, Arabidopsis thaliana columbia
agatataatagttcggcagctagagctggtggagagttaccaactcgcagttgagaacctcggcactcaccttaatccgcgccttcagattcttcctcgccgatcaaccaagaagacgttgacatcttcatccccccaaaaatcagcagatggtagcatggggactacgggtactcgtcttcctttccttaaggattgacatgtctgacttcagcatatggactacagtacatactacataagttggggacactcttgaacattgtacattttactgtaagtcttggtaaataaactgtttatatcgttgatcatttctcatttgcaatttatgtgttaccaatgcaatgctctttcttatttacccgagggggtaactctgtaacattgagggtgagagtgtgcaatctgtagatatttccttacctcttaataaatagaaatttctcaaatattccacgtacacgcttgaaaatgtaattgaaatgatcgattcttatacacatacaaactctgtacaa

SEQ ID NO: 42110 - DNA, 426 bp, Arabidopsis thaliana columbia
  unsure (1)..(426): unsure at all n locations
tgctcgttcaacagctcnnnnnnnnnnnnnnnnnnnnnnnnnnnnnnnnnnnnnnnnnnnnnnnnnnnnnnnnnnnnnnnnncagattcggagcagcttattcatcgccataccatgctcactgactgggccaagttactcgtaatcgcgctgtgctcactcgccaggtaaaatgtgggaacactgccagtgtatcgagattcaatcgactgcgtctcgacacgaacctcctcagtgtgttctcctgcattcactctagtcttcgctaaaccttgaataaagacatgttcttgaacatgggttactccggtttaaagtagtagtatctttgattcgctttaaaccgggtttaagctcaatcttatcttagaacaactccaactgcttgacgatttgactgagagataacagagtcatggaagagac

SEQ ID NO: 42111 - DNA, 600 bp, Arabidopsis thaliana columbia
  unsure (1)..(600): unsure at all n locations
nnnnnnnnnnnnnnnnnnnnnnctaaagacggtcgcaccaccagccggtcgtccgcataccttgtcgcccttgcggctttgtaccgtgactacattgaggggggcaatcgggtccaagctcctgcgtcccatgcggccatgcagcggatcgccaaatgtcatcgccagctgagactctatctgcggtcagctgatgcgtccgccgacatcgcgctgatttgcagcatcctcttctatgcgttcgagacgctgcttggggactgtagtaccgcgacgcagcatttggataacgggctgcggttgctcaagcggtgccagatgcaggcgctggctcatagtggccgtgacgagctcctcgctcacctcgtacccatattctcccggctcgacataaacgccagcacgttcgacaatgagcgcaggcctattcttaccctcgtctgcctcgcggagagattaggccccatgcacgtagttccatcctcgctggcgagcctcgacgaagccgaaaacgtcgcgaccaaactagagaattggctcatgcattacctcatcgcccacgtcgcgtacaaacataaacgagtagacgagttcccagat

SEQ ID NO: 42112 - DNA, 571 bp, Arabidopsis thaliana columbia
cttcatgacacgaaaataaaacaaaataagtaatgatgtgcccttggtccatgtaatattatgattatgacaaaatcatagagaaagtttttttaatagcggtaaattacgataatcgtaataatgtatacttaggttttgaataatgactcaaccgcacattaccgtgcgttttaagtagtaacaacttttttttaatatatatatatatatattttttttattactatttaaaccacaccagattttatctgcagttgaaccgtacattttcatcgaagccttaaaacatattagctcacgttattgggagatgtagctatcgatatggattaatggcttaggaagtaagagtttgattaattttgaaccaagtataagaaaaaaaagagaccgtacggataaatgtcgaagaatataaggacaagagttggacgttagctagtaggaagtgggcctcacttaccgctcgcaccgttagtcccgcaaacggcgccgttctctcgtttcgagccatcatcccacttgtttgttgtttcatgtgacttcttcgtctcgaggcaaacttgac

SEQ ID NO: 42113 - DNA, 507 bp, Arabidopsis thaliana columbia
cgtccacaaaatatcgataaatgaagatcacactcttatttcaaacctcagtttaaagtcaggcaagaaagttttccgaatcgaagacaaacacccatcagctgcaataagtaagtctccttcaatttcaacagtttcttgagtttccacaactaaagtcttaacctttacattagattcatcttgtgacattgtgaaagacagaaacttatgtccccaaagaaacatggtctgaggcaatgcgttatacagaagagattgaatatctgaccaataagctgctcggaaatcaaaatcctcatctcttgttaaaatccttgtcactttcttctcactatcagttgtctgattctacaacaaacccgcaacacacaaaaaaagttaaaaagtttaggtagagctggaaaaactaaacgccgattgtttcaattgccgaactatactcagtggtcttattacctgatcaatcgagagaggcaaggtgatttcatctaagagctgtggagt

SEQ ID NO: 42114 - DNA, 504 bp, Arabidopsis thaliana columbia
ccaaacctaaagaagaaacatagataaaggttacattagaaggggggcactatagtggcactagttcactaggtcattcctttcacccaagttcgaaacctcaccttttaagcggttacatattcatctctcaagtgggcctcgagattaaaattaaaaaggttacgttgatattgatgggtttagacattaatagtaggtattaattcgataagttatgaaaagacagtaaaactggttaagtagccgacttaatttggccttttgtatctccacttggttggttggttggttggttggtcagcaaaacacctaagtgagagctctctagaatattcttaagtgataagaattgaagaaggcggcattacttacttactagagagaaatgagagcaagtcttcttagccgacgttcacaaacacgtgtaccaagtcaaaccaaatgtgcccaaaccaaacttagagacgttcacgttttcatctctagtccacacaacattat

SEQ ID NO: 42115 - DNA, 549 bp, Arabidopsis thaliana columbia
cggttatactttaaataaatataaatttcactaaagaaagcaaatggacggatttgagaaattaaaaaaataggtgatcgtcacctttcagtgatcaaactttcggtgcatatgtttgttcttgagtgattttctttatcaccttttatatttccattaatattttaatttaccaaaagctttgcggtgatgtgatcaaacacaaaaatcacaagacttatgccgagtatcttattcaagataacaccaaacctatttgagcatatattatacgcaagaataatatttctaagaatttattcatcaatttataccttttaaaaatattgttttgggtttaaaatataaaagaaaagaaaaagctgattgcgacgcaactttaatcaaaaccaaacagaaagaaaaagaagcataaacagagaaagtaaggtgaagaaaaagcatagcagaagctaggaaattcattccttctatccccttctaatgattctcatcattgttcccaaaaaaagtcttcaaatttcactttgtttttattcattcataatg

SEQ ID NO: 42116 - DNA, 523 bp, Arabidopsis thaliana columbia
atttgatgcatgacttttgcaaggtaacaaatactcttgtgtacatatggttaatgcaggaattggagtaattagcataacgtcttaactatctacttacgtgtttagcttgttggtgacaaaatgccgaagctgctggattttggtaatgacctgtgatcacttagtaagctagcatcgaagtgtatgccttttgttgtgatataactcatggttgcttcttttgctctagttcccaactctcctttacttgtgctgaaaattacagattgaattggaaaccattactaataagatgcaagagttattcgacatcgaggaagaggtgaatgatgagttcctagcttcagaaaatgatggtgctaattttgtgggctaccgaaacgtaagccacatgaataaagagttaagaaaaggtctttgtagcatcttctaatccgatcttcatgtttttaggtggtgcatgattttctttgtacgattgacggcgacaagcagttgctaaatatcttatacgcagaag

SEQ ID NO: 42117 - DNA, 570 bp, Arabidopsis thaliana columbia
tctcacttcaactaatcgaattatcaacctattgatcacattagaactcagattgcaaagtccagaaaccgatcaaacattagggacactaaagaacggtaagctctcagctttaagttgaataagcaatgagcagacccaattacaaggattctagctaacttaaatcaaacccagtactgatcagctacaaaacaatagctaaatagcttaaagcaataaactttagaagtaaaacagatcaaattagtgaaatggaacaaacctgatactcccactcagcagcaatggccttagcaagtgccaaagaacgaagcttgagaggtcttttcgaaggggttttaagggttctataatcaagcatcacagtccatccatttccatcatcagcttctctagtcgtcactttcttgtaaacctcttccctacgatcgaaccagtcatgaaagacgtcggcatcgtcactgaatccgattcgtttttccggcgagagttcggagctttcactaagatgggtttctcattttcgttctcgaatgtgaacgacgacgaagattctgatggctgagt

SEQ ID NO: 42118 - DNA, 594 bp, Arabidopsis thaliana columbia
aatttggtggcatataggttacgtataataaatatattttatctaattcttggtggaaatcgaactataaaatatcattcatgggctccatagtagttataattatttgaaaaattcagattaaacacacacatacgttacaaactaacataataattgaacagacttggtcaattagtggatactgtgcatgaacacagacaatactttgagacgtcgtcaaagaatcaaaattggagacgtcaacgagtaaagatttgacttgttattcctcttcgtcatttttaaaatgacaagttgtaaataaaaagcaggaatcatggggtcctcactttccgaacattcctctgtctcatgtcttttctttttctgttattggtatttatcgtaataataataataatttgaaaatctttcagaaaaaataagaacaacaacccgtctctctgtcaattgttgttgagtgtgttaataaattccacgtgttgtttctcttttattagctcggcgacgaatgattacatacgcacggttagagatttggcatgtgagatcattgatctgacgatcgagaatttatggggacagaagtct

SEQ ID NO: 42119 - DNA, 535 bp, Arabidopsis thaliana columbia
  unsure (1)..(535): unsure at all n locations
nnnnnnnnnnnnnnnnnnnnnnctaaagtaaggcggaaagatcctcgagtcatcggtggagtccctgagaatctggatggagatgaatgaccgcgagtcgaggtatgcgcggcacggccacttgggtctctttatgacgttcgcgacgaggacactcggagttgatccgttgataaagatagaggggtttgtgttcgtgaggagaaaaaggagattcgggagtatttaaattaggagcacggcctttactgctcggttcgtgctcagttcactcaattgcatccatctgatcatatacaactccgcaaacacaatggccaccaacgggtcctcatcgtcagaagcgacgcccgtcgtcagcacgcttcccggtcctgaccataactggcaggttacgcttgctggaaaggtcattgccagtgcgtcccaaaaccgtcccattccaatagggcagtgctaagaagcgtatagtcaccggtgcaaaccaaggcattgggctcgggatcgcagaagtcattctggccaactctgcagc

SEQ ID NO: 42120 - DNA, 429 bp, Arabidopsis thaliana columbia
atattgcaggtaggttgaatcgtcccgatcgcgcctccgctagatagaagtttgttctccagccgaccttcggccagaatcacgacagcgtcgtattccaaatcgttcaaatagcctaccactttctcaattcgtactgggcttgatttattctgtccgtcactgactcgcatcactcgatgacagattccagtgctgaagctttgctgtgcgctattcaatgtggctgatcttgattattgacccaacgcgaagtcgggaatctggttgtgctgttctgcgagttccccacttatcgacctcgcttatgatcgcttcggtgtgaaccacgaggcttgctatggcggctcgccgtcgatcgctcagatagtaccatgacgccgagactctgggaatacagtagacatatacccagatgggaatggtagg

SEQ ID NO: 42121 - DNA, 153 bp, Arabidopsis thaliana columbia
ccgtctatgcagattctaaaccaaccgaaccgaaagaatcggaaccgaaattagtaccagagagtccaaaaacataggttaagctaacaattaattaaataacaatttagaatatacagattacgattacgccgcatgacacatgtgaagcgg

SEQ ID NO: 42122 - DNA, 622 bp, Arabidopsis thaliana columbia
ctttttaaaataaatatattaagacctcgcggtatgcatggttctttttttcgtttttttttctactaaaattattgacgtactgtatagtatttaacgcatggcaacaaactaatactatcctgaaaaatctttagatgtgaatcacatcatgtgatccgtatatcctggaattttttgaatatagggatattgatctactctgtttacaaaaaaacacaaaaaaaaaacacaaaagatttctgaggaaagaaactctatttaatatcacagtgagaaaataaaagtaataaaaatttattacataatattatgtatatatgtaacctacggatggaagcggacatctagcttttctaaaatttgtatttgtgaattgttttgtttttgaaaaatacatgttctaaatcattatagatactcgaattattttgaataaaatcaaagcggataatttgtttctaccgatggcatggttcgtagtcaatcaagccatggatcatagttatagtagaagcttaatgtgctcattccaaaaatgtcaaagtgattttttaaccaaaaccagtcaaacgtattggcatctttgcaagaagtgtatttcttctatgtacattggtgt

SEQ ID NO: 42123 - DNA, 598 bp, Arabidopsis thaliana columbia
  unsure (1)..(598): unsure at all n locations
aacggccggccgccagtgtgctctaaaggtatcaatgaatagtactgttcagaattatagtttactagaatatatatgttccggcatagtggatgatttgaagtcgcaaagagcagaagtgattcccgatatatatgcctcctgcactgccgactagagatcaggcacgtctgtccattttctgttgtgattaccaccatgatttactcgcaccttttagggctcaaggtgtacaatgctctttataggctgcaacggtatatccaatcgatctatatgcccctccactgccgaatcaaagtggtatgctcgagacattgttgccgatcttcgccttcaaacaatcaaacttgatcttgagagctttaagccgctgaatatctatgctttccatgcttttcttctcttcagcagatggctcttctaggctccacgcaatagagatatggaagcactcggtgtaatcgcccgttgatgtaggcttgctgactcgaatacttggttgggttccagatttcgagttaaataaaggtgcgtatagtggcggttgattantaagaccaagcgagcggttagagatatgcaaaaggcggttcag

SEQ ID NO: 42124 - DNA, 591 bp, Arabidopsis thaliana columbia
tacatttgaaaaatgcgtgactaaacgagatgaaagtgattttttcttatgtcctactaatcatgattatataatttgttaatgtattatttaaaatactaaatcaattagattttctataaccaagaaaaaagaattaggtcaatggaatctgcccaacctaatcacggacgatgttttggttaaacatatcgttaagatttggatgaatcttttatgtcatgtatggccggttccaagtgtgactacaggatttgggcaaattaacaaacacatttataaaacatttataacataatttagattaaacacacaatttaaaaatcaagtcttagttttattgtttggttttgaatctatatatcttaaggtcgattaatggtttcgtagtgcttcaatatgttatatatggtggtgccctcttttgtaagttatgatcatcagatttggtttagtagacatttcggttaacttaatattaaggtcacaacaaacaaacaacccccctaaaaactagcatcatcacatactgttttatgagcatcatcatctcagacgctaaagtagtgggacaaatcgattcaaatttgc

SEQ ID NO: 42125 - DNA, 563 bp, Arabidopsis thaliana columbia
tgagaatttttaaaggttagggcaagcacttcggaaagctcaaccattttagttagctggtggaatatctttcttataaaaagcaaatgagttatctaaaactatatgacaattattttagttgcgtgtgtaatgtatataaaataacaacatgaaataacattttgtcttttatttttgtcattcttattatttaattttggacccgacaatttcaaataatcttctccaagttgtaactaatccgttacatgcgcgtgaggagaaccgtccaatccacttagactaacgtgccctttatttcttccttttaattctatgttaaaaaaacaatttaactaaaagatgcgcacgtgtcttgacggtggaaaaaaattgtaggcgccgtcgttgatcatgctcagtcgataccaccggtggtcgcaggtagctcgaggacggtgaggctttttggcgtgaacctcgaatgtcgatggtgatgccgtcgagccaccaccgcgtcctgatgtctataatgaccacacatttactattactcactcctcatcccatggtaaatattt

SEQ ID NO: 42126 - DNA, 582 bp, Arabidopsis thaliana columbia
gagaccgtccttttccactgtgaacgaagataaatttcgctattcctctctctctctctctctctctctctctctctctctctcttcttcttcttctccgttcgtgctctggactcgctcgaaatcgatccgatgataatttatgcagctcgaaacttaatttagaatcatacctttttctggatttggctgacgaatccgttttcaattgcacgagttgcttcgccaggtgaatctatcgatcctaggttttctccgcctctgattttttcttgttcctgagtttttggaatcgaattttacgattggtagggtttgtgttcttgaggaggcttgtgaagtatttattatttggtttcgtttctcccatcttcgattatgtcggtagttttggtttctggaaatggactttgatatttgtgtacatagattgcaggtttgatccttgtttctgagcgatttgcttgttggagattgttataatctcatggagtcgtaatctattaggtgtttcatgcttgattgtcactaaacacatttttatgtgtaagtatgttggtgttattggagctactatattgt

SEQ ID NO: 42127 - DNA, 526 bp, Arabidopsis thaliana columbia
ctctagatccccacctttcctttatagtgtttaatcgattcatacaccaacattctctttctttttccaacagcctcgcatgttcccacaactatgcttttgttccaatgcatcatcccaattttttcatcagaattaaaataagaccaagtcatagaacaatccatatatgatatatcgatataatgagaagcggtttcaccaattttttgttccaatgagttgaatcctcctcaacacaacattctacgtacatattatttcattgaaagaaaaatattgaaaaaataaactaaggtacaaaaagaatatataagaaatgtagattgtgcgtccaactacaaaaatacaacacttttcctacggaataattgttgtatcaccaatggacccaaaagcaagagcaacaacaactactaataataatactctttttctcattttatcaaatcattttcacatacgcgtatttattaatttttattttggcacacgcgtatttatatatttatgattctttcttttt

SEQ ID NO: 42128 - DNA, 530 bp, Arabidopsis thaliana columbia
ctcctaaccttactggtccttgacacgattccattttacgaaattaaccctgggaagccaaatcctcgcatacgtggcatattttgattagtcaatgtttctggatgtgcacgcagacgtctttgtctgaaatttaatttgtgcaaacgcgtcgccgtgatcaatttcggtttgcaatttgtctggcggccaaggaaggaatcttgcttcgtcacataaacatacccacgcgctctaaattgagcgtgctattcaagcgcatacaaagattcacgtttcgaatcataccagcccattactacaaagatgaggcccagtttgagcgtaataagttaaccgtatgggtttatgatgtactaatttgtcaattatatagcctaaataagcccatcttgcagcataatctacgtagaccatttttaaaaaaaaatgtgagcaaaattttaacctttggtttatatactttttacttgtaaaacaaaatttccattacgtgactgacataaataatcttttttcacatcacatat

SEQ ID NO: 42129 - DNA, 606 bp, Arabidopsis thaliana columbia
cgtttatccttctctattcttattctactatatagtgtgtctgaattgtaacaagcaagtgtaagtaatgacttaagtagttctgttgcacggcacaacataatgactcttataccaaatcattgtcttaatctttcttttgttccgttcatctctttctccattttgttgcagtctttttccagccttttcttattcttattaagcgtataaatcctccacatcctagcagttagttcacaaataatatgttgatttagaacttataatttatttcaggcgaacggggaaaagtttaaagccttaatcgaacctcctctaagcagctgccaaggtaagtacgtcccagtatttaatcacatgctctaataatgtagaaaacgtttgtcttatataagattgtcgattaaacaacataagagacaaacgtgtggtggaatggagtaaaagataatcagatgtgaatggcatgtttctggcttttccatggaaaccaactatccttgtggagtaggaaatttgaacttaaatatgaaatctttaacgttgatttaatgcagaaactaacccacgatgagtactttattagatagttgatttgtgaat

SEQ ID NO: 42130 - DNA, 100 bp, Arabidopsis thaliana columbia
ggtgtagtgggcgtgggcattaccctccagattttcgccctgggccccccgacgttggcctcacccaactcctggtggaaatcatcagcaccgtcatgta

SEQ ID NO: 42131 - DNA, 637 bp, Arabidopsis thaliana
tatgataccttccctagcttatctttttattcaatcagtttgtaggttttagacgatgttattggtttggttggtagttggttcagaccgttggatgttgagtgtgtcgaaaacttcagatgtagatgtgattttgttatcttatttctcagtaatactagtgccgcactcaaaccctaaactctatatccatccattgcgacaaatcccaagggatgtgagcattgtcaacaatccatcgattaaatacatccttacagtccatgtttctcttgcagtgatactttatcgattaaatactacaacttacgctccatgttcgaattgtttttcagtggcagcttctgattcttggtgattatccagattttcttttcgctcttcttggatttcagcttttgctgcatcaactgcgccttctgtcgttgcttctggaatcctcagttctgaaatcacaagttagacagtttaaaacttatcctgttttgcgcaagaatctatagcacatgagttcaatatcaaacggctttaaagatggttgaagatatcaatggctaaatcgcagtcacctacctggtttcttcttcttcctcgaagatctacttggtttacatcggatggtgtccaagtaaaagat

SEQ ID NO: 42132 - DNA, 456 bp, Arabidopsis thaliana columbia
cgcagaaactggtaaagggcaggtaaataaacattaaattcaaacaagagtaggtttcaaatggaaaatcaagttggggttttaggttctgttaagtagttcacctaaagatagttaactaggtaaaaggtccatgcattaggtacataaattttactgcttttggtcgatcatagggcacacattaagagattagcatctcaaactctaacctaatcttgtaggagcaagaaaaagagagtaacattttttactaacagtttagttcataggtagataggcagagaaagagtctctctaagcctgttaatgttttcaagagtacattttcaatgttcaaacaaatgaaaaagctaagttattgtttgccttctgtaaaaacatattgtggcatatgataaatgatcgcgaagatacattgttgagacagagacaagatatgtggtgaccgagggg

SEQ ID NO: 42133 - DNA, 784 bp, Arabidopsis thaliana columbia
cccaagaagataaaaaaacatgagtggatagttttagttttattcacttacagagatatttaaatttccatcttttctggttggtgaaaatgaagtttcctcctccgttgattccaagctgtttcttggtgcatctacgcctgaatttgatttataacagagaatcaaataatgtaatgtaaaagagtgaagaagtggggaagaagatgatacctttgggaagatgaagatggtggtggttaataggaaactgtaaatgttgaaaatcaaaaatgttgaagacagcactcatgcatcccgccgccgttgcagtatttccggcgagtgacggcggtggcggctgcgtgggtttgatgtcttcttcctttgacttgcttgaggatttcttcttccctccgccgagccaggaccagtctcttcccattttttgttttgtcaagttttaaggatgagagctctgttgttgtctgagttgttgaattggttttgtgacttgaggaggaagaagaagaaatatgaagagaggaaatggtttttataagattaacaaatatatagctgagagaaagtggatccatgagaccgtatgaataaataaatacgtatactatacacataggctttctttttcgtcaactattttaccgtagggttttaattaggagaagtttgtcaaatctaaaatcaactaatattttgaatacaaatgaaaaatggttatttgtaatgaacataagaattacatttttggttagaaaaaggtaagtaggggcctgcttgtctt

SEQ ID NO: 42134 - DNA, 304 bp, Arabidopsis thaliana columbia
cctacaaaataaacgatagacactacaccatataagatgtaattaataaatttaaataaggaatatacatttgttaaatatttgtaaacacttaatgcctacgtatatactacatagaaatggttggattcaggagaaaagccttaacatattccacgtgatttgctcgtgcctctcaatagtccacgtccaccaaacccgtgtatcctcgtgtacttcttctcagtgtctgtctcttttcttccagctgcgtcataattcatatttttggtcttagtttacttaacgtattggtggtagaaaa

SEQ ID NO: 42135 - DNA, 484 bp, Arabidopsis thaliana columbia
tattcgcatatatgtaaaatggtagtgaaattagtgtaaaaggacagtgattttactgtggttcatgttcttcaggtcgttaatgaagctgaagctttggcttactctaacgaagaagattcaagaaaagatggtgacaagatttttcacagagaccaaactcgagtttcacttacttgccgtctagttcccgaagtccgtaaaaatctcttcagattctagcttgcttccctaataacactggttttatcttgtcgtttatgactgtaaaaaacgttacgatttgtgacgtgtggaatataaaacgccacgatttgtagttgccgaaacatgaggacaaaaaacttgcaacggataggattaaatatgagcccttcattttattttattttttcttatttttcttctaaagagataacatcactatacaatctcactctatccccaaatcttctccttctccaaaaaaatttcaaaccctagc

SEQ ID NO: 42136 - DNA, 516 bp, Arabidopsis thaliana columbia
gagagtaatctcagatacttatgttttaaaaagaattttctttttgattttcttttatccgtaaaagaagtaaatgacccagaaaaccttaaacatatcgactatttacgacccaaccaacctaaatggatcataaaattacccaagcccattttattcggtcatatacaataaaaccgaacaaaaccctagtaaaacactaagtttatttgtctctgcggtaaaatcgatccacgactctgtctttctgtttcttccttctttctttattgaaaatctaaatccagtaaaatatatcgtcaattctcgtcaacgccatttgacaacgacaaatctgtattcgtcgatcttggtatatctgtagaaaactaagaaattggttacattaaaataggattctagttattttattttgggctatgtgattgaaattgattaaagagtaacacgaagtcgtaatccacataattttgtttgtaggtttgggagaatggctcgaacaaagaccacatgtgt

SEQ ID NO: 42137 - DNA, 528 bp, Arabidopsis thaliana columbia
ccatattcggttaaaatataaacattcatatgcatcactatcttgtgttcaatttttatgtggcaccgccaatcatcataaggctctaattcgggcagatgtatctgatttcttatgtcttaaccatctaattacaaggtacaattgaattagaatttaggtaaatacatttgcgtgtatatgcagtaaaaacatattccaatattgtactttggatggaggcatcagttttaaagagtacacagagatatctctgcagggctttgatgtgagaacagtgactcctttttcttttctcttttacaactgcaatacatgaatttgttaaaatttaatacaaaataatacattaagtcacatatatcatcataattcatagaataacaaaattgtatataaactgattgaaggttcgcagaatagcgtggcgcaaagtgttgaagtgtttggtctgttcccaaacgttctttgttttgtcttttttttgtcatagaaatgttattagaacttgagatggaaccttacaag

SEQ ID NO: 42138 - DNA, 264 bp, Arabidopsis thaliana columbia
ttatgagagagcacagatttggcagagcagtcagcatttgccgacaggaaatcctgtcttaccaccataataccaaatcactaattccaactacttattagaggtcacatctagattaggcgtccacgcacatactaaaaattgatcagatccgtcaaataccggtttacgtcataaatgtattaatagaatctagagtgacaatgtttgcgacaacaaacttgtagacgaagtcaaaaagcattaacgtaaataacgtaaaga

SEQ ID NO: 42139 - DNA, 2264 bp, Arabidopsis thaliana
cgacgatcttggacataggcgctcgtgggagagctagaagatctttggagataggtgctcgagggagagcttgacgatcttggagataggcgctcgtgtgagagcttgacaatttcggagataggcactcgtgtgagagcttgaaaattttagagataggcgcttgtgtgagagcttgaggatctcagagataggcgctcgtgggcgagctagaagatctctgagatatgcgctcgttggagaggttgatgatctttggagatagacgctcgtgtgcgagcttgacgatcttaggagacatgcgctcgtgggagagcttgattatcttggagatatgcgctcgttggagaggtagaagatctttcgagatgtgcgctcgtgggggagctaaaagatcttttgagataggagctcgcgggagagcttgatgatttttggagataagcgcttttgaagagttaggtgtttgtgcaagagcaaagttgtttgaacgaggaacgtctcggtgaagatactaaaatcgatgcaaggcgtgctggtcttgtataaaagagttcaatgaggtcaattttgaaggtgtacttggtgagattagtgtgaggagcatgaaagataaaagaggtcggccgtagagatgtttaggcgagatcgatgtgaaatgcgtaaatgtgagcacgaggtatttgagcttggctacaattttccgttgaggccggcacgaattgcgtcaaggtcgcatgatatgcgtcgaggtcggtgcatgttggatcgtgcgcaatgtgagtcgaggtcggcacaacgcgtgtattctcggcaagaatcttgcgtcgaggtaggcaggtgatctagttcttacatgggctatgagtttgaatcgctaagggagttcggcgggaaaggagtcggtgaatgaggtcggcaatgagttcagggagaatcgttgcgagatttactccgatatgttgcaagtttgcgagacagcctagctttgttcttctacaggtttgcgggaatgcttgactctgatttggtgggagtttgtcgagctgtcaacatttgttcttctaggagtttgacgagctatgtagctctgatattctacgaatttgttgagatgcctagcttcatgcttctaggagtttgtcgagctgtgtagctctgattctctacgagtttgctaagatgcctagcaccgaaatgctgtgagtttgccgagctgtgtagctctgatccactgcgagtctgcaaagatgcatagcaacgatatgctgggagtttgtcgagctgtgtatctctgatccactacgagtttgctaagatgcctagcaacgatatgctgggagtttgcgaagttccctagttagatcttttgcatgtttatgggaatgcctagcgctgggtgaagaacgatcggcgataagtcttgtttggtgcgatggatcttgtcaacaagatggttctgttccatgtgatggctttgtatagtgagaaggttcggtggaggttgaacgttttgtaagtgataaatgtagtgtggcatcgacaaaggtgtagctcgttatgattattgatgcttagcaagactggagattagtttggcgatttgatgaagattgctttgtagcttggtgaagaacgctcaatcgtttggttcggcgatgagaatgctttgtagttcggtgaggactgaacgctctgtgttttagagctagaaacgcttgttggttctgcgatgaacgcttggtaagtaacgctcgcttgttaggcaaggattgaacgttcgaggtttttgagctaggaacgtttgacagttttgttaagaacgcttggtgagtaatgctctacaaggaacgcttgacagggaacgcttgcttagtggatatagatttacggggattggcattaggttttgtggatccgtgtcgagtagcaaggaagtaggtccgcttagcacaatcgtcgaaaacgattagtgtgaatgttggttgattttgcgtggtaccaaacttggttggcattacgatggattgttatggccgtgagtgcggcaaacttgttttggcgagcgaggagatgacgtaagactgagtgatgatgttgattttacggatcttcttttaggcatggggagatcggcacgactttaagttatgtcgtggatcatgtcttcgtcatgcattttagtaaaggaaatgatctttgtatgtgcgagatcgagctcggcttaaccgtaactggtagtttgattcagcatgatattgttt

SEQ ID NO: 42140 - DNA, 596 bp, Arabidopsis thaliana columbia
tttccaaagaggactttaattaattgaactcttgcagttttatttttgtagtaagcagattatttttctaagaacatcaaaggtcttgtatttagttatttaccaataaatacaacgttaataagagacgattatttgggaaacatttgtgtatcacatatcaatgtccatatgtgatttgagcataggaataccaaatatggatgaccaaatgtctcctactaattaataaaatattatctatttaatatttaaaaacattttaactcttcgaaaaactaaaaagtaaacaagattcacacaaaaatatgaacgtcattaacacaaaagatgtgaactctggttagtgttgaagataacgtgaaacaagattcaaatcctcgtggaagagcaccaatcgatcaccagaatcaaacctttgagcttcctcctagcttcggtaacgtttaatctcacctgattctcgtttttcttctcttcctgttgaatgtttgtgaacatagatatatataaagctgagatagatatagattcatgcttcaacggaaaagcatgaagaggacaacaacaatcttctaacgaccaagaataagtat

SEQ ID NO: 42141 - DNA, 577 bp, Arabidopsis thaliana columbia
tgcaaatcaataaagcatacgatatggaattttttttcattctaaaatatgacaagaaaaatgcaaaacataagcaatacataagcaacacacaagcaaacaaaattataagctcaaattttaagactttaaaacattgctagttatcaactacacaaaaatgtgtaataatataagagaccgaaaatatgtgttttaagactgtagatagttgtcattaattttgttttaactaaaaaatatttataaaactattctatataacacttctttttctatgtgttattcgcaatacatcatacaagattttggaactgtcggaggaggcgcacggggcattacttcatttaccatcgcagagctcatctcgatcgtgtcgtcggtagcggccacgccttggggaaaggattcatccgctattcttgttaacgttttttaattgagtcttcgaattgtgaacaaaagccttttgtgttgtacttggttcgaattgtgacaaaactcaatggttcaatctttataaggaatcattatcatttttaataaatgttttttgataattatgaagtttagagtt

SEQ ID NO: 42142 - DNA, 587 bp, Arabidopsis thaliana columbia
ttttttttttaagaaagcgaacaaaaaaaattgataaatacgagacaaaacataggaaaaatcatgagagataattaattataagaagcatataacagcactgcctctagcctggtccttcaaacgagtcaaaccacaggaaaacaaaagaaaccaactaattaagggagagccaaagtgtacatcaatgcaactacacaagtcacaaccaaagcatccaacggcttcaacacggccgtggccgaagcagaaggactagcctttttaccttctgagggtgtagtttttccgtcttgtacgggtgtatttttgtcagtggtaccgtctccagtactgccgcctgatgaagctgctggaacaatgacagagagcttcatcccgccagtgcagtggccggggatacgcagatgaagtagtgaggaccaggtgtcttgagagctatacttgtggttcactactgtccgaagaaattgcgtccccaatgtgaactcttgtagtcactttcgctacttcgtccacgtgtgaccgcaccgtagttgacactatatgcacataatgtaacgatcatatagactatattcactatg

SEQ ID NO: 42143 - DNA, 499 bp, Arabidopsis thaliana columbia
ccagtgtgctctaaaggcagatctatcaagcattctattatagttgtacacgtacgtaatgtggttgagagcgttacaagaacaagagttattgccactctcttccactttgcatcgatttggatgttgtcttatcgtttttagaaaacagaaacccggaacaagttgccactcaaaacaaagggaataatgtacaagccaaaaccttgaagagaacttttgtaataacagatacactttaaatatatgagcaatgcacacaagacatgagtaaagagtgataccgatgatttctgaatttacatgatcacacacgaacatgttctttgtcgtcctacctcccattcttcatctgataatccatctcactgcaaccaaaatcaagtttgtttcttggaagttaataacaaaccgtgggaggatcacaaagaaaaggaaacacagctaaatgtctctacaaaaccatgatgtgtaacaaagaatatatatatgtagtgag

SEQ ID NO: 42144 - DNA, 496 bp, Arabidopsis thaliana columbia
aaaattagtattttgtttacgaaaagatatataattgttcatttgttctaaaaagtatatttgggcacatttggataattattgaaagagaagggtaagtatcttatattgggccatcgcatgttgataagaagcccatgattaagacaggtggcacacttctaagtgaatggttggtggcaattagggccctgtggttgtttgatggaccacgtaagacatctgactattgtatttactctctctcgttaagagacaaaaaaaaatgccatgccgacactagcgtcactcaaatttccggtttatttcaccatcctgatctttctcacgaaccggtaaaaccgggtggtatgaaacattatttattaacaacgatacggcgtcgcttaggcgtttcggcgggcaacgaaattcagtctcccgcccacgagatgttgttttgtgttcttgtgcatcgctattggatccgtgaaattgaaagatgggaatgacgacc

SEQ ID NO: 42145 - DNA, 293 bp, Arabidopsis thaliana columbia
atatatgtattttcgttattatttgaacctgcagaacgcagtcaccattcgggcccttaaatcttatttttattttcttcgaaatgtgcataacgctactatacctgcaaagttggaacaatatactattttaaacacaagataacaaaacggttagcgttatgtgacaatctacactatgatatctatcagggatatcaacatgttcttcagatgcatgcagttgcagtttcatgtggaaacacatatgggtcatagagaaggggattatcacacatctgatttgacgatat

SEQ ID NO: 42146 - DNA, 526 bp, Arabidopsis thaliana columbia
aaataagatcacaaataaaagtttacttgttacttaccagcacattcaaccgagtctcaagtgattcattctcaacttccttcgtttgaagctgaatcccacagacaaatacagtttaatcaacatacaaccttggatctaatatccaacaaggcaaagagatagacacagacctttgaagacaaaattttgttgcgctcctccatttctgcattcttcttctgcagttctttaagctgggaatataaagcaccaacatctgtctgtacaagttattcaaaacaaaccattattaccaggaagatcataatatcagtaaaaccaatacaaaactcccatttatgttcattcatttactcaagaaaagttgaatgagcctatcctcaggacaatatgcaaaatcaaatttgtccataaatcctagaagacatgattcgattaaggcattctcattatcaagaccgtcgcaattctaaagaatccaattagatcaccaggtacaatttttgataagcagagaaatgct

SEQ ID NO: 42147 - DNA, 513 bp, Arabidopsis thaliana columbia
catagattcttttatgtttttcggtagaacggtagaagtgattaatttcatgatttacagaaaccgaaactatgttatctaattgtatagcttttaaatttttggaaatggaaagggtttacactttagatgaatatggttgttttagtcatatatatagccttccggcttccacaaataatctacgaaaaaaatacatgattactttttcgcttatgttattcaatcgaattattatgtcctttgaatatatatttttttgtgtgcttataattaatcatcatttcacacaattgtaggattttacgtgataattttagaaatctgtttagaatgggcacatacaatagctagaccttggcgttgatgctgaatgggtgggtcttcaccatggagatttatataataaaacacatgagacacgattttctgcccttgtttgaattgtagaagactagaagacaatctttgttcgtagtccttgtgcaaagataaccattaatcattattttt

SEQ ID NO: 42148 - DNA, 538 bp, Arabidopsis thaliana columbia
tgcgttgttggtccaatgttttattgattgatatattttttaatgtgattgcattatagttaggttaaatatagtgtttttaatgaagttgtaaaatcaataggtcacgttgagtcgttgacccgtattttatacttgacccgtattctccagtaaaacgtgaagaatcgtaaaaaaagaactatcatatagtataaaattcacatcacataaagtcactacagattcgataataaatgcattgagtcttgtgattctatattttctattcatcgcccccaattaagctacgtaataacagggacataaattgtctttttaatagattttttaagtcggcaagtactgtcttttagatatttcggttgtcctatgtagaaggtagatatgtaaagggtagattaaaaaaggaaatttaccttctacatcctatttagtatatttactatactaaaaaaggaaatttacctaacttactcattgaaaattagttattacttctctttcaaaagcagatcaaaatctctaatcaccattt

SEQ ID NO: 42149 - DNA, 151 bp, Arabidopsis thaliana columbia
acttgaagttatggatgttcatctttccaatgagcttgatcagtggacatacacttggggtgccagcatcttcaccgcaaagaaatattatacgttctgcttcagagaaattcaagcacaccaagccttcggatggatatggaattcaaag

SEQ ID NO: 42150 - DNA, 603 bp, Arabidopsis thaliana columbia
  unsure (1)..(603): unsure at all n locations
catcttttttttaagagaatatggttagttattgaaagatgattctttattgatcataagtggcaaggtacaatagaaatcatatcttaagtttctcgtaaaagtaaaaacaccacaactgaacttcaaagagaaacgaaaagaccagttaagacaaattttagaacgcctcaagcgtggaactgtctttggtgatacgtcataccgcctttattgacaattcttaagccaccctatgttgtcaaatatatgttgaaccatctgtattgacaatttttactgatacaataaagaaggtatcaccttcctccctatatatacagagttacgttaagaaattcctaatacagattaagggaaaaatgaataaagcgttggtttggttaattacattgttatttctaatattctctgcaacaccaaacagagttttggcccatccaccatacatatctccaaagacaagtaagtttataacactgacaaactacatgaattttcttttgcttatgaatattcataactaatcagttcttgttgttattgcaatattgggaaaggagcaagagaaggggtttgggatcataagataatganagtgag

SEQ ID NO: 42151 - DNA, 577 bp, Arabidopsis thaliana columbia
cggcctgtaggccgcatgtgcttaccaaaccaaatgcatgatgctttcactcttatccgcatgcaataggcttgaaatgaatacgcatggattactctgattacaactttttttcaaatcatttgaagttcatattagagaatgtaacacatcttttcatctgaaaggtacaactcaaaaaggtgaggttatcttggcacccaccctatgccttccaccatttcaactaatatatcaaaatcttttctatttatatgctttgaaaagctttttttttttttgtatgaatgtaaaatttacacggcaacatagagagccgaaggtttaaaaacaaattaaaagagattacataatgaaaggtcactagtgactactaaaattgactactaaaacaatttatgttgataacaattctgtcacaaattatgaaaagaacagatcatttataataaatacgaaaatatggcagtacaaagattctaccaatgataaaaagaaaatcctcaaataaaaaagccaacataaatgtttgacaaaaaaaaaccaacataaattgtttactctcagaaaccatata

SEQ ID NO: 42152 - DNA, 463 bp, Arabidopsis thaliana columbia
ttttgttccctcatttttctacttgttcttttcttccatcacacacttaggcggatttttttggccgttaactttgtcataaataattctgtcgatatcgcttctaaaggggttttgcaattaaatttagtagttaaccaataaaacatatctcctttgtattgttttattagtttcgtaaaagcatcattatatagactatacccacttgttggaggcaaagagcaactttattgggtggttgattagatatagtgggtaagaaattttctataagtatcgtaggagtgtacttagattcttttaacgtataaaaaacttaaaaaaaacaatttgattgataataactaaaatttaaaatttgtttgctaaatttcatttagagttattattgacaattttaataatttttataaatttcgtcatttagaccggcccctgtctctattaggaaaaaagaaat

SEQ ID NO: 42153 - DNA, 535 bp, Arabidopsis thaliana columbia
gtctagtaaaactagcattttaacatcgagtaatttgtttctgttatattattattattattttgttaatccattattttctcatgtgtgttttcttattggtctcaatgacagggcttattacagtacttcaaccttgtggaaggttgcatcacgatgataaaggcataccaaaacgagaataacttcacatacgactggatagtccggacccgagttgatggttactgggctgacccgctcgacccggaatacttcataccgggtcaatacctagttccacctggatcctcttatggtggtctcaacgaccgtttcggcgtcggagatctcaacacctcgacggtagctctctctcgcctctccctcattcccgacctcgattcagccgggttaactcatctgaactccgagtccgctttcaaggctcagctcacaacccaacgtgttccttacgtcaccaaaccgtctcctttctgcatcatgactgatcggacctacgatttcctccatatagatacggagttccagtggc

SEQ ID NO: 42154 - DNA, 503 bp, Arabidopsis thaliana columbia
gggtcgaataatctagagtcattcaagaaagatgcggttatattagaagttcaataagtaacccagaacaaagacaatttaagcctaagcagataataaactcatccttaatcctaagttttaacgtacgagtactttcaatgtgcatgcttagagttttgtattcatcttaaaccaacttaatgtatgcagtgtcattataagatattcgtaaagagaccttaaaaacaagcgtttggctgattataagaaattattattcaacaatgtagttggtctagagaaattacttacatctctctttcactctaaacactagagatcaaaacaacgaagtaaagaagtaggatcattagacaaagattggaaatatcacaagtctctttgcttttgacataaacaaacccaatttaaaaaaaaaaccaacttattaatgtaacattaaaaaaaaaaaaaaaattagacccaaaaaaagtcctgagctctctgctatttcttctttt

SEQ ID NO: 42155 - DNA, 581 bp, Arabidopsis thaliana columbia
tgtatataaaatatatgcattgaactcttcaaacttctcaatatttcatttttctaaaccattcttagttatatctagaagaaactcaaaaacttagtaaaatggatccgaatatgatgatagtaaaaaccctatcagagaccgattgttctcatgataataaattgattttaccaagagataaggttgagaacatagtaagaagcacgggagttccagtacctcgaatgggtattcaagtagaaattctagacaataccaattcctattgggtaaatcttagacaaagccaaagaggttattttatcggacgtgggtggggagaacttagagatgcaagaaatcttaaagcaggcgatgtcatcaagttatattggcaaaataccaaatttatattttctatgtaattttattttatttcttttaccgggaatgttatcttacattcaattcaatttcttaataaatctatttaactaatcttttgtctaataattatatcttggatggttttatatgtttcatacaaaaaagttgcatttcaatttgtcatctaaattatggatattttgttagatttt

SEQ ID NO: 42156 - DNA, 628 bp, Arabidopsis thaliana columbia
gcgatcgtggcaagtttgaaaagtaaattgataggccttcctgaagcttgcaatcgcatattgggtttcatttcaggtgcgcgaaattgtataaattgtgagctttatctgggtatcaaatatggctttattagtctgttttagtatagatgatcacacagtgaacacatgttggttaaattcttgtgatatatgtgccatagatattccttgtaacaatctgtcgatactttgcctgttgattgcagactgtgattcctccactcctgctgaaactagtgcaccgttcatatacgaacagccaaaacccaggcatgagaggggaagccctagtcaggacacggcgtggctgagatcggtgtgctcagataacccgcataatcagctgaaaaggtcagcgagcgtagttgatgcattccacagagagaggcaagttgaaatatgtgcagtggagatggagttggaaaggggttcaccaaaggaacctcgtttcgaagagctagagagcattgtgagaatgaagcaagcagaggcagaaatgttccaagggcgggccgatgatgcacgaagagaagcagagggactgaaacgagtaggaatagcgaagaaggagaagatagaagaagag

SEQ ID NO: 42157 - DNA, 530 bp, Arabidopsis thaliana columbia
taattttttactatacgttgttattggtatagggtaaaaataaattggaaatctctgtaagaagaaaaaataaataaacattatatatatatgggagtgatataatctaaattcatgagaatcttgatttaattcacaatgatatcctcgtcgtaagtagagaaaacttgcatataggtctataaagtcctcacaagttgcaccactcattctccactaaaacattttagttgacctatgacataaacaaacactttttttatttttcgatataattagtcggcctttctttttagattattatcgattttttgtctttttcatcaaaatcttttgaaattgctatttttactaaaaacttacaaattttaccattttataacacttaaagatatacatatttaagtttttttaataaaaatacgtattttataccgaaaactttaaacataagaaaaactacaaccgactaaactcaaacataacgaataagatatatgttaaataatatttctgtaatctggaaaaaa

SEQ ID NO: 42158 - DNA, 578 bp, Arabidopsis thaliana columbia
cccccatgaaatttcgctcctccaagattgaatttctctcaacacctgtaaaaaaaaaaaaaactatccaatttaagaggaccggagcttcgaggattaacacacaggaagcaaaaaaatcatcgacaatgatgaacctgagatagagaaagaagcagatctttttccgtttccttcgtcggcaaagttacttcttctctttcctacatgactccgagaaccaattgcgtttatacaattacacatagttacaataactcataacgaaacggagaacaagagctgaagaataatacttacagggaattggcgaacacaaagatcgatcaagagatgaagacgagaagccaagtttccggtagccattttacaacgacgacagttcactctcgccggggatcaataaactcttattaaaacgtagcgtttttgttatgacgagaggttcgatgaaacgcagcgtattgtttgtagagacaggttagattaaactttaaagtcaaacacggcgtttaaaaggtgagttcaaatgaaacgcatcgtttcgaaacttcgctttatagagagaatgtgaattg

SEQ ID NO: 42159 - DNA, 519 bp, Arabidopsis thaliana columbia
caattgaattcggacaaacaacctaattgatagttgatactaacgtgttattggcctaatggtaaatctcccaggtggagatgctgggttcaaggtacgttgggagagatcttttctccaaaggagattaatttaaatcccgcctctggaactgttcttttggattaaatcattatagcatttgctttaatcataatatgattcatgatcattattcctttaccattacttcataattcataatatttggtaactaataataaaagttggataagcccgaaagacttggactattaatgattgggacatggttggagagcactttcaaaagttgctttcttattccttgtttattgtcaggttctttttcatttattaaatcacttatagaagccaatagattccctattgtaaaaaagttactgtatatactttgtggtttgttgcgactacatgcgggttatgttatatggtttcctttttccatctgaacatgaatatatagatgaaggaggacca

SEQ ID NO: 42160 - DNA, 847 bp, Arabidopsis thaliana columbia
taactttatctctaattaattaatttttaatatgtgatttaacattatcaaaatatatttatatttacattagctcggtaaattttctgtgttttggattaactacaactttagtatagtgtaattagaagtggacaaatatgtataaattttaataaatacatcatctgaacttatctctttattttcaatattcttaataggccttgaattagaggcccaagtaaaaatgtcgaatattgtttttttttcacatttgtaacaatcggctttaataaaagttttaattctgccatttcctttcaaagtaaaaactaaaaagcttcccttgaggcaccacttcttctagagtcgatcttcttcaaccttgactcgtgagtcggtgcgacccagattcttcatgatcgtaatctcatcttctttatatattcatgggggtttgatcatctttctgcagcaacagagataacgtttaattcgaagatggattcacttcttctcgaagattttgggcagaaggttgatttgacccgacgaattcgggaggttttattgaactatccggaaggaaccactgtgcttaaggagcttatacagaacgctgatgacgccggagctactaaagtccgtctctgtcttgaccggcgggttcacgggtcgggttctttgctttcggactctttggctcagtggcaaggtccttctctattggcttacaatgatgctgttttcactgaagaggatttcgttagtatctccagaattggtggaagtggcaaacatggtcaagcttggaagactggtcgatttgggtataaccggaacgaatcggttacgacattaccgc

SEQ ID NO: 42161 - DNA, 492 bp, Arabidopsis thaliana columbia
ttttttggcttaaaagtgatgtatactcaaaggatgttgagatgtatggtcagataatcatttctcttgtagctagagaacaataaacataggaagttaaatgtaaggtccctctctataagccaagatgaaacaaaaatccaaaaacatatttgtattaaacaagcttatttgaatattatagagatgtgaaaaactaattttatttttttcacaaagatacaaacagcaacattgggttttagatttgagttgtgttcaagcatgtttgtctactcgaggttaactatatatcagcattatattccatggaagcatggttgttcactcgaggtttcgtcatttgagtcgattgtatttgtttttatcctaaaaaatgaaaagcttactcctcgtcataaccttatgatgtatgaagtgatgagatactttttgaccttttggtgaaacgttaatccgaggagttaatattattttgggttttgggtgact

SEQ ID NO: 42162 - DNA, 344 bp, Arabidopsis thaliana columbia
tgaccatttcaagtccaatctggtcaccattgaatagtaccctggtctctcttttggtacgataggcttgcacttatgctacgcttatgttagctctagtaaggggagatctttagaacatgtaaaactggattattttagattctcactttctcatcacccaaagtaccaattctataggcatgagtgttgcctccgataatttgcatgtgtttaagctctgagatagattcctcaatgtatgtggactctctttagtcatcatttgcacttagatatttgtctgttttacttcagctgattcactcggttgctgtgatagtttgcgaatatagagaagcata

SEQ ID NO: 42163 - DNA, 138 bp, Arabidopsis thaliana columbia
aatctatggaaacctgcatttacctataggaatcctttgccgctcctttatctacgaacagtaagtacacaccgcattaaggacacttgaaaatagcctcccctaaagatcattctggagggtatgaacctcctggat

SEQ ID NO: 42164 - DNA, 525 bp, Arabidopsis thaliana columbia
tcagaatattggttcaccatcctctttctcgtccttcctttggttcttaactatatcctaaaaccttttcggctaattccaccatcgtcaccacatctatttattttggcttggtttgtatatctttttaacatatgcgacatacttgtttgatctaaatggtatcgttagttgtttgacttcttgtgatcccatcttttcccccttcaaaaactatataagatactagctttcattgaggctattatgattttgtaagaaacattatctataataatctacagttgcattgcatcttcagtttctgttctgtttttgtgctttagcgagaaactctttaatttttcatgtttttcctaaaccttttttactcgagttaataaagtgtaccaacatgccagactttgggccatggcttatcactgaacattcacacaaaggacatccagtgatcactatttgagtttttgacactgtgtgatacatttggaggaaaggagttatggttaagggtgaggtacatgt

SEQ ID NO: 42165 - DNA, 649 bp, Arabidopsis thaliana columbia
ttatatgggcgttgaatagtttctaattgtgtgtattcaaacatccatgaatatttaactcttcatttttcttttttctattgaatagtttctaattgtgtattcaaaacatacatgaatctttaacaattcatatttctcccctttatttcttaagaacatagacaaaagatgggattcattaccttgtaaagaattaaaaatggtattcataattggtctttctttttttttttttttttatgtaattcaaaatttagaagtttattttatattctggtcgttattctccaaagtgattttatttttcttctttgtagacctctcgttgattaataagttatcgaccatgttatgtagttcaaaagtttttgcaaatggtgtcgttgaattaaaataaaaagttatggaccgtttcaaacgtttttgtttgcgaatgccactgaggacaggagtccaaaggtttgcgagtcactcgaatgacttatgagttcagtcacattcaacttaaccatgtttttttaattagaaacctaaaacaagagcgtcgaccattaagacctacaaatgctttcaagactccgaactacattatcaaaaataaagtctttgacaatttgcataccaaccacacccaaattgcatgaaa

SEQ ID NO: 42166 - DNA, 559 bp, Arabidopsis thaliana columbia
gggaaccataggtttgctctgtacggttgcacttagattaaatactttttattcatataggctggatggagattttattgtgtatataagtagataactatataagctttgctctaaaggtcatggtgaatggagcttgtactgcataatatttagagcaggatgccgtgatgctgcaagatggtgaatgcacttaaaggagcttgaattttctgctgacagttcttgtttgccagttattccttagttactgtctgtgtggtacatgatgtcttacatgttgggcactatttgaagcaaaattcaatctttatgagtttataccatgcagactttgacataaagattacactggtagatcatagatacttttcaccctcttagttttcagttatccctattagatattttggtttttcctcggtttgggtggtaggtaagcccataataggaacataaataaagtagttttcatgattcatatattaaattgaccatgattggtcatttacttgacttctgaattaaaattgctcttgatgcatgtgcaactgatcag

SEQ ID NO: 42167 - DNA, 544 bp, Arabidopsis thaliana columbia
catctgaccaatttcatattggccatagtgcactacagggcatggaccaaaaactcgcagcacaaatttgaggatacatggcatgagcagcaacctattgaattggttcttggaaaaggtatgtggctgtcgaatatgtactctacacctccatttcgttagatgaatcgtcattggtaaatttgaatgagttagcttgtgtattatatgaacccaatgagatggatatttgggaggaaaaaagattgagttttgtattttttttgcttcaatgctgattagcccattttaacgtcactatacaattttttttataaaaaagattgtgcactaagagtgaaatgttgtctgtgagacagagaaaaaagaactagccggtttagccatcggtgttgctagcatgaagtctggtgaacgtgcgcttgtgcatgttggctgggaattagcttatgggaaagaaggaaacttttcttttccgaatgtccacctatggcagacttgttatatgaggtggaagttattgggtttgatgaacaaaggaggt

SEQ ID NO: 42168 - DNA, 576 bp, Arabidopsis thaliana columbia
tgtatgtatagaaacttgaggatatggttttagttgtgaagcgggtttggaccagaggggacgagtcttttgtcgacgccgtaccttggatcaatctccggaggaggaggagaaagaagtggctgcttccgactgctacggtggattctctgaagctcaatgcacatagaacgcgcgtaaggaccgaatgaaggaatcacacgaacggtgaggagtcacgtggtaagggtggtggttaaacctcggaacgaatcggtgcgttcggtaacggaagtttcttgatgttctgtttccttcgtcgacgacggttgaagaagcggtggaggatttgagaagtaaagagacgaagagaagagagatcaagatcagacgattcaggtgagtcatcgtcattgttttggttccaagagagagcgagagagagaaagtgagaagtggtcttggagaagaagaagtttaaaatcgagagagggaagatatttggtggaagcaaattgggatataaatgcaacacagaagaagcacatgaatagatgttatgacggttagttttagtaaatgagagggcaaaactgg

SEQ ID NO: 42169 - DNA, 204 bp, Arabidopsis thaliana columbia
tctcctgattgcaaaaagcgatcacgaagataagaagcaaacttcagataaattaacaggaagaagaaaattatcttaaaagggttacatgaagattgaaatggtaacaggaaaaggaacccaaaaaaaacagaggttataagctttataatctagtcctctatctatggattggagccagctttactttgaccttggtttgtt

SEQ ID NO: 42170 - DNA, 538 bp, Arabidopsis thaliana columbia
tttagttcattacttgagagaatatacagtagagaggagtcgtaaatttttatgaatcacattttggcaagcacatgtttcgtgacttgtaagaaaatcttgttcacaagcttttttgatatgttaaggaaatatgttttctaggaagattaattatatctgcagtttatggatttcccatttttactttcatggtcatttcaggctagcaatgctctcatacaacttagcaacaatttcatgtttagagaaagaacaatcttttgaagcttgcacattttgcaatttcatgcttggatatatgagccacacactacactattgatattgtttaggctacttttactaaattcctgttctaatgttcatatatattccttttccacactggattaacaacattagtcttcattttatgaaactattagtaatcctttagcaattaggttcacattttgtcgtttatggtttggaataattccctgcagtttttttttctcttaaagaacaaaaaaaaaacgggaacttgtaatgattg

SEQ ID NO: 42171 - DNA, 674 bp, Arabidopsis thaliana columbia
gcaggatgactcaagaagactagaacagttggttttcaaatctgtgaaagttcttctgagcactaaccaactatatacatcaaaatctctgatagttcattacaaattcaagattctaacaaaaactagagttgaaataatatttccctaatgcaacccaaataaaaacagaagacagccataggaaaatgaagaaattgtcatgtcagagcccttttgagattgagtaaaacaattcaatcacaaagcttccaaagttcagatgataaacgagaccgttgataatttacctgtaaaatattcttacgagtataatctacatcaaactctctatgaattcattagaagtccaagattcaaggacaatttttgaactatttgatctttggtcatagaatttgcccatgcgctcagaaggatacaataacgacggcaacgatgagtaatcgaatcaacatcgagacatctttctaaacggagatattcgtagtctgacctttggatcgtcggaaaagctgtcgacttgataaaaacctagataatcatcgtcgaagtggattacaaggcgtagctacaagaccaagagcgcgttgggacgcaaaatctgccaaagaatcggagagagcatcgatcaatgagtaacataacaataagcgtgtgaagacaagacgaga

SEQ ID NO: 42172 - DNA, 594 bp, Arabidopsis thaliana columbia
ctcatttaaaaaagatcaaaaaatcaatttagaaaggttttatgtatatatgtgtttgtatgtaggcaaatatgaatgggtatgcccaaacggccaaaccaatccataattaagtctccagcttttcaactatttcaacactactgtttaacaatttaaatgaaattcattgtagctcctatggcattatgctgtcagacgagaagaatctaattaattgatgcgtccttttgtttcaggctatatttacctgctggtttccttcttctctaccatatttcctaaaaaaaattcttcaactctttctctcgtcctttagcgactgcgaaaaggattcagttcatatgtctttgtttttgtaataatcaattgagtctcggtaagtagtttaaccgttgattacaaagtttttttattttgcgagatcgattttgtaataactagggtttctggttttacttcctagatgggaacgcttgatcttcccttcgtctcatagcttttaaggaagaactcgcggcgagcgagttaatgtgtccagaagatgaaaatgttgtgtgctatcgcaacgcgcttgacgatgataacgacatg

SEQ ID NO: 42173 - DNA, 641 bp, Arabidopsis thaliana columbia
aggtgctcttcaatttcatttttacaaaagcccaggtattgcgtgaacgtctgttgtcctctcttagctttaagttgtgtcgattcatggagtcaatggtttgtggacgccacttgatctcatatcatacctctttgctctgtttgctcaacatttatctgaaaacctgccctttagaatcacctagaagttctatcaaagtttcccaaagcttgaagaagactctctcggatagcttacattatcacggccgtttgcaatggttgaggcagcgcggcactatgatctcggctccaaggagtggggattaccgctgcttcctcaaccatgtatcatcttatcctttgctcaccgtgttctctcttgtacaatttgccatggttcattcggctatatttgtgaagctcaggtttatgttttgtctctatgtgttagaccgactacaaaatgtgtgtggattccttaatctccatggctcgtttcatgtgagagaggacccaccgattttgttacagcttatcacttatcttctacaaaccctttgtgtagcttcttcatatacattgagtcatgagtttgctcttttgaagatctttggaatatcgtccttaacccatccatgtgacatcaacatctttgtc

SEQ ID NO: 42174 - DNA, 147 bp, Arabidopsis thaliana columbia
caaataaacattttttaatttctccctttttaatggaaatctcttctttcccatttccatacctacaagacgacgagtgttcccatttccttggtctatttcaagacatggactcttctccttctactttcggattagaaggtttta

SEQ ID NO: 42175 - DNA, 597 bp, Arabidopsis thaliana columbia
aaaagatctcatctcatgtcacatctagatgctaacttgacatacagaagctatacaaaatttatcggaaactctacaaaaacgaaccaggaagcagagaaatcatcaaataaacagaaaacagcaattcgaacaatgataaactacgagcaggatccatataaaaaaaaaaaaaggacaaaatcgaaatcgaagtttgatttttgaacagcgagattgagttctccagaatcgccgtcaatttttactttatctcaggttaatgaataaaacatgagaaaaaaagaaaagaggaagagagatagagaattacaggccaaccgatccaagtttgagcatgagaatcccattccgccggcatgtagtagccgtgttccgccggcgattctcgtgactcctccattcttcacgatgtttttgtgagagagaagtcagatgtaagctttaaactgatgtgtatcccgtatgcgttattgattcctaatacttctttttctgaccaagaagagaaaaaaaaagaaagggtcacaaaaagattccgaaacaatttctcagttttcttaagagacccgtatagaatatattttcttacagttg

SEQ ID NO: 42176 - DNA, 560 bp, Arabidopsis thaliana columbia
ttttgtgagccgatacatatgacaattttcgatcgctgaatcatggtttggaaatatgtttgattactactctctctttctcggtcaaattaacatccgtaagagagagaaaattattcaaacccctaggtttatggtgtacttcgaacctagctagactgggtattttgacaatttcagtgtcctaaaatatcttctaatagtaagaaaatgaaaatgatggcgaagaaaaatcgaaaatttcatgttttgacaaaaaagaaaaaaaaaaaactctttttaatcctaactaagtaaatattaatgttttgagaactgagcattttataatcttttccaaaaaggcaactattagagaatattatctgctgaagaagtcccacaaaaaaaaaaaagatatagaagccatgacttcgttactatattacacatgaaagttgcatcaattccctctccctcttcttcatcttcctctttctctccattatggatttaggaacagagataaaatcagacacaagacaagaagaacagagacatgttttcgaagattccctgaa

SEQ ID NO: 42177 - DNA, 412 bp, Arabidopsis thaliana columbia
tgcctcttccggggtgctttattggcaagaacagaaatatcatagcatggtgcgagcaacttgtaggaaaatatgatgatcatactagcatcattctttacgaaattggcgaaggtggggttacaaaacgaattcggacaggacgacatgaagcggatgaggactacaatgacctggataattgtagctatgtctatgttccaagtctgattcccgttccagaataagaggtggcaatgagagttctgttttttggtctttctgtatgttaacccttctaccatgaataatgaaatcaactacgatactatatgcaaatgttgttaaaattgacctctggttttaggttttgtattacgatcttgagaagatgtgggttttggtacagagtttgtatgtgtataagaatcga

SEQ ID NO: 42178 - DNA, 583 bp, Arabidopsis thaliana columbia
cggtaactagaccctccatgactcccgataagagttgtccagaccaagaccaaatctctgtttcagtaaagcttaatacttaccttcaagcttacggatattattgctcaaggacttcatttcttgtacttggacacctaacaggtgcgttaagtcctcaaaatatttcctctctgacaggaagcaatgtatataatttaatttagaggaaaaagaaggaacaagcaagaaaagtccagaaatgatcacagaaaaagagacaaaattagtctacaatataagctgcagaaatatatctaccttcattctttgttatcatcatttcctgactaaccctggctacatcagaagcagccgcagaagcagctttggctgcagctacagcttcttcagctaagctaggtttagcatcagctttcttcagagggtcagtttcttcttccaacataattctttggacccaggatttaaatctgggtatgagagatctctgaaacaagaacaaatctcacttcaataagatattgattttgaagaagggagattcatctataaagttgcatccacatggagcattaaacac

SEQ ID NO: 42179 - DNA, 561 bp, Arabidopsis thaliana columbia
gagttgaagctatcataaggaacaaactttgatcctttttcccaatattggcatccatcaggaaaggcttggaaagctatgcaagaacagtttctccagcaggttccatgacagtcgctaagaccagcgctcaaactatcgtcatagtaaaatggataataaccggtattattttccatcatgtatcctcttctgggttcgaaatactctgaccctttcctacaagccgttggcttctccgtgatgcagattgctgaactgttctttaaatccgtcttgcagggttcactgctttcggaaatccaggtgctgctattgttactgctgagagaaaaggttacagtgatttggcctagagtatccaagaaccagctggaaaagaccgaactattagctttcttgattgagtagctgaagtacttcatgtacttatttgaatcgaacttgaattcataatcaatgtagtgtctggatacttctaagttcaaatgagagcttccattgttcgtcaagattccactggaccagtagatttcccgcggcgccagacgagtaactggt

SEQ ID NO: 42180 - DNA, 287 bp, Arabidopsis thaliana columbia
ccagttgtatggcaccatactaattcagagagacaacgaattaggcatgtgataccttttcggttagccccgagagtgcccactgtcgaaactggcgagactattgagcgtttccattgactttatttcgactccgcattctgacctctaactactctttcgggcattcgcgtgatctgtgctaaagtaccgacccacaagcacctttacggcgcattgttttcgaggatccagtatgcatcttagctcgtcaagtctagatggggtatcctacatggcgggaggga

SEQ ID NO: 42181 - DNA, 303 bp, Arabidopsis thaliana columbia
ttgtaattctcagagacatatatatatatatatttaaaaaagaattagctgacatctgaaaaaaaagattccagtattaccgtctgctaaatatgctaagcaccaatcaacttagaaatacctaagaccttcgagagcacgcacgacaatttctcaatgattggtagatttatcaggttctaggatttttctactgtgacctcaatgatggttagactattataaatgattgaacgaaaacattaaggaaaaaattatatttttttctaacgattttagactgaacgaatatctttcatctat

SEQ ID NO: 42182 - DNA, 458 bp, Arabidopsis thaliana columbia
tgttggagtctttgctaactgtttgaatcgagatcaggtaacacttattaagaacaaaaatgtggtttcttgtgagaaaaatggtttaataaagatccgagattgatagaagaggaagatcatgataaatggttggtgacgggtgatcttaaaaatgttgaaattaaggtgtgtcgtcgtaatacgcgggaaatagatagatagaaaaatagaagtccaatgcaagagacttaacttaatcatgccaattaattgattgcactaacttgtacttgtactttccgtacgccatctaatttgattaataatatcataaagattatgattgaggacataaacaagagaaaatccgcacgaatctacctaagtgcatcacgtttgggtatccatacacgtgaccaccagtcctccacaacacaatgtctgaagatattctaatgtgtcacatgatagaagaa

SEQ ID NO: 42183 - DNA, 387 bp, Arabidopsis thaliana columbia
cgttgagtgtttaaccacacacctcggttcgctatactgtacataatgtttgagtaattatcaatgtagaaaataaatattttgtgttcctcacacagtcacacgtcgatgagcttggtggtacaaagcatgtttcgttcatatttgggattcattaaacggtgatctgtaaattgcatttggtatgtatcgaagcagtaattatcagaacccatatgatagtagcggttattgggccgctagtgaggcccatattagagtgtcaaggatgaatcagtctgaccggagctatataattaatatatatcaagaagactcgttttagttggtactaggtgattcagatcacacagtacaccgagaatggcgtcgtaccaggccgccgta

SEQ ID NO: 42184 - DNA, 415 bp, Arabidopsis thaliana columbia
  unsure (1)..(415): unsure at all n locations
caaacaaaaaaaccaataaaaaactaaaaaaaggccaccactactacataaaaaaaatcaataatggaaaaaatcactgcatgaaaagagcggaaacatctggaaataataccgggaccataataaatatactctcctacggtccacaattccttaaaaacaactangtccgctcctatgggganatgtggaagcaatngcaacgcctcctccattgattcaatttttcgaacgctctttaattttgtcgtgtgcatatgtgggtcgtcagcatttggaggctgccagtccttaccgtcatacttcttgcagatctctctaggaatgccatgctgtttgatgtatagtaggcaatcctctatatcatttcccatacagatatgccctttctcgggattttcatcatcttctttct

SEQ ID NO: 42185 - DNA, 955 bp, Arabidopsis thaliana columbia
ccctgcaagcatgccatagctctattatctccatctcgagtcttttgaactccaacggccagttcaatggcatggttaaatagtcttgtattgggtcaaccgcagcgtccttgaaactctttgacgatcttagagccaagaatttttgctctatctcctccatctgccatgatagaggtggttctcaaaataatgacgatatctaaaggtcgtaccaagtataggtaaacgaaaagcaagctctgcttgaccaagttaggaaaactaaccgataggtgaatgattcgcttgtctcctctgaggaacagtctcttcaccttcgtcttggctgattaaagctctaccacttgtctggcgtgcatacacatgagatttagaggtagaaacctgtgatccattcggtgatgactttatcatattaacaccatctaaaccagctggcattctttgggtgtggttgaagtctttctcgaaccaagttgctggcatgctcatccggctaatatgctttggcaatggtggcctcttgctgttggacggtttcaggttgctctcagctctttcattctgataccagcatggtggtgtgttagcatctctctcagacagagaaaaggaagagcttgatacaaagcttgctccgcagcttcggcttctagtaaaccccgtgcctcccgccgtttgcccattactctcaagatgccaagcataaagcttttcaggagacggagtgacaaaatcttgatgtgttgggtctcttttgaggttagaagactcatccggaaatgattcgtcagtaagtgacaaaacacagcgtggagagactttgatcggtccacttttctcctttgtttggatagagcactactgacttccttaactctttcttcttcttcttcctctttttcttctgtttcttctttttcttctttttcttctgcagtttctgttggtg

SEQ ID NO: 42186 - DNA, 1231 bp, Arabidopsis thaliana columbia
caaaccaaatatccgggcattttaaccttcttcttttcaccaattcggttctatctcttctaatttccaaatggtgtcttggttgtagggcaaatctgacatgggaaccatgttagataataaaggaagatgaaaaaatagttaacacggttttgtagttgtcctgttgtcaatgcttgttaattggtaatcatactattatcgggtagttttctataagatctgcggggaacgaaaattttttttgctttgataacatacttatccggtaacaaattactattctttttattgtaaattaggtcaataacatttctgcttatcttatacatgtgtgcttactaatttatatgtgcttatctcccatagtggtgaattaggtcagcgctaccctagagcctccaccgtcctcctgtcgaagtctgatataacagaagttagttgactaaatttcttattgccgcggttttttatttttataaatcagcactcagttaccggtttatggtggtttaacaattcatgatactactcgtggatttgatgttgcacctagatcgtgttgaggtatgttagaagtttaattatcttgttaagagaaacacacttgtgaatctatctgccagttaatgttctaatctttatctttgcttgtagattagtggaattcaagtccatgtttcattgaaccccgtcattcagttgaaacccagttcaactgtctctgttgtcgttccaccaatcgttgtacccattccacttgcggtacacgcagaggttaatttttttttgcctcttatcggtaattttatttgtagctgctaaaggtttaaatgtcccgtttcaggctggtgacgattttcctatatattcttcccaacaccaaacacgtgtcagcgaggaggtttgttactagtttattatttttggttgcacttgttaggaaactttcttggtaaacttcagaggcattctataattgtgttgaaccgcaaataaattttctattgttttatgcaaatcgttccagctcaacccgctatatctaatgcttccctgagccagtaaatcccttcgaaggttgtttatttattttttcattttaaccttatagtaaaaatcattattagatactaacgacggtacatacgcaaaaggattattatcctgctattatacttaggcatcttggtaaaaaaattttaataggttgtggattttgcttctggag

SEQ ID NO: 42187 - DNA, 540 bp, Arabidopsis thaliana columbia
cttacacaagaatttatcaagctgctctgttaaatcatgggactcaaaatcaagatccactccttcccactggggcaaggaaacgagtttttcattgtagcagcctaacgtgtttatcaacttgtccgtcagactactgagattctgctgtagatttccatttgcagtagccaaatcatcaaacttacctctcacagcatcaaactcagcctgcacagtagcaagccttgtccgataatgagctttttccaccgcttctttctccataagctctgcaagctcttttttctcacaaatgcatgtctcataattggtcttccaactcttagactccaacactacagattccagttcatcaatcttttgcagaaggatgaggttttcgtgagtaatattctgcaaatttgcctctaagctttgattctgcaaagctacagcattccatttggcaatgcatgtggttttccctctttcagggagcaaacctcgtccaaagtaatatccagcctctgcttcaatatttccttggcctctgttgaa

SEQ ID NO: 42188 - DNA, 442 bp, Arabidopsis thaliana columbia
caactagattcaatctctagcgatacgagagtagcataacgtctccaaaatgtggtaaagtgatcgatgatgccgccaaataagcactttccatggctgctacatcgacccacatcagccgatgagtgataaccaataatttcgtaagtgaagcctcctgcctccctataaggtataatgctgaggagaagaatgaccatactcattggtataaacaacgcgatgctattgattatcgagaagttttttatgatggttgattgacaattgacccatcagctaaaatagcgcgcgttaacattagtgacaactgacaacagtaacaaaaaccaataaaatcccttattaatttatatatagatgacaatccagtggcaacattgagtctcaggcaagtgactatatctcggaatatcataatatcatatacatatgtgcgtgg

SEQ ID NO: 42189 - DNA, 503 bp, Arabidopsis thaliana columbia
aaactctctttttcaaactctactttgattaatatgagaatgtagctatttattatttgttacttaacagaggacattttagtcatttacatatatatgagaatgtgaatgatccatccaaatgatcaaacaaacaaagctccatctaaatgaatcatttagatgaactagcaaataatcaaacaaacatcattaagatgaatcatcccaatggattatttggatggatcatttggatgctaattccaaatgatcaaacaaacagggccttagtttttaaaatcttcttattctatgttccttaggtacacaatccaaacgggtaggaagcttgctaatctcacgcaagactagaacccagatgatttgtaagttttaatatttaaattaaaggaaaaataattattaaaaaatctttcggatgaacagttttttttttttgaagttattattttgccaattacattaatagtcttagattagataaaggccatttaattata

SEQ ID NO: 42190 - DNA, 577 bp, Arabidopsis thaliana columbia
tcgtcatttagcttcttttctttagattttactcccaaatgtctccatttccattgttgtccctgtccatagaatacatgaaaagactctaagaagactctagaaaaaaaaaagactcaaaaacctatatctaaaacaaaattaagaactataaaaatagggttatatcacataaattttcttagatttagatttatatttacatttagtttgataattttgttttaaaacggattttttcctagattttattaatagttttaataaaaataaattattaaataaagaaaaaactagttctaattattattaatatatccccacactggcatcctaattttaataatccaaagttatgacggtaaattaattaattaagatacataatcttataaggtttctccaaaacaagctcttagaagccatttggcattctattctttcgacatttgtgactttttaaattttagtttaatctatgttattataataattaataaatttcaatgcgttgattttacaagtcaagttacatgatatgcaggtttttatgcctacttatactgaatgtgtgtga

SEQ ID NO: 42191 - DNA, 266 bp, Arabidopsis thaliana columbia
tctctcactcaattcgtaagcgttagtatgttggtgggatttgggaaagcgtctttaattgataaagcacgtcagcaacctgaaaaagtcaaaatggttcttgaaaaagtgcagaccgatggtttattgacaacctatgacgcagtgaaatcaaaattggcacaacctttggctttaggttattgcaatgttggcgtgattcatgaaattgggcatggtgtcgacgggctgaaagtgggtgatcgtgtcgtatcgaatggtcctca

SEQ ID NO: 42192 - DNA, 606 bp, Arabidopsis thaliana columbia
agtttttctttcagctgcttaatttccttggatgtcttctcttctttctccttcagttcgattctctccttcctaagttcttctagttctcctttcgatgacccgacattgcttcttaaagtgattagcttttcgaggtaatgatgtgtccggtcaataatgaagccaaaaaagagcacaacacctgcaagaacatatgagctcaaaacgtgattccaatcatcacaacaaatttcaccactccttcaaatcctcccaaatttagtgaacataagcagtaccaagcacaactatggaagcaacggagtggaaacaaacatagagatcctccttgccaaagatatctatatcacaaatcagttaaatactgatgtaggaaagatacctataaagtgttcttagtttcccactcactaaaatcacagcagtgaaagcttttgttttgcttatatagatatcatccttcagttatatacccagtagatgttgaatcagcttgaaatcaagccaaatcagcagacaagaaaacatgaaagatggctcttcacaagccattgctaatacaactaagataggacaagagctgaagtcaggggaggagatact

SEQ ID NO: 42193 - DNA, 495 bp, Arabidopsis thaliana columbia
catagctataattatatgttttgccaaaatatgaatagatatattcattagaagagcgagagatatacatataagaactgagagttataaaatttgatatcaaccaaaatttggtaatcacctttagaaagaaccgttaaaattaagaaccccatagaccacaccacactttgcttcaagctactactgctttacgtcttccaacaaagccattcaaagctttacgctgctttgggccgaagataagagactaaatatactaatgctttaaccaatccttattgacaaacattaatgaaagctatcgagagatgattcaatgacattctatgtcttctctcttcgtctgtttctctccctaagcgtaagagtctcaaaggggacattaaaatggtcattcacagacatacgtatcctactacatcatagatcctgaaattttcgcatatcacaaggttttaaaattggggagaaagtttgccatgtttgatagac

SEQ ID NO: 42194 - DNA, 1095 bp, Arabidopsis thaliana columbia
tggtttttttttttaataataaaacacatttgttgcaccaaaagtagcgaggaagtacgtacacacaaaatttattggccagtttttggtataaggttgaatgattttgtagttttagattgttctataaccatatcctaattttataaaataaaaaaattaacaataatttatttcatcgtatgttttttattaaatctttttttcttgaattagtctccactctccaccatcctacaatttaattatctaaccatttttttcactatactaatgggaacatatatgaatatatagtgtagatcctatgaatttcaaatagactatgtaataccccttaacataagattgatcacacttagttaggttcaaataacggtagtcaagtagaaccatttcaaagaaaaacaaaaaaattcattacgctagattcaactcaactaaacattctgatagaaaacaaatttaattgactagagagtctttcgaaatcaaactaaaaccagtgcctaaatgtctcttgctcatcatctcttcgtacttcccggccaatgagtcgaagagaatcccagcgccaactccaaccgcaatatcaatcgtgtagtgtcctctcgtaccaagcagcctgatggattgcaatacattgagaatgtcaaaaaccatcgccagcctaaacctctgcattctcttcatgtccaacgatgcgatcatcgatccggcgacgtgacctgagtagaagaggaagaacgacacgtttccgaccggatattctactcctgatcctaaaatttcctgtaaaaagggttaaataagtaccttattcgtctttttaaaaaaatattgaacatattaatatagacaagacgaacataaacccatgttacaacacaaaagtaaaagtaaatgaaacaagatttatgctaaaatcaagggagtacaaattagcagccctttgagaacattctttttgcatataagaaagagtccatattgtcaaattatttggagacactaatataaactgcttttttatacggtagttaccaagggaatcacatgtccacgacaaggtatcgatcaataagaaaacagaga

SEQ ID NO: 42195 - DNA, 415 bp, Arabidopsis thaliana columbia
ggccattttttgtttttgtatgaaagatatcatctcaatatttcgtaaactatatccaaaaacaagcctctatgatatgcattagagttcatttgtgcaactaatggttcatgccatctaaccccacaatagagacctagcgaattgcaatgtttcgctaggaggtatggaacagtaatccaaccatactcaatttatatggacgcattgctaaggtcaacagaagagcacaaaccaccaaaactcacagtaggatgcaatgcttcagtcctagtatgccaaaactcataactaagataagaatccttaccatatatatttaggcattggatgaaacgttcaacatttatgaatggtttcagtcaatgttcaaaaaatttacattggaatttatctctatgttggaccgtttatg

SEQ ID NO: 42196 - DNA, 435 bp, Arabidopsis thaliana columbia
actagtcctgcaggtttgaaatacgctctacccaaaaaccaaagggtgaaatacatagataacgctataaacctttgtacattgtcatgcttttcatttttgaatcaataattctcaacgaaagaaaaacaaagaaatcaagattgtcaaatgcttcaaatgaacacaattctttctaatggtttgtggattcttcagtcgtaccaaacccgtattagagtcatttcctatgtttggtaagaaactacaaacacggaaacaccaatcattcagtattgttttggtctccgtcgaccaaaagagagaaacatgagttttaaatatgaaactaaaacgccaatattgaaggaacacaatgacattcacagatggtattttcttatattctgaattccatacatgtatgatattttaataaacaattctttaaactga

SEQ ID NO: 42197 - DNA, 522 bp, Arabidopsis thaliana columbia
caaagtttcctaaatcctgcaaatgtacaattgaattgatactaatttcaaaattcatggtttccgaattcgttctcaatgataaacaacttaaggattcgatctattctacacgcattgaggttttctgtcaaaagtttttctacaccacacaaattgatcatcaccatatttctcaatcagatttgagaaaatgacaaaaagaaaaaacaccgaatatggaaaaatcaacaacgcagaaattaggaagaggaaagaagaaatctgataatcttaccattagggaaacaaatttcgaaagggaaactctacagagaacaaatctgggagggagaagaaacaacgctgacctcaagtcaaatcaaagacggcgttacttaagctgacttattttgctgctgctcctcctgttacgcacgaaacgatagcgacgtagacacctgcgtcgattgcggcggaggcgacggcggacgtttataatctacgatcgatccgctaaggagacaaaattatttgaattgg

SEQ ID NO: 42198 - DNA, 515 bp, Arabidopsis thaliana columbia
gtgagatgagaaaatatttgtgtatcaatatttttcaccacattcaagtgatttattaagagcaaaacaaataagagtaatgtactaagtttcagtccgattctcaaataagtttcaacataagaaaccaatcaatttcggtttgtttggtcaattaattccaattttggcaaaatgtttatcacctctgtcctctgcaacatagtttctgcgtggcttgactttcaaacattaagccacaagaaaaaacaagacatcaagagcatttaatttttctttcttgctttcattttcttcttgtttctaccgatcgaagatcttcattgaaaagagagaagagctcatggcgtctcccacagagaacagtaatcgatctagtagtagcaaaaaaccccatcttttgaaacgttgtctcacctccattaatgaatctcaagctcatctttgtcagaaacgctcagctccttctcctgacttagaagctctttccacgagtgttactatctggggatgga

SEQ ID NO: 42199 - DNA, 362 bp, Arabidopsis thaliana columbia
gatgttgcagacttgtagctaagttgggccggtagatgtaggtgacaagtgtttacaaatctgttaaatgtcgctgtgttcctcctacttttgattttgtgttacactattcaaaagttggtcgactcttttaatcggttgattagactagtacttagtaaaatttggagttaaaacttagaagggagaagaagaagaagaatactgctttaattcttaattaatttttttttaaaattagtagtatcattaacgtgtttattacaccttcctcgagttactttcctcgtgatgccaatggtttttttaattctttacctgttcttctgacacagagtcacatattggactacggaggagat

SEQ ID NO: 42200 - DNA, 592 bp, Arabidopsis thaliana columbia
  unsure (1)..(592): unsure at all n locations
gggtcatatggtacattcccctattaaataaatatggtgcactcctatgttattagctaaaatgtttagattataattcaaagtcatatcataaataaaattaatattaataaaataaatggctttttggcaagacggatttggaaggacgggtttttgaatcaacattaataaaaagtaaaatataattaatccaccgtttcaatacgggttaaatctttaatttattatttttaataacaattaatatatataactccttaacaataattatgaactgtaaaaatagaaatattttataaaaataaaatttgcaagttttaatatatattacttttaaaaaataaatcatcccgcggtataccgcggnttaaaatctagtttgcttttacttgggattacagaactttctttttctctctttgtgaactaaatgcattatgcattatggaagtcttaatgacactaacgattagggctgggcataatatccgaatccgagcacccaatccgaatccgaaatctcaaaatacccgaacaggttcgaccgggtatcaaacataccataatttactatatataataatatatt

SEQ ID NO: 42201 - DNA, 578 bp, Arabidopsis thaliana columbia
atatgttacatttatacatatttaaaaaattaaaccaactgttacgttcgatatataataatatatgacatagtatttatatatagtatcgacgagtaaatagtttgacattctttgagttgaaatagtggagatttctaatattctttagaaaaatatgcgttgaaagagtaatatttcacttttggcagagaaaatgccataacatctattacaaagtatctttgctaaaaaaaacaaggcaatccaccaatatccgtcagattcagacgtattttttgtttaatataagaaagttaaatatggtgaaagcgaaacataacgtcaaatatccatgttgactcgtgagtcatgagtccactcatggaaaaagggtttggcttttttggagttaaaatggcagaaacttattaggaaggaaatagtggagacacaacatctataaaataaaagaaaaaaaaaaactgattgtgactctattttgctgtcccaaattaaaagaacaaaaacaattgtcttagcaattttgggagaaaaggttaacaccaaacaatctatatccacaaaatcttatgtgt

SEQ ID NO: 42202 - DNA, 464 bp, Arabidopsis thaliana columbia
gtctatagctcatatttatcactatcaaaagctttatcatttctcaaaaaccatttatcacagtgaaaagctatgtaacgtctatccaccaaaaaaataacaatcaatgctatataacaatcaatcaagtacatatttaccttcattgaagtgcatagacgaattcctttacagtttctccttaactcacaaccacttgcttatccgccattaacactcaccaaaagcatagagaaaaaaaacaacaattagcatttacagttaactttccaatttgattcaatcacagaaacagatattaaacaacaaagtttacatttactaaacccaatcaatcacatctacatatacattaaagagaaaatcaaactatcgaacgatctattaccatacaaatctatacaacatgtctccaaaacgatctatgaccatacaaaactatagaaaatgcttcaagatatatc

SEQ ID NO: 42203 - DNA, 431 bp, Arabidopsis thaliana columbia
ctaacaacaataaatatgcgaaaaaaattactgtgataaagcatgtacatctgatagtaactggctcatggtcataattaaaatgaagataaaatgacaaaacaaggatcttaaagtgagaaaaataaccagttgatttctgtagacacttgttatagtatcatatagtcataattctttgatatcaatcaagtagggaatattattagtaagatggatttcgtagaccaaaaatatgatttcaatgtttttttgtcaataaagtggtagccggtggaaacctaacaaatattgtgatcgtgttgcattaatggtgaaaagaagttgtctcttaattagatatgtttcaacactaagtttaattgcaattgttagcatatactaaaacaatactacaagagtttttggataatttggaagcaagaggtaca

SEQ ID NO: 42204 - DNA, 312 bp, Arabidopsis thaliana columbia
ttattgtgaacggtggaaaaagtttggttatatcttgcccaacccgtatatagactaaacatgtgatgagggatgagtcaccccgacaaacccctagctagcatgccctttgtttctagtggttatggctgagtcataggtctagtttaaatcctaaaaattgtgtctaacataactaaactccacaaaatggttcatcataacatctataacgataacaactataaaacagtatatgtagtttaacaatatataccaacctccaatctgaacgtcctgatcatgtattctgtgcactgtaggttgtgtact

SEQ ID NO: 42205 - DNA, 412 bp, Arabidopsis thaliana columbia
atgatatgttttatattcaggacaaatatagtggaagctcatacgcaagtggagtctttgctcaaagctgagtactcagctgaagaacaagccaatattaatatgatctccattcaggatttgcaaacccaactcgacaatttcctttaaggtccatggctcaatcgatgtttttgtgatgtccgtgcttcctctggttatatcttatataatgactttgattcttttgactccttttagctactgtacaagagttcgctttagaagaatacatattattttgtatccaagaactcatacatcttggtctctctacattcgatcgatctacggtcaaaaagtgtagatcatatgcttatataagactagctatcaagttcttttttggttactgcttgcttcatggatgaat

SEQ ID NO: 42206 - DNA, 574 bp, Arabidopsis thaliana columbia
tgatcatgctgctgcagtgcacgctgagcgttaccttctaatctttggctggaggatcacatgcaacttgttttgatgatctgcacgtccttgatctgcaaactgtatgtcaagcttctattgtttcagcaacgctctttgtctgcttcttgacatatatgtttccatgttatagatggaatggtcaagacatacacaacaaggtgacgcaccaactccacgtgctggacacgctggtgtgacgattggggaaaattggtatattgttggtggtggagataacaaaagcggtatgtttctccttcaaaagcctctttctcttccctgcattttgattcctgcatgtgttgctctttatgttacatcactggaacttttcctgggggaaaaacttgatagttgcttcgtttttttgtttgtacagtgtgattaattgtgatacttgctggtactttaccgcaggggcatctaagactgttgtattaaatatgtcaactcttgcatggtcagttgtcacttcagtccaagaacatgtactctcgctagtgaggtatttaaacacatcccaacttat

SEQ ID NO: 42207 - DNA, 540 bp, Arabidopsis thaliana columbia
gttgtttccattttccagttattatcagaatttttttttctgtcagcgtcagaaccatgaccctcatctgaactgttcccctcgacatcaactgtatcagacccatgaccatcaatatcaactgcatcagaatcatgaccgtcaatgtcaacagcatcagaattatgaccctcgatttcaactgcactagaaccatgacctgggagatcaattgcatcctgttcaagggactgtgttgtcagtagaggctctctgtcaccatcactcatgatatccacgtcctcatcagaaccgtccttactgttagaagaagcctcactatcactgctgctcccactgtcacttccagctgcacttttactgtcactcccactgtcactgttatcactatcactgtcactatcactagagctacgagcctgggcttctctattctcagatcgttttcctcatgaaaaataccaggtgaatgatgctcaatgtcaacattttcctgcgtactcagttgctctactagatgcacaggtaaacagtctagtg

SEQ ID NO: 42208 - DNA, 1096 bp, Arabidopsis thaliana columbia
tgaaagtgaacgatcgactctaattcaagtgaagtaattctgctaactgcaataatctacattttataaagtttgcactttttttttgttttagctacgtttgaattcttaacttactatatatatattatttaaaaaagcttactatattaaaacatcttatatttattgatcaaccactcatgaatcgaattaaaagtacttccacatatatgtattcaaattgtttagataacttaaccatcctttacgtgacagcgctattcaattacaacatgggtcttacaacatttggatttattttgacgccttgttggtaatgagtttattagataattgaaatttttggtcaccgctgtccgctgcgatggtgtgtgtattattattaatcatgcatgcgtgtgagattgaataaattaatataagtcaaattggctgaaaacgttgtgacaaatactagagtgtctatatatatcaggattatgatatgcgggcatgtgatgtgtctaatgcgtacgtgtgcactcgtgtccacgtgcacatacacgtgcggtgtaccccgcgttgatagggtctcgattatttccaatcacgtatatcaattgtttttgtttttgttctttttgataaaaaaaatttttgttacttcacaattcacatatgtatccaaatgcaagcgacaaacatattcgcacgaaagagtcgaatgttttggttagtgatagaacattatatattgatcttgatcgtatgatttcatttatatttagggactgaattatatattatattgtaacatttaacatacagtatatcatgtgttgctagttatgatttacatgcacttcgaaaatggtatctgattttttatatgatttagaacttatctggcacacatcattgaataggatctaacacattaaaacactgtctaacttatttgtttgtatgtgtgtgtaaatcatcattttagctaagatttttaccataggcaaagaaatgactcaaatgagcaaacgagaaactgcagacagcaacatatatcaaactaactctaataggcccaatatagcccaataagaagtgtgaccgatgg

SEQ ID NO: 42209 - DNA, 596 bp, Arabidopsis thaliana columbia
  unsure (1)..(596): unsure at all n locations
gtatgtaagaaactgtcaaatgttttacaacaatggaaggtgatagtttaaattttctctgttcattagtttttttggatgtaacaggaaccagaaaaaacaagaaaccacatgatataattttcgctactaatgtctaaattaagacaaaattaacattaagaaaactttactttttgtcttaatcttaaacaaattcactgaatatttctttctacaaagaaaatacgaatatctcactaacaaaggaaacttaccactaacagcttctggtggcattaattactctgtaaattgccattttttcaccgagagaaaactagaaaaacaaaacaaaacatggaaactgtaacattctaaaagattcattgttaacaaaaccaacagagaaacataatactgattttccaggatttactccctcaaatctctccttcaaatactcttcctaatctcttctgttttcattttgcttgttcctgcgaacatctctctctcttcctctgtttcttgtttttttgccttttcttgatttttgtatttttttgttatggatatggacgagatgagcaaatgtagccangacacgacagaga

SEQ ID NO: 42210 - DNA, 500 bp, Arabidopsis thaliana columbia
agtgtgctctaaaggatcgaatcctggtgcaagtttgatacccgttggcaatggctgcggcacgtgctgcggcacggggaaagcagggcaaacagggttttcctgcttgacctgtccgaacctgaaccacttgacgaatgtcgcgatggcgggatggcgcagtacttattctctgctggtttgcttccactcgcgctctatgtttgacgtttgtgcgaagggtcgggtcgggtcggggttgaatgggtcggacagcagcagcagggttagggcacatgcgttgatgcatgcaaaagagcagagcacaggcagagcaaagtggattcaccgctacttcgagtctttcatggcttttcgcattttgtttctgccggtccatttgatttcgttggcttcgttggcttgactcatacctgaggcgcgtcaccatcataacatactcatagacccgtacatccacagtatctatttatgggcacaactgggaatatcaggatgag

SEQ ID NO: 42211 - DNA, 469 bp, Arabidopsis thaliana columbia
gtgcagagcaatgaagtacttactgttggaagaagatttgagctccattgcaggggacggagataagggaggaattcgaattttgacttgaagaagcaaggaagaagactcagaaatgtagccatgaatgtgtaataagttaaatagttaaataactctacgataacacaaatccgttgtagtctagctggttaggatactcggctctcacccgagagacccgggttcgagtcccggcaacggagtttttttaatagtttttctttttttttgtcggccgtccgattaatccattaaacgacaccgtcacatataacctaaccccaccaaatccaccggaacatatccaaataagtgataggtgttaatctcacacgtaggaggagtcacgtgggcacgtgcgagagagcaaaggtctaaactttatggtttaacgaccaaccggaaagttctggcaattggcaaggaa

SEQ ID NO: 42212 - DNA, 1427 bp, Arabidopsis thaliana columbia
cctgactcacaaatccgttgtagtctagctggtcaggatactcggctctcacccgagagacccgggttcgagtcccggcaacggagttactttttttcagttacagcgacccaaatcgttaaatgggctattgggctttagataaagctcaaatttccacgtgaatctgtattttttttctttcttaaatctaaaatatctgcagacgtaaaacccatgtaaagttatagttcagcccatgttaaaagcccatgtaaagttatagcccacgtaaaaaagcccagcccaaagataagttgggataaataatattgatgttctcgattgctcgccgggatcgtaagaacagaggatttttctcggccaagttttctctagctcaggttcgtcgtcttctatcttctctttctcctcctaattttttttcatttttgcttatcgtcatggagacgtagtttagattcaatccatgttgttctagtttttggctggtttcataatctgtggttgaatattattgttaggttaaaattcgatttgtgagatctgttagttagattgtacatgacggtgcgaatttattgaatctgtttaaatctattgaaacgtgaaacgcatttgagtattgtgaggctgaggaaatttctgaaagtggttttgggacgatgatgctggtgttgcggagtttgccataatcagatctgtatgtatgtgggtttcttgataaaagttgtatgaggaaggcattggagatttgtgttgaagaattgatgtatgggagtatgaaggaggtaatgttgttggtgtgtgtggttgatgttggcaggtgtttgatgtgaattttttgagggaggggaatgagttcaatgagcagaagcagaagtcgaagtagaagtcgtagtcgggatcggtttcgtagtcggagtccgagagacaggagaatgagatctgaacgagtttcttaccatgatgctccttctagaagggagagggagccacgtcgtgccttcaggtctttctttttttatgtcttgaccctttctccagtagttaccgtaacaaatccatctctccttatggctctcttcgttgtaaccttctcagactaactgacatagaggttagctataatcctaagccgagctggcaatatagccacaatcctatgcttatagccaacatagatgctaatcgagtgtcttccttgattatgacttagacatactaaacaacttttcctctctccaacctttttctctcttctactctttatcaagatggtgtggttagaggaggatcagggttaatttcagtgttcgtcttcaattatttatttgattgaactaatagtgttaggttggtttaagttcaactgtttgcttacatacatactttttgtatcgattcgtttcaatgtcgtgacgcct

SEQ ID NO: 42213 - DNA, 1484 bp, Arabidopsis thaliana columbia
acatatgtgtatggctatcagaatgttgcttttgaggtaatgcatttttgtaataaccctagattcagtaactttgatccttgttatatacttgcagactgttaagtgaaactttatgttgggttaaaatatttgcaggtgatgaagaacggtcatatagccactataaccttgttccagtcatgatgcgtatccaccgctgaggtatatgcccgttactaattcttcgtttatgttgaatttggtcgtaatgaatattcactgtttggttttgtagaaaaaatggctcagattaatgtcttgtgttatatgctacttaacaaagcttcttacatcaatcaatgtctttgtaggggctcaagatgctatcttcaaccagactctgtaaatctaacgtcacaagaagctacgaaaactatcgatgataccgaaacgacaaatgttgtacagttatacgactgtctagttactatcacccgggttataataacagttattctggttataattcttttcagactttattatgactaattatatatcatttatctgttaaaagttcataaaatagcctcatcatttgagttttttgcggtatcgataaattttaaggttttaaaaaaagaaattgaaaaaacaaaaaaaagctccgtcgccgggactcgaacccgggtctctcgggtgagagccgagtatcctaaccagctagactacgacggaatgttgcctactgatgacttaaattttatatagcacactactggtatagtcgagaaggttgtgcggtatctcttctatccgttgcgtacgaaggttttgtctttcgtgtatggttccgggaaggaaaaggggaagtggattgttttcatcggcgataagtctcttctcctctggtacttcttctttcgattctcttctcttttgtttcgggttccacttagatactctgtagctgctttcatttcagaattggcttttggttcaatccattggtagtgcgagaacttgaattccgaaatagttccgatttctcttcagattttggatgttatcttgctaattgagtttagaatccatagtaatagtgcgattattgatttagcggttgtttagggtttaagcctgtttttcatttgattttagggattgaggttggtggtgtgaggtaaagcttcggtagttagagatgaatgcgtccggcttaactgttactccgcccagatttcactttcgatggcgttctgatcgttttggtacatctcagagaagctctcaagcttttactgttcttagcaaattgaataatcgaaattccgcttggcctgttcttaaaaggtagtgttttttggttattgtttcatttagcatatgctagttctttcttcgtggttatctgtaatgttctctcttcggtgttgcgcagtctcgtttggcgctcctaccaaagaagaatctatgatactcgtgcatgagtgttctttggt

SEQ ID NO: 42214 - DNA, 564 bp, Arabidopsis thaliana columbia
taggatactaaaattatgtcaattcagatgtaaagttgtatcaatttattgaaaatactagctactatatgaaaaagtttagaaatgtattggggaattaagttttccgaaagagagtgtttaactaatattgcctcaactcgttttatgaattttcaaatttttagtcatgtggatatggaaatggaatagaactgaaatacattcttctaatcaatcataatccatacaaatctgtatttttactcatttgtatttaaatgtaacaaccacatacataatcccaccttaagtacatgattaaggaatgacttttcagcaaaacacacctcaaaattctcaaattcttgtcagttcaataaaacaatttccttgaattattgtcagacacttaaaagatttgtatgcatgtaactgctggtcccgtattaatatttattgcttcattccttattactaagcaacaaaagtcacgcgtgagatataaaagaagatcctttgcagtttctctgttcttgctccttcttcttcatctccctttattgatactgtctgagtaataat

SEQ ID NO: 42215 - DNA, 557 bp, Arabidopsis thaliana columbia
ctttcacttcgacccacagacccaaaacgttaatacttagcgagaaacagagaaagacaaacctgtttacaccacttggcgagggcattgaggcggacatccgttgctgagtcttagcgacatacttaaggaggctaaccttcttctcagtatcagaaagctccgtcgacttagacttatccacaagttccttaaaagaaaggaacgattcctctgcggctcgaccaacaagagcagagaaatccaccgtctgttgccctaattccgccatcgcggagaaagaaacaaaatcgccaccacccgattcagaaacttaggagatctcacgattcgtaaaaaattagggttcttatcctccgcttcccccaccacgacgacaaaagcacaaagcttcccttttccagcaaccggatttgattcggacaagagagacagagaaaaagggtttaaaattgaaaggggtcagggaagagtcgaacgcaaaacgttgaacggaagatgacaagaaacaaacgacaaacgatttttggagaaatcggctgaagaagccttttttt

SEQ ID NO: 42216 - DNA, 513 bp, Arabidopsis thaliana columbia
ccaaactaggaattatgctaggtatcgaattatactttccctacataaataataatcagaagttaaaagctccaaatgattaaaaaccattactgtagagtctgtacttataatcagtactcagtagctacataatgttttcaataaataaagaaattccttaaagagtttttgacacttagttagtaaagttgcacaaataaaaaggtttagaataagtagcaatacttatgcaaacaaaaactgtatataagaacatacacttatacgtatttttgtagatgcgtacaaacctgataactaacttgagaaacaggtatctaattattaatcgcgtaaaacaataaactagaaacaaataaatgaaaatatacatgcatatgcattaaattaagtgagccaacacaataacgatacaacgtacacgtataacgaatacgacacaatcgacagcaacactcacagacacgccatgaactgatactgatacaagtctccgtcgacaagccacgt

SEQ ID NO: 42217 - DNA, 535 bp, Arabidopsis thaliana columbia
gaagttaatcagtgctcgtgatttgttgtcggtccatgcctcagcgatgatagtacagccggtggtgacccactccttttcagtgtctttcagttgtaagctaatatctgacttaaccctgtccagccattcagtcttgggagaaggagcaacaaatccaggaccacacttggcaacggcgtcgagcatatggtgataagagggtgagcgggcaacagcgaagtcaatcttgttctcaaagaagaagagagaaatactcctctctgcaatgtcctgcgcattaggaggagaactaggaaagactagtttggacgcaggagcatcaaacggaggagataaaggtggtggaggcttgtacttgttggtaatggggggatcaccttggcagataaaatggaacgaactctatcagtaacatcgtccctaaccttggcacatggattaaccctttactgggaaggcgagagagatgatgcttcaatctactaatgccgccattaagaactctagagcaaaacttgcatttaaccttgtt

SEQ ID NO: 42218 - DNA, 844 bp, Arabidopsis thaliana columbia
ttttgaaacttagtaacgatcaaaaagaataagggatttcgtcacgtaaattaaatagaatctgtatacaggtcatttaaaaaaatattttagtaagatacacaggcacagctcaacgtctgatcttggtttgtcataaacagcagagaattctaccacaaggaagctctggtactatctttctcattaagcatccgcgactacaatattccccaatttattaaataaacttttccatgatgcaaaagtaccttttattaaacactacgaataaataaataaaggtgaaacacccatttcaaagaaatggtaacgtgtctttttcattaggcgagactagccaatctaagcaaacagagtcgtctttatatctaaacgaacattttgtgaaagaaagagagactaaggtgaatccatggcgtccaagattgtctcagccatagtatttgtgtttaacctcattgcctttggtttagccgttgctgctgaacaaagaagaagcactgtgagtcacatctccacagcgatatctaatttgaacaagatgataattatgtgatctatcttaatattttggagttaaatattttttggtggggcaggcaagggttgtgcaggacactgaggtgcaatataactactgtgtgtatgactcggacagagctacagggtatggagttggagcctttttgttctcagtggctagtcaaatccttatcatgctcgttagccgttgcttcttgttgtggaaagcctctcaagcctggcggttcacgcgctcttgccctcattctctgcattgttagctggtttgctatgacactcaattagtacacacatatat

SEQ ID NO: 42219 - DNA, 545 bp, Arabidopsis thaliana columbia
tatgtcatcaactgatgaagttaatcttctgaagactattgtctattgatcatcaagataatcacacaatgatctctgtttcttaagaaaatattccctcttttatcttagtcaatgaagaaattcggatttggacatgaccaagaagcttgataaaatactagctagaacaccgtattcctctcttcgtgtcgcattcataaaccacacaaaaaagaaaaaagaaaaaaacttctttaataagagtaaaatagtaaatgaataatatttccttctgcttcaagcaatctaagaaccgcgttaattaactttaagtaataagctctacttttcttctctttatttcagttatatagaagaagcaattgtgatgcaatctagacaatgcgatcctttaattagaaatcttgtatcagacagacttgttcattattttgttggataaaaatggtgagtgttgtgggagagatgttttgtaatccgtacacgacggagctggtggtgagaaggcggcgtgagagcctgaaaagggaacgctacgacgt

SEQ ID NO: 42220 - DNA, 627 bp, Arabidopsis thaliana columbia
ccccgtacttattctcagagttattttattcgttttccttcttttttttccattgtcgaaattatttgtaacgttgtgcgatttatatatagaacacaaaaaccaacttgtaaaaggaaaataacaaaaaaaaaatagaagtgataagcactaaaaattgatatattcttaatatttcaattaatcctaatttacgagttttttttatatataaaatatgaaatgtatttacatgttggacacttggggctgatttttttttttttttttttgaaatgtttgaattatttagcaaaaccattgtaatataatataagatcttccttcatgtagagaagtgacactatctaaattagtcgatatgtttcgaagatgtaaatttagcgccaaaactagagtttaatagttttttaaattataaaaaaatgagattaccacaactttaatgcaaaaatcgattttaacgtaaaataaaaatacatctataagaacgatgacctggttaataatatagttgagatatctttgaatttatataatagttttggatccaaattccaaactatcgttacacaaaatgcaacagcagatttttgcattgacatgcacatgattaattttagattt

SEQ ID NO: 42221 - DNA, 454 bp, Arabidopsis thaliana columbia
taatctttatcaaactgcgcatttgagctattatttggttatgtttgtgattcagtcctagtaaatctacttattaattttccttgagagaactgataattccattgaacaatatgacggcgatgaaactcatttttttcttaaaatggaaagaacacttgaagcagagcaaatgtgaatgtgctataaagtacttaactgcttgttggttgtccctttcgactaagttcacgaattactgcactatggcttctgaataaataatacaatgtactttgaatcagtacttctcatgatagtggataattatagcacattttgcattttcaatcacttaaaatatgttgtctgtgactttcttctgctatattcaaacacatcgcatatacatttacgtgaatttatacacacatactgcatgctaataaattaactattggtctttctggattta

SEQ ID NO: 42222 - DNA, 445 bp, Arabidopsis thaliana columbia
atcaagatgatggtgcgaggaactaaattggtagtcaacataaaattgaggatttaaatcaccaagtacatagttcatgctttaaaccaacgaaaatggtaaactaatgatttaaatgacatttttcccaatgtatatatataatacccccccaacactatgaatcatgatagttcctttcccctttgataatattccggacatcaaggcactaacaaacatggcaaccttatgacagtataacacaatttacataacacaaaggttaagaccaattagtttaactaaaaatgaatgttatcgaatttacaaaattatacgtgatttgaagtattccattatatacatttttcttgggacaaattccattacatacatgtttttctttgggacaaattccattacatacatgttttttggggacaaattccataaacaaaaaata

SEQ ID NO: 42223 - DNA, 456 bp, Arabidopsis thaliana columbia
cgttaacggacaccgtctaaccaaaaccatttcgtctctttaataaagaaacgagcctctgaacccccaaattgattttagaatctcaatccctaagttgattttgattctgggatctcaaccacttcaggtggattacgaatgtttgcactattatcgtagcctgccataaccattagtctacgcgaccgacgaggattccagtttcctccccgcgtcttcgtcatcgggatcaattgacaagtgattgagagaatttgaaaattttcaattttagaattagggattataatcgatttggggattgagcttttgtctctaaaacaacaaagacattttgtcttgttttggctcgttttgtttttgacgaaacgaagtcgtttcggttaaacagtgcgcgttaacggattgttaatcccgtaaacatcgttctagcggaaacttaacacgatgact

SEQ ID NO: 42224 - DNA, 541 bp, Arabidopsis thaliana columbia
aatacaattctagcatgaataataaacatgtatcattcctcggagatgagccgtaccgaagtagttctgaatctcagatatgatcaatgacatgatgacgagtcgcgcaattgggcaaacgtcacgggagcatctgatgatattcggagtgactcatgtatttggaccaccagcaaaggtttcgagagagttcgggcatataccggagtaccgggggcttactggaaccccccggggagtatatgggccctaatggcctttggtggagagagaggggcagccagggcaggccgcgtgccccctccccctctggtctgaattggactaggaagggggggcgcccccctttccttcctccctctgtcccccttccttctctcctagtccaactagggaaggggggaatcctactcccggtgggagtaggactcctccaggggcgcgccatagagggtcggccctccccctcctccactcctttatatacggggcaggggaccccatagacacacaagttgatcattggtattttagccatgtg

SEQ ID NO: 42225 - DNA, 756 bp, Arabidopsis thaliana columbia
gaggatcccaggtgaagatgagatctaaactctgtctccctgtaatctaatgattagagaagggagaagagaatagaaagctcgccgaacaaaacccacggggagagagaaaaaatttctctctctagaggatgagagagaaccctgttaatgaacactgtataaatgatcgattaatctgaaaaactatcccaaaacagtttcaccaaattttctataccaaagcttttttttaaaaggttatatacttagaatcctagcctctctgttatgtgtggctatttatcgtatgaacttataccatatgtttgactctaacttaagtaataaaagtagacaaccagtaaacaattcatgtgagtttacggcgttttcctcatatagaatttcgtacacacaagtattataagtaaatcgaaagtgtacgtatattggtgaattttgaacttatttgtaaaaactgaaattgctatatggaatgcatacatacgcacataaattaatatgggaaaatatcaaaaaaatcgccaactttagaaaatgggacgaaaaaattatcaactcctgaaatgtcgttttaatcatatacttttgattgacttttccaggaaataacaagttttgttgaccagaccaaattattcatcgcgttaaaacgatattcacggggttaacaatccgttaacggacaccgtctaaccaaaaccatttcgtctctttcatacagccaacgagctctgaacccccaaattgatt

SEQ ID NO: 42226 - DNA, 2522 bp, Arabidopsis thaliana columbia
actgaaacttactagattcaattatatacacatgatgttaggacacttcaaatgatatgttcgaaattgcgctaagcctgaaggttctatatgtgagcaatatttagctgatgagtgtgtaacattttgctcaatgtatctcgatgatatagagacacgatttactcggattggccgggttgatgatcgacctctagctgagactagcataaacccaaattcagaacttttacttttatttccaaaccttggaatagttgttggagcgggtaaagtttatactcttaatcatgtagagcggcaacaagcacatcgacatgtattggtcaactgccaactactagatcacctacgggagtaagttctcttattcaagaacaactaattttatttatgttttattgaaattcactaatgtagacgttatggttattgtatgtttaggaaatataaaaccgagttgttgaataaacaatctcatcaaagcaggaggaatcgtgttatcgatattgacagagaaatgcatcttagttttgcaaaatgaatcaagtagaaagtaaagacaaaatgagttagatgagctaactgatgatatgatgcttagctctgggtccatctgaaaatgttttaaagtataaagcttatgatgtcaatgttttcaaattccggacaacaaaaagagaatcaaacctgaaaacacaaaatagtggtgtttttgtggctactgagactacgagctatgctagttctcgtgatcctaacccaagaaagggaactgtagcttactatcggaatctgatcaaagttatagagttaaactaccatgaagttttcaaagttgtaatattcaagtgtaagtgggcgggcactcttacagtaaaaggatataaaatagatgcatattgtaacaccctatcccgctattaaaatataaacaaaataggagcatcacgatagacgcccgcagtcggccaacccaggttttcgaaacaaattcgtttgcccgagtcgtcaaaccgtaagtgtccagcctctcgaacatggcctaaggcttttcaacccgtattgcacacgagtgttgtgtaagtcagaaaagactaatatcagtcggtctaccatataaattttagaaatttgagtctttatacatatataccaaatcgcatatagttttcgcatcctctttgaaaaccatacatcatatgcttagtaagaattttacaaaaagctgtaaaacctacatcggttcgtcctaagtctcttgcgccctctacaaggctggtcaactaaggtttcctgcaaaataagtagcgtcataagtaatctagcattacttagtgaaccccgaatctagatagagttaacctaatacccttacccctaagcagaaatcaacacacaataatactacgagctaacaaaaataagtacgagttatacaagcaacgcacaatcaaagatgacacccaacacacaatgcaagcaaaatgtaatgcacaatgtataatgcatgcagactcaaattcctaatatgcagcggacaattaatgcaagcatgcttccgataacctaggtaaggccttctacgaatacatgctatcccgaggcaatggcctacacactcatagacacagagtctaaagaagatcgtcattccttatactacatcgtcatttagcgcctggtctgtagcgaaccagccccgagcattcgtatgtcataacggaacgaagttacacgcgacgcacagcctatgggtggaataacaagatccggctaatgctagttgactaactaacatgacaacagactcacatactatcatgcattccatcctatatgaaaaactttactaatcaaacaactaatcgtacttaattactactaatccttgtttagctcaccctaatcatgcttaggaaatactaatcctaattagccattactaatcataattaacaattaataaacctaattaactatcttaatcaaggattgagcaaataattaagataagtagttaaaattaacctcctaagctgaattaaggaaataagtgaattaaatatcctattcacgtgctacttatcgtgacttgagactcacttggattttccgagcggtttaggcttccgaagtttctcagcgaactgggattttctaactattttagatctaggaacaaatgggcggaggagggagtatttataaggtcctaaagtcggctattatgtcggccatggaagcacgaggtgaccttggacgaatcaaattgcggcagattttgtcccacaggcgcttcaggacactaatcggcctctgattggttctttcgagtttttcggataatcatcattcaaaagtggataagctcgaccctaaatggataaggattatcggaatgtagataagcatcggacctaacggataagcttgagccactattcaatcatggccgtccattctctgatttcggcgaaacctactatttatcaccggtccgcaagaacattgagacgaca

SEQ ID NO: 42227 - DNA, 990 bp, Arabidopsis thaliana
tcaactataaacaataaatgaagatcaaataatggaagtcttatcataaaatcattaaaaataattaagaaaaaacatctcatcgaaattataaagggaaaaatgccttataaatcctcaactttttcattccgttgaatttaatccccaactcgaactaaaacgttttaaatactgaactttagtttgactttcaaattaaataataaactttaattgacgaagttgttttaagcacgacgttaattgtataacggaacaattaaacagagttatatttctgttaataggtactgttaaaccttaatgaggtcatttccttcacattaaaacgacgtagtgtgctgcaaataataaaaaccccattatcgatttgattatcccaactaaagaaaacaccaaattgaaatcaaatccctaaccatataaatcgaaagctttctctgaacattagattcgttgtaatgacgcgacgggaatccaaacgaaagaggccagacgaaaaagaaaaaagagatgttgcccagttcgtgagaaaacactgaaagtgaggctgtgagtggagacgactgtgaagtgtgtggcgatgaagattgtgatgatattaggtatgatgatgaggaagacgaccgcgatgaagttaacgaaacagaacatcgaaatcgtttaggagtagacgaacaagtttgcgaagactttgtagcagaatttggagaggcagcgagggatgatgaagatgtgagtgatgcagatagtggagatgaaatatgggatgacgagcggattccagatccattgtctgatagtgataacgatgaagatcttgttgatggtgttgctcgtactgaacccgaagatcttgaagagttgttaaagttggggaagacttttagttgcccagaagatttcaagattgcagttctaaggtattcactaaaaactagatatgatataaagctctataggtctcagactctgaaaattggtgca

SEQ ID NO: 42228 - DNA, 521 bp, Arabidopsis thaliana columbia
aatggctcagtaaatctgaaccgtctatatttatgtaggtcgtgagattaacggtctagatctgattataattcgttttgtagggaaactgaagctgtgtctgacagagcgaaaataatggagctttgctatgtattgtagttattattaaagaaaaaacaaaaaactagccactcagaaaaaagattcgatgggacagagagaagttcggaagaaagaatttagatttgataagaaaacaaaagaatgtgtttggaaggcgcgtgatgaccactgaccaatgattcgctgattggaaactgtactaatacgagctgtttgggtcaataatggagaatcattaggatgtgtttgattatgggcttcttaagccagatctgaaccgtcaatgtttatgtaggtccgtaaatatattgcctttgtggattattagttggtttttcgattttttttatctctatagatacttaataatttttttagactgaatagttggcgggttgaccaagaccgtgcagtag

SEQ ID NO: 42229 - DNA, 919 bp, Arabidopsis thaliana columbia
tctataatttacaaagggaaaatgttagaaaaatcttcaaccttcaaaaattgcatggaaaaatttccaactccggaaatgtcgttttaatcacaaaacttttggttgactttccagaaaataccaaagtttggttacctggccaaattagtcatcgcgttaagtctctgttaggacgatgattatgaggttaataagccgttaacggcttccgggttagcaaaacgacatcgtttttgtaatgacagatgagactctaaaaacccccaaatcgatttcagatttcaatccctaaaatttctattcttcaattcgatctctctctctctaacaatgagttcaagctctgttacatctggagtcaccggagaatgtgatgtgccatcgaagtgtgtgtggattggggatcacaatctttacctccactgtcagcatcagtgttgcttgcatctccatcttctcttgcaccaacaccaaaatctgcttcaaaatcatcacaattttcctcctctagacctccatccatatcgtcttcaccaacattgtcttcaccaacagtcccacccacattgtcttctgggtttcgattcgtcgcagtttcttctgggtttcgattcgtcgcagtttcttctgggatctgattcatcgcggtttcttctgggttttgatttgtctccagttcttctgagatctcaacaactttcggtggtcgattcgttatgtttgctctgttacgttcgcctgcaatagccattagcctccgcgaccgacgaggattccagtttcctccccgcgtcttcgccatcgggatcaattggaaagagattgagagaatttcagaattttctctcttttagggtttctaatcgatttgggaatttctcaaatctctctgaatcaaaacgacgacgtttctatc

SEQ ID NO: 42230 - DNA, 570 bp, Arabidopsis thaliana columbia
atatgcaaatggaagctaacaacaaaataaaaattaaaaagttgaataaataaataaaaatgaataaataagttgaataacaaaaaaaaattgaaaaatgaatgatgttcattaatgtattcgaataatttttaaatgaataaaataagtaagaataattttgaaaataacgaatgatggattgtgtaaacaatttttttattgcgattccaaaatataaatataaatttaaagcaaatattgaatttggtattattatatatcaaaaatatgttcataatctattcgattatgctaatgattactaaataaaatttaagcccttgttttagcatggttgtgatctggtttccacatttccatgttaatactataacaggtgtttagggttgggtggacgaccaacaaaattgcatgtcgatactatctcgagaaacgatatgaagtaatgtttggtaaaaaaattgtatttatggccaaaaagataaatgtaagcttaatgcagatagagcggggacatacaaatgatgatctctattaaccgaaccacaaaaaagggtacaaaacatg

SEQ ID NO: 42231 - DNA, 555 bp, Arabidopsis thaliana columbia
gaaagtcctagaaacaccacaggattcatcaggagatcatatttcagcaaaaacagttagtgagttaacaatgtagtaccatagctttgcagaaatcccgaatttgcattttggaattccgtgtaggcatttaacctctgagtaagaaaaatcttcagaagttggtaaacaggtgcatatttagcatccttttccaattgtgctacggctggcaagtccaataaatcacactgcaagatttaagattgccatcgttgaaattccaatcaaatataaaagagcagtgtcaggacaagaaagacaaatccaattcacattatgatacctggaaaatactggaagctttgacaaattcgataactgcacgcacagcctcctccttggcttcatccaggacctgagcatcctcattggagaaagttgctaggtacttcgtcaagaacttaagggattcattcaccaagctggagtattaatagaaaaaaccatgaggctattgttatcccaaacggaaacaaaaaaagaaagagacagagaatgactgatgagcatagt

SEQ ID NO: 42232 - DNA, 551 bp, Arabidopsis thaliana columbia
ttgcacttttcggccaaaaccataaaattggattattgcatttttccgtcaaaaccgaaattgtgtcttctgccagtacaataaatttacgattttggccggaaattacggaattacgtttttccgccaaacctaaattgtgtttgtccaccaatacaacaaatcacaaatttggcgataaaattgcggaattgtgtgtttcccgccaaaactgtaaaattgtgtttgcataaaattgtgagttgtgtttttcctaatatcacgatttactttaggggggggggggagggtgtaattatagaaaatcatttatccttcaaaaccataaacaatgtaataataaaataatttattaattttaaatattttataaaacccatataaaaattagaaatataataatttaaaattatttagctgtagtcgaatttaatttataacatagaattaaaatggatgtcaattttagtaattgggcatgctcatatggtccgcggacaaaattggtcatatgcccaataatttgtccatttgttttttgtctagaccat

SEQ ID NO: 42233 - DNA, 458 bp, Arabidopsis thaliana columbia
tcgactttttttgagacatactgcttcgccagtcatgaggcctgcgtcgaatgaatctgcaggcatggaggatgccgaagggaggttctctgaaaccgaagaagaacgccattgtacatacactcttgtaaaagaagtctgcgagtgaggaagaacatgtgtgtgatctgtgttaaaaagaggcacatatgaaggatgtgaatcgtcgtaacacgtaagggattatgttacaaaagagtctgtaataatatgtataagctttatttcgacactttgatgttctgttcttgatacttggatactctgttcttgaagctaactactttagacattgatcttcctttttacccctctctaatttgatatatgctcttgtattactcatactgccccaattgtaacatagaagcttaaaaatgctacataacatgcagccaacagaatgaggatgacctgaa

SEQ ID NO: 42234 - DNA, 260 bp, Arabidopsis thaliana columbia
atagttgtctaccatattcttcctttaatcaattattcaacaaagggaatcttagtggttaacccctctatgatttggtcttgcgctaatgtttgttaatcaacatatatcgcattcaacaaaatcgactataacagaaactattagactaaatgcttattaatcaacatatatcgccgaaatcaacaatgacataaactattaaactaaatgtttccgctggactatctttaactcccttaaggtcacataacctctca

SEQ ID NO: 42235 - DNA, 535 bp, Arabidopsis thaliana columbia
gaggatacccgaaagataatttaggtaaataagaaggaggaatgtctgataagacttcctattaaaagccattccttgcagcctttgaccaaatcttagcccttcgttgtgtaactctcttttcaagacacaagcacaataaatatgaacatcatcacctaaagatgaacccaagtttttaaaaacttaacccaaatatgttacttgttacatacaacagaatttcattttgaccaaaacaaaaggattttttttgtattacgccatcagaatttaccaaaccatggacgaggccattcaaatattgtgtgacattaccatttctatttgaaaaaaaatctagactggcttctttcttagttatcatcatagactcatagtcatatatattcaatcctaagaatctaaagattaattatgatcctataaaaacccctttaataaaacatcaactctaacaagagagatgagaggtgtagaagttgtttttttaataaacagctcatatcttcttctttcccccgacaagttcggt

SEQ ID NO: 42236 - DNA, 481 bp, Arabidopsis thaliana columbia
gacagactgagagatctaacagacatcgacccacttaaccactgaaccgtcttattgagtaatttaaccggaaaattttactgaaccagaaccttccaattgaagaagaggctttagtgaatcatcttcgtcatcgatcatcagattcttcagattcgcaagtggaaactaagaatcgaccaatcgtttattacacgaatacttacttataaagacaatattaagtataccagatatttttattccaattaaccgtccaaaatacagatagatagccgttttattttaatttctccctatcctacagagtgaaagtcgccagtatctctttgtactccctcgctatctcgaaagagtcgtggatgactgcgtcgctgcttctcctgtactcgaactgaatggtagagtgatcgacgacaattaaggtgacgacccatagtccttgtcgccgagcatgctcagctggactgcatgcaagaga

SEQ ID NO: 42237 - DNA, 508 bp, Arabidopsis thaliana columbia
tgacaacatctaaagtaatcttctcttattggttaggtccactaatcatatcttggataaatttcttcaagatggttagtcggactgatattacatccatccctatttcaatctatcctgtgctatctttcttgacatagttaatgtgttacttggtaggctttgtttcgctcctacaacggccaaatctatgggcgagtttgtggtgagtccttatccaattaatgtttctttcaaaataaacaagtgatatagtttccattcgcactttctgagagtttaatctcaaaaatctgaagaaatgcaatcgtgcaggtggaccggtagtttcaacccttgccaatgctttcagtccactatactttgaggtcacagaagcaatggaagtaatggccacagaagaaccctgcgatgtagcgtgcaaattcggcgatgggcttcttgctattgaagattaccacaaggcttcctcgaccaggtaagactcattgcttatacttacttgaga

SEQ ID NO: 42238 - DNA, 497 bp, Arabidopsis thaliana columbia
cgatcatatgatgaggtttctataatttcattgaaaaactataaccagaaaaagccaaaccaaaccaaatcgaaacgtaatcaacccgaactaaaatttgtttacagactaattggttttattattctaacacccccgctaaagcaaaaccaaagccaaaccgtaaccaatttaaatgtcacaaaactaaaccgaataaaccaaaattcatggtacctgtaatcaaatcacctcttagattcggtccggttcggtaataataaccaaacaaaaattctcaatttcaatttcgatagaaagagttatggagtgagagagaaaccttggaatggtagagatcggagtcgtagatagcaagaagctgagcagtacggcaaccacagtcgtagccatggcgaatcgctacagctccgacgtataaaccaactccaagaacagacttatccatagccactgtctctttcgtcagtcttatcgtatccaaatgcagaaccaaa

SEQ ID NO: 42239 - DNA, 565 bp, Arabidopsis thaliana columbia
acgattgatccataattccctcacaatcacaatcacaatcacaatcacaatcacaatcgattcagtttcaatcaccgagcaagtgaccgagaagctttaccaaatccaaaaccaaaaacacccaaatcgaatctgtagaagcttctacgttgaaatgaatttgggatttaaatcagcttcttctacgttaaagctttgaattaacgaaagcgactggttaaaggttcgctcttttttttcgcatgtttatctgttgtgacagtagctcaacgaataagaaagcgcgtgttttacacgaaccaattataataagcatctgacgccagcgtttctttgcagtgaaaaaaaatcttaaaaacgtctcggcgttttcagcttactaaaacgtcacgatgttcatatcgaataaagtaaagcggcgagatttgcaaccttatttctggaaccgttagaatatcaataaactccttttagtgttcctccttttagtgtcacccttttagtgtttactgcttcgaattttgatttgacaaacgactcttcactctacaaaccccgatggatg

SEQ ID NO: 42240 - DNA, 498 bp, Arabidopsis thaliana columbia
aactttcgaaataaaagttgcgttcttttgaaagtacaaaccgtttttctgtagatgcgcttgaaccgtcctacttgggacggaaatcggaacccagacgaacttggtatcgactttgtcagccatgacattgaaagaacctgttgacctattttcaaccacaaatcaaaatttcgtatcttagttagattagatgggcccatgcaacaaatggcgctactacgacccttattattttgaataattacatttatgtagaggcagtaaataatttgtggagaatatatatatttagattttatttgataatgaatctaataagacttctattttcagaaaataaatattgagtttggatataaagataactaaatcttatctcctcaattaaatttaagataaatctaaataatatttcagagattaatgtaaatattttaaaattaagatattttacatccttctcactttctcagtattcgatgtttcataattttg

SEQ ID NO: 42241 - DNA, 638 bp, Arabidopsis thaliana columbia
ataacttgagatgtaagctactattatatatgatctttgattattcttgggtggaaatggtcacgtgtttcttgataattccatgcgttgtataaaacaatttatttgattcaatgccggatgataaactcattacaagtatatcatcccgcatacaccagaacccaatttagttctttcagttcctctgcatcagaaatgaacaaaaatgtattctattaacatgtagaggtatttgtattcagtggatgaacactttctggttgctcattccgcttttctggttactcattccgcttcccggatactctcgtttggcttttctgaaatagaggaattctgaagctgccctaacaggtattcatcagtttgtgagcttgttcatctctctgagattccttctcgaggtatccatctaacttggacaatgataaattcgttattcagtggctcgtaaactgaaccaaggaaacgagttagtattcggatcatggaacttatgctgtccatcgcaatattgttgatcattcaacaactttggaatctctcctgaatggcaattgactcgggagtctgtagtgcatacttaaattcaaattgatttttagacaataatacaattttttaagaaataaaat

SEQ ID NO: 42242 - DNA, 493 bp, Arabidopsis thaliana columbia
cgaataacatttgaatttaaaataagttgcatgagacagccatcttcaacgggtaatatgggccacttagaaaatactgagaggtcatcacaagataacttaagatagctccacagtacccttatccattctactgtcggatgtcctcgttggccaggtgtccaaagtatcttttctgagagatgccaatctgctggcagtagcttaaaaaaaagcttctcaagcaaattgcaagagaggagacatatgcatgattctccgctttgagctacagccaatagcttactataaactccttccggcacttcgcggtccacgagttggtgaggaagtgaatccttcaaaagttcatacccaatctcttcagcgaaaaagattctctcagcagtaccattcttgttaaaggttgtaaatgaaccatcagcaagaggtagcaggggtagaccgtaaagaagatccgcagaaaaggaacttttaaatcaagaagacagta

SEQ ID NO: 42243 - DNA, 553 bp, Arabidopsis thaliana columbia
tattggataccgaagcccaatacctatccaagtgggtaggacagaattgtccaaactcataaggttcattgccaatttaaataaacaaaaaagcttcgactacttcggcttgattaatacttagaaaagaaaaaatactttggcttgattgctttcaccagggctagctaaaaagcatttcatatacaccctttctagaatttatagttaagataagggtccataaatttctttggctttaaggctttaaattatattagaccaacccttggctagctagaatggaactttagatacgtgaagttgatttatgacgatagaaggcttttgtttttatttttatccgcgaatttcgggctttgtacgtgtccatggactaaggaccagagtagggtaaattagccctcatcgaacgggagagctacgtttcaacgcccttcagactgaaccaccaaacgaaagcacgcttgggttgaaggctttgatgaacaaagcagaggctagaagtttatttctgacatgtcacggggatgtcgtcattgtcattgaatga

SEQ ID NO: 42244 - DNA, 306 bp, Arabidopsis thaliana columbia
attatttgaattgaatttccatgtaaaaacccctaaaacttgcaacaactttgagtgtctaaaagtaggggaagcataaacagattcacttccccacttctgcatactcttgtatgtaatatgatccggcaattaacgtatgtaaaccctggttctaggctcaggactctatagagttacgtggctatgatgtcagactgtcatcatgatcttgggttgggaaagaattgcgtaccggccatgaatgtattgatcggagttgggtaaagagcggccgggtcaatgtccgtggctgatgcggctgat

SEQ ID NO: 42245 - DNA, 534 bp, Arabidopsis thaliana columbia
atattcaataaatttatattggacattccatctacctgaaaaaatttattttctttttctgattcatatatatgtgataaaataaattcgatgaatggtagatgaatgacaatgcatcatgaaaaaacacgaacaaaattatcttcattttgtatgtcaacacttctcaccaaacgtcttattcacttaactcattcaagagaacgatcatgatctagtcatttattaccttatattgaatagtcattattccaataatattagtatgatatttacagctaaatattatcaattaaatagaagaataaggagtggttgtctttgtataatcgacaatatagccaaattattggacctcggtccttcgtaaactaaagcgcgttaaaaaaacgaaactacagctggaactggaagcatcgaatagttgaatcagtatgagtctcaacgtgagagcctcaagtctgaactggattgtaccaattgataaaattggctgcttctttatccaattgtaatcaaacacaaacccatatg

SEQ ID NO: 42246 - DNA, 106 bp, Arabidopsis thaliana columbia
tcatctcctccgcccggcccccgcccccgagactggccgccccactggtttgtccggaggcggacgtcttccaggcgggactcccccgggcggcacctccccggga

SEQ ID NO: 42247 - DNA, 536 bp, Arabidopsis thaliana columbia
tattttacatttcacacactttaaactttaagatatataatttagcacaaattgctagacaaatggatattcatttgacttaaattttgtagattttgttccatagattaggatttctttccttttaaattaaaatacactctaatctttttttttgtatcaatgttatatatgtataccattttcataaatatttgacagaatttacagagaatacaagaaggaggaaaaaccgaaagcaatataaaccaccaaaaactataacacaacataagcatataaactacactctaatgtttgaattaaagtctctacaattatactccaatcatactttaatttaactattttgaattctcatcctttactctttccaaattaatggactagagtctagagatgaagaaaaaaaatgaaacttaactgaatccaaaagaaaataaatttagttactcttattcaccttaaactgaaaaacatatggaaacaaaatggaaatagcaaccaaaataagaccaaatatagttgaacataga

SEQ ID NO: 42248 - DNA, 1445 bp, Arabidopsis thaliana columbia
tatctacacataaattcactatcgtcttaaagttatcatcttcacatttactctgtcttggcaatatagagttattgggagggacgtcaaaaccggaaagatctagaaactaaacactgctcctacgaaactaaactcaactacaactaaaaattcctacatgcaagataattttcatagccgttagacgccgtacggtggcagacttctagtcttgctacatcaccgtcaccctctgactttcttgtcgtccagtccaccgtcttcaaagccattattatgacttcaagacaacacttctagtttccacaaaagaaaagaaaagataagagctataaacgagtcagtgtacttaaataaacgagtcagcgaaagaatgtagcgttccaatatattaaataaaacaaaattatattcatatacccttatgaaaaaagcataatacttcattatttgatgctcattgctcatctcatacacaaaatcagattcataagcaaaggcgacgacgatgaagaatgactaaataagttgaaggagtcgtctccatgataaaccgtaaccaaaccctgcgacattctattgtatgtgtatcttttttttctttttttttggtcataattgtatgttttttttgtttcttggcattgtcactgaaaattataccttttcatttttgccttctaaataacccaattgtgttactttacagaaaagcccatccaacgattatttttcttcagcccattagcccattaacttcaggataaagataagagctacgttcaactctatggtcagaaaaatcagagaaagaaagaaaacagagcaattacttgaagaatccataggaagctgaagatgagaagaattcctcgtatcaaatttcctcagagacattctatctcatctggttaagatttttgtttgttttatgtttttttggtttagtttattctctttcactactcttattttctttagttcttgctttattcttgttcttaacgtctccttttttgtgtgtgactttctcaggttctggaccggcgccgggatctgtttccggcgttaagaaaaatgtgacggcgagttctgatgttccggcagctccgaagaacactgctgatggagggaaagcatctctccagccgaaacgtacacctgtctccgacaaagaaatcgaatctattatggtgagagattatataacttgctaacaaataaagttagtatccttttgttgtcaaacaataacaattagtaactgaactctgagttttttttttgtacttgtgaatttttgcagttgggtggttgcatatgacatttggggagttacgaagatttgatcgaacacattggtgttcttgtcttgttcggctggtgatgtttattttgctgtttttaaatgtaaagaagtaactaataatgtagagaatatg

SEQ ID NO: 42249 - DNA, 199 bp, Arabidopsis thaliana columbia
tctattcacatttgggatactttcaataaagaaaagcaaagaggttttctggatggcaggctaacctatttttactgagacctttaattaaagacaattacccttggtgatagaatggctgatctcagctctcaagaaaattaccccaaatggcaaatgggaattaaatatccactcagttactgacagatgctctccg

SEQ ID NO: 42250 - DNA, 528 bp, Arabidopsis thaliana columbia
taaaaaaaaaaaggttaaaaatctagtaacaggcaaatactttgaaaaggagttgaaattttgtacataggtttaactcttctattaaaagaaacaaaaaatctctatgttttaaaatgtactactaatttataatttaagaacatttttctgaaaattttgctggttgtttaacgaaaagaaaaatatacaaatagtttttggctgtaatgctacgccactactcacttttccaaggacgtgcatacaaattaccgtaaacggattataggacttgtgttgactaatgacacaattcttttttattaaaagagattagtctccttgaagaaaaagggacacaaattattcgtaacatgttaatcaaaccaaggtcttaagtggctaccaaccgcatacgagtgttgagccgagcagtgctgtgtcgagccgggctggatttggcatttggaatatatgaaatgggccaacaacccaaaagataaaatttcgttacttggacagtaaaaactaaacatgcatgtttat

SEQ ID NO: 42251 - DNA, 500 bp, Arabidopsis thaliana columbia
tctgatactcataaaaatcctactatgtacatggtcttacccttattccattgtacggtgaaatccttcagggtttatgcttttccagtgctaaaatcgcatttcaacgaaaccgaatccctaatgaatgaaatcgcatttcaacaagtagaacaaagtgataagactagggcattttattcaaaatctcggttttgtttaaattcgaaccaaatccgaccggtttacttaattaaaccaaattgttaaccatctctcagaagcaaacccctaatggcctaatccgatgatcgacctagttctcaatgtacttgaagattttatattgccttctactcacaatattatgcataaccctattatatagatgatcaatgtctatatacagctacaaactatgtcaatcacacttagtctcattgtattatcaatcaacgatatagcgctataccatattcgaactccgatgatcggggctataatcggagaagagagagatg

SEQ ID NO: 42252 - DNA, 862 bp, Arabidopsis thaliana columbia
tccaactactttttctactcgctgatgaggccgagtgcgcacacaagactatacattggagaagtgagatttcttctactcttgaactaataatctttgttactatgtttaaaatccaaaggtgagagaattaaacaagctctctaaggtaacttacaagtcaggtgtgcgaacgtcgtagagtcttacagatccatccgcaaaaccagcagcaagttgactcccatgcacttgagaagccgactgcaaataaacacacacatacaaataaagagactcatcaagcaagatccgactagtccttgagatcctgtcttcatttagacgaaaagaagatctagatagtatctatttgtaacacagatatccaagtttgcatatgctggcttacaagggctgtgacgctgcacccggattcaaagggcatagatttgacgagctgttctttatccaggtcccaaaccatgattgataacgattccccagaaacatactgtagacaccaataatgcgtcaaatacaaagtagataagtttcacaactccaaatataaaatgatagcatgttgttaatggagtggccatataccaggtaacctgactgttgttgccagtccacgacagcgttcaggccacttgcaccaggcttctgaccttggattgacgaaaaccctgtgacaagtttttgtctaccctttgttgcgtagtctttccatatacggactgatccatcgcctacatgagatttcagaaccacaagtaagagcttttaacagccatactcaatcaataactaacttgcaaaagacgctctggaaagagttggaacattacaagaggcaacaagtagcagagagtcatca

SEQ ID NO: 42253 - DNA, 1355 bp, Arabidopsis thaliana columbia
gtgtcccttgttgttctaaggtcaagaaactgtatgtcacccgcctgtgatgcactcaccacctgaagataagaacagaatagatattggccccaggaaaacgacaaagagttgagaaactcttgagaattaaaaaccaaaccaagacgaaattcttcaaacccgaaccaatatatgctataaaaaaaggtatgaaagctgacagttcatagatcaattttggtttgcaacctttgcggggtcaagtccaggttgaaaactgaggccaaccaccctttcaactttctgatgaggccgagtcgcgcagacaagccttcaatagaagaaatgatattaagtgatgtattcaaaaatattttttggtgctctcattttagattattttgaggagttctgttaaagaatgaacattaaagtttaaaccaacttacggttcaggtgaccgaacatcatagagtctcaaagatccatcagcaaaaccagcagcgagttggcctccgtgcacttgagaagcagactacaaagataacataaagtaagcaaaattcacatgttttgtaattcaaaaatgttttgatcaaggaaaagcatgataaccatgaacttccaaaacaacaaaaagaactataagacgatagcttatgcatactatctcttcgattcatcagattgtagcaaatgatgacatcctagagcatttctatgttttacacagaaggttgttcatgcagacttacaagtgctgtaactccacattctgattcacagggaacagatctgacaagctgttctttctccaggtcccaaagtgtgactgttgacgtctccccagaagcatactgttaaataccagtaacccgtaaataacaataaatcaggcttcgtaacttggaaaactaagaagaaatatcgtgcatagcatgattgaagaaatcacaaaccaggtaaccggactgttgttgccagtccacgacagcgttcaagtcacgggcaccgggcttgtgaccctggattgaagaaaacccagtaacaagcttttgtttaccttagttgcatagtttttccatatccggaccgacccatcgcctacccaaatcccaaaagcatgtgtaagacatagataccattactcaacacccatattcaatcaacttgcaaacatctgaaagacttggtggcaagagttgtgaacattacaggatgcatcaagtagcagagagtcgtcaagttcattgatgaggcagagctttgaaattcctttgtcaggaaaatcatgattgtcaaagccattgagaagagtgcttcctcatagtccacactctaagagaaataaagtgaaatacttagtgaagtta

SEQ ID NO: 42254 - DNA, 452 bp, Arabidopsis thaliana columbia
atggtcttaaatatgaataccacaaaaatactgactgatacttcttgaatccattaaacacttgaagggattgtcataaacgagataactacagcttctttaagtcattttcctcaaaacagagtgatttaaagaacaattattttctgaacaactgaaatatgagatacaaaggccgagtactaccagcttcggtttcgcaaagccaataccagtaaccgcagaagaaattgagcttttcctcgaaactgctagtcttagtcacatttgaagatccctgaagataaagaaatgtcagatttctccgttaatggaaatcacaacagtctaactaggtttatgttcattcatcttcttgacaataaagattcaaacattatgcaatctgcaccactaaatagcaaacgatgaagaaaccatgggtagaatattaaccagaacgtagttattag

SEQ ID NO: 42255 - DNA, 524 bp, Arabidopsis thaliana columbia
tatctcttacttttgagatttgatagaggggggctagagagaaagttctctgaacaaaatattggtgctgctccacctagttatgaagaagctgtgagtgaatcacggagccctgtatacagtgaaaggtgacaattctcttcactgcaaattgagaagtacttttttcttagcagttttgaattcaaatgatgaatcatttaaaatttcttcattgaagggatggtggagagaccccacaagttgctcctccaggagctgctgcttctcctcttgctgaaaacatcagcgtggacaacaaagctgctgattttgttaatgaatcatctcctcagcaagttgaggcttttgatgaatttgatccacgaggttcagtttcaggtacagagcttcccatgcttgcaattgtctagttacgactcctaagcagcataagaatttgctttccttgataattcagtaaatgttaaaaacaccttattttaaggtataggattgtgttctgatctgagtgttgcattgta

SEQ ID NO: 42256 - DNA, 385 bp, Arabidopsis thaliana columbia
tcgtgttaattaagttttggaatactcctggcattgtgttgtgaaattgccctgccaataccgcctgtgactgtcttggatcagcctgtaattgacaacgatcagaacacttaaccatatgaaacgtacaagttcaccaaatgtcactgagtggtttgcattcgggatgcagatagtaaaatcaaacataccacatgttgacatccttcttggcttccctcaccaacagtttcagattgagccacatgctgcacaagtgaagaaggatcattcataaccaaagttatgcatcacatcattaggctagtgcagcttgcagaaaatggtggttggtcttttggccaaatggaggaaattatagcctattggttacccctaaaggatt

SEQ ID NO: 42257 - DNA, 502 bp, Arabidopsis thaliana columbia
tttgatatggtagctaagttaagtagtgatctgatacctttagtagttgagaaataataacataattgctgactttgaatcatagagtccaaaataaatggtactctacaaaaggaaattgaatattatcattcacgatgatatagggctaattggttacatagtttgagtctaattttttatattttcattcaagtaaattaaatgaaaaaatccaaaaacatagcaagtttagatattttgctcacctagaaaatattatattaactaacaaacagatcttctaaaacttggtatggtctctattccatttaattttaacagttctataaaatcttgatgcatcatcttaaatcacttactactcatatcagtctaaagttacgaaatgggaaaaagaaaaacagccctcttttagatctaaatttacctccaccatcagagaagagaccacgtttagttaacagaacaatttctcaaagaaaaattacacagtttaatg

SEQ ID NO: 42258 - DNA, 497 bp, Arabidopsis thaliana columbia
  unsure (1)..(497): unsure at all n locations
ttgatgattgatacctcttcctcagttttattctccatttctctaccactctctagtctttctttggataggaaatataaaagttttttctttgtttagcttatcttatagtaagcgatgccactaccatataatcatacatatatgtattaaccacagccacttggctccacgttcttaatgttcaattggaaaatatcaaattaatactagtcttttttttattcgaaaactagagagaaaggatcaataatgtaaaaacaggtcacgttgtcgggtccgttggccaatggccatcattatattacgatcacatatgcaactgaccgatcgaatcctatcttcgaaatctcatttgcatgcactccaaaatttgataggtataacttgtaaaaatattgctttaataagttttcttttcttattgacacactttaaggatagcgaaaatgctanagagttaagtaagtctaactagctcaaatatagtttaacac

SEQ ID NO: 42259 - DNA, 510 bp, Arabidopsis thaliana columbia
  unsure (1)..(510): unsure at all n locations
gccacaggaaaccaagacaaaaagaaaaagaaaaggaaagaagaaaaaggaggaaagtttaaaagacctgaacaacataagtaatcatgcaagaggtatcttcaagcttctccaaaacccaacccgactcaaccaaaaaccctctaatataattgtttttctttttctctgttggctccaatccttctgccatctcctttggtagcgacgcaaccgccaccacgagagtaccgtcttgcatggtctcacgtctttcgtagataatgaactctctgttcctaaagagcggtttcgagttttcgccaaaccttaaacggattacgctcagattttcatctatgtctctaatgtgtgttgcctccaccaggtcgccttcccattgctgtcatttttctccaataatcattattattttaacaaactccaattattaatgaagtgggtgataacctaccatgtgttaatattttaattaaagcaaaacganaaacacctaccgatgtgttaaat

SEQ ID NO: 42260 - DNA, 567 bp, Arabidopsis thaliana columbia
tagtaacgtccgccagtgtgctctaaagtaatttggtcacgaccactcaccaaccatccgtttccaatactccagccgacaacaccccaggcattaccctttgcacggacggctaatggataaatctccgcaggatagatccaaggcactgtgagccaggtggctccgaagaccgcggtgaatacaaaaaccatggacgctgcagcagcaccgaatgattcagctcgcgccatgttgcccgcatctcgtgcgtcgatcgaaacacgtgagaaacccccagcaaggaacatggcgattccttgggctgcagctccccagtacaaagtccaccgacggccgattcggtcgagagtaaagacacagatcatagtagcaaactgttctgttagcatgtgcctgtaccaagcccagagaaggacgacataccatgtaaaagacgttgtttaaaccgctgatccattgactcttcatggaatcgaatcctgcaatgctgaaaatagtcggggcatctgcagaaccattagcctgggcccgacattatctcaagggcgacgtacaaacagtaca

SEQ ID NO: 42261 - DNA, 559 bp, Arabidopsis thaliana columbia
tagtaacggtcgccagcgacctgtctttctgaatcgtagtttacataatcttcagtagtaatctgggattcattattcatatatataacaatgagtgggttatttgtagccgaagaatggcgcaacaagcaaaagtttggtggtcggaaaattggataaaagtgtaccaggagcacaacatatgtggcatagataaatcatttgatggtaggtttgatgatagacgtgtcattcgtcaattaagaccaaactgaagcacggcctggcccttgtaaaagtcaggacttgagctagatacttaagccaagcagatctgtttggctaagtctggtcgggttagcgcgaaattgtcgaaatctgtttaataattgcattcagtgcaagtctttaatttgtacttcatggctttaatacactaattaaacattggatcatttttagtgttttcttcttttcaaaatacatatatttctaagttttccaattcagtgatttgattagttctttagtagaatactggatcatggacacatgctacagcatgctttgacctaattat

SEQ ID NO: 42262 - DNA, 433 bp, Arabidopsis thaliana columbia
atgtaaaccaacaaccaagccttggtttgctttgatttatttgttgatattgggtatcgagaatttgagatactcaatttctaattcatcaaaacattattagccttttaaaaaaaaaaaactctgttttgtggtctcttgaaacataatttctaatgtctcaatttctctttggtctctccaaactctctccccggaacgatgtgcttgtatgtaaacttctcttgcattctctctattgtattcgttatgtattagttaggttttgttttaaaaggctttgtagggaacaaatttgggtttgtctgtaagtagtgacatcaagaagataatcggagggtggagatgattgggtttaaatcatagttagataagagtgtttgcattacaatcccattctgatgtccgaattacttggcagatacagaagagc

SEQ ID NO: 42263 - DNA, 521 bp, Arabidopsis thaliana columbia
cttaagacactttctcaggctttaatctgttgaaagagtgacaatattatatgtttgtatcatctgtgaattactgagaatactaattcagctaagaccttattgaacatttatttgacttgtaattatatgatagtgcttgtgttgctaagagaggccttattgaacatttaatttgagactgtaactctttaaaagtgttactctttagtagtatctgaatggcacacacaagtcttatgataggtttcgacaataaacatctcgatacagcaactacaaaggggagtgtctatgttacgtgtgacaacaacgagtggtgcaaaacggcaaataagcctttcgccttcattgacattcttcatcatacgctaactctgatagctttctgtcaaacttgggtttgttgaggcggcatggccttttcggtaatcctcaccggagatgaaatacagggtccaaaagtttatgatccttgtgttgtacagtgaaagaatgatgcgttgttgcaccacacttca

SEQ ID NO: 42264 - DNA, 585 bp, Arabidopsis thaliana columbia
cagattcaccatgaaagctcgctcttactctcagatcttgttcgaatctatgaacatcaccataaccaacaaaaccacgcatagagctagaagcttcaccatgaaaggagctctcacgaccttggtaacatccatagccggaaaaactagagtggttaaaaaaattgcttctttcatcggagatactcattttagagaggttttgacacaaacccatatcaacaccatccgccattaacgacgtcgtatcaagctttcgaaggttaagaaaagggtttgttgtacggtcaccggaaaagtgaaatccattagagacagaggaagttagaggaaacccattaaaacccagatcagtaaatgaacctcgttgtctcaaatcaccaggaaaaaacccaaaatccatgaacttgatgttcttcgtactctcttcaaacatgaaaaaggtgaaatctttatgatacacagaccactaaaggaagaacagagcagagagaaagaagaaaatggttttggggaataagagtttgttagcgtggctcatggacgtacggagacagagagtatttgtcgttttatgaatacaga

SEQ ID NO: 42265 - DNA, 953 bp, Arabidopsis thaliana columbia
taatgtgattattagtcggtgacaagaataattcaactaatcataagaatggtggcttccaaaaggaccaaaaccatgaataccatacgtatacaaacgaataaattcgatttataaggccgaattcattgggccttataactaatcaaatttacaaaatggataaaataaaattgaaactaaagcccattatatgaatttaaagcctaacaaaatttcattttgccgtccttagaccaacaccgattcgcacgccgactcgtggacttcggagggcaatcatgaccaagcacgatcggagactcaaagatacctttcttaatttaatcgcattactctcattctaaccgttatggacaacattttaaccggaatagttacaaataatgccattaaattgatacatttaaagagagaggtttgactaatgaccaacttttaacctccaaattaggaaataaatacattaaaagatgaacagtgatagtaggtggtaaccaagtaaaaaaaaaacttccattttctgaaaactcacaatgtttaccttttggtatttgattttacttcaaaaaggagcatttataacaaagaaactatactattgcagagagaacatgcaaatcaaatggactttttgtttcagagtttcacaccttttatttatttctgtttttggtgaatcaatctgaatcatatcaaaaacagaaaaacagaaatagtatgattccattaatatctagtcagaaaaaaacacagctggactaaatagcttacattctaaagtttgaatgaaaacagtttgtaacaattcatgttttaagtattaaataccgaaattatgtcatttttaatccaatttaaatgatgaaaaattagattacaattttttttaaaaaaatttcaacaggaagatctttgagtatattttcttataaagaatattaacatttacg

SEQ ID NO: 42266 - DNA, 305 bp, Arabidopsis thaliana columbia
aaaagtaaccatcaccggcaatataaccgtacgattgcggattatcattgtgaaatgacaatcgctttctaaccaatcttaatcttggttcgttgttatctaaacaggtccggtttgatctctgttttggtacgctttgtggtcggcggaacctagccacggttgaggcagtggtagacatgtaatttggaattgaatgggcttgccgtgtgacgaaagaattgccacgtggcgtctggtcgttgagttgttggtggtgtgagtacgtattattatacttatcgatctcgactatcttgaccggt

SEQ ID NO: 42267 - DNA, 205 bp, Arabidopsis thaliana columbia
  unsure (1)..(205): unsure at all n locations
gtatgtaagtataaataaagtattaaatgttcaaagcatttatagagggnaagattaaaaaagattgggataataattgaaaaagacaaatgacaataagtctttgaattgaacgatggaaagagtttttgtattggaatgtggaatattttaaaaaattgaaagattgtatgtgtttattgttcgtgtttgatgttttttgtgt

SEQ ID NO: 42268 - DNA, 520 bp, Arabidopsis thaliana columbia
gtagtgtgtttggtctgagaaatatatttagatgtaggtactctttatgttatgattagttgattcaagggaagactatctatttcttcatgagaactatcacgtcgcaccagatccacaccatactatgatttagtgctagatgtcccctaaaacaaactttgaaacctatatctccttgaattagaacctatagattcccgtggggatatagattccgaaattttgcttacatctcgcttctttcaagcgagatagtaaatttcctcttttgaagattctgtttgtttaatttcatttgtaaggtcataatacgaaaatgtgtgtttacttaaaaggataggcctcaatctttcttgagtaccaagctattagcctttcatatgcaaaccttaactttctctctatttcattttgcagataaagaagatgggctagctaggcctacttgtaataacttaacgcttgaattcagatttgggcttgaggagaattggctgaggccttaaatttagcattt

SEQ ID NO: 42269 - DNA, 1037 bp, Arabidopsis thaliana
ctcagattaccaaattcaaatgctgaaaccatcgattccttaaatcagcagtggaacaacaaaagtaataacaaatacatcgagtaacgaagaaaatcgaacaagtttcacctgttaacattgtttgatgctgaagagaaacgagattgatttctttcttgaagccaaggcaagctatatcatgaaaaaaaaacttgccttcttcttctttcttcgtctctatatatgccagtatccgaaccgggtgggtcgatccgggttgattcgggtcgggtttgatcaccatcttgcttcagaaagacaacagacctaaaacccaatacggcagcgttttgctgacataaaaataaatctaaaattaaaggaaaaaaaaagaagaggaagaagaagaagaacagaagcgctctttgggtccctctctctctctctctttcttcaaatcatcgtctctcgtctctcttctctgctcgcgcgtctcaatcagttcaatctctacaatacacgtatgcatcaatacatgttggtaacgcaattgcagtgacggcggagtaattttgaccggaattatgttcaaaggatcgtcgaaacgtggcggtagaggaggaagtggtggtgggggcagtggaccttcccgtaaccgtaattcattccctcctcctacaaaccgacatccttctcccatcgggaggatgtcttctggtggtggtggtggtggctccgccgctccacgccagcggagtaattctactagcgttaaggcggatgcgtcgactacggtgtcgtcgcggacggttgaggaaacgtttaatcttgttccgagggagagttcttcggcttttggaatgattataaggttatctcctgatttggtggatgagatcaagcgtgtggaggcacaaggtggagctgccaagatcaagttcgatgcgtttcctaacaatagcactgagaatgtgagttctactgaattctagaatctagagatagaggatttctctagattgagttgaattgcttcaagctagttgctctttttt

SEQ ID NO: 42270 - DNA, 472 bp, Arabidopsis thaliana columbia
gggtaccgagctcgaatggtgagaatattcgggacaataaaagagagagattggagatgttagctgatgacaaaatatatatatatatttttcttattctgattcccttaattgaataagtcctgatagaaagcttctatttgttttaaatatgaaccgttgagttaaattttattgacttgttttttcttttcaattacttccatcaaatatgtctaattattcatttccttaaaaagattattcttgtattcacccaaaaaaaagattattctcgtctttaatgtcaacttggtgttcaagataaatctgtctagagaagacgagaagatccacgataaaaatcattaactcaacatagtttagagattttagaaatatgcctcaacttctcagccaaatcttgaagccttttgtcaacaaaaatgtcttcgtaagttttcttttcaattcattatacaaatacgtaatt

SEQ ID NO: 42271 - DNA, 311 bp, Arabidopsis thaliana columbia
tcgtatgagtcatagtcacactgggataagttagttagtgagctaagagccgagtctggcaacacagatgcgcctctaccacgagacgtgtcgtctacacaagacaaaggtacatcacctggcaatcgatcgagacacagaatgctgtgacacaattgagtatagcaatgcaatcaagtcaataaggtggaagacagtcatacagcgaacatacgttcccactctgatcgtctttcaggacataaccttcacatggtgtcagagcttaacggttgagacgagaagcgtgaacactaccaagagagcgaggc

SEQ ID NO: 42272 - DNA, 298 bp, Arabidopsis thaliana columbia
gtggtgtttgactgtcaaggtcttggctaatctgcaaaattttgtacgggagatatgagtgatattgattctattggtacactcagttagatattctaccaactcaatcacaacatgaactatgaatatgtacctttgctcgcatcatatttggcgtctatcatataatctttaataagaccgtctactatatatacacgcatgtgacgattaagcaatccaacaataaccattagaccatataaatctccctctctctatggacatatagtagctgccgtacatgtgacacgacctg

SEQ ID NO: 42273 - DNA, 547 bp, Arabidopsis thaliana columbia
gggtgcttcgcctatattcaaccatattctgcttaaaatacaaaattctacatagaatctatgtaatctgtattgatgtgaaacgtttaacataaatacaacgacgagatgcaccggtttggtaagatgggttatcaaagtcatgcatgttgacaaaataaatgaattcagagatacacataagagaggatttcaaatttgcagctttatctctgtatgtattattcttcaaagcaaaatttgctttctgatttggtgaacaacctgttcttctattattaggtacttttttccttagacttatatactttcatttcttctccatcgtggggtcatgtcatatcctgtcacgtttactccatcattacttaccttttatttcaatttttgttatttctaaggacgagataatatagcacaacgcaagcataattactaaacacgacttaaaacttgataagaaatttagagattatcattacttacctaagattcttgaagttaattggatcgaacaagtacacagtatgacttacttagcatttgt

SEQ ID NO: 42274 - DNA, 517 bp, Arabidopsis thaliana columbia
tgagatcatccagtccagattagaaacagagaaatgagaatgacacctttgtgtgtggaagacataatatagatggcaaaatctcgggatatgttcatacatgtcattataatacatgcctttggcatctaaggtgcggcaaggttgcgaaaatcgcttcctgtggccgatatattttttggagtgaataatcaagaaatttcataaacaattattagatagtcaagaacttgttgccaagagtatgcccaaaattcatgacacggtgatcaacatggaaattttcaacgttcacccttgagtaaagaaagagtttacatgttgtcagggtaaactttaacttactcaaataatcattttcccttttttcaccattattttttcatacaagtggaaaacagtgtgatcaatatgtacgaaagagtttgataaaaaagaagacttaaccataaatagatcaataaaattccagtggaacttaaaataccaatgcacaaggtccaccatcaaagtggag

SEQ ID NO: 42275 - DNA, 661 bp, Arabidopsis thaliana columbia
ggtcaaatgttgactttggacattttcaaattttttgaacttgaatcaatctaaatccgcaaatttcaaaacagtgtgtatactataaactaaagttatcagattttatatgaatcaatttttttcagacgatcgtttgtataaatgttagttgtttacaattatgtggttgattgaacgtttttcccccatagaaatgtgttaatgcttcaaatgttatgactatcggcttacgggaacatatgtgcaccttgggttcaaacaaataatcgaatgaaattttgaattaactaaaaatgtatattcttacatatatatattctcgtaagagaagctcatttatgatattgataacctttagagtgctaattcaaaacatatatcaatgatatttttattaagttaattttcactccacttaatctatatatgtatatatacatataacacatacatttttattaaaattgtttaatttcactccaaatagatctcatgatttttaactagattgtttaatttaaatttatgatcccaaatcaagaataattaatctcaacgtaaaaaagacatagatatgggggaaacgagtcttatcaatctcttttagagcatcggagtaatattctttgatgtgcaggtatcatatgggcatcgaaga

SEQ ID NO: 42276 - DNA, 521 bp, Arabidopsis thaliana columbia
gtgtacttcgtattgttttagattgttcatcattacagcattctttcaaattagcttctgactgttgctttcaactgtgctaacaggtatcatgctatttgtgtgggttttgacgtggaaaatgcatctgaggatacatgggtatgtccgaggtaggtttcgttggcgtattgactacctatgattgcttaatccatggtttgatcaacttcagcaccgttgtttcattatattgtttctttaattattagcctattaggcaaaaatattttcatatcagagtttccgtaaaattaatttgccccatatgtattcatgagactttgtaccaattctaagtgaaacctaatgcctatacatattattcttcctttctctatcttatttagccatcttgtcatagttccctccttggtgttgtgccacagaggtctctctaatgagtaacacatgaacccgatacctcgccaatggagacacaacctgagtactcactaatggagacaagagagtcctggata

SEQ ID NO: 42277 - DNA, 105 bp, Arabidopsis thaliana columbia
catgcagaaagctatattaaccatttcaatgtccatagaaacaccgcctacaaagtcctaaaggatgcttgcaagaacttgtttgagcgtcgctttagttatcaa

SEQ ID NO: 42278 - DNA, 511 bp, Arabidopsis thaliana columbia
ccatctctaacttagcctggattcttagtaatgactgctagggctcagagtcttgagatactacactaaactctcgacatagcgaaatttgtatcctcaacgccaaatttaaacctagatacacaatattccgctaaaatgcatcaaattggtgaccaaattcgtgcgatcaaaggaaagatcccccaaaaattcaattccaattgcgcgctagagagagagagatataagttgagatctggagaagctaaacttacctctgggtgattctcgatttgagtaggggtattcgaagaagtgacgatgattgcttactttgatttcgaattctccatcatcatcatcacgaggatccagaagccaaaggtgaaagactcgcgtctcgatttgggagtttatagcttaactttactgcgcgtgccagacacgcgcagacactagctagatttcccgcgagcaacgatgactcgggacattttacgccaattttaaccgcttctgatttatttat

SEQ ID NO: 42279 - DNA, 359 bp, Arabidopsis thaliana columbia
atttctgcctcattactcgagacaatattcgacccgttttattacttgataaatttacaactatatatttatctcatccatttcatattagtcccccacatcaagtaaatacttccacccaaatatcttttgacattagggcaatccaaagttaagggtcaagcaaatgtctcctttctaaatgtttttgtgggtaacggtaaaggacaaatatacagcccatgcccagacctacaagtagcgactccattactacacagtaacatttttattaataaaaatgtgcatggtttcatttaacagtcattgctaacacttcactttacagtaatattcaatttcatacgtttaaacgttaa

SEQ ID NO: 42280 - DNA, 550 bp, Arabidopsis thaliana columbia
taaactctctcataattgtgaaataaggttagcgaaactcttgtgagttgtgaccattatttttagcaaatgccaattatggccggaatagaccccaaatggatacgcacaaaccaagggatgtttactaatagaaaattgctttttatactgcttaacatgcaactatagtgtataaaatcatcttaaaaccacattaaaggaagaccaaaaactgaagttaaaagtttggaattcaagatgagtacaatgatgtcatgggtagaaaatagaaattgtttaaatgttttattttcgaatgcaattgagcgatgtccatcattgagaagccaaacaaccggaaaaaatctcactcactcatccgaaagaagtttgctaagaaggccaagccaaagggaagaggtggaactcagatgacctagagagatcccatatggcctaaaaaaaaatattctaaaaattgaataatcaacaaattttatataatgtgaccagaaaatgaaaagagaaactatgtaataattatcaaatataatgtttttagctttta

SEQ ID NO: 42281 - DNA, 253 bp, Arabidopsis thaliana columbia
ctgtgatgtggaacaaggcccatccctgtgccatccatccctgcataaaatattaatccatcaggcattacgaaagtccaaaaattggaactttgaagcgataatcagagagtcagatacttgacactgaaaaacagtaaaaaaaaccattactagaattcaaaatacagcctaaacaataaagcattatcctaaaagcttggaactttgaaacgaagatttagaatcagatacatgagataagaaaacagta

SEQ ID NO: 42282 - DNA, 310 bp, Arabidopsis thaliana columbia
tggtcactttagtttaactgcaacgtaagactttctagttccaatcctgaagaagaggttatatttgtccccggccgaaattccaatggtatcacggcttgcagagtttcactaccgtgatattcgttttccagaccgtagtcccggcgactatgcattaaacatggacttcatcagccaaaacaattgctagatgtgacttgtgagaaagctaaaataaacatatataggcttttacaaaaagggtctgctagtcaatcttcaacggctcctaaaggggggtaaaagtgcttcggccaagaaatttttt

SEQ ID NO: 42283 - DNA, 630 bp, Arabidopsis thaliana columbia
  unsure (1)..(630): unsure at all n locations
taggttgaaccattagttacttcttatgtaggtgcatacgctcgtcactgattacaagtttgttggatctaaacacaattatgtataatggcaatgaggaatcaactgtgaaaggacaatcatcgtccatttgttctgcattaactatgatatctgaagagggtttgtttttcaatgggggaaataaagttatcatagtaattttgttcttagtaacaatctcttcttagtatttttggcatatcttgtctcaaaataacaatctcatatgattttacaggagaaagtggcagtgcagcaacaggtggagaccttggtgaaggacaacacagtgctcaaacgtgctgttgctatccagcatgagcggcagaaggcattggaggatgcgaaccatcagctaggacttttgaagcaactggttcctcagtatcaggaaaagcttagaaatctggaggtaagccttagggantagagagcttctgcatatcccttgctattgctttgaatggtctggtgttggttgttttaaaattgaccaaaaacagatgttgttagaatttgatgatgctcataaaagaaagagtgaatgacaaaaggtagaaaaatgcaggtgacaattacgcggtgaga

SEQ ID NO: 42284 - DNA, 553 bp, Arabidopsis thaliana columbia
gctgcattgtttctctgatatatgtttccaagaagcatcgtttcacctgagatgtgaatcgatttcgttgaggttctggttttgtcaccttaagatcatgttgccacaatcatcaatggctacgctttgtgaaagcttaaacttattgactcttgatcgacggtgtgcttggtcatagatcttcttttgccaggtccggttatgaaaaatctctatcaaacccaatctatttagtaccttttgaaacaacccgacccattttaaaaaaaatgaaatataattaaatattcccataaatatctagttaaaccaaccaataacatggtaattaaaccgcaagtcaaaaatactattttatgaataaataaataattcgaccaacaaaacctagaatagctgacaatcctagccgggttccaataaccataaacatcaaaaatatgaccaccgagttcctagatcatcctctcttccttgccatgattcccgatcacactttatctttcctgcacaacaacgcaatgagatgcgtagtattatcgtaatcttagtg

SEQ ID NO: 42285 - DNA, 559 bp, Arabidopsis thaliana columbia
taacaattaattaagaagaagacttgaaattaattaagatcgatacatggatgggcaaacctagtaacaatttagaggttctcataaattcctcataaaacctatatgatcatcatatagtaatccccaagaaagaggccaagatcttaattaagaacaataggctcaattaattacaaaattaaaatcttatttggcaggaaaataaaacccaaataatcaagaaagattcgattcaaatgataaaagtctaaaagtgaaaatacctggatgatcgatcttgtgttacaaattggttgtatttagagggttgttgttcttccaatatttctagagaagactttagatatacggaaatgccttatgtgatatcgacggaaaacaaaaagcttactgtatacttcattaaaaattcagcaatcattaaaaataaaataaattaaagaataagttgtgactgtacgatctttttatttgacaatttttttttttttcggtttcaatttcataaacagataatttgataggtgttcagaaaaaagagaaaatttgattttat

SEQ ID NO: 42286 - DNA, 510 bp, Arabidopsis thaliana columbia
cgagaaatgaaaaacttggcttgtgaaaacagaaattaaacatatactacaccaacgcatacgttatacgtgatcgagaattaaaagcttcgcttgtgagtccttgattacacattaatatatatatactagggggctggagtgcgacccccaccatgcccactgcctgatggtcctgtaaatatgtctccattgggtctatatatactcatcaacttcctccctacaattcatatttatgaatttttaaagagaaaaggcagcaaaatattataaacgaattatgcaatgaaatcggagtctaaaatttgaaaatagccggaaagaaacgttgaagctttataagaaaaaaaggagatagtgttaatagtagaaaaccattatcagcctattttctttagtacacatacatacacccattagaccattataatttaggagaattaattatgtaagaaaaaaacataacatttttatttatatatatatatatatatatattataaacac

SEQ ID NO: 42287 - DNA, 414 bp, Arabidopsis thaliana columbia
attctcgaacctatagtgtaatgatgggtatataccgatagtgttatgattcacattgatcttaccttcgaagtatactctaaaattgataattgtttaactaattttagctgattagtataccggtaactagtactgcttttaaacagcaaagaactttggattatttgttccagctaatccgctagaatttaaatcaaaatattgtagaatccaataataagaagtctgcataatccgaattttcggagcataaattaattaaccgaataattttatccaaataagtaaagctaaaatcatcatcggtactccacaagcatacatagtggcttccccttaagtctctgccttccctgcaaaaaattaaatttcccacctcaaaaatattaaatgtcacacccatacaaaacg

SEQ ID NO: 42288 - DNA, 452 bp, Arabidopsis thaliana columbia
tcacgtaaaaaagaaaagaagagaatatggataattcaaaggaataaactggattggccgattgagaaaatgatgattcaatacaaatttgatcacggattcgattactacccagaagaatgaagaagattcaaaggaagaaattggattgaagaacattagaattcagaaacaattagtgtatattaacgataataaattggactaaggaacataagagtaaaaaagaatttgttatgataaagctaaagtcttcaacactgtcaaaactaagtaatctctatggaaaatgtcaatattcaatacaaaattcgttcggtaacttataaaaatgccactcactaattgcatacaatttctagtgaaaagtatagaaaatgttcacagttatagaagttggactggactagactgaagaacatcagagacaaaatgtttatacgctcataaac

SEQ ID NO: 42289 - DNA, 325 bp, Arabidopsis thaliana columbia
tcatctttcttttattcttctttacacgctctgtttttcatcaatgtgcgtcaaggaagcatttttttgtcaaacctaaatatatctatccagaaccaaaaccagagatgtccgaagagaaagtccttcgattcgacgaatctgatattcgtaccttaggcgagcaccactagcggcattcattcgacacgataagatcgatatcaatctctcggttacggttaaaaccgacgacaaccggagattccggtaaccgcgagattacccagaccggttcgcatctcggttaatatccccgattggtctatgatcttgcagagtgagt

SEQ ID NO: 42290 - DNA, 520 bp, Arabidopsis thaliana columbia
caaggttttgggattatttggaaatcaaatatataaagagttgttttctataaataaataaaacttcaggagtttacagctttttatttcctttaagggcttaaactattacgaaattatcaatttaatcctcaaatgtattctctttccaatcggacaaaggacctttgcgcgcgcaattttatccattagcaacaacgccagaaaaaaatctcgtcagaattttacagagaatcacgttcgccggagaagtatataccaccttcgtcgcaattggcggtgcaaattcttttccttttctctagtgaataaactaatgctcgttgcagttgaaaaatgttgttgaatcttcgtctagatggaagtagcttacatgttctctgttctacaaaaaccttaccgatttcttcgcctctcgataaatcccatctttcaggaaattgaagcagaattacgtaccagggactcacgagagtgacaaaggccacagagaagcaccagaaatggcgacagaggttgt

SEQ ID NO: 42291 - DNA, 316 bp, Arabidopsis thaliana columbia
cagacctgtggaagggaggctgggaggcctcagagtagggccagtgcctgcgtagggtcagtcagcggggaggaagtggaacattaaaccccaggcggagtcgtcctggccgccggccagcctctgtctgatgctggggtcagagcccagcatctgctgaggaggccgggcaggcaggcggcgggcagggcgcatgtgcgatggggtgcagccaccgggagccccgcacaccggaccccgagcattgagactgcagtgcccacccagccggagcgtcatccttggcaggaccccacgcatgagggatgtaccaggt

SEQ ID NO: 42292 - DNA, 588 bp, Arabidopsis thaliana columbia
ctagcgtactgaatagtggggatgggtgtatatatagtgacggccacatgtagaaaaccctagttgatcacggactaatgggctgagtttgttatttcctttattgggcttgtaagaataaatcacttggtcttagtagtttgtaagttagtggttacctccactaaatgaatatctttgtaattgttggctaactttaatgaatgtgaagcatgcttaagaaaacaaggcaaaatgtaaaatgagaagaagagaatcaataaagacatttaccctcctaatcaatctttcataaactgtatatgaattttttttagggggttttctgaccccaacataatttaaagtaaaataaatttgatcatatgaaagtttaaggaataattaaacaggttgtatcgccggaggtgtttccgtttacctctctcacacctatttctcttcttctatctgacattcgaaagctctctctctctatctctcttttttaccgcgcttgtacacattgtggcagacatcactcctacctaaatctggtagcagccattttcagatcgaattgccccaaggagatccatcaggtataag

SEQ ID NO: 42293 - DNA, 543 bp, Arabidopsis thaliana columbia
tacacgatttctcgggaaattttgttcgacgctttgatttttctcatagtttggaatcggattctttcatggtcttcttttacttgattagggaatctccagtttgaaagactctgaatctttcctcattatcgctcgtttgttcttgtttaattttcccgagaattgtttttaggcgcgatcttaattgggattttggaatgtgaatcttttcatgttagtttgttatgtggagtctcagtttgatactgaaagactctgatgaatcaatctcattttcccgagaattatttttcttaatgcgctatgaaatttgctcttactatggaatctgaatctttcatgttcttagtagttgtggagtctcaccttgaaagacactgaatctttctcattatcgcgagaaattcatactttgggcacttggaattaattgggaatctgaaaatatgtcaggttagtctgtcctgcgcatatcgaagatggatcctgaagaagaggttagattgtttactcgttttgtaagttgactcgaagatgtga

SEQ ID NO: 42294 - DNA, 624 bp, Arabidopsis thaliana columbia
atcctagagctttctcgcacatctcattctttctcgagttttgacaagctttcatttgaagattttgtgaacccggattaaagtcatgggtcacattaactgagtgatctacatccgcgattagcctagtcggacttggctgatatgatagtgaaaaacttgagttaaagacatggaagctttagagaattttgaattacttcatcatatgtatctatacagtttttaccaaatggattgttcaccggaactgtaatgaaaaatgtactaattacgaacctctcaaaatacaatcaagcctccactcgtaggacaaattgtcaaagagagaattttatctggcccaccacgtgtattagccaatcacgccgccgctcgtaggcccataagctgacttcaaagttggattttgtaagacttcatgggtccgacttttacgagttgcggacttgcgggaacataaactagtaaactattcctaagcatataacaagtaataagtgttatctgtgtctatgtaggttaagtgcatggaaatacaatctagttgatatgtgttcaactaaataaatcaatgatagtagaaataccaatcgtaaccataccaattgcttagcttcaaac

SEQ ID NO: 42295 - DNA, 660 bp, Arabidopsis thaliana columbia
ccaggtgaagaacagttctcaaactttttctgaaaagcaaaaccctaaacaagaagcttcaccttcaccaatatcatccacttgttcttctccttctcatgacttctctttcactatctctctccagcctctctcttcttcctcaaaacacatcagtcctactcttagaagcccatccaaaacgacatcgtcttatcaacaaaaccgatcctttcgccgtcgacttatcccccgccgatgaaatcttcttccacggccaccttcttcctctccatctcctctctcacctccctgtctctccccgaacttccacaggctcgtataatgacggatttacctccccgtcaaagatatattacccgaccagcccacaaacaacaacaacaacactgaaaacgctatcaccaacataagtaccgaggcaaaggacgacaacaccgaagacaaagcagagggcgagattcgggtaaaaaccaaacccattaagtcattttctctctttggtttatcaaaatggagaaagggttttgaaagcaacgagcgagaacaagaacatcaacaacagaagatcaagaaacctatgagcttagacctaagtcacgccgtcaagaagtcataaggatgttgttcagaaagaggaacggccgcagtttggacaga

SEQ ID NO: 42296 - DNA, 579 bp, Arabidopsis thaliana columbia
acagatgattttgaactttgatgatgatgatattgtatcccggtttgcaaatacactgattatttcgtcattgcctgtttgtgtttttgtagaacactgaaagtgcattaaagaaacaaggcttcattgactttgtcaccttaattaaactgtctttggtcttcttcttctctgatcattaatcattggttgcactattttcttggcatcagttgacttctctacctatatacaaagtgccgaaccagtgtcatttaacaaggaagaaatgtaggtctgattttttttttaataattaaaactctccaaaggtgtgattttcttgagaaaaaaaggtgtgattttcttgacaaaaaaaggtgtgattttcttaaccccaattttcaactaaaaatgtaggtgaaatcaccaaaaatatttctcaaaattcattttttaaaaggccttttaatttatgaataacactagatttgatactaggattaatatgtaaataataagctctaaccatcctaccaaaataaaataataaactctaaccagagtaagcaatcagaacacgagccgtgggattggaat

SEQ ID NO: 42297 - DNA, 548 bp, Arabidopsis thaliana columbia
cgtggcctgccatttatatgaaaactttataatataaaaaacatgaacgtggtctggcctgctttgcataaaccaacccatataataaatagtgagaaaattaaatgtaatgataatagtagcaatgtataaatcaagaagtagtttcgtaatgatggacacaacgttttcgtaggtgccagcttcatcaccttcccacattctctctctttctcacctggtacgatcgtaaccggcacgtgcgattcacgtggctcgcaaaaaagttgactttttagctttgatttaatctcaacaaacattaaaaagtttatgatgatgaatgattagtttgctttttcttttgtataacatgagaggttacatgttattgctcatatctttcacttacatagcgcatcgcacgatgatgatttgatctgatatacggtctgatggtcatatgttcagtttttaagctaactagatgtagtcaaatacataaaatcataatatatgcgtatagttaaatatattcaccatagaatagctagctaactaatacatgg

SEQ ID NO: 42298 - DNA, 592 bp, Arabidopsis thaliana columbia
  unsure (1)..(592): unsure at all n locations
ccacctcacatgttctggtgttaaatctggccttcttaattgatcataggttggagagagtatgggatcctattttagttactggagctccaaagtgtattagtcagttcttcttaaacgctgtaagagacccacaaaaatttgttgttttctgttctcagctcaaataaggaattcaatagtctgagacattttatcgttgctgcagtttgagagttggcattcttttgatacaaatccactatatgctcttctccacgaggccatatactgtgaggtatagtctcttcaaatttctcatctttttttctatttcagacaattacttcttcttgttatcgtttatgtttaaatggaaactttttcagggtgcttcatcaggatggtctgctcatagattacgggataaatatgagtacaaattcgacgcaatgaaggcagtcaaagaaagtcagcctgtactcttcacaggagaggtacaggttttgagtatttctaattgtatggctcatagcttggatgattggtcccattgcttaactnaatagaatttggatctgtatagatgatattccatggatgnttgatgaaa

SEQ ID NO: 42299 - DNA, 453 bp, Arabidopsis thaliana columbia
  unsure (1)..(453): unsure at all n locations
nnnnnnnnnnnnnnnnnnnnctaaagaatgaaaatgttcctgcaaaggggtaagattctgttgctggtgacaaggaagggccaccaagccccaaggctgattcggaggcagaaactataattcaatcgggtcgcgagtccctgtcaccagagaaaagacgaaagttcatcaagcatgaaccgaaacgacgtgatggtgatgcgaatgatcgtgatggggaaaatgaactgccgtcaagtgatgtccaggtgaggaagagcaagcctgcggattatagccatgatgttagcgaccgtgaacagcgccacatgagcccgtcaatggagagacggatcaccgcctattgtgaagctagaaaagtccgacgatgcccgatcggtctcgagcaggtcagaaaccatgaggacttcgagaaagcggagtttgagtgagagcgtcaatggcgattcggat

SEQ ID NO: 42300 - DNA, 570 bp, Arabidopsis thaliana columbia
tgttttgataaaaaaaattaatgttactaaacgatattatacatccaataccaaaagaatttgatccttattgttcatgtccatgcataacattataatgctattttaatccagatctaacgctcatgttttttactttgagatatcaatatagtgttgtaatccaatatttttctccaaaaacctaaaatgctttaaatatgctgattttctgactttttaaactaaaagcatttgaccaaattgtgaatttttaggcgtgtctttctgttggatcgtaataatgattacgcgttgatataagatatgttgcacatattacacattattttatgtgtttcgttgtagaatcgaacttgatcttatttgtttgatatatacgtctttgcctacgaaagttgaataacggagtataaggattttagccgactttcacctatagcctagggttagtcgatcattagtgtttcgcatgtccgagtcttgatcgcttgaaagccaactcttgtcttacttgctatttactttattttgcaatcgtgacaccaacagcaaacccttttttattga

SEQ ID NO: 42301 - DNA, 562 bp, Arabidopsis thaliana columbia
tttcctacataagcttaggtttcgtcatctatctagatttccttgtccccgattgtttcacagagtctgatgggaagtttgaaatagagttgacgcgagaagattgaagccgtgatggtcactctagtttttcaaaccaataaaatagaacctatattgttgatacggggtccgagaagtatggttcattttccaatgaaaaccactacacaatctgtcaagatttacccccattcatgagtgtccacagcatttgctcagaagtccttttttatcatctccattcatgattttaagttcagagttctagctttctcttattagtgtctcagtcatcttctcgctggtgtgcaatccttagattcttgtgttgaagagcattgtttcataggaatcatgtgaatcgtcataaccacatatactttgttctctcaattcatgtgagtttgattcaattctttagctgtattcataaatgctcacgcattacgtgattatgttgtatataagaactcacgcacgtcctaaagaaagtagcgatgtcgtgaataaagaaaaggta

SEQ ID NO: 42302 - DNA, 413 bp, Arabidopsis thaliana columbia
aggtaggaaacatattatacagagataataaagtttatgtttatagaccaattttaggctaagtcaaatatatgtgaagtattagtatcattattttcttttggatatttgatctgttacttaaaagatatttttagccataacataaaaactcattactaaaaaaaattatctttatgaaagagacttttaagacaatttagagagaaaaatgtattgtaaaacccaaattaaagatttggaaaataataactaaaacccaaataaatcgatctctataattctattattgatatcatagactcatagtaacaaaagactgttatactacatgaaaacaaaagttagaatagtcggttctctctaatctccctattgaatctttcacaggagactcattaagtttgttgccg

SEQ ID NO: 42303 - DNA, 521 bp, Arabidopsis thaliana columbia
attttataacctttttctcctcaaatcatcaccaacacaaccaacaaaaaatgtaaaaccgtaccttcaatcaacactatagatgttgtggcctcattcattacattcaaatacagaactacgtatatgagttgtcacgtaaaggagcaagaaattttagccttctttaaagttttcacctagattatacatttttttgcaacatttttttcaacctggtctagagaggttataatttttaccgacaacattccaaagtttcagtattcgatcggcaatagatatttgcatgaaattgtgaataaattgttggaataagcaagctgataatccgtaccaaaaattgaagaagcataaggagaataagtttaagcaaagaggctgagcaaagtccttcaatgagactaattttctttcttattaatttaaacaatattaattaattaccattattagtttctttcattttaaacacaaaaattaattctaattttactaattaatttctctgtgatatttat

SEQ ID NO: 42304 - DNA, 529 bp, Arabidopsis thaliana columbia
taccgatcaacaaaagtttcgtacagtgatcggcgaaagaaacttaaatcccagtaacagagcctatcgacaagactttgggtttcaggggtcaaggtggcgacgattggagtgataaagagagcgtaacgagattgaaatggttaatttgaaagtcaacaataaaaaggtggctcggcccattaggcccaaataattaagagtttcctttgtttcactgttttttattttttaacgtcccttttgaatcaaactgagtttttactttttacatcaccaaaaatattgaagacaaatgcatttgaatgcattaccaaagtatcaaactaagtttttaaattcaccataattttttttaatttttttcgccctcttccacagtcaacaactcaacatcttgaaagatttggaacatgtttctctagtgcaattctcatgagctcgttaatccattgtagcccaagatttggaacatgtttctctagtgcttccattctgctcaaatggcaacaagtaatttggacattgt

SEQ ID NO: 42305 - DNA, 490 bp, Arabidopsis thaliana columbia
ccgtctctattttatcatttttgtatcagtctctatacatcccctcttttccaacattttacgtattcgttttttttttagtataaactaataaagtatttctcaattataagactcttcaaacaaaacaaaaaaatttactctagtaaaaaaaagtttaccgagtttaattatgttagaagcttgagattagttctcgttaatttctccgaccgaaagcatgtttaagacaaggctttggaaaagaacactagtttttccaaatccaaattctacatctcccgagaaaagcaaaggacaatgttctgctccaagcaacaaactgacaattccagttcccgagcaagccataaaatcagctatccaaaaacaaattccatactacaagtagtcctaataactcctaatcaatcaaacaaatctacgatttaaaaacaatcagaatcagaaaaattgagaagagtagtaaataacctgaatctctagagct

SEQ ID NO: 42306 - DNA, 301 bp, Arabidopsis thaliana columbia
ttcactttgaagatgccttggtggtgaaatggtagacacgcgtgagctttcatttgcattatcaacacaagatgctggacctctctcgtcttatcattttcactagcattactggttctccgcttcggtaactgtgtctagctggtaaagatatggcctctcctggtcgacgaggtccataaggtgtaattgctactgcgaagtcgtagtctaaatctctggatacgtagcctataacttcacgacttaggtccaggtgcatgaattctaggtatcagacgagctttgagcatgttaaaca

SEQ ID NO: 42307 - DNA, 478 bp, Arabidopsis thaliana columbia
gctttgccacaacttgctgcaataagttgttgtggaggttaactaaagcgttttgtgtctcgttgcaacgctggaacgaggttacgaatgtgaagggagggagacaaccaagcggttgcagggatggtactgcaatctttttcactcccaaagcgtggatccgtctcaaattcacctctgtttgatccacaacttgctttatgaatgctgggaattcctgtaagacgcaatgaaggtaagaaatgaatcactatacattttaacatcactatctaagaaataaaaaatagggtttcgtatcttacagaggcagggcggtttagggcgatgaaattggagtagtcgttgccagcgacactgacgagagccacggatgaagtaagctcgggaggatagtagatgtcgccggtggtgagaatgttctggaagatgtcgatttgagttgtcatgttaggcaatggagtttgagtgttgacac

SEQ ID NO: 42308 - DNA, 539 bp, Arabidopsis thaliana columbia
agtctttgtcttttgatggggatgataagagatggtgtaatgttgctgcctggataaccgcacttgggtttgtatcctttggtgtgtgagaagttgtccgccttatgttgaaacctctttctaaactggtttgccttgaacgccggaatgaccgtggaagatgtctgataagccgtgatgaagtcactagtaatacaacacctagcatgataagtaacctgcaaaaagtttcaagagtccccaataatcaaaatctatagctctgatggcagaaaaactatttggaaagatcttttgcaacttctgattcatgtgtaagtgatgtttctctaatgactgatagaagttgtctttaactagcacactaacaatacaaagaaagtaatgagtagaactttaccatcccaggagaagtaaaagccgtccagatggtgaagtgggtaatttctcacccagagcaaacattcctgcaaccacaccgtgttacaattgatgccacagcagcgcaagtggatactacgattgctccccatgtttta

SEQ ID NO: 42309 - DNA, 491 bp, Arabidopsis thaliana columbia
tttgattcattttcaatgtatcattaaaaatacaccaaagttataaaattgatcatccagggaactttctaacacaaatgcttttcaagatattagtatttaaagctttgttaggaaagacaagcaataggcaatcgggaagtcttttctgtacaacaattatgcgatgctatcaaagaaataatatattagcttattttactctgtacaactttttttctctcctctacatacaaattttagagttatgcaaaatcttgagattttcgaatatattgcaaattgagtctttcgtcttgtcaatggattatattcaatttttcatagatagctaaaaatgcgaaacctgaggattatatagcctttaagactgaagtgataagatgatcacatgagatctcaaacaaagcgaaggaccatgaaacattcagtgagacaaggtaagagtttaaagttgaggatttcttataaacgaaacttcgaatgagacg

SEQ ID NO: 42310 - DNA, 497 bp, Arabidopsis thaliana columbia
gataattttaagttataaacttatcattcatatttaaaaagcgatattttcagttatcccctcttataattataaacttagattctacaaaaaaaaaattgtcagattattatgagagacacaaacaaatatatagttggttcttcacattatcgtgtttattctttctaatcacaagatcaacaatgtagtatcactcttaaaatgtgattatgaagttaacaaagcttacatggtagcagaagaaaacattgttaacgaccggaagacttacactttgccacactttctttatttttcataacaaagagatacttttggagaatttcatcttttttactattcaatattaatcaatactgttttgcctctgaaataaaaatctatgggtgtgtgtcattgtaattctctcaaaataaacatacaaataggcaaagtagacataaacaaaagatctttactctaatcagttttgtgagtgcacaaagctccatttt

SEQ ID NO: 42311 - DNA, 589 bp, Arabidopsis thaliana columbia
actacccggtcattgactcattgtctatagtagcttctttatagatgtttgagtggtgtgtttattacacgtttcaaaatattaaaaaatacttataactgtataaatatactatatgtatatataaaaggtttattagctcttggtaagtggtaaattataaagctggtttgaagtttgaaaagttatattagaaacttgaaaggacaattattttgaaaataactcaagactgagattttttgtgcaaaacccaaaaataaaaaccctctgtttttccatacaacattaaatattaattctgattttcaactgtagtttgattcgaggcgacctcaatatccttttattttctgcttacatgagtttccacatgataatagagtctattattaattactagatgaacacccatgcgtacatgtgtctctttgtttttaaaattgtcaaaaaataggattatggttttttgttgattttgatgttcattttgataaattcatctatttaatataattattattgtgtatgattagattcatttataactcgaaatattaattctactacaatatgtatatttatatat

SEQ ID NO: 42312 - DNA, 586 bp, Arabidopsis thaliana columbia
tttctggtcgctgccatgtcagtaattgtcccactttcctacaggatgactagtgcggaatgaggagtcagcatttcaagattctcccatggaagcctattgcctgtgtcatttgggttaaatgctatttgacttttaaagaacaataatggacttcataatacaatttcaatggttcatattcatattcaaagcgaaccaaaaaaagggaatatattagtactattcatttgactaaaatccaatcttaaaacaaaattatagctaacactagtaataaactgaaaccaattgaaataggaagagctgagtcaacacaaaataaaccgaaaaccaaatagatatcataactatgattctataccaaaacattaatcatatttagatttgaaatagttgcacaaaaatttagatttgaaataactcagatacccataattacaattataaacaaggatatgtagttattttaagactgaaattaaaaacaaaaacaaaaaaacaaacaaatattttgtgcatttttggatatccaaatatttcaaaacaatttagatttttttggcatttcaagtattttgagtta

SEQ ID NO: 42313 - DNA, 543 bp, Arabidopsis thaliana columbia
tacatgaatctaattataaaaaataataattatattaaatagatgaatttatcaaaattaacatcaaaatcaataaaaaaccataatcatatttttccgacaattttaaaaacaaaaacccatgcgtacatctgtgttcatctagtatcttataaaaggcttttaaacatctcataaaacgtattacttatacaataaaagcttataaaatacaaacatcttataaaaagcttttaaacatttgataaaaggtttataaacttcttataaaagcttataaacatcttataaacatatcacgaacatctgagcattccaataaatgatatactgtatgtatcaaattggagcgtatatgagaaatcaaacatctgataaaacgtattacaatgaaagcttatcaaatttgtaatatttttttaacagaatcttgtaaaagcttataaagtcttaaaaatattttgttaaaaaagcttttttattaacacgatataataacttacacagcggtaactctggagaagacggagatagcgatgaaaa

SEQ ID NO: 42314 - DNA, 607 bp, Arabidopsis thaliana columbia
gtaacttatcaattgttcgaatttctgtggattttatgcaatcagtattcgtaaagtaacttggttttataagtctgttctcaatttccatggcagcaaaagaaaacgtttagtctgtttacttcgttagcttataatccaaattcaacggccacgatcagctagactactgtaaatcaggtggtcgtgacagcacaagatcaacgatctgagttcttccttcttcgctcatatgctaaattctgattgaaacatctgacgaattcgttcttcccctttctaatttgattctccttggaacaaacaagctctgttacagagatcagagtcgaatccgtaacaccattgttgattctctaaagcatctactgatttcaatcgtgaaattagccggtggtgcatggaagctcctttagcggagagttagtttcaattttgattcatcaatggcgtcttggcttaaagctgccgaaggtaaattctaatggtttatctgcaactgaaattcgtgatacaaatttttgaagtatcagtttttttttcgcagatttatttgaggttgttgatcgaagagcaaaatcagtggttgaagactttcagaagacag

SEQ ID NO: 42315 - DNA, 282 bp, Arabidopsis thaliana columbia
  unsure (1)..(282): unsure at all n locations
aattataagaaatgataattatattaaagagatgaatttatcaaaattaacatcgaaatcaataaaaaaccataatcatatttttcctagaattttaaaaacaagaacgcatgcgtacatatcattgtcgatctaggtatcgtataagaagcttttaagcatctcataaaacgtattacttatagaatacaancttatacaatacaaacatcttgtagaaaacttttaaacatttgataagagttttatagacttcttataaaatcttataaacatcttata

SEQ ID NO: 42316 - DNA, 554 bp, Arabidopsis thaliana columbia
ccctttagtcaaacttataagcccaagaagagcacccgtttaagactatttgaagacgtcatgcctgatgaaattaaccaaacaaaataagagagagaggcaagtctcatgttttcttttcaagtttcagtacgtgatgtcgtgatggactgttgtgtacttgtgtgttttttaattttcttttctatcagactttttgaatcaagtcgtattgatgatatggatcatcaggtgatatgatgactctcattacgttggaaaattcatttgtttatccaaatgggtatttagttgatgtaaacctcaacaagttgaaacttgaaacacgactcgaatattccaaagaacccaaaagctaaaactaaaatagaaaacgtcaaccagtgcgagccacatgtccatatctcataaccccccctggtcatactttgaccatatattatttgtgtattcatctcataacccaattttaaaagtacaatttatatacattcaatttattcggacttgatctcacgactttattccgctcaacgtatttatatgcacatttt

SEQ ID NO: 42317 - DNA, 709 bp, Arabidopsis thaliana columbia
tacccgagtattgaaataataagcaactcgagatgtgaagaccaacacaagtgttgaagctttcagcatacctttctatcatatccgtaccagagcaagtgttgctttgataaatgaacaggcaaaagaagagttgaatcgcgcagaaataacagaggtccaagctggagtagaaagagagacgagctatcatctctcacaggggaatttgaagtagaagcttctactctccaaagatctcccctggctgctaacgaatgttccatactacttgtcctagtttcataacttgatgatagctcaaccgttccctacaaggagcagaaactgcaagctgtaaacaaatttcactcttggcaggaactccattaaacttgattcaaaacatcaataatttcttccagactcttattgattgaagccatagcctaaaacaatcctattttcgcaaggtagtagtaatcagaaagcccctaaattccaaaactttgcatatgctcattctcaatctctaagaaatctcctacattcaaatacaatctagatatctctgcagtaagaaacaaaataaaaacttgaaattgcagaactacaacaaagtacctttgctctcctatgtaatccaatagtccttaaatcgaattctgtaactttctcctcatacacagtaccagaggaagcagtatctgtcttagaaaacgctgagttc

SEQ ID NO: 42318 - DNA, 545 bp, Arabidopsis thaliana columbia
tccaaatatattgttaatatgatttcattgttgattctcttctttcgtcgatcttatggtgctttgtcgtcttttcttcttgttgttttgtaatattctccactatcctacaaatgaataaaacttcactttatgcttatacgtataacgagtattgttgatgaatgatgtatatggatcgtataacgttattccataagagctaaataaaaagtttgcctactttgactagacattttttacaaacacttctgttttcttgcgaatagtattttctttgagcttatcagataaatgtctacagtctacactaaatgtctaaaatcataagacctttcgcaagtataataactttgaccaaaatagtttaatgatttctttctagtataattttaattatattttgtaatacaaatgattcataacaataattaacaaataatcaagaaaaaaaaaacttaccaaaatatttttttgtgttaaatacttttcctagaacattaatatttatgcccacagtaataagaaagagaagatttgtatat

SEQ ID NO: 42319 - DNA, 571 bp, Arabidopsis thaliana columbia
atgatgtgattgtgtactagatgacgagagaatatatggaataaagaattgtttgttacaattaagttaggcaagtttcaaaacacataaataatataactaaatacattgtatcagtatatcatatatagttgtagtatgtgatcatgatagtgaaatattagaataatagatatataaatattcatattgtagtagaattgatattcgagaaatagatgaatctaatcataaaacataataattatattaaataggtaaatttatcaaaatgaacaacaaaatcaacaaaaacccataatcatatttttcgacgattttaaaaacaaaaactcatgcatagcatgggtgttcatctagttaaaataaaatataataaaaaaaacgagaaacatattagtgggattcatcccctaagtggttgtttttagtaaatagcttgacttttttagacttcaggagtgagatggactaggagaatacttttgttgcttctctgtggattgttgccttgtcagccatggtggtgtataagcggtggagcatgcttgttccaaggaacatgtagcag

SEQ ID NO: 42320 - DNA, 550 bp, Arabidopsis thaliana columbia
agcttgttgttgtcctcaatcaagacctttattttctggcgcaaatcatcattttctttcgacaatttgattgctgtctcgtgagcttcagcttctctttgactaacacatgcaatggcttgaaccattgttttaacctccatctgatcatcatcaccaaccatgcctgaggatcgttatttttccctcaagttcattagacaaattgtcgacaagcctgcaagagaaatccaaagagatgagctgaggcttaataattgaccctgaaaatgaaatgtatagtgtgtgcagtgaattacttttgcaatctctctttctcgtcaagtgaaaaacttaaggacttctgaagagattccatttcgtgcccggttttgaatagccttcattttacaaaacgaatcaagaaagttagacaacttaatggcataaaccttgactgaatagtcagactcaatgcaagactaacctgcatccggagaaattcattctcatcttggatagacgaaagtttctttgattcctgattctgcaaaagacaacaagaacaagt

SEQ ID NO: 42321 - DNA, 568 bp, Arabidopsis thaliana columbia
tgggaaacaaggactcgaaaggctcttcttcttcaaccaatccgaaagaggagattgctgctgtacctcagcctcaacagtcaccaccgcaattgatccgaaaatcgcaaccacagcagccattaccaccaccttcgtctgagatgcctcttctctatccgtgttacaaaagagaagactatgagaaaatgagcgaagagacaatcgatatgctcttagcgacttacggaatcatgacagtccctggcgatttagctgacaagagaaagtttgcttttgaaacctttcgttgggatcataagaacaatcaccccaaagcttagcaactacttgtctagtataatgaaactaacgttttatgattggacctaaacacattcataattcgttcattaacacaagaaaatataaatcaaaatgctagtacttgtacaatatcgaatattttaatcactttaacatctcttgaacaagtttcagaaaaaattgttaagactaaaaggccctaattttaccagaatgattatagttttatcttgagttttgccaaaggtcgaaaaatgaattg

SEQ ID NO: 42322 - DNA, 669 bp, Arabidopsis thaliana columbia
  unsure (1)..(669): unsure at all n locations
ccgtttcttcactcctcaagctctagcccgacccagtaggacgaggaagattttcgctaaacctgacaaagtctcgggaagaacccgaagccctagaaaaacgaagcttcaacgcgaagtcgagcttaaatctcgaggcggtgataaactccagccagtttctgatgccggcgggaacagctacttatacacgtcttcctcctagggaagattactatgatgtctctcttttgtcttcatcttatttaaaagtttctgaagaagtgaagctatctgagtccaatgtcgcgagggttgaggaaaagattgaaactttgagggaaattgaggaagaagagaaagaaaaggaggtgaagagttatgatgatgatgatatttggggaaattacagaagattagatgtgtttgaagggagttcaagatcaattgatgaagatgatgaagattgggaagacgaagtgtttgagtatggtgatgaaactgatgcggagaaagatgatagtgaagggtctgaattgaaggatggagaagtgttatgtttcccggtgaagaggaagaggatgaaattggggtgaaggagaaaggagttccggctgtgatgangtgttcgatagagcgagatatatgtagacccgagatgagggaatgtgtgtgcgtttagagagaaag

SEQ ID NO: 42323 - DNA, 440 bp, Arabidopsis thaliana columbia
  unsure (1)..(440): unsure at all n locations
atcccaggcttatagccagtggtataacggtaagtcgcgatacctaggcgttagacatagcgcaatacgtgagttaatcatccattgggtgattactatagaatttgttcggagcctacaaaatctagcggatcacttaaaaaaaaggattagctagagacatggtgatcaagtaggctagaggagtgggattaaagtccatttagactttttaattgtggaatacccaattcccctctaatacaacgttagaggctaagttcaattcggaaagcccatacttagagattgaagcactggtttatatcatcccaaagtaagtgcttcgatctccaagaaaatgttaggttaaacttttcttcttaatagatcttttgaaaaattacattttgcaggtgcaaaagattanaagatctacctatatgagtttgaagtgtagc

SEQ ID NO: 42324 - DNA, 489 bp, Arabidopsis thaliana columbia
tccattccctattgtatcacccaagattttctgcgtcgataattgagtggtagcttcactagaaactaatctgccttcgtccatatatctttgcagacccacatctggtattttcctctgctcctctaactttactgttttccctgtatctatattgcctgagaaacttgcagtcttatgcttggttgcaacttcaggaaggcgattttgataatttgtccctttaactcgtttggagtcatcgactaaacgatgctgcagactatttggattgttaattctgttcccaagataagtacttgggtgagacacattaacacttgaaccgagtctgcctcgatcagacgaaaaatctggattcaagccagtgtcattagttgtcatgttctcaaaatacactccattattggcaagactctgtgtgtattgaagctgtaccgcttcctgaccttggctaaaattcctagattcttcatccttgggggaaac

SEQ ID NO: 42325 - DNA, 544 bp, Arabidopsis thaliana columbia
gacaagatgaagaggaagcaatccagctagatgttcagcaacagaagccatggctgctttcacggggctcctatgttataaaaatgaaggagtaaggaaaaactcatctactctaattccctcatgacgagcaaaatttaactaggaaagtatcataaaatttctgctcataacaagctgctaacatatacgtgttattacctcagatcccataatagtgatcgcccgttgcattgcaaatggctctcccatgaagaggcctccgactgaacaacaacaaccatgttcgaaagcgcctttgcttgataatgcttgtcaatcagtagcggatcaccactgatgagccaaaagataggaatttcaagagtggacctgctgtgggcatgacctcctgagttatatacaaggatacttacagcgttaatgccaatcatgatattatatcaacatcaccaatgcatgacatcaagtagcaaataacttgacaaaatttgaataggacgtgaataaagacatctgaagtgaaatgctgagcagtaggata

SEQ ID NO: 42326 - DNA, 533 bp, Arabidopsis thaliana columbia
ctaaagatttagtgactctactagtggcgacaccgccttctctctgaggtcggagtggacgctatctggctagcagaccgacagctgataagctccactggatcttcgattctgcgagtgcggcgcatgtacttggtcaacgagtatcctcataaacgacatgctgaacgccaagcggaagcaatcagaggccgggcttactgatgacggaccagctaggaggaggagtagcaacatcctgggctacaacgctcagacgccgtggcttcatgagagtcacgactccagattctccgctatacgaaggtcaataggaactcggggccacgcggcctctctaccactggctaatatggtatcgaccgttcaagacttgattgatcccgactttgatccactgattgccatcctcgacgaagaaccgcgtttcttgaaaccgttgccgtcgcggatatctgcggaggatctggaatttttgcgctttcggggagcgctggcgatcccgagagcgggctacggattgagctactacg

SEQ ID NO: 42327 - DNA, 643 bp, Arabidopsis thaliana columbia
gtctaaggtatgtattcttatgggaattcaagaattcttaaaatctttgtatctacgcttttattcagtagttgtcttcctgcacgacagatgaagcattgtgatgaagaggtgactgaaattgaagtgaaacctgatggttcttggcgtgtaaagttcaaaagagagagtgagcgaagggaactgggggaactctcacagtggcatgcacctgatggtagcctttgcccctctgctgttgatattaaacggaagatggaaatgttaccggttaagcaagaaggttactcagatggtccagccccgctaaaacttggaataaggaagaatcgtaatggcatttgggaagttagcaaacctaatacaaatggattatcttccagtaataggcaagaaaaggttgggtatcaggagaagaatattataccaatgagtagtagtgctactggaagtggtagggatggtgatgatgcaagcgtaaaccaggatgctattggaacttttgactttgtagccaacgcgatggaacttgattccatttccatgaatgttgattcaggttataacttcctgacagaaaccaatctggcgagggtggaaataatgaagtcatcgttctgagtgattctgatgacgagaatga

SEQ ID NO: 42328 - DNA, 804 bp, Arabidopsis thaliana columbia
tctactgtcattttataattttcatttttcttggttgaaatcaaatccgaaaaaaaaggctaaacgagtgaaccaaggaatttgcttttcatgtagacagacaaaaaaaaatattgtaaagataacatgttcattctcgaatagtcgaataatgtctctttctgttcattaataccacaaaagagaagccaagccacttgcgcggagaggattagaaaacaacaatagcaaaacatgaaaaaatgttcgaaaaatgaaatttcatttttagttttaagacaaagattcttcaactatagtttctaattttggtttcttagatttcgaaactgagatcctatgcataaactccgccgccgaaaactcttcgatatcttctaggttcagctttgatcccgctgaaatcaccttgacgtcatctccttccccgtccggcgaaacccttccgttattatgacagtgtttcacggcggcggaagaatgatcacttcccacgcggtggcggcgctgtttcttagcagctacgaataaccgagccaaatccgaagcattagcagctgacgtggcacgcgtcatagggaaagctacgtacacgtggcagcctttgatttgaaggtcgtcatcggcggctaacggacaaaacttccgaccgatctttaaagactttgcgtcgacgaggaagaagcttggaatctccatcataagctcggcagctttcatcggcgcgtgaatgttacgtactccaccgtcggggagaatcactttcgccatgtaaccaacgtttattggggggatcctctagac

SEQ ID NO: 42329 - DNA, 473 bp, Arabidopsis thaliana columbia
tatgactcgagaagatgagacgagacgtggtcacgtgatcacgccacgtggataataaagaaacatctggaagattattttatccgtccctggacatgggcctagctctcggcccataactaatgtgcgagaaaaactactgcaagctcatcgcatgctaccagtagtctagtactgatcaaaggtttaatttgtgtgtaagaaaaaacttatatataaataaaaaatagtttaaatctaatcaatatgattttatctggatcaaatgcctggaaagtatatgtctggtgtaaacatttaacttgatcagattttgtaatactttcacttaagtttcatatcatgaaaacagatttcagatattttgtagtcattatatttttggaggatagcaaattgcacactcatacacatttggctatatgagaccacgtttcctttcttgcgaatcaagccctcttttttgtcccgct

SEQ ID NO: 42330 - DNA, 524 bp, Arabidopsis thaliana columbia
ataatcccaatataattacttctcttttcagtcaaaataaaaataaaaataaaaatcgtcagctcaattaacaaaacggactaacgagttcgtctcctcgacgcaccgcacaataacctccgtcgcattcgcaggtaattttgtttctctttctcctccatctttcctccaacgaattcgtcttactcagtcgtggatccaaacaattccggtcataatcgtagccttgaacggcggttttcgcggcagtggaatccgagtctcgctctctcattcctaagatgtatcgattactctcttcaaacatcgaattagggttttgtttatgttatctgatcagacatcagagtttaggatcctttggattctaattttttccgatcatcacaatttgtcaatttctactttcccgatgagttttaaaattggacccactcaaaattcaatttatcggataagcaaacatcccaaaattaatatgaaccgggatcataacataatgggccttttcagcactgaattaa

SEQ ID NO: 42331 - DNA, 531 bp, Arabidopsis thaliana columbia
tgtcatagtagcctcaccaccagcgggacaaaattagatagaagaaagtttagtttgcttagacaacctaaattccgcagaggtagctaggcagttttttgtggcagcaggaaattttaacttggtgaaaatccattactgtatagtgataaatcagataagagattaatggtcagatacctgctccttgtggtagctttgaacattttctggataactgctaatgaaggaagattccaacaatcagcagagaataggaccaggttccaacttcaagatattgcaccacttcttccatggaggctttcagttctggcacaccatttgatttgagcaaagcgaccctattttctaagctgaactcagatcttatctgtttccaacgattttcaaacagtctatcagctagcatcccagcttacacagtttcctttccaaaagtttgctcaagcatacaggcatacatgtcagttactgtgcgaacagccattgttgcaagctccatgcgatttgacctaaagttgcacagag

SEQ ID NO: 42332 - DNA, 688 bp, Arabidopsis thaliana columbia
ctaaatggtaccctatatttatgtagcttttctaaaatagccgaggttttatttaattatcaaaaaagtcttttaagtctaaaagtaaaactcggtcacgaccaaagtaaaaactacgaaacagtaccttttgtttatgtatacttacaaaagtatcccaaatgtatttaattatcaaaaaggtccgttttaattacaatcactgaataatcatctggtgttactctctctgctcacaaatggccgcagctacaacaaccttatcatcatcttcatcatcaccatcgctaactctcatcaatgcctcacacagatttgtctctgtaactcccttctcttctaactctatattcctccgccgccgattccgccgcctaaatcgctcactcgcttcgtctagctcccacgtacgttctgattatctcctactcatagaattgtgtaatccgaatccgaatccgaatttactcaatctctttatccttagtcgcgtaggcgatacgaatcagacgatagattcttcggcggtggtgacaattacgatgttgttcccgatgacgacggatttagcgacgatgatgatgaagaagacgaaagagaaagcagtgtcgatcttttgatcagattcttgagaagcatgttcaagaaagtctcgaaacgaactaaaaaagcatcgcgagcggatttt

SEQ ID NO: 42333 - DNA, 601 bp, Arabidopsis thaliana columbia
tctttgaatactaactctatcatttgtcttgatggtgcaccccacttatctttatttattttttcttcttcttttaagattaccattaaagctcacgattttcatctccacatacatatctcctctcttcttctttctttcaaaaacactcttgttttaataaaacaaaagactaaaatacatagatttttggtgacttttttttgatcaaaatatttagatataaattcatattttgtttagagattttttggtcaaaaaatctgattcatacatatactcagatacatagtagtacccaagcatcatagttgtacctaaacgacaagattcatacacaaccttagaaactaaaacaccaaccgaacaatagtacctaaacacgtatatttatacaaaaaacttagataccaaaacacaacccaaactattgtacataaagcaaaatccaatacaattgtatctaaaaaccacaaccctcaaaccaccaaagcctctttttcttcttcttcccattgttattgctttctccttcgcctttgcctttttcttctttccttctccgcttttcttcagtataaggtttgctgacttgaatgga

SEQ ID NO: 42334 - DNA, 608 bp, Arabidopsis thaliana columbia
gaggttttgatgcttgactttctagctgaatctgataatgacatatcaactatagcgtctgctgctgctacagatttttcttgttcctcttcctctctaacaagaaagctccctctggcctttgatttagttcttgaactctttctcataaccttgtctggttctacttgtggtttacaacattttctcttaaactcaggctgtgaacttgaactaacttcctccagattatgggcagattcagggatgtatgaggcatcttcattaacaccgaagttcgagtcaagatttgagcctttccgggatttggtgcgaggattttttttaacatattttgctccacgtttagctttcttccttggctgtgagcaacgtgtgtggaagagtgaaatggtttccaaacatgggagcgctagaactaacgatcttgacggttctgatccgtgttttccgtgcaatgaagctgaaacaagctctcggggttgctcagattctataggtacttcttcttcaggtgaaaggggagacatattcaagtcaattccattctctgcaccaagacattgatagctttcaataaatcaagacaatgttacaaaaacaataat

SEQ ID NO: 42335 - DNA, 569 bp, Arabidopsis thaliana columbia
ggatgatggatgttgatgtggacaccatatcaccaatataacactttatataatggttgttgatgaatgtatagctctctatgtgattatcctttattattacttcaagacatcattctaggttctacatatcatattttttacattgattggtaacaaaactataacaaaaattataccactaacctcatatatataataaaataataacacttgtaaaattggagagagtcgcgcgagtgagatctacgcgctggcgatttctctctcaactcttcttcttcttctgatcacaaactcttgctctgtcgatgtgtttcttcgttgattccggcgatgaagagaccctgtggttcatggcgcttcaactgtgatccgctacatattctcggcaaatcaatccattcaaaataaagggagcagtgaaggggagaagattccacgagacaccgctggtaagagctatattggcggtgtacttcgcggagaggaagggtaagacttcacggtgaagaacaagggttgacgggagttagattggaagactagagattcaggaggttcattgg

SEQ ID NO: 42336 - DNA, 520 bp, Arabidopsis thaliana columbia
taacggccgccagtgtgctctaaaggagaccacggcagaatttcgattgcgatcccgattgtccgttccatatatagagtcgaaatggcgagaatgaggaaagaagcaagaaggggtctgtggttcatgcagcaagcagtcttgccgatcgcgcaaacaaggaagcccgcaccaacagcaattttcctgtttaaccgacagtttgccgttgagacagcgtcgccttttgtgcgaaacaacaagatcccgtagctccatgtgcgctgagtatgttcagtcgttgctgtctctggtgggcctctttagaatgctattcttctataccatttctgtcttctttcttctgtattctggcctcggcgcatcagaactcacgactctggtgcggacctttccttctcttatcaatgccacgcaaagcgagcttcaggccggcctccgcgtcggctgctttagcagtacagatcttgttaaggtctgtatctatccattaatattttcatgtcgtgcttatacggca

SEQ ID NO: 42337 - DNA, 1071 bp, Arabidopsis thaliana columbia
atttcgcgttggtttatcctccgagaaccacttgaatgtgaaatccggaaacctctccgaaacattgaacacagtttcaatatgatctacatcttccatttttttagcttttgcttcttgctggcttgacgacccttccacaaggcataccttgtgcattcctgatttcttcatgactggcttgtcctttatatcatacatatcaaaaagccctatctccttggagataagaaccactgaagcatgcacaaagggggccatcttatagctacttggctcgactttgcgtttgatttcaacaggttcaatcaagtttctatccgtgaaatccttaagaatgaccttcacaacatcttcgggtttgagaatgacctcttcagtgccctcttgtgatgatatgtctttagtactcagaatgccctcccccatccaccaatacatcagcatcgttctattcacctcttgattttcagggaagacagcgaaggtcagcaggcagatcttccgttgatcactaagttcctcgaattcgcgtagcacatatctgaaaaccgcgcgacttctaagatctgctttatttgcatggatcccgggcaggcaaacaattcctttgccgttattattatccccgtcgccatcgtcatcatccaatcctttggcttttttacgcttgttgggcaacaaggggacttgacacatcaagttaaagatcttcttgttgatatcgtccaagtctttcttcatacctaaggtcaaggggggtttcgtagggtttttcttctgctcttttgccacattttcaagcagcaattcaagtggacgaatatgtttccacacctcctctgcgacttcactgcggagatattgcagcttagccacgtcctccttaagcaaacgaagatttcgttgcagcttaggaatatgatgatcatctgggccttctggcttagcattaggaataggggcactttctgctcttcccagattcgtctgtggttggtcagcagttatcagtccatcaactcagcatcataggttctagccctggttatagcgcctggaagatcactt

SEQ ID NO: 42338 - DNA, 810 bp, Arabidopsis thaliana columbia
ccctccgatactaattatctaattgaaaaaccttaatcgtgctagttagccagttacaccttaaaatcaatatcatcaaaaggtatatggaccgaaaaataaatagattttgaagcaatcacaatcgtatgcgttacacaaagtttacaagtactaatcaagagagtcttgcatttggtaagcgacaattacaaaacatttgataaattttcaaagaaacataaactctacaagcgagagagagacacttgatatctctcattccactccattataaaggcgaaaaggacagtgataacaaaagaaataccaaagaacaaagacacaaacttggacaactcatgactgttattggtagaagaatgtggagggtaaagaattaaacccttctgttccactctgaccaagactgttttgatccacaaagccatcaagctcgaaggcaaacgtgtctatgcttgcatgcgcaacattccaatagctatccgtctccggaatcctcagttcagctccaaaacaagtactgggaggaagaggtggaagctcatgatcacaatgctcagcattactggttatagattgataaccacattcagcctcctgaggccacccattgtatgagaactcaatagagttctggttttggttgttggtcgatgagtagagattgttattgttgttattgttgctgttagtagcttctagttggcttggagggttgaataactcggaaatgaaacgttgggattcatcaggagacacaaaggaagttactgaggagccacgaggatatcggagtagacaaagttg

SEQ ID NO: 42339 - DNA, 1064 bp, Arabidopsis thaliana columbia
aaagctctgtgcttttacagattcgtggttgggattttgtgttggagggcttttgattttggcagccttgcctattttggttcctaatttgattaggtgagtcacctttcttaatttggctgtgaactttggggtattgattctgtggttgagaatttttgggtcctttggtggttacgatgagcggaagcttcactgagagtttcgccgatgatggcaagcttcttctttgtgtggctgagaatggccactcgtttgaatttcaatgcagcgagactacttcagttgaatctgtgatgcgtttcgttgaatctgtttctggtattgccttatctgatcagcttcttctctcgctagacatgaagcttgagccacaaaagctgctttctgcttttggacttcctgcaagtgacagggaagtgtttgttttcaacaaggctatgctgcaaagtaactctcatccgccatcaccagaagatgtagatttgcaagacgttgctgatgctttaccaccggcttcattacatgaacatcatcccttggatgatgcatcggatccagctttaaaggctttacctttgtatgaaaggcaatttcgttaccatttccataaaggccgcaccatctacaattgtacggttgtgaagcatgagaactgcgaaaggttaacgagagagcaaaaggtacagcagcgggctgttgaagttgctactaggaatctggaacagtattacagggtgatctatcagaactttcttgaatttatgaagcgttataagcatcaacaccgcctccactctgatttgctgatgaattttggaagggatattgagaaattgaggtcagccaagattcacccttatcttcaaactgagtcaaggaaatgcttgttggactttgtcaaggaagataacctcaaaaaggctgtggagaattgtgcaagctctcacaggcaatttgagaataagattgcacagttccagcagatgtttgtcgaggtcaagcgcaaggtagaagagttgtttgcctgcagggcttctttatcaatgaagaacttagaagtg

SEQ ID NO: 42340 - DNA, 574 bp, Arabidopsis thaliana columbia
gttgacgttacgtgtggttgtgaagaagaagaaggttgcattgcgaattacggatctgtaaatggtgattggggacgagaatcgttctctagattgcttgtgaaggtttcttggtctgaggctaaaaagctttctcagttagcttatttgtgtaacttggcttacacgatacctgagatcaagggtgaggatttgagaagaaactatgggttaaagtttgtgacatcttcattggaaaagaaagctaaagcagcgatacttagagagaaactagagcaagatccaacacatgtccctgttattacatccccggatttagaatccgagaagcagtctcaacgatcagcttcatcttctgcttctgcttacaagattgctgcttcagctgcgtcttacattcactcttgcaaagagtatgatctttcagaaccaatttataaatcagctgctgctgctcaggctgcagcgtctaccatgaccgcggtggttgctgcgggtgaggaggagaagctagaagcggcaagggagttacagtcgctacaatcatctccttgtgagtggtttgtatgtgatg

SEQ ID NO: 42341 - DNA, 716 bp, Arabidopsis thaliana columbia
  unsure (1)..(716): unsure at all n locations
tagaagtaacggccgccagtgtttagattggtaagacactatgtggtagttaagcagtaaattcacacataccctattgttgtttctatcaaaataagaagaattggtacaatcacagcatacatacacaatagctatctctaaccaaattggcacagtcaaagtcacaacctttaagacctcaaaaaccaattgaggacatacccgattcaaggaattagaaatcaggaaatgggtagttagattcgtgaaagaaggattaagaatcagaaaagtcgcagataataacagaggaagagggagagagagagagagagagagacctttaacgaaaagcgtagaggagaaagatctggagaagaggagaggagtgaaggagcgataaaggaactgggtgagcatttcttttgaagccgtggctgttgccgcgatctcaccgccggcgaaatcacactctatgaactttattctcgctgttgttcttccgttccatttaccatataataaaccaaatttaagtccacgtcagcaattctaaccacactgtaaaaaaacaaaacatcatcgctccctgagagcaaaaccctaatcgtcgattctgctacattcttccggattctcagctgctgaaatctccggtgagtgttccacactctgtcaattttggttattanaattttgtgtcatttcttttgattgatttttagtttaaaaat

SEQ ID NO: 42342 - DNA, 1334 bp, Arabidopsis thaliana columbia
ttcgctctaaattctctctaatttagtaaattgagttcactcgtttagccaaaactacatttctcttttgacatatttacataacaaatgtacacattggaggcatttattgtgactatatcattctttgcatctgaagcaaaggtagactcgaaaatgacatcgcaccattcgatagtttctcctacttttttagctttcatctttttgttaacgcgattctagaaaacaaaaccttcttttgtcgtcaaagcaagagtaaaaaggagttatgctttgtcttttattttcttaaaactttctgttaagtgtatgcaagtgtgccagattcattggaaaacttgcatcatgtagtgagaactcaaaattgtcatctatcataagatggtttctttactagcttctaattttttgagaagttaaagtaagcactaagcacctaataacgttgatgtccaacctaaaaaggagaaaataaccctgaaagattctacagttaattggttccggaaattaacaatccaccgtaggaagcgactatactaccacaaaatgaataaaagtttagtaatctgagtacgtatgctttacaataaagttatagaatatattttcatcatccgattttttattagaaaaaaatcagcaattccctaatatcgcttgcccgcaatatagctttctagtacttcgatttcctgccctaatattcattgttatgctaatgttcatcttttgtcttctctccagtcccagccatggatcgatccctccaaagcacacacgcaaaactcgtggcgcgtgacatccaacgcctgacacagtcacctacagaatccaactctttctctctgcttggcggacggtgcgtttcacgcgtagagatagtaggcacaatcgtctctcgtgatctgaccccaaagtttctcaagttcggcgtcgacgatggcaccggctgcgtcacgtgcgtcatgtggctcaaccaactcacgtcttcttacttctcccggtgggatccagccacgattctgctgctcgcaagtgccgcgcggaaacaagccgcacaaatcagaatcggagccgtggctcgcgttcgcggccgcgtcggctcgtacagaggagtgatgcagatcacggctaatgtgcagtaggccgagagagacccgaacgcggagatcttgcactggttggagtgtttaaagcttggtcaaagttgttatcgtgttcgtattcaaagttaatcaacttgggaaagggagagtcatgaaatgtgtgctgaagatgaaagatcaagagaatgtacaccaacaccaaagttgtctttctcaaactca

SEQ ID NO: 42343 - DNA, 1052 bp, Arabidopsis thaliana columbia
ccacaaagacgacaagatttctttaatgaaacattcatgggcgtcaacatattgatgaacttttgagaaaatgatctcacgaatcatataaaaagaagaaatccgaccaattttataagtcaggaatctaagaaacgaaactttttccaatttattcccaaatctagtattgattattcccgtaaacaagaaaaattaccgaaatcctctcaatcatccctcgcaggctgttccttttccgagatgacaacttctatgaagtccttggccaactgttccatcgaagattcagccagcgtgataacaggcttatagtaattagagtgggcatctacacactttatcttatacacttaacaagaccaccagtttccttcgcgcaatcttccaaagccttaaatgattctttgcaatcacctcctttcatgaagtcgcacaaccgcttaacaagtagttcgtcgtccctctctgtatatccttcctttggttgatcagttgatgactctcccactttcggcgggaataaagagtagagctccttccacaccccgtctacagacgcttccaccatcgctcgtacgtgagcactctctttcttcggcttgtcttcctgattcgtgtagtcaaacatctcccacgggaattggtcgcttcgaagactaagctcggcggggatccccttggatgacgatggggatgacaatgagggtgacgaggacgtcccatttttctcaaccgagagatcggatcttatggaaatcggcgatactaaagtgactagagagttcgaaagagacgaaccaatttgctagggtttcgatactaagaaatttaaaacttaatcgtttgggaaatcttatcttctgatattccaaaagattagtatataagagcatgtccattaaagagtcctaataatggaatccttacatttttatactaataaattttgaaattttttatgtttagagtttttgttaaatcctaaacatttttcttgtccaatggtgagtccttaaatgggtttaaaaaaaaaaaaaatataatagtta

SEQ ID NO: 42344 - DNA, 563 bp, Arabidopsis thaliana columbia
tgtaccatgaccagtacatttcaaataatgaccaaatgtttcctttgtgggataaggaagcttggaaaaggctcctaactcttttgagtatataaaacgctgcttcctgaagtcaaagaaaatttcttccatgtctcccgaggatgctgaatctgtcatctgcaaaacagcaaaatacttaagactgttaaaaaacatgagaagtaagagtactgataaaatcaagcatttccacgccaaagaggattcaaaaagtataggggtttaattcatcaaattttacgcagagagaaatggcagagacaaattatcggtttgttaaggggaaaaacactgaactttacatatatcacgagaacaacctagaaacatagaaacccattcatggagactactttagcgacaacttcactattaaacaaaaaatcttgaatgaacttacttggctacgaaaatgaagaggcacaacttctttagaaccagaaaatttggctggtgtaactttacatgcatctgcctggtcgatactgttaacctgtgaataaacagacacatgcacagga

SEQ ID NO: 42345 - DNA, 728 bp, Arabidopsis thaliana columbia
aaagtcaaactttgtcttcccaatggctctgggcaaaaaggaagattggaactctcgagggatattataaagattgggaatagtggaaccgccctttagcttttgttattttacatttatatcctccaaattttgtgtatttcatcatttttagttttgtcacataattcggctgggcctggctgcgttgagagggatttgggctgggcctggctgagtagttaatatgtgtttttcttttttactgctgtaatcatccatcatcaaatagtaactgaaacaaaaaaaactccagataaaaaacaaacaaaactgcgcattagcttaatttaaatttagttagttttgtgttatcttcatgacaaataataaaatgaaataaaaactcataacttgtttatgattaacctccaattaacaattttaattagctcgaatattctcctcttaatccttcccgccacattcctctccgcataactataactaaattgcgttaattcagtttttcaccagttcatcacacactaatcgtaattaacactataacaaaaaaaaaaaaaatccatatttaagaacatcactatgcatccccacaattcaataaactcaaatcaatttcacaaaattttccaataagccaatttaatttcttaaaataaaaaaatggcatcaagttgttgtggggatacgtggcggcggcgtcccggagatgtcgcagtgatggg

SEQ ID NO: 42346 - DNA, 1515 bp, Arabidopsis thaliana
ttttttattttcactgtgaaaacttaacgacacactgtccttttttttattattcctgagacttaacgaaaactgttaaaaaaaatagatcgtccaccatccttaacggcgcaaaccccacaaaaacctagcgagtaccgttaaactccaacactcgccatctcagaccatccacgtgtccctcatgcgtaccacggttggaaagaatatatcaccggcgcgtgaaattgtcagaacgcgcgtggctttcctcaattggaaatttcacagacaagtagagggtaaaatagtcatttaacatcacccctgagagatcactgtcttcctctttcgctttcctcttcttaaaaaaagagttaaataaagagaagagaagagactctctcctcttcacttcgcgaactcagaaaaatcaaatctttctctctctctctctcgttgaaaaccatttctgtattgtgttgaagctacgttactactaagaagaagtgaagcaaaaacagaggtttttgaaaatggagaaaaaacaaggctttttctctgctctcagacacgaagttgtgagaggtctttcgccgtcacgatccagagcaaggtctcgttccgttagtcccgctaggtctagttcacccatgtcagctctcacttggggaagaaagaacttaactggaggaggcggtggtggtggtggcggaggttactatttagcgcaaccagagcagttaattgggagatccggaagtttgagacctgtaatggaaggtcctgatccagatgaaggaggaggaggtggtaatataggagaatctaaacgactcgggtcgggtttaggtcactgggttaaagggcagctgtctcgtgctccgtctgttgctgcgacggcggcttatcggagaaatgatctgagacttcttcttggtgtaatgggagctcctcttgctcctattcatgtctcttcctctgatcctttgcctcatcttagtatcaaaaacactccaatcgttagtctcactctctcctccttcttcttccttgtaaagttcagatttttcatcattgtccttcagatttgcaagttcatgactttgaaatcttttttagtggtggttggttttattaatcgaattttctttacttgagaatgtttctcattggtcgttggttggtggaaattgatgtcatattctttggtgggatttgatttttcttacaaaccattggagtattaaaccaaagttttgatttttcttctttggtttcttcttctgagccttatttgaacactttactgtttatcatttttactgaatcttctttgttcttactatttcttgcaggaaacatcatctgctcagtatattcttcaacagtacactgcagcttctggtggtcagaagctacaaaactccattaaaaacgcttatgcgatggggaagctcaagatgattacttcagagcttgaaactgctacaagaaccgttaggaatcgaaacccatctaaggctgagactggag

SEQ ID NO: 42347 - DNA, 594 bp, Arabidopsis thaliana columbia
tataaaaataattcaagcacaaaaaatgttattgtttgtttacagaatctctctaaaaatcaaacttggttaatgggttaagaacatccatccattttcgttgacctgagaactcaaattgacggaaaaaacttgaaaggaaccacattttctccccaaaccaaaacatcaacaaaagggtacaaacgaaaaaactaaatacttgagttttcagcatgaaaacgagacgatcttaaacgagaaaggtgtcaaccaaaatcaagcaatgggaagtacaaaatgaagatcattccaaacagtaattggctaagaaattaggagggaatgcaagagatataccagagaagaagacgaaggagaattacggtagaaagaagttacacgccaaatcagacggagacgagagaagggtgaagaagaaagtgacaatggagtgggaggagacgaagtcgtttcacagatgaaaaaatattgattttgagagaaatatcacaaagacagaagagaagaagaagaaactgaaagtgtctccgtgccgtccgggtcgggtccctctctctctctctgccgtcacgtctttcatttttctcaacg

SEQ ID NO: 42348 - DNA, 553 bp, Arabidopsis thaliana columbia
tgaatattttatgaacatatgtatggaacatgatttatgaagtttatttagttcaactcctgttttacaaaattactgtataatggttgtttgggttaacaggtgctttgatttgaatggaaaaggactttaaacatgcttttaaacagggtttttaaacgatttacaagctgctttataaggattttaaaagtgttgaaaaagctgcagtagcggttattatgaaaaaaatttacaatcgtttttaaaatgatttacaaccgtttttaaaagagatttataaacgatttataagctgttttaaaagcgttttaaaagtgttaaaaaagctgcaatagctgttattatgaaaagatttacaactgtttttaaaatgatttacaaccgttttgaaaagagaatatcaaccgttgaaaaagttacagtaatgttaaacactgtttctgttactaattaggcctaggcctgttatttagaaaaacaaactgttttaataaaaaaacacttttttttttttgttttttttttttttgggcaaataaactgactttac

SEQ ID NO: 42349 - DNA, 528 bp, Arabidopsis thaliana columbia
gatttatcagcttttgtttcttatttcataaaactttgtcatttgaatattttatgaacatctgtatggaacaagatttatgaagtttatttagttcaactcctgttttacaaaattactgtataatggttgtttgggttaacaggtgctttgatttgaatagaaaacgactttaaacatgcttttaaacagggtttttaaaaacatgcttttaaacagggtttttaaacacgatttacaagctgctttataaggattttaaaagtgttgaaaaagctgcaatagcggttattatgaaaaaaaattacaatcgtttttaaaataatttacaaccgtttttaaaagggagaaaatgtcaaataattgccgaactttcaaaaagtggccgtttaatacgtcaacttcgtctaaggccatattaaacatcaacttatcgttgaccaaacttttaaaacatggaatatcgttgaccaggcccattaagacatctcgtaaactctgttaacagacccactaacagacgtttag

SEQ ID NO: 42350 - DNA, 731 bp, Arabidopsis thaliana columbia
catttctcttgccattcatcaccttgtccactctttccccatttgtctgcagttttctccatatgcacaacaccattctcctgtaatagacaattcaaattaagtctcaaatagtctatagtgcgttagatttactacggcaactactttacactaacctggctcattgactctctccagaactcacgccacacgtttccagtggcatcacgtcctgatttctcagaaccaagttccttgaacccaaaatcatcagaagcctcccaatacttatcttgccactcaacaacaccatcagcagtaaccccacgtatcattgtccacctgcaaaccacaccatcaggtcttttctccacacccgtttgcttccaccacttcaatccatcttcgctaactccatgcgttgaagattcatccaaactatcaagaacacgagctacttcttccgcgtttgctgaagatatgagatcaaggtcatgttctgtcgataaagtctcggagctaggcttcgtctcagcctcttttcgaacctcaatcaaagactcaaaaggcgggatagtaaagctatgtctttcagaagaaagcatactctcatatggtatcgaaagagaatccgctgatttatctttctccaatacaggatttggcaaagttggaaactcagcaggcttttccacagcctgcaagtccacagaactaatttcactaccttgaggaggtgtcatgccaaa

SEQ ID NO: 42351 - DNA, 520 bp, Arabidopsis thaliana columbia
agattatttcatcaagctatgaactaatattgttttggattctagaaaacgcaaaactcgaactgaacaaaaagcaagtgtctttattccaagacctaccataaaaagcaacacacaaatccagaaacaccaccaacacacaacctcaagcgtattgatacgatccatgtaaggatgatgccacgtcagaagaagaatgttgacttgaatgatgacatggacaaaggcaaagaagaagagaaagacttgggtggaaacagaggctttgctattgaagggaatcgagtataaattagtcattactcactcatttctggtttatgctttatgttgaatgtgatagtcgagcgatgtgcttgagccaagcgatgtgcttgaagagagatcaatgttaatctgtgttttatcgttctgagattgtaaagtgaggttaagagatcctaaaccttaacacgtatgtgttaaaaaaaaggactttggttctgcaatgaaatccaaaacagagcctttgatggggaaa

SEQ ID NO: 42352 - DNA, 494 bp, Arabidopsis thaliana columbia
ctaaagctttagagtccagttctgaatacccttcataactgcacttgaagggcctgtgatcggatagatctttatataataatgtaataacagtttttgctaaaatgatggttttctttatggaaagtgagtcccaggcagcaaaagagggttatcaccaataggctgcccggggtgactttagaccacgttgcttgttagcctgacaccagtgatgctaggtatataaaaagcaggcttccccccagactaagcgttagaatccagcactgaactttgccacagtctcggtgagcacgtgagttatatatactcttctagtaacagatagagccaagcctgctgcttccgaatatatttgtctcttgttcccagtgtataagcaccggccatccttaccgttatacacacccatacccctcgagtacttccgcgtgagattcaaaggtacgaaatctccttcctccatgccaagatctctcttttttgatcag

SEQ ID NO: 42353 - DNA, 606 bp, Arabidopsis thaliana columbia
aaaaaaaaactaaatatttaaaaattgtcattctaatattgtttacattattattttttgtgaattaaggttgattattattagatgtctttgtttatgactttttaaaagtgtgttttataagtctttatctgatagtttaaagtcacatatgtttctaggcgtaactagcaattgaagatgaaagaccacgttaaaacatcacaaatatctccggcgtttagaggtttctctcaccatggatcaaattcaattgttgacacaaaatattacaaaaaaagaagaagtttaaattagctttcatttgacggtggtttgaagttaaacgtactgatggattggaaaaacatacgattctagtgaaaacaagtcaacctaacaacatatattgcagagactggtccacactcgatcccttcatggaccgtagcattcacggccaatcaatctgttcattgagttttgactagtgtcaataattcataggattttgtttatatgaaataactttgatatgagtcaataattcatacgaatttgtctttttctgtgcttcttgaagaatccttttcaagatcatgagatccctgttttaaaacggagatg

SEQ ID NO: 42354 - DNA, 406 bp, Arabidopsis thaliana columbia
caaagcttaatgcgtttccgaactaaacttttattctttttgtaataggaattttgatgtttgataagtttatattaatttatgataatgattattaatttacgatattactagactatttagttacattagattttcaaacaagttattattttatcaaatgatgttaaatattacattgatctaactcgagactgaaaaaataagtaatttatagtgattactaatttatcgagtgttaattgatagaggttctttctctgtacaaaatatttacaagttaaacttcaatttactcatgtgttcacttttttccaccttatctatttggaagttgtataattgctaaatcatgttcataattaacgtataactactatcttagatttaactttagtgaatatgc

SEQ ID NO: 42355 - DNA, 493 bp, Arabidopsis thaliana columbia
tattaaaaatggtgagaagtacttgagaactctagcatcaaattcttggactcaaatcctctagcattttgtcttatttatttggtttaaggttaacacaaatgaaatttttttatgaaaataatgtttactgagaaaatattttgttagaaatctaaatgcaaaatgcaaaaacaaattgttgatttatggagcttagtatcaaataggaattttgtcttctagcctattaaaaaactaacctaaattttacatttagatacttttaaattatgaaatataaagtgaaagcccgcacgtgctacgtgcatctcagtgagttattaatttacgatattactagactatatagttacattagattttcaaacaaattattattttatcaaattatgttaaatattacattgatataactcattgatataactcattgatatcaaattatgttaaatttatatagttacattagaccataaacataattaattta

SEQ ID NO: 42356 - DNA, 593 bp, Arabidopsis thaliana columbia
gattgcattgtatgaactaatggatgcgatcataccagcactaatgcacctaatcctatcagaactacgtagctaagcgtgcttttgtgagagtagtactaggataagtgacctccctggaagtcctcgtcttgcattgctcttttatttttactagatgagtacccgcaccacgtcggctttcactttatatttcgtaatctaaaagtatttaaatatgaaatttaggttagttttttaataggcaagaagacagaattcctatttgatactaagctccataaatcatcattttttttttgcattttgcatttaaattcctaacaaaatattttcttagtaaacattattttcagaattgttttcatttgtatcaaccttaaaccaaaaaaaaaaagacaatatgcgaagaagatcggagtacccgctctgaaattcatggtggtagtatttaagtaggaaaattaagcattgataatcgggttgtcgtttcgtttaaataaaaagggttattaagttatagtaaataggcaaatagaaccaaacccttgataagccttattaattttttgaaacataaatgtaaaataatt

SEQ ID NO: 42357 - DNA, 321 bp, Arabidopsis thaliana columbia
cactcgataaattagtaattactataaattaattatttttttaatctcgagtgagatcaatgtagtatttaacataatttaataaaataataatttggttggaaatataatgtaattatatagtctagtaatattataaattaataatcattatcataaattaatataaacttatcaaacatcggaaattcagattaaaaaagaacaaaagtttagttgtattattaattattaaaaatttagacgaaggtatactagttttgtaattctattattattactctatagaattaaattaatagtctatagaatggtttgagt

SEQ ID NO: 42358 - DNA, 688 bp, Arabidopsis thaliana columbia
tcctactccatttccagataatttcaagctattcagaatccgatttccatcactgaatctaccaacaagaagaaactcaaatgcaattgtttctaagcttaagatatctaaaaccctaacgaaaccatgtcaagcaaccaaaaacactgacgaaagtgagaaatacgaaatcaaacctcacctatcttgtgaaatacgcttcgaaatcgctgcaatttcacctgagaaactccgaattagccattgcgaaaagtgtcattttccagatattcaaatatctgaaaatctctcgaaagagcaaggattgatacaagaaattaacgaataacgtacaatatcggctgtaagatgagctgtgtcttccatggaacaaagttttgagagaagctcgtacactcaccgccgcaaacatcgtagtcgctccgccgggaagaaagagaggagaagaagttggtctaacgccgattgaatattatcaaacgacgccgtattgatggcctgtttatcttactaggtctgttttattgggcctagaggcttcttcgtacccattgttaaaacgatttattgtgctctcttaccgacaaatgtgtgcaattgtctggttggtttataggcgcatttttgggcgatttaaaatgatagtacaataaattccattttaataccattgccggcaaaaaaaata

SEQ ID NO: 42359 - DNA, 475 bp, Arabidopsis thaliana columbia
ataaatatcaaataaatatataattgatatattcatacaaataattaatttatgatattgatcattgatgggattaaacgattaataggattatcaaaaaatatattatcgtattatataattgacttgtgttatgttttacgcaagtttcaacttgaaacgatataatttattattttgtagaggtattactgtatacaacttataaagttgattttaggaatatatatgtatatttatttatttaattgaggttatagttgtaacttagccaacacaggtttctcctatgttcttctataaatacttgtagatcactaacctaactaatcattcaaacttcaactctcgctaatacttgaaagctcaaaatatcctcttgtattctgatcaaatttctggtaatttcgctcttttaatctctaactcattttgattcttatatatatgttcatatttctgatttttagccaat

SEQ ID NO: 42360 - DNA, 489 bp, Arabidopsis thaliana columbia
tgcctcacatatagtaaaacctctataaattaataatctcggtaccgtgaaattctattaatttgtaaaagtattaacttatccataaattaacaaatttgtaaggagattttcttaattttgtatttttttaattttctatgaagatataaaaatgatttcattatataaaatatacttttagaaccaattacaattatatatatatatatatatcatatccacatctagaagacaacatcaaaactttttgatgcaataaaatattagaaataaattcaaacaagaataaatgcgaatttaagccaaaaaaaaaatactaggattatatttcactaaaatttcttacatataatatatacaattataattatcaaataaatatataattgatatatttgccccagggattaatttatgatattgatcattgatcattgctgggattttcatagatatattatcgtattatattattgacttgtgtta

SEQ ID NO: 42361 - DNA, 747 bp, Arabidopsis thaliana columbia
tgtcaatgttgtgtaggatgattttgtgagcaaaagatcatagcagagagagagagagagagaaagagagcatggggtgtgctcaatctactattgctgttgtgggaaggaagaacaagaagaggatcattcaagaatctgtagtgtttgttctacagttccgtgttcctgttcagtctgatcttcagcgccaactcaaaggtgtttctcccaagacaaccatcaatcggttgacatgtttaagaaatcagattgagttggtagctgaggacacaggtatagagaaattagaccaacttcttcctcttttcttgcgtgtcaagacataaggttccatcttttctactgcagggggttcagccatctctgagttgcgtacagctttggaggagtacttgtcacttctatccggtcttatcaagaaaagttcgtgtttgcaagttttgattaacttaaacagtttagtatattcaaatggtgatattagaatatttcactctacaggtaaagatggaatggaggcctgcgtagagctcaaatggaggacctttggcgatgatcgacgagtaagttcggtgtttgcttaaattaagctgatcctaaggatattcattttgtttgttctagtatcattaaaatcttaacaatgtgaagggtgtatacaggcagagatatgttgcacaaacctttggatggagatgttgatagtgatccacatgatggctgctttggcggggatcctgatag

SEQ ID NO: 42362 - DNA, 517 bp, Arabidopsis thaliana columbia
ctttcaattgaggttaaatcctagattttcttatttttcaattgtgaaaactaaaagagcgtaatcagaaatttcctcaattgcaatgctaaatatctagggtttacaataaaaagataatgaattttgaagaagaaacagtttttagaaaaaaataaaaataaaaaaacgtctttggaggaggcgccactcgaacccagacccaaaagaaaactaaatcaatgtttaaccatttgactacgacaacatattagtattgtcaagaaaagcgattgtatatatatttaattaccatgatttaagttttgaccatagttaacgattccgttagggtagttgacggaagttaactcggaagtacaattataccaatttttttaaaaccgaaagttttaataggcaaccaaaattaacgaaggtatttttttctaaattaaatactaaaagtattaaacgtccaaattaaaaataaatggcagtatttttgagtttttttccggccacataatcaacaaat

SEQ ID NO: 42363 - DNA, 694 bp, Arabidopsis thaliana columbia
gcaggtcgactatccccttctcaaaccatcaaaaagtggtctatgcaaaaattgaccttctttgatgtcttctcactcttcttttcttctttttctttctttctttgtttttcatcatctttatgatacaggagcagtaaccagattcaactcaagaggcttcaaagctgcctgaacaagctcttgaacagtacggttacgtcgacaaacatctgagagctcctcaacctgtcctatcagagaattcacatctgctccataagcaatatcggacaatgcttgtaagaacttggtagattcggtctctgtcaaggctgttcgaggtatcaggcttacactttccttagcccaactcactgcttgtaacctgtatgttcttgtcagagctagcagcgaatatgttacctgaccaatacccaaaacaaaagaaaacggttttcaaaggccataaacatcactcaaaaaatgcagcaaaaagatagatttcctaaatttaccgtatctagccgagaactgggaagtgcccagctaatgaggctatcaatattctggtgattgtagctcccgaggaataatgatattgccctgatccgtcgaactgttcttcatcacagacttctcgaggcaaaaatgtcggttagaaaggcaatatcgagtggcaggcttctctggaaagaattgtcaaaatatattg

SEQ ID NO: 42364 - DNA, 570 bp, Arabidopsis thaliana columbia
atggtcctgctctccactgcggcgttttctgaactccacaatgaccacactgccgcgtctgcgtctgcgtttgcgtttgcgtctgaccagcgtttttccaaactttcttcttcttttgtgttttagtcattggctcatcaagaaactgaccgctggcgagccatagagggcttgaagggacgaggagaggacgacgaagatgttgtagagcttgaagatgagtcggttaacgactgcgaaccatgagaccagactctgactccggttctggctcgtttgggtctggttttgacggccggatgttgggatttgaagcaggtctcctctttaaccggttgtacaagatgtctccgatttccggttaaccaaaccggtttattcgtcggagcagaatacggcgtgaaagaagaatcatctacgaaatttgataaccattcaagttccgctatatcatccatctaacaatcaaaacatgaaaagcaagaaattaacaatgcaatgactgataatttttataaattttgcgaaaatgaaacacagattcataccggaacggaaacccgctagtgt

SEQ ID NO: 42365 - DNA, 935 bp, Arabidopsis thaliana
ttttttcaggaagattttcaagtatctttgactttcttggcctaagagataaaaaacttttacatgcaaaaaactttaaccttgtgttcaattggttctctgataattaattatatattacttattgttaactataccaaaccccaagaaattcgtatccttgccacaagattgtaagattttatcaaaaaagtaataagaactaaaatagcatattattgtgtagacaaacagtaaatgttggtttggtaatcatataattagtctaaattagaaaaaaaaattataaacattgaaaataaaagacatttagaacataaaagagtccatgagaagcttgagcaaggaaggcagcaaagaaaacctagaaggccaaaactagaggagaaacccatataacacacaccgacatattcatatagatggtgggctcggaacatcatcaccatcatcaacaacatcatcatcaaaaccatcagcagcagcaacaaaggagcaaagaagctttagggatggtggctctccacgacgccctgagaactgtttgtctcaacaccgactggacttactctgtcttctggtccatccgtccccgtccgtacgtatctctctcctcagctcctctcttttttttttattgacatgatctatctatctctcctcaaaacgatgtcttttttgttcttcaggagagttcgaggcggtggcaacggctgcaaagttggcgacgacaatggaagcttgtaagttacacttcttacaaaaaaaaattaggttacccgtatagtcaagagacttagcgtactatagttagtctttatgaaacatgattaaaaagtcaacattttcccttatggtttatcgtattatagtcaccggaaactttccccggaaagaaactaactagacagactagtattagtactctaggcttg

SEQ ID NO: 42366 - DNA, 578 bp, Arabidopsis thaliana columbia
ttcttaagtatctgtttatgaacaatgtagagcttttttttttgtaaccaaattttttttttttttttttgaattttttgattataaagtgacgaacttttataattaagatactgaatcagtaagagccaacaatggcgatgttgggtaatgttcttcatctctctccaatggtgttagccaccacgacgactacgaaaccatctcttctaaaccagagcaagtgtaccaaagccacgccatcgtcgttaaagaattgcaaaaccatagacgaactcaaaatgtttcatcgttcgctcacgaagcaaggacttgataatgatgtctccactataactaagcttgtagcacggagttgtgaattgggtactcgtgaaagtttgagctttctaaagaagtgtttgagaacagtgaatcgtatggaacttgtttcatgtacaattctttgattcgaggatatgcatcttctgggttatgcaacgaagctatattgttatttcttcgaatgatgaattctgggatttcccagataagacacgttccttttggattgagtgcgtgtcgaaaacagacgaggg

SEQ ID NO: 42367 - DNA, 726 bp, Arabidopsis thaliana columbia
agaggatcccattccaagatatttcaacttatatcaactcaagtcttacagaaatattgtttcccactgaacacgacctaacttcagtaagtaaaagccaacagacaaagaggcaggaaacagatgcttcctggttgcaattataaaaggataacatttattggcaagatttcctaccccacactaatttagattttaatgagggcaacaaaatcagatatggcagtaagcatagtcatatacctctttgatagcatttttaatatcagtcacacctcccacatcttcccaccccaaacgaccaccttcagaggcagattttgtgatgtcacgcatggcaacaggcacaaaatcatgcatagctcgagtaaagtcttctttgaccaaattatatttggatatatttgattctaaaggtagatgccggccaatggcagcatgaacagctctatcaaccaatatttcctggaaaaaaaaaaaaaaaaaaagagaattcaaagagagcacactgtagatctgcggacagaatgataatcaagttaaaacgaaatagcaagcttgaacaataaaatttataacatgaaaatcacagatagtatcagcttccaaagtctgtcaacatttctgtcaaatgtcttttctggtcttagcacaacggcaaatttaaaagcatatagaaaaatttaaataccaggtcatatgcatcatatccttcacatttagcag

SEQ ID NO: 42368 - DNA, 777 bp, Arabidopsis thaliana columbia
ttttgtaaaagtactttcttccttgactatttttgcactttaaggatttataatcagtactattcatgatatgaccccatgcttttagaatagtttatgatcaccctaagaaatttttaccatagttgcattttcaagtaccaccaatgtcagagatgacgaaggaagcggtatactcgtttggtcttcaaacaacgcaacttcaccaatcaaatgaagaaaccgtaactttaattaaatatgaaccatacaataatacaacttttcaaaattttgtccagagaccacaaagtaagctaattttgctatatactctacgtattaaggacaccatcctcaattacaaacatttgcaaccaaccaccgttcatcagaaagaatgaccaaacaccagagaatatgaggatcaagattcaagaccatgctctgcattctccgccaactccatcttcttgtgctcctgctgatgagcatcctgatttcttcctctcactgtccgtcgttaagcagctggacttccccaccgcaacaggtagcttctaccgcctccttcaaacacaaaaggaaagcataaatatctagcatcaaatactctaaggtccttccgctaactgtataccaaccttttccgtgctttcttttttgatttgttgtcgcagatttgagtcagaatctcctcaatgtctacagcatcatctacatgcgtttcaacaaattgcagttatccaaaagcctgagttgatgacaacactcggagcaagagaagtatcattttgt

SEQ ID NO: 42369 - DNA, 550 bp, Arabidopsis thaliana columbia
tgttctgattttcttctcttgcagccttgctatggtgatacaggaggtatgttgccttacatgatagtaactctatgcattgttcttctacacttttgtcttttgctaatccatatttttcttttttccagtggcatatcctcaggtgggtaatacagagttttagcaactcttttttggtcaagatcggtcaagatatcgccagaatctaacctccttgtccattcttaatttcttttttcgttaacagttttgattatgtgcatagttaatctcattcttgtgctgttacttaaaaactagatggcaaacacatcagcgattgcagctgcctttggaggaggcttgcctccgggtataaccggcacaaatgataggtgtacagtccttgtctctaacctgaatgcagatgtaagttggtcatttcccgttttgcttttgataacttagtttttcttacaatattttccaaacttaccagattcatttgtttcagagtattgatgaagataagctattcaatctattttctctttacgggaacattgta

SEQ ID NO: 42370 - DNA, 619 bp, Arabidopsis thaliana columbia
cagactgtgaagtcaagacaaatggaaaccaaacactacgtcaaatcacaaataagacataagtacagttcttatgtctataaaaaacatatatatttaaaaaggctgatatttatatgattaataatattcaaaattttgttctatagaaagtaaaacttaaatccggtgtgaaaaacaactatatgtgtaagaagtaagaatatgtgtgtatatttgttttaagtactgtaccagtatgctggagaaacgaggatgcttggagacattttgcttcaaggcatcaagaacaacgtcgggattaatctttgttttgaaacccatgatggtcacggcacataagtctatgcccggcgattggaatacacgcgccatcgggctaaccggctcctcctccccataagtcattttccttttccctcttatgtactttcttctctcatgtgttccaatggtatttataacgttgagtttgtaagtggttcaacgacaacaaaactagaatacaagtgggcatggaaaagtattagtatttatcctcacaaaaagtaaaattacatttaatgtgacgttgatatatacgatcagcttctattaacaatgatagaaaaagaaaatg

SEQ ID NO: 42371 - DNA, 543 bp, Arabidopsis thaliana columbia
tgatggatagaaagcttcctttttttaatttctgttttggacttaaaattagttgacgaaataaattaataatgcattttttgtttgtcatgtctgtaattttgcagagaacacggttaagaaggtgactttaaaaaccgtgaaggagcattgtatcatgccaagaagaaggcttacattcaaaataaatgcaagaaaataagaacaaaaaagtctattgttaatagaagatatcatttgtcatacagttcatgtctacgcattctttaatataatctcaaaatttccacagtccaaagatatcatataagaaatgacatttttcactcgaagcaactgtaacaacgccaaaggtgacgtttaaaatcacaattactgtagagaattcagaggctcaaaagactgtaactttaagagcttgaacctgtgacaaccaagactgaagtagtttgatgcaaaacggacttgttaaagagagaaagcttttgttgctgcaagaaaatagagcagagagatattagagatgagagtagagaagggagc

SEQ ID NO: 42372 - DNA, 312 bp, Arabidopsis thaliana columbia
gaaactttgaatttgttgtacagatgtgataatgacttgtgacttacttatcttgttgattcaattttcatattatcttgttgtgcatgatcatctgatcaaatacttagtggcggatttcaaatgttttttaggggaaatatcatagtagatctttaaatatttggttaaatattattaattttatgaagaagaagacgttatatagtagtatgtatattgcattggattccaatatatgattagttgattatttgaattttcggatccacttatgatacttgaattatcaatcgtcaaaaaatttgatga

SEQ ID NO: 42373 - DNA, 395 bp, Arabidopsis thaliana columbia
actttgaatttgttgtacatatgttataatgacttgtgacttacttatcttgttgattcaattttcatattatattgttgtgtattatcatcagatcatatacttattggctgatttagaaatgttttttagtggaaacatatcatagtagatcttttaaatatttttggttataaatattattaattttatgaaagaagaagaacgttagtatagtagtactgtgatattgccattggatttccaatatatgattagttgaattatttgaatttttcggatcccagcttatgatatcttgaattattcgaattcgtcaaaagaattatgatgagaatgtgttcactaaccccacctactcaagaattctccgttttacacattcacaatatatt

SEQ ID NO: 42374 - DNA, 565 bp, Arabidopsis thaliana columbia
cgattctcatcttttgacatacggtttagtttccgcagggtgttggttttaattgtttctgcgtagtgatgtccaagcagaatttttgggattttttggtttatagattacatcattacagaaccgaatgaaaattattggaagattaataatacagcctctaaaataacactttcacttttcattaatttttaccaacaacaattatgggaggatcaaaaggaccaaattccatcactacacacaactaagtaattaaaatgtacttgagctgctttaataggaaaactgtgattatacaaagattgattctaaaacctaaacataactctatctatctcctaaacactctgaaagctataaaaacattacatcttctgattaatgccaagttaatgaatgataagccgtatgcgtcgtgcaagtaattaagagttgcctcgaaggtgtctatgctctaccagaagaaacgtgtcccagattgttcaccggttgaatctgattcactacccaattcgtcatcatagctactatcagtgggaacaacttgattctgtcagcatgc

SEQ ID NO: 42375 - DNA, 942 bp, Arabidopsis thaliana columbia
aaatctccagagcagctctgtatatcaccatatgtaaacaatacattgatgtgagattcactggtagtgaatatcagtcgtctcgttcaatgattacggtcaatgttacagaagagtttcatcaatggcggattttttgtcttgtagcgggattgattgtgattttgttagcacctgttgttagcagttggctaccgttttactatacgagttctatggcggttggtgtttttctcgttgttttgattattatcttccaggttatgaggttattacctactgggaggaagaatgttatgtatcttgcgttttatggatctgttgttggtgctggatctttcattctacatcaattctcaatgatggtgaatatgattcttgttaattttgggttgagtgaggatatgtataatccggtagcgatacttgtgcttgttggggtggttattactggagctgcttttggattttggactgtgaggaagtttgttgtttcgaaagatggaggaggtgtggatgctagtgttgcacagtttgtgaaatgggctatgcgttctgttgctgctacgtttattttgcagagtagtcttgatactcctatggccatgggagcttttgttttagctagcttgtttggttttcttgttagtaaaacgaaaagctttgtagggaaaagtcattggttggtttctgctggtgagagacgtccgataatgcatggacgagctgagttccttagtcgccctggaggtggtggactgtggaagagtgctaagagtgtaccttcgtattccggctctccttcttatgatgtgattgtgagctcaccgtcttcagttaaccaggagataccgatcggaaatcaggattactattctacattccatacgacgccaaaccggaagaggatgtcgaagagagagtatgccgagttgacacaag

SEQ ID NO: 42376 - DNA, 620 bp, Arabidopsis thaliana columbia
tatattatcttaataatcctgatctttaaatcgaacaaatttagatttagcttcttttttttttgttaaaatttagatttagctttacaagatgtacctttgattatgatagaggaaaataacagtatcccacccaaatacacggttataatgagattttcatgtatgtagaaaaatcatcaaattgtaagaaaacaattggaaaaattgagtgtgttgttttgagtagcaaaatatgaagaatccatcaaaccaagaaattagcaaagatgtagaaaggaagatttggtcgatagattcacggacgtattagaaatgaccactttccgatacaatcgtcccaactaggaaaagagtcaaagcttttcgaaagaaattaaaaattcctctatgaaaaataagtcaagaaattgttttaaaaatatttaagggccaagtagaaaaggtcacatcttgccttaccaaaaaaagacagttcattgaaattttatcgggacaagtttactatttttaattaatgcgtatctacttcaaaacatgcgtcgattaacggcgattcccgtcaatttcatggcgtcccaatttttgtataaggataagagagtacttttatattttta

SEQ ID NO: 42377 - DNA, 715 bp, Arabidopsis thaliana columbia
acctttgcaaaggaagcagcgagcaaaaccatgtaagacgcactaagttttctctctaagtctaattgtggatcgtcaggactgctttgtaactaatgcgataagtgagccaagaagggggctatatatgattgataacggtgatctttcgtaacacactaatggctataagctctaatttccattcttcaaatgaaaccgttagcctcaacgaacggatgtttcacaaatgttgagccaatggatggatatactcgtctttattatcgagcaatacgcttggcgttaactattcatggaagtagcatgtagtagcgagagtcgctctatttgatactagatacatagaagaacctttcacatcgctgtctttcaagaaggatgaagatgccaactcaaccaaagcaagccagaccactaccgaagaagatcgacaatcatgaatcaagacccaatgatgtaccattcaaacccaaatgggtggaattgctttcttatggggattatactgatagcattgtcggtcttctaagttaatattgggctcatagcccgagtttttttattcgcatatattattgggcccatagcccaagtttctcaaaatggaaatgtcaatcaaacaaaaaggatcggcagtttaaacatactaaaaatcgaaaaagagagaaaaactcccacaaaactttagtataaaacaatttacaagtgggag

SEQ ID NO: 42378 - DNA, 1061 bp, Arabidopsis thaliana columbia
gttgatcaatatgttgcataaactgctcacctgagaaaaagtggaaagcagaccgcatatgctaccattaagcacagttcggatttcttcgactggggaaagacgagcagccttctcctgaaaattagacgaccacatatcactactttaaaactcatttcacatcgcatggagaacatcgatatgttcagggagcatggttacaaaattggctaaggcgaaaaatcgctggcgaaagctctagcgaaacagatctgtatcactgttgccactcccgtaagacacagcctgattagtagaagtacatgacacaaagttagaagttttcaacagttgacgaatataactttcccctttccaagttacatagcatactcgtagagctttatatgcacaagtctggcattttgaaaaagattcgaccttttctttctctgatcataaaaaataaaattcatatatataatcggcgcaaaaattacagatcaacgagccacatcaatcaagatacagattcactgattttcctgaccaataaaactcacccactacaagtctacaatccaaaaccagaacacagattcatcaataaaactccaaacattgaatcctccagataggtacgtgagaagaagactgagctgctgaggccatggtgagaggagaaaatcgacggcggacggtggaaaaagagacggcggagattgaagctcgatggatgatacatctaggaactaatctagcggtgattaaaggcgttgagaaatgagccacaagcgacttcatcttcttccccacgaaacgaaaccttcgttgttctttggtttacacgtctctgcttatttctctcctgtgacgacaacaattccacacaacccggtttggttctgtgtgtatttaaatgtttccggtttattctggtattaaatttgtatgtccctttcggtttacaaacatacaaaattacattacaatcagaacaaggattacacaatcaaaagtcgaaatttaacagacgattcatggaaacgcgccggtgacttaatcggaatgagtacggt

SEQ ID NO: 42379 - DNA, 852 bp, Arabidopsis thaliana columbia
gataactactcccaaacaagtaacaagattaaactcgaatctgatttcacctcaacttgattcgtcaccgtgacagattcctcccttctactgtccaagagcctcagatccaacgctccgacgaaaaaattgtatccatttcccaacaatccctccctttcatctctgagaacatgaattccttcaaagatcgaaccaaagacattcttagcatcattgtggctcaattaatcgaattagaaaaataaacacacatgaaaattaacaaactcgttagaatcatggatgaaaacacaaatcagtgaactctaaatcaaaatctcaaacactaataataagtcggaaaaaacttaccaactgagatatagaaacggcgacagatctaagagacggtgacgaagacgacgcggctaaaaaagatgacacggacataggagatcccttggaaccgtcagagaattagtaattcagctccgttagagcatgagcgacgacgagatctggataaataaaattagatctgaaaaaagaaattgggagaagaaaaggaatgaagaagaagaggtgaagaagatgagaaaatagaagaattaacgaaacaattgagttggaggaagaagaggaagaggtgagtgaaatctaaagaaaactagacctaaacttcattggtaaatatctttaatgtattaaaagattttattggagcccaatttttacttaggcgggcaaatgaattatcttttccgtgtggacaatgaatatcgtttaaaatataccaatactatgaatactacgggttggacaggtaaccgtgatctttattgtgcaggaaaagcgttattgtagtgcggt

SEQ ID NO: 42380 - DNA, 823 bp, Arabidopsis thaliana columbia
gagtatgacattgaggaggttcatcggttcatgggaaacttgaggattcttggttttcatacatattaatattatacggtggtcgatggactatgatgtttattttatcttcaaatgtactattgaaagaagagtaagtagtgattgattctcgtagaagcaaatatcatgatgatgtagcatgtgacgcttctctgtcaccaataatgattggatcattttagtggatgccatgatgggattggtcattgggtatgtgactatgtgtttccccccattcccaactttaacttatttcccaattccacccttttattattttcacaagttccaacaccaacaacgctccttcttccttcttcactctttttgtataccacctggatattatttctctatttttctttagaaggttttaacttgtgtgtgtgttcaagaatcaagatgatgtgatctttaagcaaagatgagttctatatttggtacaaaacagagtattctacaagctaaagattccataagtgagacagagtgtaaaaagaaaagagaaagaaaatatgctttgagaagagagcgcatgggtttaaaacagcgatgcaatcagattcctattttcagaagcagtgttatctgtcaaagtatgaacttattaagactgggcttaagagcccatcaataataaatttactacctgctctctttacagcccatttagtggttgaatgtactttatctcctaaaggcccaataatgacgaatcttgtagaggcagtgaatgcgatcattcgaattacaagatgatatgatgattagagaggtgtgt

SEQ ID NO: 42381 - DNA, 676 bp, Arabidopsis thaliana columbia
ttattttttatttttgttcgatctcaagcattttaggtggcaaatgaataatatggggaaatatttaaagaattataattatgtaaggaaataaaagaaaaataagagaaactaggatagtggtaaaaggacaataaggtcacatgaactgaaccagatttattcatgggtccctctaaattggttctcttgcccatatctctccatcatattcattctcatcacaacattataactctgctgatttctctcttcttgttttctcattcttcttctaaaaaatcttgacaactttttgtttttgttttctttctctgaattttttaaaagagagagagctatgtagctatgaaacagtaagagatatagatatagagagacagagaaagatgatgatcagtgaagttaggctaaacccactttctatttatgtataattaggtcaatcacatcaccaatctcctcctccaattctcctcctctccttccaaattctagggttttgcttgtatctcccccctttctcaattccctagggaaactgtgaatttcatcaaattccattattttttggtcacacccttaaagagatctgagagtctaaagatgatgacagatttactctcacgagagatgaagatgaagaagaagcaaagcccttagcagaagaagaagg

SEQ ID NO: 42382 - DNA, 627 bp, Arabidopsis thaliana columbia
ttttttggcttcagatctgaagaaaagacagtccgattgactgaagttctgcctttggttattagacatcgtctagtttattggattcgaattaggttaataaaagcaagcctcggttggtgataaattccttttctgaagattataaagttattgtttgaagatgcagaagtattacagaattgcttcaattagaaagtattctcatcaaagctaacttgggatttcgctttaaattttttgggcgaagattgagttttgttgctgcaaaagttgagcaattttccggtggtttcaatcggaattaaaactttccggcgtcacatcattctggtgatcggaaactctctcttcttcgacttctcacgtgtcatcaaatctggttccctcttgccacgtgttctatgtgctgtttacaacaccgttttttcagtgaaagggtttctgtttgggcttttgggctttcactttgttttattgtattttttctttgtataatatggcctgtttctttcggcctgtttcttttggttttgaaaataatggcatatgatttggctttgtaatatgaataaagacacttgtgaaaaaagaaaaaaaaattgtcactcagagaaaatttgattg

SEQ ID NO: 42383 - DNA, 561 bp, Arabidopsis thaliana columbia
gtcgatcagatgacggacgaaaccaagggaggcaacaatggaggatctagcgatgaagaggatggcaaaatccacatgtattcacatgaatccggagaaacgtctgaatctgaatctgaatctgagaaagaagacgaatctgaacctagagaaacgtccgaggcagacgcggacggggactacgagtctgtatccaggaagcgtgcgaagaagacgacgagtgctagtacagatcttaagttggtttctatagactacttgcggatttcaaatcttttaaaatatattttccttattttagtattgcttttaatccttgttgtacttatgtctatgcgactttttcttgcttgaaagcatgcggtctttgtgttatgcatcaaattcgcctgtcccccattagcatttttttctccaaaaaggaccagcacttatgaaacatatgtaggtttttggagaagacttcaagaagtggtttgtgttcaatcaaatcagatatttccaattctagaagtcttaagagtttacttttcataaaaggaagaaacatgaagacgaaca

SEQ ID NO: 42384 - DNA, 608 bp, Arabidopsis thaliana columbia
tcaaatggcaagtcaacaaaaactttatttattatttaggaagtcataaaaaactttacgatttatttatttcagtgaagttgaagattaaatcgtcccaaatttaaaagtttataaaatttttaatatttttgcccttaaaaacactttaacattttttctgaagatatacaaatatatatggcgccaagtcatagtattattgactatagaaacccacacgattataagacgaaatataaatttaatggataaattggatgtacaaagagatatataacataatatgaataaaagaaagaaaagagaacgagtttcacaacatgtacaaaaatcataagaatgtcacaggagtggacatagagcggatatcatgaatttgtgtgatttttgattagtttcctctgttcgatcggccatttgtttttatccatacccgttctgtaacgacttatgtcaaaagatagatattctgaccgatattgattacttcagattttgtttttttcccagttacgtgataagatttttaaaataattaatatatagcaaatttcaaaattcaacaaacaaaaagcagtattgatatattttaggattaatgtgat

SEQ ID NO: 42385 - DNA, 492 bp, Arabidopsis thaliana columbia
cgtattttgttatgaactaacgttgaatcactaatggtttataacttttctcaactgagctaaaatcaaaacatgtcattttaaagaaaatcaaatgcaaaccgaaaaattgaccatggtaaactgattcacttcttaaatcaaaagctaaaagaaattgaacccaagtgaaggcttattggcaaatgctggaagaatacaaaagataattccagtaacaaaagaacaaaccaggtatcttctgggatttcaaaccaagaaataacatcttcaacagctagtccacattgttagaacaatgataagtatcggatccaattctatgcttcagcaagtaagttgccatcttccgttaccttggcttcagattccatctctttaactgcccttataagcccctgactgatcgcattcaagtgcaagcctttctgcttcatctcctcaaacagcacctctgctttttccaatccagagctttgaggcaaaatgatt

SEQ ID NO: 42386 - DNA, 524 bp, Arabidopsis thaliana columbia
tgaatattgtcgttaaataattttgataatcttaatgatgtcattaaaagattttgtttttgattaaatttttctaatggcatgtaattaattacaaaaagtaaggttatgtactttccaaataatatagtaggatattgttatgctctaaaatgttagatctaatatcaaacgcgcagaattaaaacgcatttggtttcagttttcatgcaaatttggttaattgtttttttttttttttttttgcagtttgatattggctttaaaataggaaaccaataaagtttttttttttttggcaaactggaaaccagtaaagttagaaaaacattctggtttaaaatcggtttatatgtcaaatgtggatatttagagaaagagagatgttctattcactttgaattttgatacccttctccagataatactagttaataatacctaaggacagacttttgtttttctttaatgtaatctttcataaggaatgataagggacgtacccaacaaacccgtgacgttgg

SEQ ID NO: 42387 - DNA, 264 bp, Arabidopsis thaliana columbia
tagcccctgatttgaaggacaaggtgacttttttttattttttgctcatttttacttaaatggaatgacattttaaattgctgtaacgattcaaactctcaactcgatcgaagacaataacttgtagacattcatccaaacttaccgggaatgattgattattattacttcagataaaagtcgtctctataatcgttatctgcgtgagaacgcatcttgctcgtactcctagcgttatggacattcagatcgactactttatag

SEQ ID NO: 42388 - DNA, 641 bp, Arabidopsis thaliana columbia
gtctcactgataatatagttgctagaacttgttaagaaaaagactaatagaaaaaagagatggtatctgagttatatgagacacttgaaactacttgtgaagttaatagcagcttcttgagaactcctctaaacttttgtccaattcctgaaaatgattaaaagtttgtatctccttttgttttctgtaggtggatgttgaggaagtgatgtacatagtgaaagagttgtggcacggacgaagtgctagagatgagactgcaaaagatgttggcagagggatgtggcgagccatgaatgagttgatgctcgtaaggtatgttgattcactccttttactaagctcaatggaaatctgacaaaaaaatataatgggaagttatgaataatcagatgggatgcaaaaaagccagcaacagtctcaaacttggttcttttgaagttcaaagaggtttggttttgctcaatgataataagcttgaaaccgttacatgacctttatcactttgatctggttttgtccaatttgagatatgatgtatgttgttataggcggatgaacatgagactaagactcttgaggaagtgaaggaaagtgaacagagtctttgaaagagttcatgcgtctgaagaagcagaggg

SEQ ID NO: 42389 - DNA, 490 bp, Arabidopsis thaliana columbia
cctcctattgagatcgaagaatgctagaggcttgaaggtttttacgctccggagaggaatactaagtggtcgtctccatgaattgagaaacactaccgcaggcatagccggagtcgccgtgccggtaacctgaagaaacatttctgggttttcgagagaaacgatgaacttttttgaaatcacggtttattttgaaatgctaaaccaatcaacttggttaactatacgataccaatattttggaccggtttaatgcgtgtatacgttttaaatcttatttgatgttgaaaagtaacttatttgatgttaacaagtaactaaactgatgtgatatttgatattaaaaaataattgatgtcaatctcaatagactaacataagtatgttggttatattctttaaggctgctgaaaataatttaattcctgagtgttctaactattggttagattgctttgctaggattatgaattttgttagttccatgtag

SEQ ID NO: 42390 - DNA, 746 bp, Arabidopsis thaliana columbia
actaaatgcttgacattaaaccttttacaaaaacaaagcttttagaaggaagaagaaacacatgttaagctcaatcgcaggagattgattcaagaaaaaatatatattacttagtagaagcggttggtgagtcgtgagtgtcttcttgttggatgtttgacatatcaggaaccaagtagcgagcagcaggaggccttcacgatccagtcgacttttgctcacttttttgacttaaaaaattgtaatagttggcgtcaccaaaagtttgttgactattatttcgtataatcatagaacagataaataaaaaattatttgtactctttgatcttagtgtcttacgtactgaaatatgagattgttttaatttatggtccgggaaagtcaaagaacgagtaatttggaattttgcttgtgaaatggaaaatgtgtgaataagagaactctctcctttttggaccgacgagaactgattcagtttgctttttttttcttcttcttgtttttcaactttatttatttgacaatccaacttttttattaaaaaaatcaacacgaatacaagggataataattatttttggactttcaaatgataaaaaaaaatgcgtaaaagctagaaagaaaaggcggaaaatatagataacctaactcagagagaaaacactcgaccgttcagatggtggaaattatttagtgaacgataaaaacaaacttaaaagtataatattggatttaaaggttgg

SEQ ID NO: 42391 - DNA, 366 bp, Arabidopsis thaliana columbia
gaaacttgtttgttgttaagtgggcatagagaaccaaccggcctcaataagtgttaaggtcatagaaaaacgtagactgatcatctaaattcgtcatgagcctctgtggtagccctcacaatgatctcaatagagtgcatgccacgatcttgtaaagacgtagatgagggctcctcaggtgttcatgtcgaatgttagatgatgtatggtaaagtttcttacaactctacatcgttaacacttgaatcataaattgatatgcaggatttctgatttgcagaggagagctgtttcattgagagttgttaactgtctccaaggtcaagataagtaagtcacatatttggcaattattgatctcgataa

SEQ ID NO: 42392 - DNA, 423 bp, Arabidopsis thaliana columbia
acagttaaaatgcctataaccaattaaacagcttaagcattagacaataatgatcaacacatacttagtgactatcgttttcttgaaaattgcttcatgtacattgaatggaattattatagttgattagtcttcattcttgacttttcacccttcaaaacaaaagtttttttctcactatgagtcatttgataattaattgaagacatagacagaatcaataatgcatgttgacagaaagacatattatatatatgcataacacagctaatgatgcttcttagaagtccaaagtaagaatcagtctacaaacgttggctatacaacaagaaataaatacatcacatttttcagacaaaactccaatttcacagtgaactcaaaaacaatgacaagctccgataaatctctgtcgcacgacgt

SEQ ID NO: 42393 - DNA, 322 bp, Arabidopsis thaliana columbia
gatgaaggttttggttttggagcttaagtacaatttgtgcatttaaaaaaatatttccagttttcaactaattatgaaagtataaaaagatcgattttactacataataagttgattgtatttaaaacattgtatgcataattagtggtatttagtaaactcggccgggtcggtggaatcctcgaccagcttttacataaatcccgcagtaccttcgtccatcgatctgattactccggtctccgggtcttaaaagtttcccgcgtgtgtgcaatttggaaatggttgttagtttgttacttgttgggtcgttaccccccct

SEQ ID NO: 42394 - DNA, 618 bp, Arabidopsis thaliana columbia
ctgttgaacaataatctcattagaaaattatcccaattaattttgctctaaaacaaagaaaagacaatttgttaaacagtttttatcataatggcatgataatatatacacagcaaaataaaatttcatagcaggcaactttcaacaaaatattgcaatttgagttgccaacactaagttagccaaaattttctcctagtgctagtttcagagttagaacatgagagaacctatgatgaatgacgccagaggaaactataaaacttacccatgaaaccggaaattaacaactggttcacgattgtgggaaataacctttgtgaaatcagttgtttgtttgttatctttgttaactgttgttcttggttgactctgcaaataagaagagtgtaagtgaaattcaacattaagacatactaatttacaattgcatatcagcttctgaggaagaacataaagaggttcgatatgtaatgaaatcttacctttgatcgccttaggtggtcttgtatgactgccggcggttgaacctggggacaatggtcgctttggaggtttaggcttatgtgaaggaatcagagacgaattgagaatggcagcaacagcttcacgctgctg

SEQ ID NO: 42395 - DNA, 550 bp, Arabidopsis thaliana columbia
taaaaaaattgcaatttaaatgataactacccctggattattttcataacaattttgtacatgaaagaatttaagataatatattattttaccaaattagaaaagctaaaaaaataagtactataatttgttgtatttagtgaaagaataaatgttgctgggaaaaaaagtgaaagaataaatgctttgggtatataccttatattaaaaacaaaacgaaaaaaaattaatgatatttgttaccatatatattatatacaatctataaacagaaattaagataatttatctgaaaagtgttttcaatgaggaaaataacaataaacagaaaaaatgaggtgtatgtacaaagatttgttaccaaatttaaagtattcaaacagaaagtacccatctgtttaggcaaaggattcgatcatcaaacgtcctacaatatcttgttttgcgatctcacccacaaatttatttcctataaattctcttcctctgtctgatctcttctattcaagcccacttcttttctctttctcttgtcttcgtggagtttcgg

SEQ ID NO: 42396 - DNA, 1018 bp, Arabidopsis thaliana columbia
tctactcctctcgatccccatggagatcctgctccttccttcaaggtcaatttcactcttttcttcttttcacattttctagggttttgattgtttagcgccttagaatttgacctgaatttgagactaccttaaagtaaagatttttctcttaattcatcagagagcatatcaattgtggagggagtcatttagaatgtatccttggaatctggttaaaagagttagactttgttgggacaacctcaaacaatggttgaccttaaacttccctgaagcaaaggcaacactgaggaaaggtgtcacagaagatgatcttcaagaattcgagacttctctcaaagtgaaacttcctttgcccacaaggcttctctaccgtttcgttgatggtcaagagctttcttcccccaatgggcttgatggctctttggggcttataggtggctattccgcttattctcatgacgttaatgtctacttgctacctcttaaggaagtgatgagggagacaaaggaaagtttcatgcgcgacctcggtttctcgagtagattagaccttattgttatggctgcatccgtagttgccagtctgaaaatatttttattagactgcacaaccggacagctttttactgggacaagtaaccgccaattgcttccttgtgtacccgatgctttggttagatcggttcatgataccaacggcgatcagcaacaggatgccatgctgctttggttggaagaacatggccggcggttacaaatcggcactataaatgtccgtcaacagaacaatgtcaagagtatcagtttgttcccggagattcctcccttgtgttctgtctccgtaactaatggtgtgcaggtaaagcaatgtgttattcagttttattgatattcaggtttgtggattgtgggttgaaaagcttgttcatgaataatgcaggtacgtgcttcgtctgtttttacccggaaatatcgaaccttcgggatcagccacggcatactggtatgcata

SEQ ID NO: 42397 - DNA, 726 bp, Arabidopsis thaliana columbia
tccctcgttatcttaataaatcacaataaaattcgtaacaaaaatgttgtatagtttttaaagttgatacttataaaacagtcaagatgataaacacgtgaaagttaatacgaaagggtgagtggtatccacatcaagaattactactctctctttaaccaaatgagacaaattctgctgagggtatcccttttgtccactaccctacacacctccactctctggaggtgtcatctcgtacctttttctgtagcgagctcttcggtctggtccagtccagaccaaccatcaggttcagatacagaactgtgggtccgtcctatgccgttgatgcgagccatgtgagattgtatcatgctattttctgtcaccaaaacaaaaaataatgtgtcaataagtaatgtttgtggccttttgacaatgtttgttgacactcatgtcaaagaaacctgatttgaatcgagtctcaaaataaagttggaagttatgacttcttataagtttccgatataattgagttgttagagaagatggagtttcattaaagcaatataagaaaaacaataaaattgtcaaacagactatatattcccggataggagatactacaatataatatttcagatttaggttgaatctatatcaaagaagggtaagaaagttcaataatgggagtcaaaaatgaactctagtgtcggctacataaagaaagttatacatgaaaac

SEQ ID NO: 42398 - DNA, 329 bp, Arabidopsis thaliana columbia
ctgaatttattcaatgtctcgccaatcctacttacatccactgtaagtttagaattcgttctatggcttagggttttagtgttcgaaattgagatttaaaaagggatttgttctaaggcttagggtttgtacttaccacattctgcttttggttactgtttggcagacctggcacagaatcggtattttgaagatgaagcatttattggatacttgaagtatcttcaatactggcagcgaccagagtacatcaagttcattatgtaagttggaatatcttatggaattggtgtagtcttgtagagtcttgtgaaggtttggataatata

SEQ ID NO: 42399 - DNA, 517 bp, Arabidopsis thaliana columbia
aggagccccaagcgaatccccgataaggatctatctctaatacaccgaaagtttactttctaaattgactaaatagaggcctttccaatgcacttactcatcgaatgtttgaactaatggtttttcatgcatggcttagatggttgaatttcatttgggaaaagaagggtgaattatattcccatatgtacagtaacaaccatgtgtaatattttacagctctgaattgctttcccaacttgcctgcaggctcaactgaatgagatcataaccgccggctcaaagatggtacatgatcacgtctcttctgaattaccttggatgactgatggggctggacttcctcctcacgctgatgagcacctacctgaattggtacgcccatgttttttcgacctttactttagtctattagcatcatggaacccggatagtgggctttctatctgttttatgaattgtatatatgctacaaggcatcatcactaccgtttgcattttttagctgcatattttt

SEQ ID NO: 42400 - DNA, 510 bp, Arabidopsis thaliana columbia
cttagaaacatcatttttatcttgtaacagcagataaaaaaaaaagtattacactttgtaccatcatcttagaataccaatcaaagccatcattctaaatgttagtgacagttttggctcactttctctatattagtatttagtagattggttattttgtgacgtttaacatcttctcaaactttttgaaaactcataccctatggcctatgccctaattttctctttatttgcgcattgtagaactttggaagatacttttcaatggtgacatctcatgaactcaatcaatcttcggagagtctgggcaaagcatacgcaacaagaaccgaattattccatatggtaaacctgatgcatattattcttacaaattttggtttctctcgaattttgtttgagtaaatttatcaaagcaggataccacttgagttgcaatcacttgatgacattataaaacaaggagtcgtataaattgatacaattctaacatatgttaagagacaatgc

SEQ ID NO: 42401 - DNA, 460 bp, Arabidopsis thaliana columbia
aggatggcggaaggagaaacttctcgcttgatccagagttctgtgccattaggaagaccaggaagattccatcgatggatcggagtaggaagctgaagggggagaagaagaagatgatcagtgaaaagtaatggagaaggagaattgaaacatagagaaaattgaaaattaacgtacgtgagcgagggagaaagtgtgagaaggaagcggacgaagatgagaagcccaagaaggaggagagtaaggttttttggtgagaaaatccgccattgaaggtacggatgttgcagacatgcttcttctcgcaagctcgagctttactcttgagagtgtcaagcttcgtcctctcattgcttctttcttcttcagttgttgactctcaaatatacctctattatgggcctcggccatatcatactcgggtcggatcggtttgggtaattcggatcaatacttttat

SEQ ID NO: 42402 - DNA, 464 bp, Arabidopsis thaliana columbia
  unsure (1)..(464): unsure at all n locations
gataaaaaattttggttcggtcacaaaatcaaagccttacacctttgagtggtgagataaaatggatttccttatatcactacaccattcctcttaggagagagagtgagagaaacatgtataaattcatcgataacttcactatgtgtagatcacaagcttatatagcgctagttcgccactcatgaccaagccgatgaaccgtgcgtcaccgaacatctacgcaaaagcaaagcggtaactatgataataagtctaatatgcttttgtatttaaggaataaatgagccgctaagagcatctacaatggtaatctctcaccaaaatctctcacctacaaaaataataataaaagaataattaaagtttttaaattaacngaatctctcaataaaggtgagcatcatgagagatgataggagccttttccaactgttttgagaaactgcccttattaaattata

SEQ ID NO: 42403 - DNA, 472 bp, Arabidopsis thaliana columbia
gacaaaatttgcaaaatgcaggctctcctttgctctgtggcctatatggggcttcttgactctcccccttctggtatgatctcagtccataataaactcgtccttgtagacaatctcatctggttatgaatatattggtttttttttttttttgatgatatgcagttcacattgttcatggcatgccttgttgtgttcccacatctcatgatcatcaaattcaggcctcaaaacgacgaactccgcatagattgatctgtagagaatggagatagtgttattgggaacgttgaaacccttttgttattcagaagtcaataaatctgaaagtgaagggggaatttgttggtttgtggtatatagatagatgaactcattgatcaatagggatctttttttctctttactgtttttggtctctgagattggttcatgtcttgtttcgtttctgagttcagtgaagtgaaaaata

SEQ ID NO: 42404 - DNA, 150 bp, Arabidopsis thaliana columbia
caactgcgcgctaaccgatatacgcgatttcgttttgttatatgtaggagtcatagttaaactatgtcgttctggtattagagtttgaagaatccattcctagattgtcagctcgtattcagttatctagagagggagacaaggctaagg

SEQ ID NO: 42405 - DNA, 547 bp, Arabidopsis thaliana columbia
atttaaattctaaactgattaaaagctcggaataggttttaaaactatttgtatgaagagatagggtgaaattatggttgaattacacggaaatgtagagagaagttatggccaaaacatgaaatttcttgagggaaattgaaatgccctaacccgatttgcctaaggccgattaaccgccagccaaacggactaaccgtgttaaacatttttaccaattcgatagacatagtttaagcgataatctgattattaaacaagtcaaattcatgcacaagcggaaataacttaaatcgattcgttttattaagcaaatgaggttcttagacaagttgatattcaccacaatttattaccagtctaaccaacaacataagttacccaaaataaaacataacagaaaatccatcatcctcttttccttgccctagtcccgcgaactggttagccacgcacattaccctcttttcctgcatcacaaaggaggcataagcaagcattgcatggtgagagcggtcgtcccgtctcactaggccacaataaacat

SEQ ID NO: 42406 - DNA, 534 bp, Arabidopsis thaliana columbia
tatttttttttttttagtaattaagtgctgatttgggcttttactatcctactaaaccacttgataaatgtagccgtcgagtagttcactaacctgattttctaatgggtttaaggtataataccatttcgactagccaaatgagagatttagtaaacttcgcggttgaggagaaacaatcccttactcatacctagatgctgactcctccacatgtagaaaccactaaactatttcaggtgatttactaagaaatttggaacatgtccttcataacttgtaatttggaataatttgagggtattcctatcattatgaacacactttttctctgacatatcttctctaacagacaaataatggcaaatggcatgagcatctaatatataactacataattctctacgtaaatataacatccaacttgtattattatgtaaccgaagattacgttaataataaaaaatttaaatcgttaatcagtttcgtgacaccactaagattgtacattatttcaacgagccaaataattga

SEQ ID NO: 42407 - DNA, 150 bp, Arabidopsis thaliana columbia
tctccctcacatagagcactgaatgagtagcattagactttaacctaatggtaaacaaaccaagaatctattactaataaaagaaactacttgagacctctcaaggtgttcacatcaactatttttacaacactctcttcatacgtcaca

SEQ ID NO: 42408 - DNA, 685 bp, Arabidopsis thaliana columbia
gttcacgagtttgaaaatccccaaaaaaagaaagaaaaaaacaagttttttaattttattttttaaacttgaacacacaaaattaagtagaaaaaggagagagagacatgaagtgtgaatggtcttgaaatgatattgtaaaaacactcaagctgtctacttcatagagagagatgtgtggccatcgttatctaataactcctacttactaactattttacagtttcataaaatttcgtaattattatcttcttctttgcaacacattttctgtcacattaaatattcttcaccatcctcatgttcgattcccaatgtaagagagagaagagagaattgcagagaagatagctgcttccaacatctcttgtctggtaatttaaaactcaagaaccaaaaacagacacaaaaagtaacccaagtttagattcaacttagccacttgcttgggtttttgatccatccaccattcttcttacaattttttcctgtcagtcccatatttactgtacaacgtttaagcttaacaaaaaaagttgtaagactttttcttactcaaaatgggaagagactgcggcatgttcgatgacggccatggcagtgaaggtggtggccgcggtggagcttctctcctcaaggcaaagaaaacagaaatggatgcatggtgctttttccacttatttga

SEQ ID NO: 42409 - DNA, 498 bp, Arabidopsis thaliana columbia
taattctttaatttagaccaaaaagtattaacttataataatatatatagcattgtttaatttagacataagggagtaatgaattttacaataggcaatagccctcctgggtatccctagatccaaatggtgccgaaagaccgatcgccgactacaaattctacaagttttattacatccaataaaacttaaagtgttatactggtgcatagtcgcattttttttttatctcttgttccaatataaggcagataaaggtcacgaatgatgatgaccttggactttaaatttgtcaatacccattcattgaagtgttcggagaaaaagtccacgtacttcgtttatcgatcatgattcgtgacacgttataatcaggtattactagctcgattaatagttctttatcatgcagattactgagacatctcatttcattttccttgaaatatattacaatatctgatttcaattatgggatagtcgtgtctaacttggacg

SEQ ID NO: 42410 - DNA, 575 bp, Arabidopsis thaliana columbia
tattcatcttatcagttgttattttatgatgagtaaataacaggccatccaaacctgaacgttttttcttagattcgattatggtttgagctaattcactcgcacccgatctgaataatccaactttttgggtaaaagtaattgaaattctccatttgactcaagataatttattcgactgaaccatttcttaactattttcaacatttgttgaaggatgaatggttctcaacatttgtttggttatttatatcttggtcagtcgaatgaaaagaccagacaagggtcatctttgtttttgggtttggtatgtcacatgtctattgtagcctatatagatccttgtcttctttgacaacataatacaactctcacaaaagtttaatacacgttttggagagatattatagttgtatctctctacattctttgtactagccaaaccggattatcttagatatgtaagataggtcaattagctacaccaatagtatgacgattacgacaaattaaggtcattaaaatgaactaaactaatcaaagactaataaaaatagtgattgagttgcgataga

SEQ ID NO: 42411 - DNA, 1861 bp, Arabidopsis thaliana columbia
tcgtctctgtatcgcaggagattacgagaaccttgtgaacaagtttgcatacgttttgatcatattcggttgatgtactcgacgtgctagtcgagtatgagtacctgcgagacaaacacaagcaaatgaagaaacaagtgagtaaccagaaaaaaagaaatagaacttgatcttaataacttagaaatcctaaatgtaacaagaaaaacacccaaatggcaacggcgccaaattgatacaagggtttttcggtgtgtcaattccctaaatgcatcttatgtcattgcagcatttaaggtgtcaatccaaatgggtgtaattgctatcaatcaggatatgatcagagaatactaagtcaagccaagtgtgaatgggtttggtgtgtttctactaaacctaagcaacaggttaacatgcaaattaaataacaagaacagaaagtaaaccaagcactaggtaaagcactcggtcgagcaaacgagtaaacaggtcgagtacaatactaaaaacaccaattttgcacgaaaccaacaaagtactaaaaacacgagttttgcacaaataaacgaaacagagctcttaagaatgggataattggtcttagtggactcctcaatccattagctaactaacaaactcaatcaagctatccctagacaatagattcaaaaccaaatcaagccacttccgtgtgaatgattctcataactttagaacttcttaatctcaatttccattgatgaaacataataaagcaggttttaaacaccaatctattgaagtcaataagcagtctaaacatccaatgccttgggctagaatctacaaatctctaaaattagttggttcagacattttatcaaacaccttttggatggagaaagtctgaaatcaattttcaattgatcagaaagaaaatagcattaagaactcctaaaacagaagggaatcatgcatataatcacttagctagctaaagaagagaggaatccacctaaacctaacccatcctcaagaactttgaagaacactactcaagaacactgaagaacatcatagaacaaaacccagaaaattcataaaacccagaaatcattataaacttagcaaaagatagatctcaatgagataaacaagtttgcagaagaaatcaaatccaaattctcaacacaacaaccagaaaatgcaaaagaaaatcaaagaaccctaatatccagcggacaaagctcagatattttgggcaaaaacataagaggtctatttataggcaatcctaggtttccctaattgggaataagacaaaatagataagtcggcgcaggagcgttcggccctaggcgagtagaaaagccgagtggcttggtcttggtcacacagctcggccatagcgagctggcttggtcgagtggcttctcttcatccttaagtgcacaactcggcctccagccgagtgccttggtcgagtaggctccttgttcttcacgtgtgctccactcggcctccagccgagtacataggccgagtatacttcaaatccttccttaggtcccccgaactcgagtctgtccatcccttgtgctagaaacctccaagttgagtccaaaagtacctaattcatctgcaaaacactccaaatgcaagtatgctatgcaatgcaatgcaaaatgtgcaaaagaaggaaaagagactaagaatgcataaaaaagggcatgaaactaagctaaatgcatgaaaaacaagggcttaaaaaggttaaaatctagtgttatcaaaagactcatacggactttggctacaccatgaaagctttgagaagctagaagaaggttggttggtgttttggagtcgaatatgacttgat

SEQ ID NO: 42412 - DNA, 779 bp, Arabidopsis thaliana columbia
  unsure (1)..(779): unsure at all n locations
aaacaccagtgtgtaagctaatcgtcaataaatcacattttccattagattctagctacaacttagaaaccattcttcaatgtagagcattaccacttggatatcaatatgaacaatccctatttatcctctacatcattatggtatttacttacttgatctctcacttggaacttctacgatcttcgtgaccccacccggtattggcagctctctgttcatataaagaatcaatacaaaatcaataagaagagcatgttgattcaaatgttatatatatctgagaagaatgttctttcttacattttcatcgtgagaaaatttgcaagaatctccacgagtacactcctttctctgaaaagctctgcaaacaccacggagcttctctcttcttctgcttcgtctcttcatcttcctcttctctctttaagtatttaccacaatgctccacttttattatccttcccaacaccttagctccattgatattatctaacaattaagagaagaatcgaaaccaagagaagcaagaaccaatgtgtagtaatatccataaagcaaaaggattttatagactaaccaacagcaagattagtacttctctgatcttcataagcaacaaacgcaaatctttttgatctccagntcctttatctcgaacaagattcaaatcaacaacttcaccatatcttcaatcaaacaaatatttcagaattaagaatcatcactagctaggtataatatctaaattcacaatgtgagaagaacacgtctgtgag

SEQ ID NO: 42413 - DNA, 670 bp, Arabidopsis thaliana columbia
tttcataaattatatgtttggattatgagataagtaaaatatatattatgaaataactttagtttgttgattcttttcttttcaaagtataaatttgatatgtttgagcaaatccaaaatgaaattaccaaataggaacacattcgatatgattatgaagaaggggagtaggatacacacggtctaaaatagcttcattttgtttacaaagttcatgagttaaatacattttcgtctaaaggaagaacaacaacagtgactcaatgagttaactttaaactggatcacagaaatatagtagcttttgtaacatgcataagttgagttggaaatctccatagcagtctaaaatcgaaaataatcagtaatttcagagtactcttgttgatgcgaatgaaccaaataggtttctacttcattgttgaatatcaaaggtagtgtggtgaatggtataaagataatcagtaagtacttcattgttgtatcagtgatgtaagtaactcaatcgtaacaaaggcaccattccggtatccgattagcatttccgaaatttagatgatagaatcaatcaacagagataatatctccgaagaaatttgttatttagagaatgacaagtgacttaacattacgtttccagataccaaaatacctaatcacgaactgttac

SEQ ID NO: 42414 - DNA, 510 bp, Arabidopsis thaliana columbia
tatccccttaaacttggatctaatcacttgtgtggtacattggccggggaaaaaaaacatacgttaatgaagtggaagttatagaatattgagtcgagacatcttcaaaaaatttagataggaattacgaactaactcatcgagggaggtaataaaatttaccctttttgaatcggtcaagcgacatgcctcataatattgatatattcttcttttcttccgtatataagaacagtaatgccgttgaatcagtctaatgaaccataggtgggagttgaatcctcattggtggactaataataatttcagacatgatagtggattttttcaaaaagaaaaatattatataagatttacaattacaagtaacaatggcatgcttaacagtaaataaaatcaaaagaagaaaaacaattaattgtggagaagcacaaactaaagaacacttatttcatgaataacaataagttacgtttgatcatttaacgatgcaaaacttattaattgacg

SEQ ID NO: 42415 - DNA, 495 bp, Arabidopsis thaliana columbia
ttcgaacattaattttaacttttggctctccagctgatgggagtaaattgacatgctccaaagaaagaaacacaagtcacctagtgattttcaagaaaatgtgcttccttcaaaatatccgaggtctaagatgaaatagttttaaaaattgttatgcggggcatatattattagagtgttgtgcacttgtaaccttccagaaaataagcaatttggacgatattttaaggtttggtccatgttccagtatcgtgttagggtccactgcttcgagatctacttgattgatactcttccatttgttttctaattgtttgatgcaaaggttatccattaagggaaacttatctatatcacgtggaatactcactgcaaaagattcgcaatattagacttataattgtcactaatcagaccattaaacaaatatcaaattgattaataagttgaatttaataatccaatttgagctctttcagatagggctttggggca

SEQ ID NO: 42416 - DNA, 417 bp, Arabidopsis thaliana columbia
attatttgtcctgaattcatcatccaactatgcattggatagaacaatggtcataatcaatagaccacaaacgatattctcgctgacacaagaaaaactagatcaagaaattcatcggcaaggaaaaagatatgttataactaacttcaacattacaagaagttaactaaaatgagacatgtgttaattcaatcatgattaacaaggtaaaagcattgtacgtggttatgatacataattagtttcttttgtttttacagacaagaagctggaaaattcacgttgacattggtcaggacccaaaataaaaggggtaatatcgtcatttactaccataaagatacaccaaccgataaaacgtccattctaagacggcgggacaatgttcatacttcatgggtacattacatacataca

SEQ ID NO: 42417 - DNA, 504 bp, Arabidopsis thaliana columbia
ccgacgtagcacgaaacctgattatatacgagccctgaacccgccaaactctgcacaagcccgaagaaaacagcgttaatgatcgtagaaattgattcacccgaaacttgaggatatctacacacagcatagcaaatacacaagttaccttgaagcaaacacgagggacttaatcgctgaaccccatggatctgtaacttctgcaattccgtcgccgattttagattctaaccgattagaacctcgattcaatgaatgaaatcgtcaattgaatactctctcctctctcaatctctctgtgaatcgatatgagaaaagaagaaacggaaaagaaactaaattcctctctactgtatctgtaacccaagaataccaaaggaaatagttaactcttaatcccatttctcgcacaggcgctttatatatagaggtttaacactcgacgactctaaattgatttcagttacaaagggttggaataactaactaactctcggataagat

SEQ ID NO: 42418 - DNA, 565 bp, Arabidopsis thaliana columbia
agaggatggcaaaaacaaattcagatgataaaaagtcattaaatagaaaggaaaataaaaacgggtaggtgttatagatgttcaagaaatttgtgacaggtgataactatgaagtaaaattcttttaaaaaaagtttttccttagaatatgcaactttttgggtgtcaaaattttaaagataccccataaattcaggtagttattgaaagtgttgtttaaaaaaagaagaagatgagattcccaagcttacgaaccagggcttgtccttttaccatattaagggaagaagattcggatgtacgaaaactgtttgagacaaagatctttgaaataacgaattcactgtaagaaaacagtgaagtaaattttaacaagaagaacaattatatctaggatttaattcttgacccaaggctgtcaaagtccttggccactcatgatcatgcgcacgtggtagaagttttgatggatcaagtctttaagtgctatcattcattgaaggggcatacgagttggtggcaaagagatgtagtagagaatgaagtaagaaacaataaatgggtg

SEQ ID NO: 42419 - DNA, 439 bp, Arabidopsis thaliana columbia
tagtgacgaaaacaattaatgtcttaatgttctcgtgaaattgcaattttctatgtggcaggtagactagagatatgagatggtaacaactctaattaaaagacaaaaacatcgctcaagagtatattcacttttacatcgctaaatatatactgaagttattagctcaagagtatttaatcatcgccaaacctccttatctctctcgcttacttagggttcttagtatttcatcaagaattcagcatcaaatatcatacacctttatacactttggtctttgtgtaagcaccaaagcgtctttcgtcaccatcattcactaaatgttactcacttaatacattcataggtgtcttttttctccaaaaaaattataggtttcatataagcatttattacatttttaatcttgttcaaatcaataactaaaactgtttaa

SEQ ID NO: 42420 - DNA, 514 bp, Arabidopsis thaliana columbia
tgtaacaatttcctcattaaagcgacaaaacaagcttaagaagccttttgctttatgcaagaaaccagcagataaagggtcacttgatccagcatcttctgacacgatttcgacaaatgcgtactgatatttccagggagaaccgggatcagctaaccagttgatgtcaaagctcgtcatgagagatttgtagcgacccttgaagatagcccatgtctctcctattcttgggtatatacagaatttacccgcgctacttcctttattgcaatgaaccaagtgagaaaaccttgtgtgatctttaatagtctcatcttttccaagtttaaacctaccaacagaaacaggcaagtctttttcatacctctgtattggttcctcgtcatatggatcaggctcaagccacgtgacagtaacattaaaaccagaaacaaaaacttctttgatctgagcatacaatctaggcatccatccactgtatcataaagagccaggtctggcaacttcaaagtgt

SEQ ID NO: 42421 - DNA, 418 bp, Arabidopsis thaliana columbia
tctaagatctataatcatttgtgtcgtgaacaagtcgttaattaaataagtgaaacgaagccatgcatgatgatgaacacgatcagtcaacttgtggggtctacaacaacaggctttgttccttcacgacacattaacatattcttatttataactatccattcatctcaattaattaaaatacattatgtataagatggtaagagattagtataataatgagaaagactttacattggccacacaagagaagcggtgaagtataaaatattgccatccaatgcacgatttgtggaatcattatcgcaaattcaacaacactaaaaagaacaagaaaatagaaagaaacttttaatccatgtcgctttttaccttaaattactaattgtcctgtaggtctctcttagctaattttttt

SEQ ID NO: 42422 - DNA, 404 bp, Arabidopsis thaliana columbia
ctttatattttttgatcagatagttaattaaaaggaaaactttggttgagtagacttccacacgaatggcatcctccacgagtatgacacgtgtaagtaatccgtctacttcgcctttatagatgatcggtatccaccgtgtaaaaacagagagaagagtcaatgttttgtgttcttgacttctggccattcattaagtaattcattcttaaaaaaaaattagagccactattttcatattttttccagaggatgaatcatagtgcacagtaattaaagccactttcatattaccattgagccgtggatttatatcaacataggaatttcgaaagagtttataactattttacccaagagacagatagaactagttgaaagctctgtgcataattttgtgtgtt

SEQ ID NO: 42423 - DNA, 385 bp, Arabidopsis thaliana columbia
taatgctggatcaccggtggttttgtcagtgtctacccttatttgtatggaaaaacactgccatagcccataaggtaacttataaggacatcacagcttttggtgtttgactgcttaaatgttcagtctccagattccagtacatggatttctcgaatacgtgactaatggttgcagctagcattttttaataactttgccttaccaatcatggtggttggcggaattaatcatggtggtaagcgagagacgttattttaaccaaaaaaaacatgagagtcgtgaaattcgaactagttttcgttatgatagtgatatttcatgatttcgtcacaattattctccccgctccgctaagtagacgtgtgaatatgagagagattga

SEQ ID NO: 42424 - DNA, 1000 bp, Arabidopsis thaliana columbia
cgaatcgcaggctcgcacccgaaaatctctcgcattcgtttgaaaacatctagagcttgatcaggcatggagttctttccgtaggttttgataaccgataaagcgacatcttcgtcgcatttacattcttgtgacctaataagctcgacgattcgacttacatgattacccatccgcgtctccgagagacgtcggaggatatggtggtaaacgacggcggagtgtgcatagcctggatggcgagtcgcgaatcgaatagagcaaaagccgcacgcgggttcttctccgatttcaagagcttaaggacgtgtttgggtgacagcgactttgggaacacgaccatgtgagagtttttggtgaacgttatttctccggcatgttttgggctttttgcctttaattagaagtgaagtaataaactctttgttgattatagttagtcaacaatctctttcgattttaaaattttaatttaggttaactaacaaaattatcagactattcaatttatttgttccaatgaaaattaactaatcaaaatttggttaatcattggaaaaaatttaggtgttgattgggaagcctggaaccaaaaatatagctggtcgaatggcggtttattccggttaaaatagacaacgacaacaagtgattcgtttgagaatgcatcccctccttaacattacaaagtaaaccaattgaaccgaaattaaacctaaaccaacgaaatactaaaaacaaaggttcagcttcatagagctaattaaaccatccaatgaacaattttgttgatcaatacagcctcattacactcctcgctatagaatgcccgtgactattcgcccaccctccgccgccgccacctcctgctcctcctgtaccgctcattctccgactagctttcatatgtggcaagtaaaacttcaacattccgttttcccattcttaggtgagtccttgaactcttatcctcctatcaatccgttgacttcctcgctga

SEQ ID NO: 42425 - DNA, 296 bp, Arabidopsis thaliana columbia
tggtaagaagatgcgggtcgagtttaggcttgggttagggttgaggataaaggtggtacagcagttggtttactggcgagagagccaaacttcagagtggtaggagtagaatcgtctgttgcttcctgtgtattgctctatacatccccatctgagttatgtaactgcacaacctttgtttctgcagaggtcactgaaggcttcttaacgacatccttggagctcaacttgcctctggcagatacatctagattgtgcacgggaaattgcctgcgaaaggtcctaaatgcgaagtc

SEQ ID NO: 42426 - DNA, 2486 bp, Arabidopsis thaliana columbia
tacatagctggtgggacccacgacaaatggatcatataatctttaaaaaagaatagatacgattacattgcatgtagtaacacatgcgatcataccagcactaatgcactggatcccatcagaactccgcagttaagggtgcttgggcaagagtagtactaggatgggtgacctcccggaaagtcctcgtgttgcatccctctctttttttggtttttctctattttgttttgttaaaaatgtatggctctataacttttagaccgtgaggccaaacttggcatgtgatacctttttggaaagcccaaagagagctctccgatgactaaggaaggaaaatggaattcttctactgcctttttttctactccaaattttcaactaaatgtactttttcgggccttttcgtgatctttgctatattatgggggaaaaattatatgttcggacattgttttccaatattttgcatgtatcaaacctcttataaagaagatagggtattcctacatagctggtgggacccacggcaaatggatcataaagtctttaaaaggaatagatacgattacattgcatgtagtaacacatgcgatcataccagcactagtgcaccggatcccaacagaactccgcagttaagggtccttggacgagagtagtactaggatgggtgacctcccggaaagtccacgtgttgcatccctctttttccgtttttctctattttgttttgttaaaaatgtatgactttataacttttagaccgtgaggccaaacttggcatgtgataccttttcggaaagcccaaagagagctctccgatgaatgaggaaggaaattggaaattttctattgtttttttttctactccaaattttgaactaaatatacttttttgggccttttagtgatctttgctatattaaggggggaaaattatatgttctgacattgtgatccaatattttgtatgtatcaaagctcttataaagaagatagggtattcctacatagctggtgggacccacggcaaatggatcataaaagctttaaaaaagaatagatacgattacattgcatgtagtaacagatgcgatcataccagcactaatgcaccggatcccagcagaactctgcagttaagggtgcttgggcgagagtagtactaggatgggtgacctcccggaaagtcctcgtgttgcatccctcttttttctgtttttctctattttgttttgttaaaaatgtatgactctataacttttagaccgtgaggccaaacttggcatgtgataccttttcggaaagtccaaagagagctctccgatgaatgaggaaggaaaatggaattcttaaactggttttttttctactccaaattttgaactaaatgtactatttcgggccttttcgtgatctttgttatattatgggggaaaaattatgtgttcggacattgttttccaatattttgcatgtatcaaagctcttataaagaagatagggtattcctacatagatggtgggacccacggcaaatggatcataaaatctttaaataacaagaaatatgattacattgcatgtagtaacacatgcgatcataccagcactaatgcaccggatcccatcagaactccgcagttaagggtgcttgggcgaaagtagtactaggatgggtgacctcccggaaagtcctcgtgttgcatccctcttttttccgtttttctctattttgttttgttaaaaatgtatgactctataacttttagaccgtgaggccaaacttggcatgtgataccttttcggaaagtccaaagagagctctccgatcactgaggaaggaaaatggaattcttttactgtctttttttctactccaaattttgaactaaatgtactttttcgggccttttcgtgatctttgctatattatgggggaaaattatatgttcggacattgttttccaatattttgcatgtatcaaagctcttataaagaagattgggttttcctatatagctggtgggacccacggcaaatggatcataaagtctttaaaaaagaatagatacgattacattgcatgtagtaacacatgcgatcataccagcactaatgcaacggatcccatcagaacttcgcagttaagggtccttggacgagagtagtactaggatgggtgacctcccggaaagtcctcgtgttgcatccctcttttttccgtttttctctattttgttttgttaaaaatgtatgactctataacttttagacggtgaggccaaacttgtcatgtgatacctttttggaaagcccaaagagagctctccgatgaacgagggaggaaattggattttttctattgtttttttttctattgtttttttttctactccaaattttaaagtaaatgtactttttcgggccttttcgtgatctttgctatattacgggggggaaattatatgttcggacattg

SEQ ID NO: 42427 - DNA, 537 bp, Arabidopsis thaliana columbia
ctaaattttttgtcactttcaaaaaactctctcgctatattagataaagtgaagattgtatagcgagagagttattacctattgagcacaaatctagtagattcacagcatacaatcgaaattcgtaatctactccatattgcaaaatgataatagttttattttttattgataaatttgataaaagtaaaaaacacaaaagtatttagaattaattataataaaactttcataagaataatgttacaattacattttcttatataaaaattaggataaaaataagaataaataatatatttagagataaacttcctaaattccaatattaacatttatcaatatttttctagaatcatattttcttgtcatattttagtaatgtcatctcgaccgtcgatctcgattgatcttcggttctctatatcccaatatccctggacaatctcatacgacgcagtcgttaaaccaacgatatttatatccgatcgtaaaatttaaatcgacgtttatatccggtggtggggtcaaaatggt

SEQ ID NO: 42428 - DNA, 564 bp, Arabidopsis thaliana columbia
tacagcttaaatgatgaccggtgccaagtacgattctttctttccgtttctttttctttttcgttaactttgttcacaaaaacatgactggtgtttggaaacaaaatatctcaggcctattctccaacggaaccattgaagccaggagatcctctctccagacaaagcgttgcctttgacctcagcgaaactcgcactgacttaccttcaacatatcaagacttagttcagagatatcaggttaaaaccccaaagccttttaattttgttcactagtaaaatttaaatccctgggcaaagaattcatcagtttcttcacctattttgtttttttgcaggagtttaagaacgcaatgagagaagatacggttgacttcaccatctattcaacaaacgtcaagagaaaacgcccaacgccaaggaaaacttcaagatctgctaaaaaaacagtggcctacaacgaagatgatgatgatgacgacaatgatgacagaggatggcatggaggaggaggaagaggagctgctcggagactaaattacagcaccagaagtagcaacagaa

SEQ ID NO: 42429 - DNA, 514 bp, Arabidopsis thaliana columbia
ccttatcgtaccgatttttcttcaacattgaaaattaacacacacctccggtttgagaccttaataaatgatacgacatcagccggtttaccacgattttaacattcgatttttctctattttttttttcttttagtttatccatacaaaaaattactgatgaaatagcaaaagattgcgtttaagttaacaacgaatatttaaagacagaacagaacttcagttcctcactaaaactgtatctatagattttttctaaacttatttgattaataaaagcacaggctaatattagaaagaaaaaaagtttttataaattaaaaactaatgtaattaggtaaatgaaaatgtttattcgcttcttttggaccatggagattaaggtgaaattatttagttgttatcattataaattaacaaaggttaagtgaatataaaattaatttgaattattttgttaagttgtgattaaagttcaatttcttcttcacgtttttaaaattcttgagcaagt

SEQ ID NO: 42430 - DNA, 336 bp, Arabidopsis thaliana columbia
taaatttatttggttacgaagaagaaccggattgaaagggtaagaaacgaatcagtcttttattcttggcacatgttacattgtcaagactgaatttgtccagtgtgtatcccaaaccatgttatttacatcattgccactatttcacgaagcctgggtttccacagttagagcaactatttcagacgactgtaggcaaagatgcccacacagccaatggccaaaccaagaagaatcggtacagtagaggattcgaggttttgtgttgtactgtgtgttctgctgctgtcgagtctctctatgcgagtcttttctccaacatactcccgaagaaga

SEQ ID NO: 42431 - DNA, 378 bp, Arabidopsis thaliana columbia
tagatgaaatagtaagcataacataagccctaagaaacccagagcagaaacaatcttgaacaaggctaataaaaagcgaagtccaagaggcctagaagatgaaggatttttcaattttttgaaaaatcttttgttagtctgtcggcaaactgttatttctcaaattcatcatcatcatcaattcatcatcacctgttatgtttaaggagtttttttgttcaatgactatgtaaacagattctgatctaataaaatgacgttaagaaaaagaaaaagaaaacgtatttgatttagataaaatatagaactacagaagcaaatagatatccttagtttattttcaaaaacacaacgttaatttgaaatatcatcgattgc

SEQ ID NO: 42432 - DNA, 464 bp, Arabidopsis thaliana columbia
tgcatttgtaaatcaagaaaagtaaatgtaaaatccacactcattacctcaagctgatcttcggtgaatgagtctttctggatgttcgatgtagccgcatgggttcgccggaactcagccacggctttagttatcagtcgattttacaggtgtaggttcacccgcgaaccgagccagtaaggtcacatgctccggcagccagctgaaattattcacaaaagcttcagattagttaaaggtgtctcaagcttcaagcttgagctctgcgtcacacgcattgacgtaaagatgttacctgggcatgtcataaggaacagacaaaactgaagctaccaaaccaagaacggctccatgcacccccgcaatggactgagttgaacttgacgtcccgaaaaaaatcgattacaattctcaggatcatgttacaaacataatcgaagacgagatatgcaaatcacagctta

SEQ ID NO: 42433 - DNA, 444 bp, Arabidopsis thaliana columbia
  unsure (1)..(444): unsure at all n locations
aaaaaaaataaaatgaggtaaaaataaaaaaaataaaaattaggggggacaaaaaaataaaatagatttgtcggcaaggaaaaaaaacgattcacgaaaaaaaaaggaaaaataacgattcacaactacacttggaattggaatcgtgtattctttataaatatagaccactagctnacaacgataaaattcattaatcgaatttcttcaaaagcaagatgctctgacttcggaagcataaacctaagtgttctctcggaaaatccatcatcatgtttctgtcttcgagtactatttttgtgggtttgtgttttctgttcgttttggctccatgcttttctagtgcctcaacccatggcgttcaagttcgctgcggctctcactacttcggcgatggcgaacgcttccgttcatgtgttgccttcctgtgttagcttcgtttct

SEQ ID NO: 42434 - DNA, 575 bp, Arabidopsis thaliana columbia
ctcatatccagcccatttccgcaaagacatatcttcagcataactattcactgaggaacacacactgcgctgcaaaatctttgatgtgtcaaaatagctagctttcagaatgaactcacgacactgatgacatgagcccattctgaaagctaataatgcttgactcatcgccatagttatgctctctgcgtattgctactgtcagcaaatgcgagaactaaaaagaaaaaatgtcgcaagcttgaaattgtgttgcacgatctcttcatctttgcattcaatttctggtttcttaagagttctttgcacaatttatactcggagttgtcttcatagctttgtttactaataaatttctgctattttttggttaaacgaactgtgagtgtgaagtgtctcgtttgattaaagttcttactaagcatacataagcaagatatatttgtttgactgatagattttcagtctgtccaatcctgcatgaactgaatatcatatacattggtatattgcatctttgaccaataaaagaactggcgactgctctgcatcgatgggatgacacatttataagt

SEQ ID NO: 42435 - DNA, 413 bp, Arabidopsis thaliana columbia
tacgtagctatattagaaaataatttacatttattttcttctaaacaaatctatactttatatttacatacattagtaaagaccaaaacacatggaattcaaattctgcaataagtaattgcaagaaaacacaaagattaatcccccactaaacccgtttatttacgttagtatttttccgttttatacattacacatgacatgacattacacgtcaaaagaaatatgtcttacgtcagaacttacgtatgatcaaactcgatttaaacatagaaacatctgtttactaaattatactaatttcataaagacactttgatgcatgaacttctttgtttaaataacaatttcccccaatttgggggctatgtctcgtcgagtcctaccaccattataaattatctcatcgtttg

SEQ ID NO: 42436 - DNA, 399 bp, Arabidopsis thaliana columbia
attgcaattgttcgagcttcaacgaggaattcctattactcgtttataaactaagtaaccaaaagaaatagtatatagagcactcaaatcaaatcattttgaactcaggctaagatttaggtggggacaaggtagacacatagatggcatagaagagtcgctttggttaacttgtagcttggagacaaacccttggtcttcacgggtctccatcttcttctcttaacaaaagagaaaaacataaaattccattgctattcaaatttcacgatcaagatgaagaatttttgataaaacatgtagcaaagtggtttgaactaattcctattataaactagtatacaagagagttgcatacgataaatgaaaaatggatcggaagaatatttgtgatgtata

SEQ ID NO: 42437 - DNA, 349 bp, Arabidopsis thaliana columbia
agaggatcattggaaggcacatataatgtgtagatgatcgatctaaacaatcctttttaaaattatatatgagaggaaatcgaaatgaaaagagaaaagaaatttgaccaattacaacaatggtgatgctagtgctatcattgagactacactcttagagcccattataaggcccattacgtaaaacataataatctctgaactaataacaaacgactatgggatatttgatcaattgacttgtattcttgtagaacatacgcagaggttgacgacgatgataacagtaggatttattcaacccaattctctcttctccttctcaactaaatccatcgacaagacacaa

SEQ ID NO: 42438 - DNA, 1050 bp, Arabidopsis thaliana columbia
actctagagaatccacgagatattttttaccttttttcttaaggaaaagagtttttttttacctttttagttgaaaaatatgactttaaaaatatgacccatctctgcaactaacctcaattaacaaaatatcgcatcattgcttcaccaaggaactacataaagagttagtgatatctcatagggattcacataccagaagaaatttgtatatgatcacgtagattaggcaaaattttcagatacaaaacgttagttcttttaagacgttaaaaaagggttaaaaaaaacagtgctacaaattgttgatattgtcctcaaaaaagagttttttctggcttcatgacattctatgccaaaaattggtgtgacgtgaaagaaaattatattgttaaaaaccaattattgtattagctaatagtgactcaagacaatattaatgatattcaatttgaattacaactagagacatagttcgatatataagaaattaaacaatggatttggaagaggtttatagcttttgtcaaggaaaagctcaaacgcaaaaagccctagctaattgtgacaaaagcaattccttttactttgtctttgccaaaacttccgctactcacagaagtggagacacaatcactgtggaatttgaggtttcttcgcgttccgtttacgtcgtgcctttctgctaagcggcgatggcgtaacaccttgtgagtttcgctactaggagaagtatcgtccttggaaacctcagaattgataccatcatcagagatcttgcaatcctcgatatctgtcttggccgtcacgttttcctcctcagctacctccttacgtgcctaggaaggaaaatattaggtttagttttactataatacgatgcgggcatgcggctaaaaccctaaagaaaattacgtgggataacttttgctgtttcttgttcttagcaggggggctggtctcttctgaaatggctgcagaaggaggaggaatgcggagctttacgagctcatcgataagggcggagacgattggctttgaacggagggg

SEQ ID NO: 42439 - DNA, 500 bp, Arabidopsis thaliana columbia
tgttgattacaacataacacctgatttttaatcatttgtagagctttgctttttcttgttaaagttgaattcatttcaccgacaccttctagaccttaagaggacgtaacttcgcacccacacttaattaattaattaatcacaagaccaacagatttttttgtcacttgccaacacacccggagacttatatgtaatcaaattcatggttctacaacaataattcataagtttattagggtatgttatgtgtatatattctcatacacacatggaccacatggttagcttaattatttgatgcaaagaacaaataaaagtagccaccgtaattgtcttatttaaagcttaattgaccaaagcacttgtaattactagtggtcacctccctcgcattattacctaattacagtacttaaatactaacagttgggttttgttaactaagctagaaaaataaaatttcagacagaacacaaatatttatatcttcatttaca

SEQ ID NO: 42440 - DNA, 543 bp, Arabidopsis thaliana columbia
agaggattacagagaaagtaagattgagtttcttagtagagagcgtcgaggattgagatttagggttttcaaaattggtacgattctgtcgttaaaaatagtcgacgtcgtataatcttcaatctcgccgagtcgctcacattctcacggcccattctagtacgacaccgtttttgtagttggcttgctaacgataccgtttaatctacaaaataaaagtactgaaattactaaaaaggttatgaaactaattgattcaaataaagagattaaaatgttgagattagcttaacttaatgagctgtgtatttttggtaatatgtcgtaaattaatttacaacttcaacctcttaataatcgaaatattcttagtttaccccattattttaacttgggaaaagttcatcgagaagtatttcgaatcgtgaccactcactcatagtcatttctctcctttcttcgacctcacaccaaagaacataaaagaaggaaattgtaagttagaactaaaaggcgaacacgaagattcatgctttcagatga

SEQ ID NO: 42441 - DNA, 605 bp, Arabidopsis thaliana columbia
tctagtaacgtgccgccagtgtgctctaaagcttgcggcatttttcacttgaccataatcgacttcggccagttggacctgcctttgcggtctctgttctctttttgttttgattatgatacccatgtgttgagtctcttggctttattccgtcatagcttctgtatgacacgatacgttaacggcattaaatgctgcagcatttattgtacttactctgaatacctgataagtcgaaaaccatttcttcaactattgagagatttaatttccactttctgtatctccttaaatatgcctagagctgttgggcaccgcttctggccgcaaacgtttgagaggcctattgcaagcccagtctgtatggaggacctgaaatttggcaagcggctcaaaaattaccatagccgagttaactcgaggatgccagccggggtgttaactagccctgaaccccgctcctgctgttcgcgaaactgagggctgacagacactttcggttctgagacagctcggcttagggctaggaagtagggccataacctgcagcggtcactatcgctggtaaaaccagagggtcacaaaatgtcaattacttggatggt

SEQ ID NO: 42442 - DNA, 604 bp, Arabidopsis thaliana columbia
tagtaacgtccgccagtgtgctctaaagcaaagacatacctcatgcgatatttgctccttttcaacttgtaagcgtcctcttgatgctacaacataggtatggccgtggatagcgctagttggatactccggcaaatcatcaagatgctcaatttggagtgttttaagaggagatgatctagcattaattagagaaatcaggccaggcatatctgttcatacagcttgagcaacttcgaaggaagtactagcgacaagccacatgatccctgcgactgaaggcgtttacctctgccttcctgttcgcaagtgagcggacggtttcttgagactcttaagggtcttgtttgcggtcataataaagtccctctttcgtgcgccctgcaaaacctcgacagagtgttctaccggaattaccagtgcccagccacacaaatatggcaattttcccttcttatgggatattataagttgcttagtactcctgtccagtctgttgtcagggatactgtcttcccattcgcccacttttcaagtttacggctgtccgtcgctgactcttgataccagtggttcgtttgcaaccttcgaagttacatcgtat

SEQ ID NO: 42443 - DNA, 635 bp, Arabidopsis thaliana columbia
ttcatgttattagctttgtttacggtgcatattgtttagttatgtatccttctttggatatgccatcaatagaccatgtgatatgtccccctgtttagctgtttgttctgacaatttagtcttactgaattttgcatcatacagcctagctttagacttaattacgaattttatgttgcaggtatatgattctggcaacaacaactgtttctattattgtgaagtatgccttctatgtcactgatatgctcaaggaaggtcaatgggaaggaaaaccagtatacactttctatctggagcttgttcgtgacttgcttcacttgtccatgtatctttgcttcttcctgatgatattcatgtaagtttttagtttattcacgttttcattattccaaacttagatgttataccaccaaaagaaacctaaatcctgaattattaacatgctgaaattagtatgtcacaactcactatcgccttatcggtatacagtgtttgttgctggatacttgtagcaagagttacttgcataattctatcattacacttatgtccatctatgagtcttctcttggttacattagtactttcatatatgcttacttgtagacgatgaaagcataaatgagaacaat

SEQ ID NO: 42444 - DNA, 1040 bp, Arabidopsis thaliana columbia
gatttgatttttgaaaagttaaaaactaatagttgactaaaaaattcataaacaaatatatactttttaaagagatacgttttgattaataacaaaaaggaaatatatacattaagtattataattaatatacttatataactaaaaatcactattataagtaacaatatctctaaaactttgaatggccattaaatttttcaaaaatagatagaagaaagaatttttttaaaaaagatatatccaagagatttccaactatgataaagcaaatatgtcataattatatttattggcttatcgcgacacgatttccagattcttattattattttgtagtgtaatttgctttaataactctttaactagtaactaatttactactaattgtttttaggaagaatcttttccttacaaaatagtactaatattagtcaactattttcagcacaggttaagtacagtggatcccaacgtctacaaaaaaaagaccacgtgacgtgatctattccaaaaccaaggacaaaactgtcattcaccaagctagacctcacgctctttcaattagctgagcggctacaattttcatttttaacattttagcttcggtgtctttcgaaatcaatcgcgcgaaaacaccattttatctcccgccgttccttccctcctttattatttttttccatctctccctcccaatctcacaaatctcaatctaatctcattcccaagctccaatctctctctctctccctctcccaaaatctcacgatgcaacctcagccgcatatttctccgaacaccgcaactgccgcgatctcagccgcgcttgaatctcagcgcagtagaaaaaaccgaggaagttacaattgcggtagatgtggtcaacctaagaaaggccatgtctgtcttttaactgctccacctgatattcccactactccgatcgcttctgagccagtgagctgcatctccgccgccgcatcttcttcccgttctactgtcttatctttaacagcggcgccgtcatcgcgacagac

SEQ ID NO: 42445 - DNA, 582 bp, Arabidopsis thaliana columbia
  unsure (1)..(582): unsure at all n locations
gccgacctgtgtgtttcttggtattgtcaatccagtagcatgtcttgccatttaacatatcactctttttcttctggtggagtattattgtcgttgataaacgtctctggaaaagagctttgtaccataagttcagtgaaatattcgagcggttataggtttgtaacttnggtggtgtgttccatttcatcctttgttcttcaaagcttcctatgactgcagattgtttcttatcatcgagtctagaagcaaaactctcatagcagcctctcaaatccactctttcgagtatctttatttgttttccgcgcagtttgtcaatcaatatgtggccatctttcgattcatctccttcagcgatcacttttatgtactcagttcgcattttcggcttcaataaagcgtgatctcctcccaagaaaattgctccaagaatttccctaagaacatgtcctgtaacaacaatgtagggttagtttgaaaactagccgagggtcttgaatgtttttctgtcttcgcgtgtttgaaacaatcaaggccaaaatcatattagtcttacgatganacagaatgacaagagta

SEQ ID NO: 42446 - DNA, 516 bp, Arabidopsis thaliana columbia
tgaaattcttgaaaaggatcttcagagccttctctcccaagtatttgtcctttgtgtttgcatgtaattatgtatgtatgtgtgatgtgtctaaaacgtatcttggtcgtctttgtagttttgtgaaagtgtacaatttgtgtgtttatgttatcaagtgttaaaaggttattccattgacacacgcccattactaggtttgacacatgatctaaaagtaagttgcaagatttgaaatttggtaatattgggctgctattactttatttttgacccaacaattgttcatagatccatgaaaaggtaaaagaagaaatggagaggaaaagatctaacacacagagagccaaacaactctgttagttcatcacaggttcaaaccaaagtctactaaacataagaagagtcttcccatccgttctacattaaaaataacaaaccaaactcaacagagtactcaacttttgtccgcactgagctaaattcctaagagcctgctacgaaaacaatgacctg

SEQ ID NO: 42447 - DNA, 486 bp, Arabidopsis thaliana columbia
taatatacacaatcagataaaatatgtcatgttgtttcgatattaccagatttaagtgttaaaatgatttatattgtatgcatgtcatatgatcaaatattttgaattttatttttttcttataaccacaagaataggccgaagctcaaaccaaatcctggaaatagcatttaaataaatgaatcatactgattactctacttttgatagtaaattctgtgtaatgttaaccatatatccatcagctatgattttctctgcaatataaaaatccccctatttagattctgtagttctaattggctcaatccttcaaatggttacattaagaaaatgacaaggttttgattcgcagtacgtagttttattaatcagtttattcgatttctaggctcatttgatcgaatggtacaacattatatatacggtatacctatcattttacatttcaattaaatatcagataacgattcttaaaaattgata

SEQ ID NO: 42448 - DNA, 594 bp, Arabidopsis thaliana columbia
tcgaacatttcacggctgcaagtaatacaaatttgaagaaatcaacaaattaggagctgacttaaccatatacaatacagaaccaaagagctaccaggttaacagtcttaggttcacaaaactcaagggatctgcagtaaattgtcaaaactagaatctagaaatatcaatcctagggagctgaagtgttcctcttgccatgaagaaagttagttagatcatcttgctctcattatatgttccacatacaaaaagaactttacgaaattcacaaacacttccccacacaattgtccttggggaattcatttaagttctccatcggattcaactaccgaaatataacccacatctcaaagacctttcttggcaaaaaggatgtacaagttctcataattataagaaatggtttgggaccacttcaatcgattcaagaaaaatgaaagcagcaaccagttccaacacagaaatctcacataataatatcctaaatatcaactgtactctcacattgcttgtctccaagaacacacatctctacttccaaaatcaaattaaacaatttccaaccagtatggattagttcatttgagt

SEQ ID NO: 42449 - DNA, 616 bp, Arabidopsis thaliana columbia
tgaagatattggccggccgatgattcgtgtaacttagtcagagagaagcgttgtgggtcccatgaagatattgtggagctccactcagctcatccacagtggctcaatgctgggatatttcctacacgatgtcgtttggatctattcgacgctggtctcgttgctggagaaagccgtcatgtgacgactctgggcggtatcttccgcaagtccagtaaccgtcgactactacgaggatacgccatctacctatagtgatacttaggttgatttggcagtaattacgtcagacgtattactgcgtgttgcatgtgaaaatgatagcagaaatgcagttaagtcatctacaagcattttctggaaatatgaaatttgttttatcttttaaaatatgtttttgttttgtcaatagcttttaaataattcttaaaaatcttttaaaatatgttgatagtaatttaatttttataatattttgactagagaaatctgattttttttttcttctccaaactcattgattaaatacacaaaatttcacatgcccaaaattagtaaaacattgaatggaaatccaaattaaatttaagagtctaagattgcttcgattttgaaa

SEQ ID NO: 42450 - DNA, 504 bp, Arabidopsis thaliana columbia
aggatcgccgcgtccaacatcgttacaactctctaccttgctcaagaacaaagtacaagaagaagaacagagtaatagcctttaaaccggccaacaacgggggtggccgaaccaaaaccggcttcgatttgatcttggttaaaatgcaacccgaagcctctgcgtcgtctagagtctttcacttccacttaagttgaacccggcataaccgcagcattctggattttgtgctaacccaaaccctttatttgaaacatctctcaacaagtttgcatcaatcttatgtgaggcaccttgtgtccgcataatgtgcaccgttatcaaatggcttgtcatatcgtcgtcgatcttcaagctacatatgatcttcattaacttattctcatgaagtcaggattaagaatagcttgtgtaagtgtgtaaatgtgtgttataaagagcaaacacttgatattaaatatatttttgttgttcattcccaaaatagaacctttttcttattag

SEQ ID NO: 42451 - DNA, 576 bp, Arabidopsis thaliana
ctgtctcaaactcaatcactgaagtttatgcaagaaccgccgcaattttcgccaccggtgattccggagaaaaacaacaccgatcaaaataactttaattctaagtaatgaaaaataaatacaaaataattaccaggataatggaggattatgaggagatgatgagtcatgaacagtggggttaaaaggatgagataattcttcctctgtttggtttaaccacgaaggaaattccatgacgtcactaaactttggaaacacgtcatcttcgactacgatgacttcttccgtttccggtttaatctccggctccaccgtcttcaacatgagttctgaccaccaagctgacgtcaccacgttgttttctccattagaggaagacggtagttgaggagctgaatctgaagtggcggtggtgaaagtgggaggaggtgaaggggaagagtagatatgaggattcgtcggaaaaatcgaggatgaggaagatgaagtggaggaagatgatgatgaagatgttgttgaggaggtttggatgaagtcgttgaaatcttggaagtttaggtttaacctaagggt

SEQ ID NO: 42452 - DNA, 539 bp, Arabidopsis thaliana columbia
aactgaacaaacttttagtttggttcgatttttcttcggattctaaattttttttattttattttaactaaactatatgttttatttatttttagtcatgatttattttatatatcaaaaatatgtaaccgaatttattacatctagttttttccaatcactttctttggtacagtttcggtttgactcaaattagtttaaaccaatttggaccaccctaatttatacattttttttttcaaagaccctagttctcttaatacattcaccgcacaactttttataactataaataaggccacaagcattcacacacattacacttttctctcccaaagaaacaaaaaaaaaaactcttaagctagaacaagtttaaaactcttcgctcagttttcgatctatctaacaaaagcatacatgactacgccggagggggcgatgtatgtggcgtgggaggatcttacggtggtgatccaaacttcggtgaaggagcaactaagagattactgaatggagtgaatggttgtggtgagcaaata

SEQ ID NO: 42453 - DNA, 470 bp, Arabidopsis thaliana columbia
tatgaaagtgttggttttctgttaacatcatcagttattcaattagtgattttaaaattcctttccaaattctatgttattgaaactgaaatttatataaagtcattccaaattatttatgaaggtacatccaaacacatatatgtttgaatggttagttgtggctaagagttatcttggaattcagtcgtctaactctagatcctcatatagaaaagatttgcttcctaaacaataatggtgaaaaaatcactgactatgtattggttagctacacggacgtgtcttactacaaaaatgtaacctctgttgaaagtggggtccctccggtaagaaatgcacgaagaaggtgataatcgtatatgatgtgaatcaagctaactcgcaggaggagaagcatgttgttggcatccaaagtggagctgtaaattcttgtcaggaattagtcactgtactactacatgatttgg

SEQ ID NO: 42454 - DNA, 523 bp, Arabidopsis thaliana columbia
ataaaggctctaaaacacagacattagatatgttttaacaaaaaaaatctcttattagagtatgaggtttctttaatatgttttttcctctagttaaatgaatagaacaaaatggaaattatattttagttagttcaccgaatctcttatttaatagaggaattggtttctatcttttgttctttctcgtcattggaataaactgaatgatttattttgtttttgtttcaatataagttatataacttctaacattcagtaagaactatatatattctaatttatttacatgaaaataatatacttagttttaaactcctattattaagatttttggtcatgatgaaacattcctttgatttagtgacttctatcacacagcctttttctctctttgggaatttttggtatacgttcgaagaaatatgttccgtacgtagacgataatctaaatgttgtagaaaagtaacgaagaatgattacgtgataacaattgttattgaacttttaatataacaaatta

SEQ ID NO: 42455 - DNA, 661 bp, Arabidopsis thaliana columbia
atcagcatccgatggtgcttctgatattggattgtgttcgacaaagtcgtcccatgcatcagatgatgccttggggattgggcagacttaccaggtagttaatcctttcttaaatgctaaatgtttctcatttcctcaacgaagtatgtgttggtgattgcctgagttttttcagtctttctgatgaaattaggctacaacatttgtaatttgttattgtctacttatttactcacaggaaatttcaaacgagcgatcgactaaactaagagggacaccgttggacactgcaagcaaatcagattcatgtaatgatacccgagatagcaaagcgaacacaaatcctattcgtaaaagcaaccggatttctaaacgacgtgttctggatgaagaactcgatagtcttgatgatgatgacgaagaaattcaatttctcagaaggatgaaaatggctaaagttgtggctgtagaagaagatgttgatgacgatgaagacaggaccagaaaacataaaaagctttccaaggtaatgaaacaaaatgtagaattcccacgtggtgtaggaacatcagaaaaatcagccaagaaggataagatgggaaaagcatttgacgatgctgattatgtcaaggatgatgatgaggaagaagagagggggtcc

SEQ ID NO: 42456 - DNA, 623 bp, Arabidopsis thaliana columbia
ctcgttctctttcttactttcttcctcatcctctccaggttaatctatgtaaaatattcgcaattatgtgggttaaaacagagcaataaatttaaacttactaacctaaaccaaacatagttcaataagcctatgaattaactactgaaacgacttagttcatttcaccctctgaattcgaaaattcgatcccttagttcccatctcccgaataatctaccaaatttcaatttactctgagtacattggatgcttatttgttgtctccacatatttggtcaaatctgaaactttaaaatattctcaaacctgttgaagaagttgtttaaatcttaaatctaaaaaaaaaaggttgtttaaatctatatcacacaattcaacctcatgacactaatatcagacacctcatcatcacgttgagctacatatatatgaactaaacatgatcataaaaatgtcatgtcataactttttctcacttttttggccatatttgataatccaagtttgtcttatggtgtcaacaaatttctctctttctttgtcatttatagaataaaatcaaccgtatttgtctactaaattttgacgtcaattgttcataactgaattttgctcagatt

SEQ ID NO: 42457 - DNA, 288 bp, Arabidopsis thaliana columbia
tttattttttcagaaatatatattcaaactataagttacttgaatcacacttgagagcggatccaacagtaagtaggaaacattgacgattctgggattagggccggggaaaacaaaactggatccgaatacctgtcccggcaccggaccacctaattggctcccaaactgaccccgaagatgtaccctattgcgtccaaaattcctctacccgaatatacctgaatgttttattcgctaatctagactttatccgagacccatcattttacccgctgatccgtctag

SEQ ID NO: 42458 - DNA, 483 bp, Arabidopsis thaliana columbia
tttggtttttcgaaccggttttaattaggagtattttggtctgattttacaaaggtttggataaattactaggtgagtcgtttgttacttgctctcacataatgtgtttgtgctacttggaagacagatccaagtgaaggaatatggggtcagttgagacccacccacaattaaatttaattataatgaaaccataaaaaatagtttatttagcctaacacccataattattgctctacagtttttatttttcattggacgacaattattttgtccaactggggccaaacttgtgagagcaaccacattggtgataaaagtaaaatgtctttagatagattaacattttaattaataaattgtaaaagcattataaccaataaaaaggtaacaagtaggtagaaaatgtctttaagagatgtctttgtgtcttcttggagacactattctcttctctctcttcacaaatgtctttaatttata

SEQ ID NO: 42459 - DNA, 592 bp, Arabidopsis thaliana columbia
gttgtaacaagtggaaatggtaactctaatccaaagcaaaagcaatggccctaagatatatgtttgaaacgaattcattgttgtacacaaagaatttttgaaggaggtaaacttttttcaaaaagctaaccgtaaatattgagaaatcgatgagatcgctctatattaaaatcatacggccgagatgacaaaaattaacaatattctagatcttcattatatccataatattggtttgagaaggttggccactaaaaaggagattgcatcattgtactaatctttgaccaattcatctaaacattatatttaatttggttgcgtaatcattattagaacatcgtaccaaatcaagaacaaaccaaagacatcacaattaatgcctaaagtgattggagatgagcttaagtgatggattcaactagttcattagtggagagcttgctaaactaaatggagcttgaaaataacaaatagaagctttcaaacttgaagatcaccttagaagtttaaaatgaagcttcacgattcagatatttaaaggatcaaataaacaataaaaaaggctctactgacgtggaggcaattttga

SEQ ID NO: 42460 - DNA, 588 bp, Arabidopsis thaliana columbia
tcatgaactatctgagcagtaaatttatcctaccttcatgttcaattgaccttaacttggcctccagaaataagattctctgcaaatatcaacaaaagaatatcagattttgatactatgatttgcttttacgaatgtatttcggaaaaacaacactcaattgtaagaccttgtgtgcttcatcatctactgcagcaacccgtgatgcatagattttccggacatctctcaagctacatattttgttgcacaggggacactacaaaagaagccaatgtgattcgatgagcaagataactatatccactaacagcacagggatttgaacaacttcgactaacaaccacaaacctatccgctccacttcgtcgctgctgaaaccacttgttgatgcaggaatgtccatacaagtgtccacaaggaagacaacttgtaccatcacaccagattaaaaaagaaaagagaacattagttgcactcaaaatattagacgtgaccagagtaatcaaatagttaagagagatactaatcacaatccagttcgaaagttttgtatgacataaacctaatcaactaagaactatataa

SEQ ID NO: 42461 - DNA, 498 bp, Arabidopsis thaliana columbia
ctatgtgttatacttgtagggcttcaaattggaaaaagaaaaaaacactgctaaaacgccatcgttttcgaaaattagtcattagaggcccacgggaacacgatatatgggcctaagtttcggtcaattctatataagaaaatgacaatactgtcctaaataatagaggcacagagacagagaaaagcttttaacttactggttttacaactgtgagctgatttctgatgtgccactctattaaaagcttttaacttattgaattcattagtttgtttggttatttttcgttaatgtgaaaaagtttctgctagaaccattagcaggaagatccgtttgtgatatctagagatttctgatggctatgagacatttgtatctatcttgataagattgttatctgagtataagctgtatgctcttcgtgattttcctgctaatggttctagcagaaactttgggcttgtgacaaggcagccatacaatggaatggaaggg

SEQ ID NO: 42462 - DNA, 199 bp, Arabidopsis thaliana columbia
ggatccctatagtgtatatagtgagttttaaaatgtatttaatagttgtaaagtaaaactatttagggttaaatatcaacctcttacttgataagatcaggttgggcctcgggtattaaactcataaaggcctcagatcttactgcttagcaatcgcttaaatgttcggtgtaagtccggttcagaagcattatcagcg

SEQ ID NO: 42463 - DNA, 554 bp, Arabidopsis thaliana columbia
  unsure (1)..(554): unsure at all n locations
nnnnnnnnnnnnnnnnnnnnnnctaaagtccggacaaaataaattaaattcaaatctgaataagaattaccaatgttttgtactgtattttaccaggttataaatatccttattaaattaacccgaagttgggtgcctattggattcactacaaaatggatcggcttctggtagagctgcttgaaatcattattttgtttactctacaagcttctctgaagcatctattgagcgtgaacaggctattccgggccctctgtattccttcactctttcagtctgttcaggtcggagttaccttcgcgcaactggagggtttgctgcagatatcaaagtcttcatttgctccatttgtgagagctatacgatatgaggcaaatgcccttctcgatcccagtatgtgcccagttagtatctaaagatgaccgaactaagttaccagtggcgcctatgattctaccgccatgtggaagcattttacatccatcttttatgcaatcacgcatggcagaaaaggaaaagatcttatggacaagtcaggatatactgtgcat

SEQ ID NO: 42464 - DNA, 675 bp, Arabidopsis thaliana columbia
tcgatctagatgaagaggatccctgaacaaattctcaaaaaaaactgtgatgattacaaaagaagaaaacgttgacaatgatcgaaggagaatcaaataatagatctgtagaagaagaatcagaaaaccataaatagaaactttgtttagtttcttgaaacgaaaaaaagaaggaaaaaaaaatcaagaagctaatgatgatgagaatgatgatgaagaagattgatgagagaggagatcacgcaaccaaagcaaagcaaaggaaccagaaagaagaagaacaaaactctctctctctctctattctctttcttctggcttcttggtgactttggtaatggagaaaaataaaaagtcttgaaggacatcagagaggcccctacctggctgaccgaaacaaaccgtggttaaagaatgaaccgtggttaggtttggagatgatctaacggtggggaatggtttgaaggagaagaagaggagatggatcttgaccgttgatgggaaatggcatgcatgtgtcctaatcactggttacgaggccattctcgccaaagagagaaaaaagagaaggtgatgtagtagtgtcagacttgagagagattttgtaattgaccttggttttatggtttaattcggaattatgcattgttgcttgtggcgagtagagagattatg

SEQ ID NO: 42465 - DNA, 869 bp, Arabidopsis thaliana columbia
gttaagaaaagttaattgatctaatctactgcaaattattcaataaaaattaattgatgtgaaaatatatctagaaggaaaaaattctccaaaatgtaaagtcatgtcaagaacttagacccccacacgtagattctgtattaaacaaaaaatttattatggtccaacgaaagcttctgagtcggttttgagagtcaacccacgtgggcactaacgaagtcccaagtcaaacatattcctatgggtcctccaatcaactcttttattcagtacacatcatatttttggtaacataaaattccattgctgttgccaaaaaataccatacaaatatagttttctataataattagttcaagagactgtctaattttatcataaatttcctactttttgcaaaagttcaacttgagttaaaccttataagctctatttagatataaatatttaataatttagatataatgtaaaacataaacgcaaaatataataatttcaaggatataacaaaaaattgttttatatttttgttgcacatgattcttaccatattattaatgttgtacatttccgaaaccccatacatgtatattattatagccataaaaaattgtacatatatgtaaaatacaaaattctcaaaataaaatctattataaaaaaatgaaaaaagagaaagaaaaagaaaatttattttatgagaaacatctatgttgaaggagaaaaaaggtctaaagaacatctacataattttcataagtggagtttttcgaacttcgaatattaggttgatggacccacttgttccttgcctataaattcccaaatcaaatctcatttaatccatgcaaaattaaaacacacacaaa

SEQ ID NO: 42466 - DNA, 559 bp, Arabidopsis thaliana columbia
ccaagagcaaggagctcgaagatctcgacttctcttcgaaaacaaaaccgaaagacgaaactttgaacgagaagcagcttaaaactccaaggaactcatcaccaagaagattagtgaataatcatagaagacaagtttcaataggtgaagatgaacaaagccctgccgcggtcactatcactacaccaacttatatggttgcaacagagtcagcaaaggcaaagtcaagatcattaagctccccaaggataagaccgagaagttttgacacacagtcagagagttactcgccatataagaacaagctatgcctgacgacatcaatgatgagtgaagcaccaagcaaagtaaggattgccaacaatggcagtaacactagaccaagtgcataccagcaacggtctccagggttaaggggatttaacataggccctttgaaatcatgcaataataataatactctattgaacgatctcagcattaattcagacagatgcctacctagctggaacaagcagagcagcttgagatgagtggatattgaccctggatatatcat

SEQ ID NO: 42467 - DNA, 474 bp, Arabidopsis thaliana columbia
ttcccatttcagaaccttccaattaaataaacaaaaccgctataaatactgaaaaacactcatcaaacagaatgcgagaaactatcacaagtctctaaatcaaagatatcaaagtaaccaaagctacgtttgaaatacacatcagtgattctgtatataaccatcaatttcgactcaagctcaaatccaaaacctttcacctggaaaactagccattgaaaaaagctgaagcttatagggaatctcaaatcatttgaactataatcacacgagcacatagaaacagacacaatcgcaatctaatttgatttcaatgatccaaatccgacccggaacttcaaaatcgaatcttttactcacctcaggaccgccatgctcataaaccctaatccctttcaccatcttcttctcggtcgactcttctaccgcgactgtactcagagctcttacagcaaacacagtgccatgtgtaga

SEQ ID NO: 42468 - DNA, 464 bp, Arabidopsis thaliana columbia
  unsure (1)..(464): unsure at all n locations
tnnnnnnnnnnnnnnnnnnnnnnnctaaagcgatactcggtcgagtgataacccgctcgacggcgggtttaagctgtgtgacgaagtaaccactcttaacagcataaccaattttttacgtacgtaaaccactaaatgatatttgagagcatgctaccgagtattgaaaacaccactacaaatacataagcaaatctcaacaaataaccagaaaataatttccagtgttatttttagccggtttaaattgaaccttcaaattatagagcacttataaataacagccgttaatataaattggctaatagatctattcatattcagccaagagccatgaataggattcgatagagaaaagttcagatacaaatagagatctacttcacaaatcaaacgagaaacccaaacttacatcttgaaataatcacattgcttagatgaatatttatcgcgcagtgacatca

SEQ ID NO: 42469 - DNA, 517 bp, Arabidopsis thaliana columbia
tgcagccagctttacaagcgtcagaagatttttttttaaagaagatcaaaatactaccgcccatcatatataagagtcagcagcaacgattccggagattttgtcgacaatagggccacatcgttttatatttaggttccatgggcagcatcaagctccacactgaaatttgatgcaggcagttcttgactgaaagaaatcagacgcacacagagatagaaatgtggttaacagtataaacagagttttacaaatgttgaaagttgattctaagctttaggattctaaactaagactgaggtaacaagattatatccataagcatgaagcaggttttgaagagtggggaggtgcgagaaaactgtacctgctatcagctgaggaggcataattgttcagtgccagagcacaggaggctgactacaaatatatatggtatccagatgtgtgagtaaccgtagaagtttgaggtggagtggctggaattgttgaattttaaacaagacacaaccaaaag

SEQ ID NO: 42470 - DNA, 325 bp, Arabidopsis thaliana columbia
gagttgctgggaaagaggcataagccaacgaagcatgtgccacgaactgagaaaacaaagaccaacttcccgagccaaaaaagatgctcagtgcaaaacgtttatacatcacaaagggtgctactatcctggtgttcataattaccaagtatgaggtgaattaatttactcttaattttttttctaatgtaattatttacaaaggcaagattactttctactatgtagtttccaaataataatataggtcatctctcaattatatagggcttcatcaatatcactctgaatcgatacatgcatttttgctctctagcttcaaata

SEQ ID NO: 42471 - DNA, 656 bp, Arabidopsis thaliana columbia
acccaaaaatatatgcacgaacatagatcattactttggtagttacaacttacaacttagtagcataataatttaataaagtactactggttacaactttaaaaaggaaaaggacatcttttactttattaggacagctttttgagttgtaaatttagagcccaacattggattcctcttctttgaccattcctctctacctgaataacccgttaatctctctctgtccctttcttcttcttttttcaagaacaataaaaaaatgtctcaagattctgcaactactactccgccgccacctttaacctccgacgtttcaatgccttccggtgaagaagatgagccaaagcatgtaacatcggaagaagaggcaccggtgacttcggagacaaatctgaagctacctttgatgccggagctagaggagtctaatcttacggcggaggttgtttcagagaaggtgacgccggagacgatgactttggagtcagaaggtctcaaccacgcggcggaggattcagagcagacacatgaagtgacgccggagacagagactgcgaagctagaggttctcaaccacacggcggaggattcagagcagacacatgaagtgacgccggagatagagactgggggatcctcaagcctctagatcg

SEQ ID NO: 42472 - DNA, 521 bp, Arabidopsis thaliana columbia
agaggatggccaataatcattcgccacgtaaacatgtagattagccactaaacttatcattatgttgttaattttttttacaagtgttgcactggggaaggtttgaaatgggctctcttggagtaatccttaattttcaaattttcatcagcatttactgagattttatgaatattgttctttacaaaatttccatagaaatgaaatgtaaattaaagattttatcatgcaatcatccaaatttagttttgaatcttacatacatgccacatatatcacaacaaatcagacaaaacaggtaaatataaaccatgaaattcataataaatcttgcataattaacaaacaagattatttctatgcatgattgatctccacctatttatatgaacattgtaaacaacacaagacaaataacaaacacaaatggagattaacaaatttctggccgtagtcgtagccgtcgtggtcctctactccgtcgaagcgacggcacaaggaaggtaccctcagttgacggc

SEQ ID NO: 42473 - DNA, 856 bp, Arabidopsis thaliana columbia
gatgaagctgtatgtgtgaaaaaattagttcgttcatgctcaaaggtctaaataaaaaagacacataccttgacactaatttccaacgatgtattttacttgtgagaataattttgttatttcagcaatactaaagacacaaaagaagacatattaagaagattgtgtaacattttaaccaagaacaatgattatatgaacaaattttgtgaaagattaccttcaagtagagtaagatttttgtgccgaattcgaaattttggtagtttcgatcaaatatgtagctttgctaacatactcggcttgcaatatgttgcaactctcattgcttggagttcccattcaaggccacaacatgtatgttcctctatttttgaatccccacaaagaagattaaagagggctataataattaattgataaaaaaggaataaactgggatttgctaaagtagggttgattgctcacctttggattaacttaagtcgatgagtaatatgatcaccttcaaagtaactttcaaagtaacaacatactcaaaatcacgaacattaaaattgaagtaaaaaaaccgttgttgaaaaagtcaattaattttttgttttatttttattttaatccttaaattagtgaaaaaggtgaaaatgtataattttagacttaagacacatggtataatgataaggctgcagtttttagagaaaagtaacttgtgatttattagataaagatttcatctgtaaattagtaaaaccagaaggtaaaagtgcataattttagacttaagctacgtggcataatgataaggcggcagttgttagagaagtgcatgtgatgaaacacgtggcataatgca

SEQ ID NO: 42474 - DNA, 532 bp, Arabidopsis thaliana
tattgacagtggaagaagaagcgtatgaggagactaaagaggaagcgccgaaagatgagacagcgatccaagtagtccattccataggacgtgtctcaaaatttctatcttatgtaatacctttctagtttcttgatttttaagcagcttcttgaatcagttttgaaccttttgtgttttttgcattttagtcttgaacaatcatctcagtctatattttgaatttggttcactcctatatccactagatgcagttctggcaaaacagagatttggtttttgaatcttttaacagttaatctatctatatgctgtatttattcaaggttagagattgaagttagaagttagcgttagctcttagaacatcatgctccagttcgttttatttagacagcaacagttgtctacatttattgaactaagcaaacgctatacccaagtaactgattctatcagcggggactatcgtctgtacgtgttcccttgatatctttgatgtcacgttgtatctgtgtttgatcgcggatgc

SEQ ID NO: 42475 - DNA, 523 bp, Arabidopsis thaliana columbia
aaattgcgattacggaatccttttttttgtgggttgcgaattgcagtcttgctgctctttgctgttgctgtttgttggaggaatgctgcttctgagaatgccgccagtctctgtggatctcgtcgtttactgtcagcattatgtgtctaatcgaagacatatgccataacactctatgtcttgtgtactatcgtgtgtcaatgtctgttaatgtttacctctttgtttgagagtgcactcatccagagcatggattagacaagtaggtttcttgtggatgtcattgtaatttgtattatttggaaaacgtgattggtattttacctaaatttatgttttcaatggctgaattacggtgataataaaatgcgacatttgtatttgttccaagtttgataaaaggcaaaaactagtacaaagaaaagtttgaaaacacatgaaggtgcaaagagactaaagaatcctaacatatggtggtgcatcttttctagtcccaacctactgttcggtagaggtaaagttt

SEQ ID NO: 42476 - DNA, 557 bp, Arabidopsis thaliana columbia
ttgagaaagatttaatagaggaggagagaaattggagttggtttaggggtaggtgagttatgctttgtgattctaaaaccttctgcaagaatgtgtgggttagtgatatagctttggtgagttttaaaaaacatgaacatcttgggccataccggttatggttcgaccattatctatcagctttaaaaccaaagccaagcttgttccgatatgttagtttgtttgttccatacaacacttttttcaagcttaagacccaaaatcgcaatcgcttgaggtttcttaaaccaagttcttgtcttccactttcaggcatatgttagcaaagttaaaaagagccaacttaaactggaatcccattgtttctctaaatacaaaagtcaccataaaaacttctacttctcgtttgaggtaggtgaagatcaggcaaactaatgtttacttcttggtcttcagtagtgtgtagatatagatattcccatagattttatcagcaacagaagacaatttgtttttgttggatttaataatttagcagaggaatgggaaaatgaaga

SEQ ID NO: 42477 - DNA, 540 bp, Arabidopsis thaliana columbia
gatgttccaaggtgagtctgcagaatgtaaatcggcgatggggggatggatggattgttgtgatcagcccgtagctgtcagctggattcagtatttgcagttgctctactagactctacaaattgctgatgctgtcacggtaaaaaccggtatgttcgaacaaggctcaggtagttttgacatgaggtccgaacttatgactaatgccatcgatacaataagtcgagcagctattaccgctttcaacagtctggttggatcagcagggtacccagctcgaagacgtaatcttggtcatagcgtggacgctgtgtgcaatagttagccgctgtcgatgcatctgcagaaagatgattgtcgctatctgtgcaaaacagaacgacccgcgaaccatagatcacactctcggtgggccggtttcttagccgattccttgcccgccggatccgtggtttcgcgtatcggcatgctcgggagcttttatctcggtcttgtcgtgcgcgttgcttccggatatcacaaaaccccggcacgaaaagt

SEQ ID NO: 42478 - DNA, 512 bp, Arabidopsis thaliana columbia
tgtcaagattttgctttttaacatatagatatagtaaggatttgtgaattttacaggtatgttccaaaattcgaaactgaaaggatagaagaatgcaaagcagaagaacatagaaagtgtaagttgtatccattattcgagactaatatacagtaaaatctactccacggatcctatattgtgggattgttcatgtatgatataactttatgaacaatataagaatcagttttagtgtaaatagtacttttctatatttaataaattaaagtatatgtgatcaaaaagaaagacaccatcttctccttcctggtcaaatcccgaacctggtaagatctgttgaactccagttatcaccattgatcatgaagctccctgagaaactaactggtctggctcctctgagaatgagcattccaggatctcttgaatctctttgtcatcgagtaaaccctggaactcgaagatctcctctcgatcttcttggagaaactgaccaaatacttcttgat

SEQ ID NO: 42479 - DNA, 494 bp, Arabidopsis thaliana columbia
gataacttcaacaacaaaactagtgtttagttttacacatacagtgagaacaaaatttaatattctatttatattgctgtatagtttcttaagcttaagattatagtgacaatattcaccataaaaaatgttaaatccatttggtagatcatatttagtcaataacatgcatcttccatcccaaaggaggtttactagttcgagtatttaatagcttaaaacattaataatatattcattaagcaagtatataaatatgaacctcaagcaaaaatctattttgaaaaaaaaaatagatggaaacaaaaagtttgttaggaggggaggttttgtttgtaacttggagaataaggaagtatgtattggtgtgtttgaaaaacaaaaataaagaagaataggtcattttattaagtttggttgggccaatcatgaataagaatagttaatgaattgatgattaaattggatttttgatatatgcatgtatgtttagt

SEQ ID NO: 42480 - DNA, 442 bp, Arabidopsis thaliana columbia
agtaacgtccagcagatatgctccttctttctttctttttttttttgatatgaaatcaatcaaagtgaaaagcttagattatacaatatagcatagcctagttctttgtaaccttgcccaaaaaggaatttaaggaaacatcaaagctgggaaaaatattgggagactaacgcgcaacagtttcattgatggttctttctctttcgggtacaaaagtcaaaatctgagtttatcattgatggttctcttgtaggcaatttctgatggttctctttttctccttccaaaatagatagtccataactctttgtccgtaagtataatttcgatgatttttgttttttgttttacgagaacgttcacgtcaccagaagtataatatcattgaaattaggtttggaagattacacagttttgtaaaaatagttacataatttgtata

SEQ ID NO: 42481 - DNA, 566 bp, Arabidopsis thaliana columbia
tctaaaaattgaagaaataaataggtccagattaaaaccaaaacgagtatgttgcttcttctgagtatggatgatatcactaccttccttctcgaaacaactatatcatttctaatctaattctcattctatattcctaatgatatatagtatctgtaatatctacaaatcaaaagttagtttctttagtttttccgaatagtaataatacagaaaattagagttatcaaagacgagtcagtttaatttgtaagaattttctaggaagttgaggcaaaacgtggaactaaatcttgagtgggaatggaaggacttatttgtaaacatagaccacactttctcctaaccaaaacctgtttttgttcatgcattaaataccgtctatgacttactgaccttagaaaattcaacaaatgtgttctattcttttttatgcaaagaaaatttacgttcaaacgacagagatttactcataagctaaaagcttgcgagttacagtttacagagaaaatcatatctcagaggagattgaattttcctctgaaatccaggaagaatcgagatga

SEQ ID NO: 42482 - DNA, 532 bp, Arabidopsis thaliana columbia
caacaacacatttcattacaattgaattaagttcttgtcttaatctcgttactaactttattcaattgcaactaatcccttagtttagttcataaatcgttcccgcttagataactagcaatcttagcttagctagctaacaacgaacaaacaaacaaacaaaaaacttcattcagacttattgttattcttgtttattttttattacatcatataaataaacaaaccctcataagtttctgtttaaatcttcttcacaatctcaggtgtgattcatctcttcaaattttcgatcatttctacaatcagaccaaaacagagcgctctgttttttttgttcttcttaatcacacaatggaaacaaaaactgaaaacaaagaacatcaatggaaggattcagtttcttcaaggtcgacttcacgatcgtcatcgataacatctgcttcttcggatggacactttgatatccgacactttcctcttcccaagccatcattgtctgcttctgaggcacagaaactgagagagtcac

SEQ ID NO: 42483 - DNA, 556 bp, Arabidopsis thaliana columbia
tgtgcataggcaaattttaacgtgttattttgatagggacattctgacattctatttttcacctttggttttattttttcttcaatgttattatgacgtaagcaagttgtattttgacgttcagttttgggcgtttcaactagcgaacgttggaattgtgtttttggctatcgatcgttaggagtatgggaaaaatgtcacatttaaatctaaatcatcagtcagtttactactttttgttggatctggtttaaatttttgcatgaactctggatcatgtttaaattttcgaattcccattgacacttccaattcccaattctcattgacacatcgtaaatcctaaacatttttcaacatgactcgaaagttattcgatttttgataatgtagccgaagtctgcatgaaagtaattcaattgcacattctgacttatagccgtaacctaatagatttcgaaagttggtgtttttaaaggatattaatgttattttagtgttattttgaagtcgctttaataactttttcagttgttttttatttttaaagtggggg

SEQ ID NO: 42484 - DNA, 582 bp, Arabidopsis thaliana columbia
catgtaataactttaagaaaagcccaaagagatccgtccgacgaaagaagcaggaaaatgggtcgaagtaccattataaaaaactccaaattttaacgtttaggtaattatactaattttcccgtgatctgtgctatattcagggcccaaaatattttgttccaacattgtttttaaatatttttaatgtatcaaacctcgttaaaactaggtggggtatctctatgtagtggctgggagccacgacaaattgttcatagtcttcaaaaaaggataaatacaattgcacagcatgaactaaccgatgcgattataccagcactaaggcaccagattccatgagaacgtcgcacctaagcgtgcttgaacgatagtagtattaggatgggtgactcccaggaagtcttcagtgttgtatccctatatatttggttaagattatacgatcctattacttgtagaccatgaagctccacatgacatttgatacctttatggaaagcccccagagaaccctccgacgatagaagcaggtaaatgggtcgaggtatcaatgtttgaacatttactccaatatttgac

SEQ ID NO: 42485 - DNA, 575 bp, Arabidopsis thaliana columbia
tccatcccatagatcagttgagtgaggcatcaccactgaaaagaaactcacctatatcccgtagtattaaggaacatcttaatcaactgcattgctgaacactcttttttgtagctgtcagtaagaagcttcaaaatacggcctaatttactcatatgtcggctaaccaactgagagaagacatcaatcggaacctctgtggcaccttcaaatcccatcgtcagaagcatgcgtgcaacaactttccgtgacaccagagctgcttgatcgtcactaaaacccattttttcagcttttctactgcgtaaaactcctctttcttccattctatggtactcaggcatcagcccaagcctctcgatcataatatgactcctggtagtaacttgcggtaaagtatcaagtaccccatagaattctgtttttaagttgtcttgtgttctggtaatcggcgaaagggcagtctcaggtacacagttcattctaaacattgtctccggaagaaaaagtatatcatcttctgaagtacttccatcaaagccagaactaggatgtgtactagatctactcatatg

SEQ ID NO: 42486 - DNA, 430 bp, Arabidopsis thaliana columbia
  unsure (1)..(430): unsure at all n locations
acaaagatgtatcagattgagatggganaaaaagtggtgaatagttgaggagaatgggcttgtattgagtgggatgtcattagttgtttgaggcgttagggtggcggtggtataaaagtgtgggagttttttgagcagttgtgggagaaaaattggtgagtggaggagaagaatgggngtgtcatgcgtgggctgagatggattattggaggtctaggggtggctgtatataagatgttagaatcacatgaggagatagtcatccggcaattaaccatcccacagcgtagtgaaagcagcgccggaatgcatgcaagtggaagcaaggccgcaaggaaatcatcctttgtgggcaactgatcatctctagattttacaacttccgaatatgaagtccacaaaatgccacgagaacaactagaaagtagag

SEQ ID NO: 42487 - DNA, 318 bp, Arabidopsis thaliana columbia
ttctcatcttcacctaatccaacactagacacatcaatcgccaaactattcaccatatcatcatcatcgctttctctcctatgatcaaagtacttctgcttcacccatctctccatcaaatccatccgccccggccaaggacggactaactcaataacacctttctccttactcaactcatcagaatcaatctgaatcggctcaagcacaacacaagactccaatttatcattagacacaacggattcgacttctctaagatccggatctatgttgtggagcacaacgacgagtttttaactgatgcgtctgtttaga

SEQ ID NO: 42488 - DNA, 582 bp, Arabidopsis thaliana columbia
tcaatttagtcgagtagaagaactcagaaaaacatctgcattagtgcatatctatttataataattacatttgttacttcacacacttcacgatttctaatttttgtaatgatatttggccatgtggggtggggggggggggagggggagtggtatctatattagtgaaaattaattagtattattattggatttaatgaattataacccaaagattctgtgaattttgctttgagtaggtccgtatcaagttgatgtttacactaaagttaatataatgataatcattgcagttaacaatcaatatttttccacaaatcaagatgttaacgacgcggaaatcatgttgttatgcaccataattacctcactaatcccccacatgatccaaatacgtcacatcggttaagatttttatgaacatacaaaaatcacatttcacagtagaaacatatccaaaattctattagataatgacgttttcattatacagatacacggaaaagcctattagattttacatcatgaaataaccttattgattattctccaaacaacagaatcaaatgaacaaaaaatcca

SEQ ID NO: 42489 - DNA, 527 bp, Arabidopsis thaliana columbia
catctttggaaaaagcataaagttatgttcatgaatcttataaaatgttttaaagatagtccttcacaaaacaagacaaatcaaacgacacaaagattcgatgctgcggtgtcctaaaaagttctctttatttggagtctcaaaatctaattcttatttgttttcctcaaaacactttctgtgaaaatttcgaaatgtcactacactgtgagtttagcaaaagagtttttgttcattacgttctaattctatgattatctaatagattaagtgccatcactttcattcatgagcacaccatcactagttaaaaagatcaagtgcctttctcagttaatcctaaatcctagttaatgtggtgtcgttttgaccaatccattaatacgttgccgttttaaaatcccaccacgagcataatataacggatataatgctatcttgtcttgtttctctctagatttcagagattctctcgagtttctgacacgcgcgtactcgcacgtgtctcatcactacactaaccctac

SEQ ID NO: 42490 - DNA, 536 bp, Arabidopsis thaliana columbia
gaatggtcttaaggatgagacgactgtggtggatatgggggtgataggatcgtttgtgagttattttaagaaggaggtggagcttattgaggcgcctatccccaatctcaacatggatgattatgtgatgattgagttagagcttgcacatgatgaaactcggtggaaagattacgttgtttacgtttacatttgtgatattttgtttacgtttatatacgttttatacgttttgtttagttagagattaccttgttctccaatctctatttgtctggactcgactcttcttggcgttgggacggagttttatcttgttctattatcaaatgacgatggagatcagattgttctgagtacatccgtgatgcccccattgttccatccttcacatatccgaacttgcctgattcgccactcacctcactatggagagattatgattgtatgcgacgaggggatgctatagagacggagatgggagtgctgcgactcgtgcactcgtactttgggaccatattgtacacatgtgggga

SEQ ID NO: 42491 - DNA, 476 bp, Arabidopsis thaliana columbia
cccacatctcttcaaagagaccccaatctcatccctcctcgctgacatagaaaagctattgttcttgtaaagagacataacatcagtattaactggtcttccccacccaaaatccgccccatatatcccaaactggttcgacccggtaacagtcaatacttttgtaccaaccttcatgtttttagttccttcctcgtacacctcccaaactgactcaagacttcgtgaacccaaacctttgaccgaatcacttaaaatctcaacaccgttgacgaatccatcttctcccaaaaaggtcgtcgcttcatatccattaaaatcaattggtaaaacacaattcccaaaatatgttaaaggaaccggtggatctaaccggtttctaaaatcagcagcatacataaaccgaatcggtctatccacacatgcccatgcgccttaatcacacaagtcaacacataagtgtacgtgacgaatga

SEQ ID NO: 42492 - DNA, 536 bp, Arabidopsis thaliana columbia
gtcgacgtcgactctacccgttcgcctagtttcaagaaatttatataccatgggcgttgattaccaattttttagctctctatattgtttttaactattcatgttcaaatctgttttttttttatctatacaaacatttgtttaaactgtacatatgaatcattagattttatatctcacattatacatgtgtaacatggttcaaaaactggtgtgagtagataccaaattacatcccccagtcttttcatatgtgagactattttacaaagtatggttatgtaaaacgttctcatgtacatataagtctctatagatatatgactcatcatatttatctaattacaacttcaaaaactcaatcttaattaccactagatgcttagcatttccattgttaccaaatatgtaaataaaaaattaacagtgcatctaaaaaatggttttatcgttttgtaattctaatcaggcacatgttatcaattatcacattttcaataaaaactttatattgaaatatcagtcattcctacgtg

SEQ ID NO: 42493 - DNA, 410 bp, Arabidopsis thaliana columbia
tatgcactttcttaggttataagttacaacgaaatattatcttacattattgaataatttttgaagaatatgagcaatgagaaatgtattagatatatatgaaaaacaaaccggaaacagttttgatacttatgtcataaggtaaaagctacaaacttttgagtacaaggtgaacagattagccaagctattccaaacagagctattcaaatttcagaagttggcgtagggatagatctggtaggaatgattttaatatgctgcttcaagcagcttgtatttgttttagtgtgatgaccaacgttggtgttgcattaagtgtcttatggatttgagactgaaatgagaggaaggtacagcagattcacatgatcacttgggattaggcatgcaaaactcactcatcttag

SEQ ID NO: 42494 - DNA, 343 bp, Arabidopsis thaliana columbia
tatgttgttaaaaggacccaaagttttatattatatatatatgtaggtatatgattttgtaaaaaaagacaattagtataaaagagtccatttttaaatatatgtattgggactccggatccattgaactagcactgtgtgcagatgctattgcaaaaatttgtctcctcttgtggtttgtactttgcttgattagaatgttggtcatcacctttgttaagaccattggtggatgcttagaaaccatgtattggttttttaagtattaatataaggatgctaaagtaagtatgtttgacggggaaaaaaaagatgccaacatgtaccaaacaaaacaacaatc

SEQ ID NO: 42495 - DNA, 618 bp, Arabidopsis thaliana columbia
tttacgttcattccgtaatttccatttcccaaagattaatgacaaagttgaaacagaattttgacatttcttcattcaaagtattacaatcattaaactacacctaatagatgtcaagataaataaaatatatttaaaacaagtgaaaatagagagaaaaacaaatctttaatttagtagatattgttaccttgtatgtataaactccactggtaatgtatccttcaagatcatccaggatgctatatttgcttctacgcaaaacaacggtggagaatggtgttagcaacttcatcattttctgcaatcatgaccttgacatagcaaaaaaacagattttttcttcatatattgtcaatgaaagacaaaatatattaacttaaaggatagaaaatgacttctacttaatgtcacaccatcaattttcgttattgatatcgaatcaacatatccaagatgctcaggtcttggcacacaaagcttcaattatttgaaacatttaaaatattaaaagctaaggtataactgacggtcatagagagtattccataaaggattgttacaacggtcatataataattatgaaatatatatatatacatctgctatctattgact

SEQ ID NO: 42496 - DNA, 468 bp, Arabidopsis thaliana columbia
tttgtacaaaaatataataactccaactaatcatcctcagtcaagcacttagctgaatttaatcacacaattcaatttttataattcttcttttgtatcatattttacaatctccagatattttggtttaactgccgaagatatttggagtgggagagaaaaaaggagaaaagaaaaaggaggacacgtagggcaaaaggaagcagacagatgttgtgagtgtgacgtaaggcaactgagtttacgtgaaaccaatgtcggtaagagagaattcaaaaacaaatcttcacgtctctctctaaacccaactctcatatatgtcttcttccactaactacttcctcaacctctcccttataaataaacctcttgacttcactcttcatctttaagatcacatcaatcacaactaacacttttacatgaagagacagagaaaagatatggaggaagaagggactgctgatg

SEQ ID NO: 42497 - DNA, 575 bp, Arabidopsis thaliana columbia
tgatgacccatcaactttccctacttcataaaaaaagcttggagggctatcactgttatttgcggtgtctccgatattattagacttgagtaagaacgacaaaagatgaaagaaaagaagaacataagattaaggagaagtaaaagcttcttcttcttttttttgtctccacttgttgtcactgcgactttgcgccaaacaaacaacgcttctttttttggttacctaactttcttttctggctatgttgttgttaggtttaggtaaattaaatcgtgaatcaaaattaaattacgcaaacacaagtcaccaacaccaacacacatgacaataattaaaacatgcacaaatataaaagtttattcgttaaatttaacaataccaaaaagaatgagctaaaaatctattatatttaatttgctttttgtttcttaatttttatatatggcaatcatcacattcatgaattaaattccataaacaaacacaatcaaattgataaacaacaacatgaatgacaaaaagaaaaacaaaaacctagatagtagagaaggagctgatataagaccttggta

SEQ ID NO: 42498 - DNA, 616 bp, Arabidopsis thaliana columbia
ttttgatttcttcaatttgcactagctcaccggtttgtcccgaagtctgccaccatcttttcagtatgttacggctcaatccacaggactctacagagactacgccttttagatggattccaagacggtccaatgcaatttccgcaccaccaatcccgctaaagagtgataaaactgttaaaccttggggaaacatagacttgagtacagagagatggtaacccaatgtgtctgtttggaagcagtaatcaaacaacttcaatctttcagccaaccttccaccaccgatgtttgtgtggttcattggatatcccataatgcactctaaatgttcaggctccaagggtgagaggatgtttggtgctatccaaatgagattggaggtgtgacaatgtcgaagtattaaagtctggtcctgttgagtaggctttcccttgcattcagctatacggcgaccaattcgttcacagagaagagttgcatctttcatattagaacacgtgccgctattgaaatgctttctgatacccattgtggccacaactcctcatgtgtggcatgcgtcttgtatagttaacgagggtcgggagggattaacctgttacagtgggaagag

SEQ ID NO: 42499 - DNA, 624 bp, Arabidopsis thaliana columbia
  unsure (1)..(624): unsure at all n locations
aaagttcaactgtgtcttttgttgtggtctgatgcaaattttatttatagatgaatctcagcgcaccacacaataatccactatcctaaagactaaagagtaagtatataccagggtaaattaaattggatcccacttttacttggaagccaacaatggttaaaaaaatatctatctataaacgattgtcgaaaatgaagataaaattggagttaataattatatatactttggcttaacgtaaatgaagtttaagcttgtatttgatcgtgttatttttattttttttaacgagagaatcaattgagtgcgtctctttctcttctcagctcatatgtcctctctctctctctctcagcctttctatataaaacgaaataaagaagaaattaaataccagaagtggtatagtctaggccgatacatttcactatctctctctcttttgtttttcctcttcttctttttttacatttgatttcaaactctcacacaaagagcttcagatttataagaccatgataatggctttaagacaaagattggcaagaagaaaaaactanagagaaacgaccaaaatctcaagcaaacagtactaacttctgttgcaaacagaagaagatg

SEQ ID NO: 42500 - DNA, 196 bp, Arabidopsis thaliana columbia
cgcgcccggttcgcccggcacgtcggtgagcgtggtcagcgcaactgcgctccttcgtgattccgcacatccctcacgacgacgtggtgctgcccgaagaagtgcaaggcctgcgtgccttcggctcggaaaccgagatggaagccatcggcggcgtcatggcccgtcatctggagacgatgcgcaacaagcacgc

SEQ ID NO: 42501 - DNA, 577 bp, Arabidopsis thaliana columbia
gtctttaaatatttaattaagcttgaacataatactacaaaatcaacgtgaaacaaaccgaccagctcttggatttattcacttttgagcgtaaatctctagtaattattcaacttcttcgtttagattattgttttacatgaactagaagataatatatttatttctcataattgtgcatgtatatacacataaaaagtaaaatgcttttagtataaattatattgctattttttctcatatgttttttttttagtgagaatcgaatgttttgtcgaagaaatcgaaatcaagagttcactattttacataatttccggatttaaaaaagaaaaagaaaatgagggaagttagaagaagaaagaaacgtaccaagagaggagcaaggagagggatcgccgtcgatagtatcaacggtggagagaacaaagacgaatcggagaagaaaagtgaagaagagtagagagtaaacaccatttgataagagaatcttctagaaccaaccttaacttttatgaactctctcaatcctttccctgtgaccacagtcacatgtctcaagctcggagatatatgt

SEQ ID NO: 42502 - DNA, 604 bp, Arabidopsis thaliana columbia
gctacaaaataacaaactacataagttagttaccaccaaaccttctcaacaaccattaaaagtttccaaggaatttgaaacgaagacaggaatcatcacagtttgacagggctatattggggtactttctaactgcaaatcagagcaaaaacatggtatatttatcctcatattttccacttcaagatgccatatctaaataagaagtgcttatctgaaactataacagtttttactctaacaattctagcccatttcacgatagccagcagtgtccaggctaattatacctctcgattctgtacatactccaaaaatgatggcacatctgggtatcgaaattcactctcctcgatagaaagaggtttctgataacaaatgatatctccatcttcaatctgtacaccagaaactcatttcaatgaagagaacaaactgtaaaacatcaaatttgatacaatgagattaacattacttgacacagcctgaaagaagtcttcttatcaatctggtcacacattacgcaaggttcaaactttatttcctgaaattgggcacaaaaagcaattaaatggaatgtacatggccatatgcatgacgagaa

SEQ ID NO: 42503 - DNA, 1085 bp, Arabidopsis thaliana columbia
tctatcctctcccattcttcgcttccttccttcgctgccacaatcttccgtctcgctcacggtgcttcttacgagtgtctcgttcacagattcgggtttgattccacttcccaagcttcacgctctttcttcactgtctgcaaactcatcaatgagaaattaagtcaacaacttgatgatcctaaacccgatttttcacctaatctgcttccgaattgctacggtgttgtcggattcgggaggtttgaggttaaaggaaagcttcttggtgctaaaggttcgatcttggttcaagcattggttgattccaatggcagattcgttgatatctcagctggttggccaagtactatgaaaccagaagctatttttagacagacgaagcttttttcaattgcagaggaagttctcagtggagctccgactaaacttggaaatggagtattggttcctcgttacatattgggagattcttgtcttcctttattgccgtggcttgttacaccttatgatttgacttcagacgaggagagttttagagaagaattcaacaatgtagtacacactggattgcatagtgttgagattgcgtttgctaaggttcgagctcggtggcggattcttgataagaaatggaaaccagagacaatcgagtttatgccgtttgtcataactacgggttgcttgttgcataattttcttgtgaattctggtgatgatgatgattcagtggaggaatgtgtgaatggttgtgaagctggtgataatggtgagatgagaaaagatgatgataaggaggaggagactaggagtttcgaaggagaagcatatagagagtcgaagaggatcagagatgctatcgctgagaacctaagccgagtgagttcactaagatgaaatcgaaaagttgcaagaagcgtttttgtttgtctgttttagccttatcttgtaaattgtggtttctgctgttttcttttgtgtgacaatgtacatctgtttcagtatgcagtttacggcttagaatgtgaccagataatttaatatgaccgtataattttttgtacgtgtcacttcaggtattggat

SEQ ID NO: 42504 - DNA, 549 bp, Arabidopsis thaliana columbia
tagaagctgagagttgatcctggggtaaacgaaacgaaactcgacgagactgtttttaaaaccaagtttgaagtgttagttcctcgggttgatgatgagccaattagaagtccgaggttgagatcgatgagtgagaagagatacgtgaaatttgcaaaccctactggtaataatggctcggtgtttcttgagagacatccttcaatgaaaaagaaggagaagaagacaaaggataagaagaagaagagtttaatccctttgtttattggagggattttttctaagaaaaaggttttgcaatgaaacagattttgttttccgacatttcttcacttttatttgtgtttttttcttggttttgataataatgtcacatgtatgactttcgtaaattgttcttgaaaatatttatcttaatttaatccgctcgtttttttttaattgaattattaactattgtattattggactatttagtcaattcgttaaatatttgtatttcacatacaaaatttgcaacatattttatcttgtttaaaattgatgaaa

SEQ ID NO: 42505 - DNA, 592 bp, Arabidopsis thaliana columbia
taatgttaactatgatgcaaaaaggagatatgacctataaatactattttgtttgttcgattctcttcctcgctccattttcgagctggcactatctcatatatatctctaacggcctgcgcatattcaataacaaattctgagaggatcataagaccttactcatgttttaattcatgactacagactacattacctgcaaaatatgcatctggtctgagttttgaatgctcaacacagccttgcaacggtatacatccatctccgattttttatcccacagaatttcctccagccataaacgaacctgtcaaaccgagaacaagttggtgtatccgaacaacaatatttcttaactacttgtccaagaatgttcaatacatttttgctaccttatcgaggtttataggttgcggttcgctgatgcatagagtccttactccactatcgtgaagatctgtcgtcgttaatgatttatttgcttccagcagggattccagacgactaacatgctaatttcaacagtaaacaaggaagataagttcagtttttacagtcaaaagcataattagtaatcaagcgagaagagaag

SEQ ID NO: 42506 - DNA, 529 bp, Arabidopsis thaliana columbia
aggatgatgccccgcttcttatgcctcaacatcacatggttataccccactacatgggaaggcaagaggagtcagacattgaaagcaagaaagagggggacagtattagagggattagaagagatgattcattttcttctagatcatctttgcaggacattccattacttttgcctcacgaaccagttgatcaggatggttcgagtggggggcataaagaaaatggaacaaacaacagaaatggtcctttctctttccggaaatcaaaaattgaaccagttgatggagatactcctatgaggggctttgtagatgatcgtaatgggctagatcttccagtagcaaagcgtggttctaatgcaatagattcagagtggtgggaaacacaagatcatgattatcaggttgggtcgccagatgagactgggcaagtcggtccgagaacttcatgccgctgtcaggtgggtgttatgaaagtttatatataccaattatatgtggaattcaaatctgaatagagctgatgcta

SEQ ID NO: 42507 - DNA, 581 bp, Arabidopsis thaliana columbia
  unsure (1)..(581): unsure at all n locations
ccaccctttttgtttaataaataataaattaacattatgaaggtttgatttttttaactatgctcaccaactcaccatcaagaaaatcgtcaaccgtttaagatcacagaaatgtaaaaacagtaaacacatatactcacctcaacattgttagtgtagattttttctaaagaaatcttanaggagttcaatccaccaattgtggccatagtgtttaaacctcatccatcgaatcagctattgttacatatccgaatttaacatccctcgtcaaggaaattagaagaccaatatacaagttatagacaaattgaacatgacagtagacctacatgtcaagagacgtgaaatatacatacattatatacatatgtatgtcgagaataaataaaatcatattgtgctatgtatgaagtttttaaaattcgcattttatgcgtgcatccacgcataatcggatgtgggggtgacctttgaaatgccacaactttgcgcggccttgatttactcacgcgggacataaatttaaaattcccatataaattagatagaaatttcatattctcttataatttatacat

SEQ ID NO: 42508 - DNA, 586 bp, Arabidopsis thaliana columbia
ctctagtatcactattcattatccgaaaactgaaaacccggattgaacactcgttcagaaaaaggggtttgttttatacctggaaacgtgtggctgagctactctcatgtacagtgtcccttagacattttattgccatgggtagtgaagtaaacacctcactgtttccatcactttcaccatctttttctccatctgcgtgaccaaacaagaagagttaagttgagataacgattgtgacgtgttgattttattccatgatcataaagatttaggactacctctttcactctgcacaaggctttcccacactttctgaagtgtgaactgccatgacaagtcaacctgtggatcattctctggcaaatcagctgctgtaccaaccttatgatacaccgacatgtttggtacaaacaatgccttcttgaaattgacacctacatcaaccattattcagcttctctaactatccgttttacctcaggccaagttttctgtttctacattttgtcttttgaagacacaagggctcacgaacttaccgtattttgcgcacatattctttagatgtggaacagtagatttg

SEQ ID NO: 42509 - DNA, 586 bp, Arabidopsis thaliana columbia
tatgaacaagcttggtccttagaaactcattactctccaacccattaatacgtatatgaacatggacttgtttaccgtgaagcaacgacttccggcgaacacacgcctctaaaagagcagagaaagttgtcgcatttacaggaatccctctctgttcgagataatcaagaatcgtgagagcgacttcgagattgttctgcctcgcaaaaatttgaatatctctgtggataatgtaggggttcttggagtggagaggaagagaagaagggaaagcatctctttccctaaaaggtttcggctttttggcgggagaagtggaaggtcgtctagttctgcttggtctaatcggagatttcgccggagcgccatctttatcggaacgatgaggacggtggttgagactcgtcgtcacggagagggacgccgggaggtctcggattccgagagacgacactacttccattgtgaccactaaccacttgattaagctaaaggtcgttagtatttatatgtagctttaaactatttttataaagtatgcaattgaaattgaaagctaatatttgggccagaaaattgaaatatg

SEQ ID NO: 42510 - DNA, 571 bp, Arabidopsis thaliana columbia
atagttctgttaacaatttcttagatgatgaggttccaatgatctgagaggctcataccggtaagctggctctcccactgctaaaattttgttctcgagctggcacattcgagccaacatccacacctaaatagatacaacgaagttttgtaagtgtttttgattacatattgtgggtttcaaaaggtatggataaatgagacttggtacctctttctcaactgcttcttttagatctctaatgcgacgctggagcacatcatattgagataaaagttgctgcttgataccaaccacatctactgttcgctcagggagctgaaaccgtgcaagggattatgagattcatacccaagagactatcatatgtttacttgacgcagttcatgtgatagagaatataaacctgatttagcttaggaaggacaaaagaatttacggttgctcctatcgctagtgatgtaacagtagcaactgagagtaactgaggcaaactgggatcaataacaccagaagcagcatctccagtagccaaaattgcaagaaggggtattagaacgagggttgtaag

SEQ ID NO: 42511 - DNA, 542 bp, Arabidopsis thaliana columbia
ccgcaagttctcaaggttgcttgagagtaaagaaatctatccatgtatggatatatgtaaaattacaaaaaaactaccttgtatgtcgtattttaagggtatgggttctaattggaatttatatgaaataaaagggcatatagttaaattccatattttcgtgtttaaatgggcccaagtgaagcgcactctaataattcaaaggcccaatgtaacaaactcagcagatcagaaggggaaaaagataaaccctaattcctcagattacaatttgagaaccaccgattcgagagtagcaatggggattctatcatggttcacgggaagtcctaagccatcacagtccgagacgtctaagccggagatgattcagatgccgaaatcagaaactccagccccggggatgaatggagccatagaagttcctcggcccgatcgcgcgacggttttcgagttcggctccgttgctgctactggagacagagtcactctcgctggttactgtcacgtttccgatgatctcgaaccttgccgttgggaga

SEQ ID NO: 42512 - DNA, 455 bp, Arabidopsis thaliana columbia
cattttactttttatgagttttatcttgaataatggtgcagattgtgccccacgtagcaaatgcatacatggtcaaaacttctagaaaagggtccactctaatcgtggaatctcctgacttagataatcgctgactgtttgagtcaacgatgtgaatagtgtccccttggccttagggctactggtgttttgcatgagatctagtatctcgagatgttagcaaagtcttatttcttaatcttggagtggttcgcgaagaagagttattatgtgctaggcagcagcatgtgtagtgatctgagttgttcaccgtgtgaatattcgtgtccatcgtggtctactagagtgttgcatgcatgagattgcctgtatgctaactaagtcttctgtctcacagactcttagcgcttgtcgcagttggagtagtagagtgttgccgacgcgtcgatgtggtg

SEQ ID NO: 42513 - DNA, 552 bp, Arabidopsis thaliana columbia
ccttatataattctctacaactctctcatattgcaagaaacgaaggacatatttaacacatgtgcaaaacgtttttccaatattgtgtgtataaatgtagttatacattatttctcttaataaaggaggaagacatatggatgatggtaattttgtggtatattgtgtggtgagcctagtgtcacagacttttcttagaataccatgagactgtcgacactctccacaattgaccatcttcgactagttttaccctactttgggttcatcaggtgatcggctccaacaaaacagacttacccttgataacttagtagctatgttcgacatttataataataaactcgcaaaagtaaaagtgaaagaacggaacctaaatatattcatcacagtggcatatttagtcatgttcatcgtaaaccctaaaagtcaaatgtcaactctttcctcgttgcctttttaggctcttaaaacatgcagatgcatgagataagattaaattaaaaatttcatataatgcaacttgaaatacagattcgttttgtttgagaa

SEQ ID NO: 42514 - DNA, 454 bp, Arabidopsis thaliana columbia
caagttgaaaacgacgacgcgtagacatgaggctcgcttgattgaccattacgccgccagggtagacttttcgtgcccatatataataaacccttctctttcctttatcccacaacatcatccactccaaatatcacatattaccaaatctaatcgccgacatacattgaactcaaatccgctcagaatctccgacaatcagttccaatccatggctcagaatcaacaacctattttccagaccaaacctccaggtaataataagaatcaacaaaccagatctctcgtttcttgatctcctcttcttacaaaacaatttgattctaatttcctctgtttctttttgcagaacaatttgtgcaaatacctatcaacatcgagcgtgattcttcaaccacacgcatgaaccaaaccggaaacacaatccggaaaccaaaccactggccaaccatca

SEQ ID NO: 42515 - DNA, 534 bp, Arabidopsis thaliana columbia
gtcggtgtaacagttgggatttataagcccattaagaaggtttaggacccattgatctagctagcaacctatgctagttcttgaagaattctcaactttttaatgcaaatggtgtgtttaatctttttatgcccattggagttttggatagaaaacaaaatttagagtaattaccatgcatgcttaagttgtagtggcaaaaaatgactaaattgaatttattttatagtttaatttagaaaacacaattactagtctatagtagttactaattatacacttacatcacttttttgttctttaaatactaccatcatagggtattgccgtattggcaataagtccataactatttgataatttatcaatgtgtttttattttcttacttttttgaataaaatgaaatgttcttatatactttctaataaaatgaaattgcattttaccttgtatactctaaatatgtatcataatttcctttcctatactagttgttttatcaaacctagaaacattagcaaacaatgctacta

SEQ ID NO: 42516 - DNA, 496 bp, Arabidopsis thaliana columbia
gaatattgtcggagaaaaagcaaaatattatcgaccgtacgattcttcttttaatggccaagacccaagagacatgtcatgaaaattaattaaaataatacgattgagagtaattagttgtctttatttctcctcaattcttgaaagataaacaaattttccttttggagggactttgtggttcaaacaagaatctccatgacaaagccgcggttgctttcccagtcaacttgtcaaatctgaggctttgaaggttttgcagtacaatattagatgcgaactctgttgtattctctatcaagccctaagaggcagagaccttttaaaagcctattttcatgcattggaaatttaaaataatttattttatatattagacgatagtaaacaagcaaatcatagggtactcattatctaattatcacaccgcagtctttctctgtgtgcttgttttcactttttaaccactaatcagaatctacgttgtcataaaagt

SEQ ID NO: 42517 - DNA, 476 bp, Arabidopsis thaliana columbia
atgaaatatatatcactgagaaaaaatcaagcttggtattattttctgataagtacactatggaatggctgaaattcaagaagaacacaaaaaccttatgttctgcattctaaaatagtgaaagtttccccattgttgggaaggtccttggtgatgcttcaacatatactgcttatgggcccattcctagaaatccagaacaagagaaccaatgaactagaaacaggaataacagtgttgaacaggtcatgtattactcattctgtgttgttccatattgacactcacttgctgctcttctggcaatgggtagacatcgccgaataatgttactcttgcattcgataagcaactccatcctggtatctgaaaataccaaattcacagagaacaaaaaagggagtaaacaccaatatgtttgtatagtttaagcacgattgataatgttgtacctgaacaacgagggtgcatctagg

SEQ ID NO: 42518 - DNA, 554 bp, Arabidopsis thaliana columbia
ctctggaaacgtttcagcgggaaaaataagagaaggtaactagggctaacgcaccttttctttatatacattgcgaacgtgactctttggattccagacttaaccccttccaaaaattccaatagccatggtgaaaggcacgaacgccgagcaagccctcgccagagaagaagcttcgagcagccgtccaaaaagacaaagagttccttccattgttgaagaagaaggcgaaaatggtggaggagatgtggtagtacgatctgggacgttgttcgagctagatcttctcgattgtcctatttgttgtaacgcactcaccattcctatctttcaggtcttctcttcttacttcaccactcagagttttgaatatttgttgtggtttatgattttggggaaaatgttgtttgcttttggtgattacagtgacttaactaaaaattcatgctttacaaatttcaatttcattacagtagttggatgattttggggaaaatgttgtttgtatctgaataactaagtattgtgagttttttgtgtctcagtgtgacaaa

SEQ ID NO: 42519 - DNA, 520 bp, Arabidopsis thaliana columbia
tgataaactgaattaaacaaaaccaatgaaaaagaaaaatttgaaactaaaaaaacatatatgaaatcctaaatatacatgcatgtcgtgagataacaacaatgtgacgattcagattacttacttctacacaaagcttcatctcccgtattttatcgatgatatactcaaggctcgagtctaagtttctctacgtacagttcatgcggataacaaattaaaaacaaagcaaaagttgtattagtaatatcagacccaaatttatttttcattagcgtttgttgatacaagttaaatggatgtcctaaaaaaacaccactaatttagttttttaattaaggacatatgttaagtttcaaacacaaataggagaataaacttcttgtttatacgtatatgaacaaaatattttgattagtaaagataattaaacacatgtatcaatttgtatttgcaacaattagatgaccaaaatagaggcaaaaagttggtatgcatgacctttccattacaacgtgtc

SEQ ID NO: 42520 - DNA, 495 bp, Arabidopsis thaliana columbia
cttaattgttcatttttatttttaaattaaaattattaaaaatattaagactttaaaagttgggatacttttttgggatatgtgaaaaccattggaagtgctctaaacctcttgtcaaatttctagtttcaaatatttacagctcataattagctggcagtacaatgaatattttaaccaaattaagaaaaatatatgctccaaaaggtataatatatgcatgaattcataatttatctctaaaataactgattttcttttatatccaatcatgattttacacgtgtacattaattgatacgttttaatgtcataaatagtcatattagtgtataagtcaaaagatggaaaaaatccatatatattattatattaatgtataaagacagttttacccttatttccttttaattaaaatcaacttattgactaaacaaaattagatggaccttctggccatggcagattttttaaaaatattttattaaaaattta

SEQ ID NO: 42521 - DNA, 771 bp, Arabidopsis thaliana columbia
cagagtacagatgtgtttcttggtgtcaattttcaggctctgtggtaaataaagtcctgttcttgatattggtggtttcatcagaattaggatgaaagagaagaagggtcattacgtgccaccatcttatattccattaacacagtcagatgctgatactgaagtagagaccactactccaaatctggaaattgctgtttctgaaagcacaaaagatgatccgagacaatggtcatctggtatatgcgcttgcttcgacgatatgcagagctgtatgctactactctctgtcatccaaaccttcttcattttactacacgaatcaaatttgttaaaggtgcctctttgcattgacctgtgaaattgccatgtgttagtgtgttcagatatgttcataaagataagtgtggttctggttgatagttcttgcagagttttttttggtttagaagaataaccaagtgcatttcttgaataggctaggaagaaacttagattgcttatgttttgagcttccttgtgttacttctctaggacttgattctgttttcttgtttatgctgaagatcatttagacaatggtttgaaatgaacattacaacttactgtggtttgtttcgtatgcacaggttgtgtaggtttgttctgtccttgttatatctttggcaaaaacgcagagcttctggggtctggaacatttgcaggaccctgcttaacccattgcatctcctgggctttggtcaatacatttgctgctttgcaactaatggc

SEQ ID NO: 42522 - DNA, 487 bp, Arabidopsis thaliana columbia
gaggctgccgaagaatcaaacttaaagaaaaactattatagatagagagacaagtgtggtaaggtaaacagaagaccagtttgctacttttaagttccaagcttctatgagacacccaacatttacattttcaaatcctctctatagcaaaaccattcacacaatctgaagtttactcttacttctctctttactccgaaatcctaactcttctttaccacattttgttttttgtttacgcaaatgacctctgatgagaccaccacatttgcgttaatggttcaccactatgcagtatccgcaacggactttcctttcgtatctacagttgtcggtttctccaaaagccgaagttggttcgttaacacctatccagaaaacaatttgataagaaactctgagctgcttctcggaaaaaggtagtttttgtacaaaattctatcgacatacctcgatttgggactcaagaaatcttctttgagcttct

SEQ ID NO: 42523 - DNA, 473 bp, Arabidopsis thaliana columbia
cacgaaattttaataatgaataagatatcaacgaaataataaaattatccatttacatcaacctgaaaagtgaaactagtcgctgcgagtaaaccaaataaacaatttgaagtttctctctattattttgatttctagaccaaaatccttttaaaacaaagtttaaatcgtgattcatggaatgtagtaattaactaattatgtaagttatgtaatataacctctttggaagatatataacattaaccagcaaaactaaattacacttggttaatctaactacatctactacataataattcgttgagcttcacttctgtcacgcctaaagacattcgcatttaactccatgcacgcgcctgatgataatgattaaagtgctgctatgaaatatcctaattccttgaaagggaagtaacatttgatgtcatacaaagatttcaatagaaacctgaattatggatgaagtgggg

SEQ ID NO: 42524 - DNA, 627 bp, Arabidopsis thaliana columbia
gatttcagctaatttgttctcctaaatcggggtttgtatgatgaacagaatcgtgctttgccataattagaggaagaaacaaaaaagtcagctaaatatattaatcttgtcaaacaataatttatattgaaggatgacgtgttagagtttgtatgcatgtaaccatatataaatgattgcgtcgttccatttgtattagattttaggataatgattagttagattagacaaaaattgatcaattattattaggagatcacatgggactgataaggataaagaaaaacagagaagatttcttcatctcattagagccaaagtaataataattatgattaaaaaaaccaaccaagatcggcgggaagtaattaacaattaccacaatataaagttggtaaaggaattttcttatttcttaaatcatatacatttctttaaacataatctaactctcatttgatcattgacaacacattattatgatagttttgctcgtggcaactaggatgagaattccagttcttcggttatgtggcaatcacgcaaatttccgagtttcacgagtttggaatcggtgtttctatcgcaacttggctttgacacttagtagtaatctttgcacttgag

SEQ ID NO: 42525 - DNA, 617 bp, Arabidopsis thaliana columbia
tttcattgtctcttatccaatccacccaattcaattggtctgaatcaagagatgagaacgttgagacaatccgtggactaagctcgcctctgctctgttgtgcctctttgtctctaactagacctaacgagtcgactcagtcagtggaagggaaggatacagtacagcagcagaagggtcactcggtgagtcgaaatgcggaggaacgagttctgattagtgaggttttagtaagaacgaaagatggtgaggaacttgagaggaaggatttggaaatggaggcattggctgctttgaaagcttgtagagctaattcagcgttgactattcgtgaggtacaggaggatgtacataggattatagaaagtgggtacttttgctcttgtactcctgttgctgttgatacacgagacgggattcggttgatgtttcaggtaatattttgattgttactctttttgttggaggagaaaggtctcgtttttatgtttctgggatgcaaataattctcattttcttgccataaggtagaacaaaccaagaatttcgtgggttagtctgtgaaaatgcaaatgtcctccctccaagtcatacatgaagcttccgagatgggtttg

SEQ ID NO: 42526 - DNA, 531 bp, Arabidopsis thaliana columbia
  unsure (1)..(531): unsure at all n locations
tactcgttgcaataggcttgtgcaatttcgtaaagagagtggttatgttgaagaacacattctgggaatgcaccagctaagtgatcttggagtttatcctgaacagatggtggaaatctcgcgacaacaggaccttcttcgagagaaggaaatccaaaagataaatgaaaagcaaaatctagctggtaaacaagatgatcagaactcgaacagcggcganntggagtggaagtaaatactgctagaagtactgattcaacttcgagcaattttcggatgtcatcttggaagaagcttccatctgctgccgagaaaaaccgtagtcttaataacactcccaaggctaagggggagagcaaaatccaaccaaaagtttatggtgatgaaaacgctgaaaacttgcatagcccgtcaggccagcctgcatctgcagacagaagtgctttgtggggtttctgggcggaccatcaatgtgtgacatacgataattctatgatttgtcgtatctgtgaagttgaaatacgagttgta

SEQ ID NO: 42527 - DNA, 443 bp, Arabidopsis thaliana columbia
ctttttgtttgtatctggtttagtgttttgtagttctctttcttcttttttcaaggttgagtaaattaaagaaaattaactttctatagagggaatggtttttgctttacagcgttacacataatgagaattgagtagaatgaataaggaagagtagaatccgaggcaggttaataggtacgtgggcatgagtcttagtagcttcgctctcatggatatattgatgtcggaggcaatggcagctagactctaagcaaccgagttgtgaagccgtgagatttcttcttacatatgaagtatatcaaggcttgtatttatgagagctatagtgatcactttgacattatccgagaacataatgttagcacggcctctggagtgaataattgtataatcgcggaataggaatttataatgagtatctagtttgcttatttaattat

SEQ ID NO: 42528 - DNA, 582 bp, Arabidopsis thaliana columbia
tgcttattgtacttcatcatcccgttgtaaaatttataagcacaattttcgccaactatttattccgcaaattgaacagctgattttatttaaattaatgtgatctttatcacaacaaattcacaagtcacctgctgctggtgacgcaagtatccccctctctgttacaatatctcacgatcattcaattgtatccataaagatgatgtatgttactatcaccaccaccaccaccatcgtcatgaatcatgatcatcagacaacgactacgaaaaaatcataagtctacttttattagacacacaaatctgtgaaaatggcgatttagttaataataattcgctcaactttttcttaatcaatcaaaggaataaaataacaaataataataagaccattttttacttttccccttctttatgcaaaattcggcctcttaattttcaaaattttcgacctccgatctcccatctccgcttccatcatctttaggatctctcaatctctttcttcactgatcgattagggttttcgagctgaaatcgatactcctccaccgcgaagaagcgattacctagattt

SEQ ID NO: 42529 - DNA, 492 bp, Arabidopsis thaliana columbia
gtttgctaatcggcggaatgtagtgagtaacgcaactgagagtttgtatttacaacccaattcttaacacaactatttgcagtttcttggacgtgcatgaggcagagagaattaggactgatttatgctgacgttgttgaagctagaaaaaattttccatagcaacgcttcagaattgtcccatcaatgacatagcctgcactaagtttaatttgaataagatactctccccataaatatcagacaaaaatatgctctaattattgacagtaaatgctatactttttacgcacagatctcaacctgtaaacagaacagtattgatggtggtgaaaatagttcggcagttaatatgagaatcaaactggaaatgtacaaaaccatcggtttccagtttttgtatttacattctgccgatttaatattatattcaacactttccatgtcaaagtacttactttccctttcaaataaactacttaccatgattgt

SEQ ID NO: 42530 - DNA, 486 bp, Arabidopsis thaliana columbia
cgtattgtggaaaaacttcatgatccagccacacttgttctatattatctcctaaactgcattcactaaaatgtaacagaagatgatgccattgactcctacaacgcaaaatacaggaagcaaatgaaacaggagatggagtcattgattcctacaatggcaggaaatgggaaagtggagaacgttgcctaccaactagcaagactcattcacttattgaacaaatgaaacagtggattgcagtcttgcaattaagataaaggccaaatggcattttacataatggaaataagatcatgttgagaaagttccaactactaaacctaacaggaccaaaagaataactacaaatctttaacaaagcaaacttcttgcagccttaggttacacaaattggcaggggcttgaatcgtcttctcaattcgcatagactcaagctgaggaaccgaaaagattccagtcattgactttgaatgtagagagtga

SEQ ID NO: 42531 - DNA, 903 bp, Arabidopsis thaliana columbia
agtacagtaatgggggtattgtatcaatgaagttgatggtatctaagagaaatgatgatatgtgagtagttggaaaatgtatagttttggaagttcaaatctgagtggtgtgttgtttgggcagattagattagtctggtcttttttgacccctttttttattttgcagctccatctgtggattggattttcctatgaataatatgatattgatatgtttattatggtgtatatgtaatcatccttttaaaactagtaccagtaactttgacaaaggagaatctttataagttataaccttattattaacttgtaaaccgaaataaactgaaatcttcatccgtttagagcaaattttcctgcaggcttgaactctgagccgagcggcccatcaaaaaatcttactctcgttagcctcattttcaataatccttttagattcatggtgaaacgtagatagaagaaattacttgctgatttccggattaaatttgatgttcaaacaagattttgacattttagcaagattccacaatcaaacttgtctttaaaagcagagcaatactgattttcgttttcttgaggaaactctgaaatgttttatttgaaaagttgggactcttcgaacatttgcattctacgatggctacaaattttttgaaaacgaaaaactaaagagagactaggaaaccaaaaaactacaattacagagaacactcaacagagatattaaaatcctctgtttcttgactggttccgctcatagtgttgccctgatcctccgttttgattatcataccaaccatcttgaggcggtctaaatacctcgggtctgaagccgagaggtggaggcggcggtggtggaagctggtggctagggacgtgtggctgccattcaggtat

SEQ ID NO: 42532 - DNA, 502 bp, Arabidopsis thaliana columbia
tgccaagtggaccaataggaaggtagtgaaactttacttttatatatacatgattttttcattttttctctctgtttattattcatttaacataaaaagacaatattaccctccatataactcacaatatttccacagtttttcacattatatttttctctacaatgtttatcctcgaattaggaaaactgaagaagagcagcttcgttttcagaaccttcccaggtatgttgttgcttttcagaaattatctagatatgggttcttctttcgattcttttttaatcatgagataatttttgatatatggtagttgttgaatcataagagaacttttgactagattcgtttttttcttcaaaatttgagtgttgttgattgcttttgtatgaaacttgtcaaaaatcaaaacttgtcacagagattttgagtataggcagtaaaagattttagattcaaggttttcaactttgagatgattagttttcgacggatagaagag

SEQ ID NO: 42533 - DNA, 560 bp, Arabidopsis thaliana columbia
  unsure (1)..(560): unsure at all n locations
tcccttgcactctgacagttcgattcctgcaacagaaaataaccagcatgcaactatgatcacctaaattaacaaatgacaaaggtgcattcaccatgatggctaccattcactaacttatcgtatgaaatatttttgggaacatgttcggtttctacaggtgaattttaccagttggtttgtgttcgctaaactaagttcttacaaaaataatcccaaaaagatagctanaattgatagatggacaccaaacctggaaatggagatgaaggggtattgacttttgaaacagaggagacattgccaccagttcgcatggtggtcgaagggaggcctgatgatccagagtggttatttatgacagcagaaagagcatctttgtgttctttccactccctctctgcttctcctcgaacacttaaaagccaacgttttgtcaatggtagcgaggaagacgcttggtctggggaccatgccgactggaaaatgacttcttcagatattccagaccagcaggtcgcttaagaagtggctccaagagttcaaacgagatttgctga

SEQ ID NO: 42534 - DNA, 509 bp, Arabidopsis thaliana columbia
ggatctggctctgcatttgcattctgtttttgagtaattttggctctgtttctgatgtcttaatggaaaggttatggaagaagcgaggaagcataagagagaaacgtcatcaaaatcatacacgaacggtcttcaattcaagatccagaaacccatttcaaaagacaacccgacccggtccacaatgcacaacgacaagaagaagaaacggtgttggtggaagaaagctctcccttttttcaaatggcggaaatggccaatctccaccgtcggcgtgaacgaagatcgtagggtcaggaactttcgctccgtaaccgggtccatgtcaatgtcgggtccgatttacgcaacggagagtctaataagtgggtcgaacacaccgtatcgtacaacaacgagtaaaccttcgtcgggacctatagcgggaacattgacgccggcgaggaaaggtgacgtggcgattccttatctgagcttacgagagcttaacatggagcagccacagagga

SEQ ID NO: 42535 - DNA, 629 bp, Arabidopsis thaliana columbia
agtaggctcagaattatgccaacaaaagatagtttcagagtttattgcaacaaaaaatagtttacaaaaagggtcccaaaacccatttaatcatttaaatgatttagggtactgttactaattatgatatgtgactgttgaaaacttctacaatgtttatagcattttttgtaatggaactcccaaaaaccctgagggctcttaaagatcactaggttattaaagcagagactcactaatattgtcattatcttaagctgacaaaaacgtagaaaaatccaaaaaaataaatggcggaggaaattgaccaaaacgcatatataaggattatggagtaaaagcaacttatggtagttggagagaaattaaccaatagaaatactcaaagggcgcgtttattgccataatctacgccccctccatatttacacacaaccatatcataatattaccaaatatgaaaattatatgtgcattatctttattacataaacaataaatacagtttattattaatataagaaaaagataatttttgattttatttttagagtgatcttggccgtagaaaatgaggtgatgaaagtgatgtgtcaaaaaaatcaggaaatagccatatcaagcatgta

SEQ ID NO: 42536 - DNA, 510 bp, Arabidopsis thaliana columbia
tttacttttgctctttttatactatccaaagtttgtgatcatataaataattttctttgctaaatattctggttatatagttgtttacatcaaattacactgaatctctctgctacaaccttttcgattacttaacatacaatacaaagaaggtgactatacaaactataagaattttttaatttacttttcgtagaatattcaagagatgtgactggaccaagtatatattgaaggacactagaaaattgctagaaaaaaaatatagatgactataattatattgtaacgaactaacagaaaattaatgttttaataggaactccataagatatgtaaaggagaagacaagactctggttttcgggtgtttggtttgtgaaccgacacgtgatgttaattcaggtaacatttgtcgttaatgtgtaagtatgtgaataaataaaaataaatgggtatcttgttattcataattaactaactaatcaatgtgaccacttacccaatcaca

SEQ ID NO: 42537 - DNA, 427 bp, Arabidopsis thaliana columbia
tatgctgaattaaagtgatgatcaataaggtaattaaaaaaaaaaaaaaaaaactgggcgtatatatacatactgcaaattttcgtatcatttaaacgtacgacaccaatttatgaatcattatttccacctaacatattcggcttattatgatcacacgatcgagaacgaaaatgttggtgcatttaaactgtaagtctgtaaccaactgtctattaatggacgttggtattacacacactgaaacacaattacataaatatatagtatctaatttaaaatccaatttcagatttctttattcatatccaagagagacaggttaagtgtatcaatatctagattacatatccctagaaattttatcggccatttggtctttactcgcatgatacttcatctaacttgcattttcttgaaattaaat

SEQ ID NO: 42538 - DNA, 595 bp, Arabidopsis thaliana columbia
agtaatggccgccagtgtgctctaaagccaagtaaactgtcgacggcgttcatgatatgcatggcgaccgtctaggtgtcggaccctccacgtggagtgttttggtcgggcccttgcccttttaataatggcaaacgctggaggctgaggatgggggctgacattatttaccccacaatagctggaagttaactactttttattggctgatttatctacatttgcagggactggcctgtctgagaccaagcttagctctttctggtgctagactagcctctataggactagccttatcttagtgctgatgggctgggttctggccttcttgggttgctgacgggctgactcgctagatttggctatgtagctttagcgatggatggccgctgggctaacaaactgaatgttgaataatcgtccgagatgtcaattgttctgactgaaagggtagtcggcaacatcaaccctcggtgtttcacacatagggcgcaccccttctcccctactatgtacctaatctaggtgctcttcgtaaccaggctgcccctaaggccatatcccagcgcacagctcctactctctattttacgca

SEQ ID NO: 42539 - DNA, 380 bp, Arabidopsis thaliana columbia
tgataaggggaattcctatgagtttgagctccgaaaagattacttggagctgatggcttgtggacacaagagcattctgcaattttacgttgtttgcatcgatgagaaccatggattatgcgttgtgacaaaactgatggaaggtgggtcactccatgaactgatgttgaagaataagaagcttcaaaccaagcagatactgcgaattgcaatagacatagccgaagctagaagttcgtgaatgaccatggtgttgcttatcgggaccttaacacacaaagaatattactagataagcatggcaatgcatgtttgggaaatattgggatagtcaccgcttgtaagagctttggtgaggccgtggaatatgagactgatgg

SEQ ID NO: 42540 - DNA, 500 bp, Arabidopsis thaliana columbia
ccacaaatataagctgtgtcggtctggataagacctaaataaaggaaataaatcatgtgccacattcacatgttttgagacttatagttcacgactaccgactagatctttgttgattattctcagatttccttggctttcgtttataaacatcctttagtgaaacaacggaacaacatacggacaatctctctctctctctctctctctctctctctctctctctctctctctctctcctctctctacctctagacacttctcactctccgaaataaagattctgccctctatatataggcggaggggcacacatgcatagtgacaagtgtcagcggagacagataacattaccatcgtgacaaatgtccaccagtcgcgagaagtattgtatttctcagcgacatatgtccatctgtatgatatatggtgtttatgcgcgcgcatggtcgccatctcgtagattttacgatataagatacgatttccaagatatgctc

SEQ ID NO: 42541 - DNA, 488 bp, Arabidopsis thaliana columbia
agtatcttttacttttattaatttttaataaaatttatgataataaaaaaaatgaaaataatcgtaaataaaagaaaaaaagagagttgtgggttctttctttttagttacccacgcatcgctgtcgaaagattaattatgaaatcagatgtttggttgagtataatagtaatgcatgtcattagtttaaatttataatattaaacaaaattataaataagatatttgaacaaaacaaaattaagttagtttaaacgttaattggaaaccaaataagagatctgttaggaaaaaagaaaatatataccaaataagagatacaggaaatcagaaattttaatattatgtgtttgaatcttctcaccaaaaaaaattatgtgtttgaatcttctcaccaaaaaaaattatgtgtttgaatctaattgattaatggacacggtctagtaaattataatttttttgaccgcgaaatatagtgaacagagttt

SEQ ID NO: 42542 - DNA, 491 bp, Arabidopsis thaliana columbia
taaaatctgtgcttcctgcacgctaacagatggggccctattatcgtattcagtactggatgttgacacgtgtttatctctttacttattttgccgtccgatgaatctatcatattcttcacggcatcttcatttttttgagaaaaataaaaaatcgaacatagtatcttgaagtgaaattttttactattgctttgataaaacaaattactcgatatcattttcttcatataaaagtaacaaagttgattttcgtttgtggtttaatccttggcctctccacccgactgtggataaattcaatatcattttcatcactaaattggaatatatatatgtacagtatcatggtttaaatgtttcggcattgaattgtctaacacttggcgtgaatattgtttatatgaattatccgttatacaagaaaaaaaatagaaacgagaatcccacaaaataggaaagactagatacctggtgattgagacgttagt

SEQ ID NO: 42543 - DNA, 481 bp, Arabidopsis thaliana columbia
  unsure (1)..(481): unsure at all n locations
tctgaccacatgccaaattttgtttttcgaattaaactcctaaactacacaaaacttgtgaatatgatctcagaactatactaactcaatgtgattttttcacattttgcatactaaaagtaaataattagttgaatgtgaaatcaggttaaaaaaaagttcttgaattaacacagattattgatccatgaagctacaaaatctcaagttctaatggattacaaagaacaaaaaggaagaaaaacaacattttgatttcgtaatagaactctagacgtagagacaaagtaaaaccaaagaattaactgatgtctctgcacaatactttatcatccatcttagtacaacaacaagcaaagacacaagacataaatatagcgagaaacataacacaaatcctaaacgcaaaaccgattcaaacttgattggtttgtaccgntaacgccttaaacgccggatgaagcaaccgagctcgtctttc

SEQ ID NO: 42544 - DNA, 397 bp, Arabidopsis thaliana columbia
attaaaattttatgtcacgctcagaaattattcatcttcttttatttctttgacagaacgagttacccactggtgaaagtgagaactcatatcttacagatgtcccgtaaaatcattgctttctgataagacctcagattcaatattttatacaggttcaaagtgtatagtctgtctatataacgtatgaatagatatcaagactagtgactaaaatattccgatcaatctctgtttcaccgaatcgagaaataatcaaagtactgcagtaggtgtgactattcatcgatatacagtgagtgttttctggcttctgctgtatgttttggacggctgtgagtaagcacgtactattatttgccaagtccgaattatatttcatcacgtgccatgagcc

SEQ ID NO: 42545 - DNA, 530 bp, Arabidopsis thaliana columbia
aacttctcttagacttgaagcagctcagactatcacaaactgactcctctcccttccaaccacgggtcctataaaaacccttcatttgtctccacattaggttctctctcgtgttcatgtttgtagtcagatggatgtaattttttggtaaaagataaaatttacaaaaaaaacaattccaaaataataccaaggctcatgaaccagtacttaaagagtcaaagatggacaaggcctaaagaaaaatagtacaaactgagatcatctagttcaatagtaaactttcttgcaatcaatatcacttgaccaatgctgatgaccaaaatccctgaaccaagaaaccactcttctaattagagccaccgtttctcccacctattcaatacacatcacagtaaattgtatgagtctctttaaagcatccatatgaagatatgaagatatttatttagcaatacatattgagagaagagataaaaccaaacaagattagatttatggacccaaacaagataaaaccaaaattgtat

SEQ ID NO: 42546 - DNA, 409 bp, Arabidopsis thaliana columbia
tataggtcattattatgcgttaagtttcatgtgtcgtgatgaaagaaaatcctttttgggtgactaaagaggaaagattctaaatcggtggctaaaatgtaattatgatggttgaaccattaaaacaattcatatcgacacatttgcaggaaggtttcatattcgataattctaacttcttctttcttatgcacccgattagtctaacttacaataatagttttatctagaaattcattgaacctttatggtgcatttagtttatatgtctatgttattatacctactcaaccatgaagattgtttgttttcgtatttttctacgatctgatttgacaattagacttacaaaattatcaactaaatagaagctttgttcaaaaaatcggatagagtcgcagcgattttg

SEQ ID NO: 42547 - DNA, 583 bp, Arabidopsis thaliana columbia
ctcacgtgttttatgatctacagtattctcatgtttttagaccgttgatcttttaatgaagaatgaatggacggtgagatgtagacaactaatgtaatctcaccaaccccgttgtcgttggtatgggtgtggttggtgagagagaagagtaatacccgacaatacccgacccggattttgacatcgtaattagatcttggttatatatccgaaccggatcctttggataccacatggaccatgctggcatcaaatcaaggaggagtggtttagattttttcgaaaataaaataaatttattttttctttggatttaattagtttttcttttcattatataaagatgttggttggtgatggtgtttattttaatttccgcatttgaaactctttaattcatttaatcaactttttttaataaagtttggagaagctaaatttgccttatgtttgtttgtaggaaatttagtttaattttggtgttctgaagataaaataaaaactctaggaagtaaaattctttgtgtatatgtgactagtagtagcagattagcagccaataaaaacatccttagtatatata

SEQ ID NO: 42548 - DNA, 454 bp, Arabidopsis thaliana columbia
gataaacgagaactctccccggaagttgttaacaatttcgagccatgaatcttcagcttccccacaaagtttatggtacacatttatgactctcaaagagtcattttctccatctttgactacataaaatttcaatataaaatctacattattaactcccaaaggatgcaataaggaagaatatccattgatatggagcttgaataagacactttgaagcgcctttgcgatttctttgatggcgtctatggaatcatcagtgggaagattctccgaacgttccaaaaccggatacatcatcccaaaaagcttcacgccggccaccgatttcgtgaaaacagcaagcattgtttcttcttttctggcgatatctgagaatgaaaattttgttacgaaattttgagtaaagagaaccaaaaaaaatgtcaggtacctgaataatagcagaacacat

SEQ ID NO: 42549 - DNA, 490 bp, Arabidopsis thaliana columbia
cgactaggattgttactcattattatagccataggttggactttgctttaaagtttgggtttttagaaattaaactacttaaagtttgaaccaaaaaaaaacaaaggaaaactacctgaaaacttttgttttcttgcttcacaagactctacagacttcaaatttcatatataaaaggataattcaaatggttccggatgaaaatttccttttgttgatgttttcagtatagttatagtctcttacttagtaagttaggtttatggtttgtatttaattatcaaattcgtcacaactttgctttcttagatccaaaaattcgtctagctatagttcaaattggttaaagctgctgattctcagagtttttttctaaattcctatgtcaggattaggaaatagcttcaagtagtagtgtttgttcgtctggcatgtaatttctgattgaattgttatttgttggtatgttgtagatcaaagcggataaggt

SEQ ID NO: 42550 - DNA, 511 bp, Arabidopsis thaliana columbia
gaaccaataataatgggctggtccagagtctaaaatttccggattactcgacctgacttctaaactaaaccaatgttcaatggacttcacctagtactgtttagtatttacatatatatatttttgttctaccacagttatgtttaacatggcaaattacatgaacacattattattgatccttttagaaaatgtgtaatagtcacaggaacacattattacgcattctactcgaaagattctataaagattttttttttattgtcggcagtagatctataaagttaatataagccatgattgcttccacattttagactaaaatacacagaaaaaaatgagatcttaacccatgtttcacaaatttcctgtcactctttgttttttgtctcacaaaagtattttgtgttataacaaaatcaacttgtttgtcactgatatgagatttgacttaggttgttttgttgtcattattttgaaccgtacaaaaaactgtaaactatttataagt

SEQ ID NO: 42551 - DNA, 549 bp, Arabidopsis thaliana columbia
taccaagcaacacttctccatttatcacgataggtatatctcgatgaaccccaatagtctatactttttctttaccaagagtaccaatcttcgtagctttcggaacaaattctccttaaaaagcccaacacttaaccactcctggctttacacaaatgaggataacaccactatcaaatagtgtgtaagcattccagcctcccactaaaacaaatcctacacggttattttattactaagcaaaacaattcacacgcaataaattttataacttactaatcaaaaggcaaaataattctagatcaaaataacatttacgtacctacgatcgggtctgtctcatcctcatgctctccagccatcatcacacgcggtccaacgttttagcgctttagagggggtggaaaattctctctagggcgattctcagcttgttgtcgcccaatcttgcgagggcaatatcttgaaacatgctgttgtcgacgcactcataacaactcctattggttcacctcgagggcaatctctatgaagatgccttacgtgatt

SEQ ID NO: 42552 - DNA, 478 bp, Arabidopsis thaliana columbia
cacaccacaaattctgctgaaagtctaccagaaagaacaatggtgattacaagcattcgttgcaaccttctttacctacaaatggcttccatttcgaactttccttccatcgtagaaaaagaaaactacaaatttctattaagttaccacaacattaaggatttaattgtgtccctttttcttatgaaagtttataacctaaaaccaattatccactgcaattattacttcagcagacaagtgacaaaaagaatacgatttgattttgatcagcgagtgcttatctgcggacaggctttgctatcagtctcttgtatgccatgaaagtgacagccgccgagagagaatacatgttcatcaataaacagacacaatcataatgtcactcattgaccataacagttaagaccagacaatgccaagaacacctcatgtatctgtatggagtttacatgtgattgagtagtcagatggtctg

SEQ ID NO: 42553 - DNA, 311 bp, Arabidopsis thaliana columbia
agttgtatggcaccatactaattcagagagacaacgaattaagaaagttatatggccacagtgtagatcgccaactaaatattgggcaaattggtgctcacccagagaagcagaaaagcttgccgttgaaaatagagattcccgcatgtaacggttgtttctcacttgaatctgatccattagcaatggtcctaattgctgcatctaaaggtccataactagctgtgaaaatgataaatctgtaacctgtaatctgaataacagattggagaactcgaagaaaggctatgggatccttacaaagcccatgc

SEQ ID NO: 42554 - DNA, 1305 bp, Arabidopsis thaliana
atattaccttataaagaaagttttagagaaaaaaaaaactcaatacaaggcagtcaatgacaaatctatgaaaatctttgattttcttttttgtttgtaaatattgataaacatatttttgctaaatccactattttttaaaaatctcaactttttaagtcagtaaatctacacatatcaataactttttttttttggttttaatgttaaaaaaaaagaaataactttgataagctttctgtattatttttgaggaaatagaacaaaggaaggaactgttctaattttgattttcatgaaactcccacatgtcatcttctaaaattaaaataatttagttttgattttaaaattacaatttaattatttctttgaaatattttaaaataataatactttcttgttaagatactcgttttggtatgtaaggatggagttggcgtcaatagtttgattcaagtaaattggtaagaaactaagaaaatgtcggatttggttattgcactcgtagccttcgccgttctttttgtggtgtttatcatcttaagctgcatcatgggtggcgaaaaagatgttcattctccaccgccgcttccacgaccagggcaactccggatgcctgtctatagaaccaaagataaagatttaggaggcgatggcaccgccatatcagtggctggaaccgatatctatggtggttcaggtgttggttctggcggtcatggaggtagaggcatcatcaccagcgatacaaagcttccttctccaccgccaccttcaccactcccaccacgaccagtgcagcggccgaaatcagtgtctagaacaaaagatcgagaattgatagacactgcaccgccatgttagtggcttcatcccttcttactagtggttccgctagtagttgtagtggtggtggcagtcatgggcatggttgtggcggtgggggaggaggtggtggtggtggtttaggtggcgtcggttgcggaggcggcggttgtggagggtgataagctcttctctcgttaaaaagtgcgaataattactgaatatgtttcatgaagttaatatgttttacattttttaaccattttcattttctattgcaacttttgatgggaaataatgaaatacacgggaaaatagaattgtataaaaatacaaaacatcttaatacgtgaacaagtgaataattagagtaacggtgaattaacagagaacaaaggactactttttttttttttttaatttcacaacatccccgaatagacctagaatattggtgtgtgttccacgtcattatga

SEQ ID NO: 42555 - DNA, 547 bp, Arabidopsis thaliana columbia
tccccttacattccttcaaccattttcagcaaaaccaagttgaacattattcaactcattcatctacaaaagagtagatgaaatggttgaacaagtttcttttataatttgttcatttttcttttttttttgttgaatgagttgaatcaattttccaacctattcatttcaaattgtaaaaataaaataaatagttattcaacattttcaaccttttattttaaaacaaccaattcatctaaataattttattactttataacaatcgcttgttgaggagatgacttaatcacttttcattttctcttcgtgaattcgttttactaagtttccgttactttcaaatgtactcaaaacaaaaaaaacaatcgcttgttactataataaaagatcgatgaaacaagattctaatgttaagcattttgaaatgttacgaaaccgtacaaacaatttatgtgattaacgtcaaatgcataaaaacgcaaacacaaaaaatagcagttaaatcttataaagatatttcataaaatattacacactcatgaaa

SEQ ID NO: 42556 - DNA, 168 bp, Arabidopsis thaliana columbia
  unsure (1)..(168): unsure at all n locations
aagtaaccttagcatcctagatgcagactcatacgtgaggagcgataccacaattcaagctcggaagatcacagcgccagtgaccttcatcgagcactagtggctttggagaggtntcatggatcgacatctcaagctaccattgctttttctctctgttcgtgccag

SEQ ID NO: 42557 - DNA, 537 bp, Arabidopsis thaliana columbia
tttttttttatttttgaagataaagacaagttcaattatgatgttatatctaccaagtaccaccaaccaatgaaaagaaatcaagatttcaagtagaataaaagtagataaataaattacataatgaagattattcatccaactcttgtgttacttaatactcgtttcgttgttaatcaaaaatttcatttggattttaacaaaaattaactagatgctttcacatatggctttcgatagaaacggtgtcaatagtagtattacaacacaccacagaaaaagggacgatctattacagcgtttcaaaattgtggtttgtttgatattaagcttcagactgaacgtttctggtcttgagaccgaagagattcttaagcaaatccgccgtgtttggaggaatcttcgctggtcgtggagccataaagttgacaatcttctcatgaacattatacctgtttcgattttttacaagaaaatgattcaaaagagagaattatgggaagagaaacctccaagaggtgaactatgtgtgtttta

SEQ ID NO: 42558 - DNA, 463 bp, Arabidopsis thaliana columbia
tacaagttgctttatctactatccgccaataatcacaacatagctccaatacagttagtcctaggctaattagatctaatatcgaccagaagtagattccaaaaaaaatatagaggccacttctacaaatcagtccagtaataaattatgaatcagaacatacaataagatgactccatttggctactcactcacaccacttagcaaccgcctagaagaactaagaacaggtattgatccaacccaaccagacaattttccaacacattaccactcaagaaagaggtcaacacaacaaagtggaactggagaaactctatccttcaaatgaagtttgacaagcacagaatcaggagaagaatgaagaaacaaaacttacatgtatggccctgaaaaatcaacataaaacgaaatcaacaaaaacttaaacactgtgtaaccatttgctgtacatggagtaaat

SEQ ID NO: 42559 - DNA, 148 bp, Arabidopsis thaliana columbia
acgcaattccacgttaatagatccaaaagagttgaataaaataaaaataaccactaaaaacatctactaaaataaaaaaagaggacaaataaacaatacatggaacgaattaaagcttctacgaactcactttgaactcacctgcaaa

SEQ ID NO: 42560 - DNA, 499 bp, Arabidopsis thaliana columbia
tttgaagacgatgatgatcttgatgaagttggtaatttcaggatctctaggcggactgcaaatgatgctgctgatcttgtgccaagactgccctcctttgcgactggtaatatttttggaaaatgcatatctttaagaagtaaatttgataaaggaatactattgttactgtcattccattgaataacctcataaaattattcagatcatacgtgcatttggagacttggtaattcattatttatggacagggcattttagttcgagaaactaaaggagtacttgtaaatattatcattgcttataccatccagtagccagagctaactacgactggaccataagtatgtacacccacacctatgaaaagtcaaggccctgctgatttattaagaaagttgcaatgtatttctgtttcaggtattaccgatgatgatctccgtgaaactgcatttgaaatacttttggcttgcgctggagcttcagggtatcagaatat

SEQ ID NO: 42561 - DNA, 119 bp, Arabidopsis thaliana columbia
ggcgtgcagagttcggcgacgacggcacacccgcgtcccgtgcccggctcggcgcgctgtctccgctcgcacgcgccgagtcgcttccggtcggtgcgccggtcccctcctacctggga

SEQ ID NO: 42562 - DNA, 487 bp, Arabidopsis thaliana columbia
ctttcctgatctagctgcttaggatttgtcttattacctctttggaatgtcatggtgatttgtcttattacctaacctgtgtaagattttgttggtatcaatagctcagtttagtaaatatttcattatcattcatgtagaagtggatttttgctcaataatgcatatggttatcaggatagtaaaataggctcacaaatttcagacctttctgcatgcactatcacatactagacagaacaattgattttagcgggattttcaatggagattttttcatgcctagtttttctattcttcttgtataagttcatcaggtctatggaacataagctctaacacccacttaagttctgttataatctatgcattgatgatcatatgctatgtacatgaaacatttgagccacagaaactctagcggtggtgccattgtatacataatcttttcgatgttctttagattctcagtagcttacctaacatg

SEQ ID NO: 42563 - DNA, 730 bp, Arabidopsis thaliana
aaaaaaaacacgaaaaagaattgaacaaaccgagaagattaaaaattcactcacattacaattacaaaatagaaatacatcaaagaaaactgagaaacatcaaaaccaaagacaatagtaatgcactaagcatgttttatgacattagaaatatattaccgcctacagcaaccaccaccaaggttgtccggagggggtggaggagattgcctatagtagaaggctttttgagcttgaggcgcaggatgatgaacttttggaggtggagaaattggagtaggaggaggagaatatattggaggtggatagattggaggaggaggaggagaatatattggaggtggatagatcggaggaggaggaggagaatatattggaggtggaggaggaaaagcaaccggacgagaataaaccgggggaggaggaggaatagtaactggagatcgataaggcggtggaggaggagaatatatcggttggtaattagtggtagtttggaggagttttctgttgctgttagcttcagaaactgtgaataagattgccaagagaaaaactagggtgtagaaaactcctagagacaccattattcaggttaatgtcagagatttagacttaattatgtttacatatatatatagtccatggaagttctcttagaggctcccactaactgtaggatttatcaagatttgtcccaagtttatattagaatccactatttagtatg

SEQ ID NO: 42564 - DNA, 450 bp, Arabidopsis thaliana columbia
gaatagtttttaaaaataacagtttgcatttatgaaattaaaaaaaaaagttttgcaaacaaacaaagtattttttttgttcgttactttgcaaaataataaatatgttacaattacacgaattatatatacctaaaaaaatactactagtagataaataacaaaattaacgttgaagtttttcacctgaaatgagatactccataatttgtagtcggtagatttattttagatttttggtgtgtggcagttttgtatagtcggtagatatgggacaatgataaaatattcatttgatatgatagtatgatttttgaaactacattgattataaaataaataattgtaaaaaacaccgtggacgcaaagaggttaatcgctgccattggatgactaatacgaggtagggtcgagagatgaataccatgcagcctcccttacgcaatcttt

SEQ ID NO: 42565 - DNA, 522 bp, Arabidopsis thaliana columbia
cgttttaacagaataaacaaattactcggaaaagtttacttattttaattaacgttattctcaattattaagaaataaattatatagatttgtaaaatcgaagatttgtaatacacaaatgacagtattctgatatgtatgtctgttttgtattttttttaaatgattatatgcggacagtcattatcactttaataaacagtatataaacgcaataattattctattatttagaatatttttaggatattaattacttattatagatatcatttcaaattctctcactatagatattgtcagttttcgtatattacgattggacgtgaaccatcatgaatttttttggggaccgacgtaactaatacgcttgccttatcatcattactttatatatatataaccgacttgataattatcgtcttcaacgaaattaaaagaaggaaaaaagtgtttccctatagttctctctgcaagtttacagccaaaaaacaatgaagttctttcatgatcttgagttga

SEQ ID NO: 42566 - DNA, 514 bp, Arabidopsis thaliana columbia
taaaactgtataaagcgaaccgtaaccaaagcgaattatgtatggtttctatatggttatagttttagtaaaactaaaaaattgtaaaaggaaaaattttgaatcgaaaccaaaccgaaaaaccgtttgtccattcctgagcaaaaccttatctaaacaaaatgaagagctggatagaagtaatgagaaataaaattttgtttgcaaaatagacaaataaatactcctatttgaaaagttatattttgtattcatataattttaaattttatatacacctatttgaaaatatagagtataaaataaattaaaatggaaataaatcaaataaaacataatatatttctaattacaaattatctataaccggatatagctaaatatcaacaaatgttatcatatttctgcatgcaaatgttaaataaatcaaagcgtattaataatagattaataatggaatagaagatatttttctctttttactgaatttgtggcatgaataaacagaacacgt

SEQ ID NO: 42567 - DNA, 526 bp, Arabidopsis thaliana columbia
tagtatgtgattaaaaagcgagaagtacttttagaaacacgaatccatgaaatttcttgcaacacacatgacacatccaatatacttgtacgagtgtgtgttaaatattgtggatttataactaaagaataattgacagttagtgaattgactaaaacaactgctttggttggaagacatgttggcaaccttagggctgttagtttgtttgacactgcagatctatttcacgtcatgaatggttttggcgtttttgttagggtttcaggtctatttcgtgcagattcaaacgtatacatggattttttttaataagtaaaataggatagtttgattccgttacaagttcagcatggacctatcaagctccacgctctatgatggacgtgtatgtgcttattcgaatgaccatccgaaacagaaattttcacgaattgaccacctttattcgttacgggattcaccatacacgtgaacgggtaatgactgtcttacattgtaatgtttattccagttttcagtatgt

SEQ ID NO: 42568 - DNA, 590 bp, Arabidopsis thaliana columbia
cagatttttctttgataattaattaattgaccatctttttctctttttgcataattaaattgaccatctgttaattgcctatggatttaggtttatttttatttttttgggaaacagttattttcttttttccaaagtaaaaccaacaaacaaatttgaaaatatgtctcaaaaatatagggaatggaatgtaattttcatttcatgaacataaaacaaattgaatatagattgttaaatagaggggctcaaatgtaaaaacgttaagagttgaacaaaaagtaaagttgaaggtgacgacgaacccaaaccccacagcttcgtcagtcgccgccggtgactcaaccgaccacgcatgatcggtaagtaatttatcgcagttctgtatcaatttttcgattcagatgcgaaaagacttgatagcttctggctttgcatcaatttttgctctttatcatatacactgctcaacaacagtttcaatatgatctttgaacagtttacattactctgtatacgtaatgtctgtgtatcgttatatatatctaaattgacttgacttcgtgtgtacactacttttaaaaagagga

SEQ ID NO: 42569 - DNA, 560 bp, Arabidopsis thaliana columbia
gcaactttattagggcatactctaatagacttgggcttgctttgtctgtggactatgtagatcaaggagattcaacaacaatgaataaaacaggccctgtattgtaagcccataattaaaaaacgggcccattatcatttatctttttctaaaaataattttaaatgggttaataacatttcagtaaacatattaaagctggtaatctcttaccgttggtaattctacatttattctgtggccgtatttgtttgtttaatgcgtgcgtgtgatattcgaattcttgagaaggtagccagcagcccagcagccatacgtaaaccttctttgctggaattgaatatggtaaaaataatataccaaggaagaatatttatagattcttacataaaaaaaggaaattgcaagcatcatcaaggcgttatttcccgttacttggaggtatgacgaaagccaatactcgaaagacaagaatttaattggttgccaaaaaaagaaagacaagagtttgactgtatctttgttattagataggcaatgacctcagctgacgtagttaa

SEQ ID NO: 42570 - DNA, 629 bp, Arabidopsis thaliana columbia
ttttggatgctaccctgtcagtaataagcccccaaaacatcatccatggctagaaagtagcaatgaattgctaaaagagaactcttttaagctgatggacacaaaatcacacttaaaaaatcatctaaaaatcgcaaatttgaccctagaaattacgttagctgcgatcaaactcgaaactaagctgaattttttcaattcccaatctataactacacaatttatatgaagactaatctaggtaaaggctctacaatgaaactggagcaatcaaagttcatcaatctcattactttaatcgattttgagaacgtcgttaaaggagtaatatttgataaacatcgatcaataagaaaacttacgtttggtcaaagaggagaatcgagcaaggtacgaatttatcgaccggacgaaggagtttggagatcggagcgaagacgaaacatcaagcaagccacgatcctattttcttcaaattaattacctttttcagaaaatatacttttttattctttttgataaatacgatattttatggattttacattaatttggaacaattattttaatgatacatgtataattatttttttttaactatgggttattttttcaaaaaataatgtgtg

SEQ ID NO: 42571 - DNA, 454 bp, Arabidopsis thaliana columbia
tggttagaaactaatacatatatatatatagagagagagagacataaaacaggaaagccgctccacagaacctgagagattcgaggagctaacgtattcacgagactacctcccaacaaagacaagtccttcaaaatttggttcgaagaaaagtgttttgaataaagaagaaacatgtgtgtatggccttacaaaacccatcaagtactctttttaattttgtgtcttctctttctcttcccaatctcatgacttgagtccctacctctttgtctctcactaccccacacgtgtcactttcagtcacttccatttataattgcatctcacacactcaaaacctattcgtattctttactagctttcatctaagtcttcacgtcttttatcataccctgtttagattctgattgttcaggtgtctctgtcttgtcttgtccctaagccttaaaca

SEQ ID NO: 42572 - DNA, 546 bp, Arabidopsis thaliana columbia
gatcaggagtcccaaagaccgtaaaagcaactcagaaattgttgagcttatggaacagaatcaaagactacctagctgatccaagaatggggcctacattgcttctaggagcgttgttatctgcaggcaatgtttggtggatgagaagccgatcatcaacacaacaacctgctcagacaaatcagccatcaccaaatcaaccagccgataacgtaacaatgaaatgattcatataaaaatattaatttttgacataagcccgaattaagaaagattgatgattgtttgacaggtggaggagaagaagaagaaagagagaaagagagaacaacgaaggaggaatgcaaaggaagaagaggttcctgcttcgatcactgataacgaacctaaagatgctgtccaaattctgtcttcaggttccgattctgactaatatattaagccttaggattcttctgactttctttttttttgacatttacgttttttattttttcttttctttgtgaaagtcataggtttcaattttaagttactaaatagagt

SEQ ID NO: 42573 - DNA, 504 bp, Arabidopsis thaliana columbia
atattttatataatgaaagaaatataatattttcatataaaaataaaaaattagaaaattaagaaaatctctctatcgataaattgaaacctctataaattaataaaattttgcggtcccaaagttattaatttatagaggtttactatatttgttttatttgttaatttaaaaaatttttggaaaaaaattcaattatgagaatcagtaaataacatcaactaaagtgaaatatatgcaaaaaagattgagtttcgtacagcggtttttagtgctgcatgaaaccaaaccaaacaaatcatctctagtctgtacaaaaaacatagtttcacattaaccctacatcatcattcggggatttttcgtttatgggattttagagcaccttcgttcaccacacccacttgaagctcatccttccatctcacgcacttgaagattttcagtatctttgaactgcagaaaaaaaaagaggaggttcacattatatcagaaacaaccaag

SEQ ID NO: 42574 - DNA, 562 bp, Arabidopsis thaliana columbia
  unsure (1)..(562): unsure at all n locations
tatccccaggttaggaaatcgaattatgtggatcctatatttactttggggaatattgatgcttttacaaattcgagatacatgcaacatgttaagcacctggaacttcgattcaacacattgactgataagggtttgcctctatttataaacaatgtttaaatctagagtatctcgacttgttncgggtgtccaaacttgacgatggatgccacactagctatgtgcgtttgggtattcgtttgggtttggattagttattttcggttttcgggttaagaggtatgggaacgggtttagattacccataattcctaataatcaaaaaaatttataactaaatctatcaaaatatgcaaatatctaaaaacattgaataatgtttacctaaacattgaataatgtttacctaaacattgaataatgtttacctaaaatagattaaataccctaaaatatttaaaatatctaaaaatctaaatattttggacaattaggttattcaaatataaatattattactatatatttacactgtcggtatgtttgagaacctgtttgg

SEQ ID NO: 42575 - DNA, 357 bp, Arabidopsis thaliana columbia
ggcttcgactgcgtccacacgggagcgcgcggcgtcgacctccgtcgcgagctcgggcgcctcgggccgcctgctcgactagctgctgcgcgctcgcgagctccgcctggcgtctcgctcggtactcgcatggacggagcggcggcgctgatcgcgctctccaccactcccagcgcggtcccgagccggccacgacaccggcggcagctgtaagcaccacgccgaccgcgaccgccgccccgacgagggacgacagcccgagggcgcgcaggacgccgggacggagcagcagcgctatgccgagcagcacgaggaatccggcggtccagaccatggggacgaaccatcgccgtctgc

SEQ ID NO: 42576 - DNA, 236 bp, Arabidopsis thaliana columbia
tcgagggcccactctagggctactaacgccactcctagattcaggtcgtggagggaaagaagaattgttctggttggctttattgttaaaggataattctgcctgggacgtctcatctaccagatgcctttcctcctccgttgctgaataatccctagcgttgttcctatgacctgtttcttcaacctcaatactccgtcttgcaccaccacgattgttgtacctccgctcaagac

SEQ ID NO: 42577 - DNA, 477 bp, Arabidopsis thaliana columbia
cctacctgagcacttatctttcaacttcttcgttttgattagaccaagatcattgcaggcgaagtcctccagaggatccgagcgtgctcctggaaacatgagataaaataattatcagaaaagtttaaaattgaatttttcttattctttctggagaaaactaaacaaggaagagactcacttttagtaccgagtttagagagcttgccgtgaactagcagagcatcggcttcgtgttttccagtagacaagcctctagcagagaagaaagtgagcaaagactgccacgtcacacaagtggcaactagatcaaaacctctgcttatgaagtgaccattgagcttcaccgttgatggttcgagcccaaacgctgcggctatggctctaaagtctagtttctcgtcgttccaagcataccactccacaatcttcgataccgagggacagaaaagtttgatcatcgtccgacctgagtct

SEQ ID NO: 42578 - DNA, 586 bp, Arabidopsis thaliana columbia
ggtgccgaatccaactagtaacgtccactttgtagaaccagctacagcaaagagatcagtgggaatattcggttgtgtcatcgagttaagttcgagtctagttcgttgtttcataccgtaatttgagcagttttatggaaaccaatttgcgagaataattcaacatcttttaacatgttacgtgtatcatctttgcatcttctcaattacataagcatcgagttaaggtcataatctttttagaaatgtaaaataataaaacaggttgtaatacaataatttttgatggtattttgaaattttcttttatcttataacataaggtcgtgaaatccacctaattggtttctggcgtaaatgcatttaccctctaattataaaaacaaagtggattacagacaaacatttcttctgcaataaaatcatgaattcacctaattggttttctgacgttaaaacattacccaaaacaacaaagtgggcctacggaccaaattccagctataaaataattaaagtaatatttttagaaaaggacataaagtccaatgcacgaccgaatgaatccacgtggcaaaatactgag

SEQ ID NO: 42579 - DNA, 457 bp, Arabidopsis thaliana columbia
tgactttttggttctatgtaagaatcagtacaggtgctattgaaggtgtacctatcttgttggctaaacctcagataaaaatctgaccaactagacaaaattaattagacatgtaagaagaacctcatagaaaaatccactaagggaactccaaatggaacaaagtatagcagaggcagaaaataaaagagagaaccaagtaaaagatatggaacagagtattgtagcagaggcggaaaataaaagagagagagccaagtaaaacgatcttaatggttctttatcgtcaaagacgatcctttcaatagtatttttctcttttattttctacaaatcccaacaccgaacaaaaaaaaccaatgaaagattgtttagcaaaccagacagcgatttgtccaaagatttgaagacgaaacagaaataacacctattctacccacttcagggcccatttggt

SEQ ID NO: 42580 - DNA, 535 bp, Arabidopsis thaliana columbia
gggggtcttctttgctctttcttcattaacagaatactaattataagcttttcatatacaaaccttgaaaggaattttcatcagttactaattcgatttcagagaaatgaatcattcaaaacacttgattagagaaatgcttcttgaaccgggtcggtttaacgaaatccactggctggaaaaattatgcttttatatatataagaagaatccaactgtgagagtaattgtataaacaagagcaaaaaagtgtgacctgatattttgcaaaaaccaaagaatacaaatattatatatccaaaatacatatatcacttaccaattttgttctcactctatcttaaaacaatacagcttcagacttgagaggttcttcaacgaactttaaaaccgactcttgagagaagtaagagttggtgtcatgaagtttgcttcactgtttcctctgctagtatacgaatggaaaaccccaatttctagaatattcttggccaaaataattcttccgaacaaaaatcctgcagcaacaaaagcg

SEQ ID NO: 42581 - DNA, 501 bp, Arabidopsis thaliana columbia
gataaattcggttatctcatcgtgttatatttcatacaagttttcaagaaaagaagaccttattctcaagtgaagtatgaaatccaaaaactaaatctctctccctttcaaaggaaacactgggaagtgggaaacacattggtccaacgagcgtattacggacaccatcgcatgtatgcttcaatggcattgcatcgagctttcgtatcataaacatgggagaaacgttgtggagaagcttctcggtgacggtaagtcggtggtggctttggggatcttctcgaaggagattgtgaagtgtgatgaagataagttggtgaaactggctaaagatgatcatgggagcaaagttttgaaaaattattttagaaaaaaaaaactcaagtttgagcttaggaatacaaatcagtaattagacttaccatttcaatttctacgatctcagttcgatcctaactaaaatgaaatgagtatagacacacaaaaatagaaatatttgat

SEQ ID NO: 42582 - DNA, 361 bp, Arabidopsis thaliana columbia
tgacacacataattgatggctaactagaatgactcacattttaaatgaaaagactttttaaccttaatcactactaaaaccataatttgatactaaaaaccatactttgattaaaaaaagaaataaaatgattaacgtttagatgagattaaataaaacaaatgtaagaacccaaaataataaaactcaaatcgatttggatttttgctcgactctctcttttccctttatgcatgtctcttctaattctttgatttcaaatcgaaaccctagcaaatctccggtggtggcttctcgatccgccaacttctcatctccggtggtggcacctcatctccggtggtcgctgcacgagtaggcg

SEQ ID NO: 42583 - DNA, 578 bp, Arabidopsis thaliana columbia
actatgaactgctatcaagtaaagaaagaaaaagagacatgaactcaaaacctcattttacaaaaaaaatagtgttaagtcatcttattcagctaaaatctcattattccactgcttttcaccaaaaaaaaaaatctcattattccactgccgacaggatctttgccgcctttgacacctttgttgcagagttttaatttattcatcgatctggtgtacctttaatattttacacgaaaggtcaaagactagctttctcttacaaattaaacaatagtcaaccattgtaaacgaaagtagcacataaagtgaaggaattaaaatgaaacgaaataatctgagtgaggtggaaatatccaatttcaaatgtgtctttgaagtctctatggataatttgtcaaaacgatagtatttgataaaagaaatggaatgaaatgaaattagtagttatcagtaaatctttttcttacttaattcatcaaatgtttttcatgtgagtgtgttttaaaattacgtaatcaatgattacaaagtaagtaataatctaaagcaaattgtatatatatagtaattagtat

SEQ ID NO: 42584 - DNA, 549 bp, Arabidopsis thaliana columbia
cattagtagctttttctgtgtgatctttgtgttgtatatatatagatcgaattgattttagctggtgaaaggtgaagttgtggtatgaatatgaagaaacagattatggatgagtctgtaaagtcattgatgctgcctcctcctccaccgcttcttcctccatctcagggatatggatcaagaaagatcgatggagacagcataaccaataaacagatcaagaagttctggagacagaagcagatcattgaagaggatcatctctattctgctattaaggctgcagctcgtgtcagagctcgtaatctctctgtatgtccttttggttttaacaattcttttcttgtgttgttctttatttcttaatctctgagaaggtggttctgatgtctatatctattgcaggatgaggactacaaacgctttgaagaaagcttggacatggaggacctggaaaccgaagatcatcagggattgaaagactggtctctgtttacttctcatcaatataatcttgcacgtttatagatatcttgaaccattcaatga

SEQ ID NO: 42585 - DNA, 634 bp, Arabidopsis thaliana columbia
aatctatttgctcatcattgcattgagatgaagtaactccttttgttatgtcaagcaagaactcgatagcatgtcttttgaattcccagagcagatctccagaggaaagtatatatttcaacatcccataagcttgccaccttttcactggattgttttgaagctcatcaacaacacttcctaaaaccgcattagccgcctctgcaacctcatgggagatctttgcacagatgaataaaagcgatgcacccaagctgatgtcagggaaagaggtgataaactcatcatcatctgttcattttacaaccatgagacatgtgatacgagaacagatgcgtgttattgagaaatcaggaagaagtgtttttgagtattgagagtaacctccagcaaccgtgctcattaatttttcagtgtcattccccgtgattaaaccaagatgtgttaaaccacaggatgtcaagaacggttctaactgaatcaccagaggaatacaagaggccgctttgtctctgatgctaactgaaataatagcctgcaaaaccagaccaaatctaaggtattgaagaaaatctatatgctcataataaaagagaaaagtcagaaaagttccatgatatcgaaacaaagttgg

SEQ ID NO: 42586 - DNA, 532 bp, Arabidopsis thaliana columbia
aataaatatacagaaaaagctgaaattatgaatttcccatttcccaccaacaaaaaaaagggaaatagtcaaaactcatcactctcactcaataaccatatttaagcttgcagacgaacctcaattaacgcgccaaaatatccaaaaaaaaaaacctaaaattaaaactttttttccccaaatgaattttcaaataaagattgaatttttatactctataactaccgtattgtcagatccgtcaattttccggcggttgcgtgcatcggagtccaaatcgccgccgccagatttggaattagaagaatcacgaccctcgtgtgaattcaatccgtgtaaaagccgatgctttttgtctctcctctcatcgtcgtcgtcttcagaatttgaattcctccggcgatttgatcggttgctgaaattagggtttctggaactggatctaagctcttcttcgttttcttcattgggatttcttctctgaagcaattgttgctgtttgagagctcgcttttggaggtcaagaagtgat

SEQ ID NO: 42587 - DNA, 605 bp, Arabidopsis thaliana columbia
taacggccgccagtgtgctctaaagttggcggtcgaccaactggccgggaagcgttgcggaaagcggatggcgccccggggtgagagactatggggaaatgaatgcaatagattgacgagtgaacattgacctcaccaccgtgtggggaagttgctatttattgttcattttctggaatgctgacgaggtcgaatatcggcggatctcaatcggaataggaggtctgcgattagacaatgccatgacaaatccttagacggctctctgttattactgatcccaatatgacagctggacggtctgggtgtcgcaggagatactggattgggaaactaagcaagaagtactccgtactacaagagtccagtcttttgtgcaactcgtacaactcttacaactggtgcgactggcccaactggtccaactgctaggcgatcgaattgcggagaattcggcaaggagcgccgatcgttggcccatctgcttgctctcgtctttgcagaaacatcgtcgctctgcccgaccgtttcagcagcctgattgagagtctggggtgcccgatccgttgataagacatccagggagattggtacttcgtgtagga

SEQ ID NO: 42588 - DNA, 664 bp, Arabidopsis thaliana columbia
gggatgtaacggccgccagtgtgctctaaagcagggagttcacgccgcacggctctgggaaggcgaccataccgccgcggattgcggtcggaatgaaagtcaagaaatatcacgaggttgctcatttctcgaaatatgtcaactcactatgtgataccgtgcatcgggagcggggcgaggagattacgcacattgtggattttggatctgggcagaattatcttgggcggacattggccagtcctccgtataacaggaacatcgttgcgattgaacggaggcaccagtttatcaatggggccaacaggatggacgtctatgcgaacgtagctgagaagaagaaggtgcgcttatacaataagaagctggataaatgcaagacctgcgaagatccagacatgccagtggaaaagctagactcgcaaccggagcggacgagcgacgacgtggacgaacaagacactgggaacgacgatgagggcgttgcggagattagcatattccgcgacatcagcgtgacctccgacgagctcggcacctttcctaaagccggcgggactgttcagaagccagtaacgaatacaaatacagacgctccacgaggcgcgatgaactatattgagcatgaaacaaggacggttactggagcgatcacaaagatgtt

SEQ ID NO: 42589 - DNA, 705 bp, Arabidopsis thaliana columbia
attcgattcgtcttccttggtcctggattgcttcatgaatttctaggtgagaattttcgatccttctcctttgccttttggtaatccacagagagatagagacagagaatttatatctttcgagcatagttcggattcgatttggttttgtttttccagcgaagttgatgtttggttggataatgattctctcttgcaggacaacaatggaggctcgtccagttcatagatcaggttcgagagacctcacacgcacttcttcaatcccatctacacaaaaaccttcaccagtagaagatagtttcatgagatcagataacaacagtcagttaatgtctagaccattaggacaaacctaccatttactttcatctagtaacggtggagctgttggacatatatgttcttcttcatcatctggttttgcaaccaatctccattactcaactatggtatctcatgagaaacaacaacactacacaggaagcagcagtaataatgctgtgcagacaccaagcaacaacgatagtgcttggtgtcatgattcattgccaggagggtttcttgacttccatgaaaccaacccggcgattcaaaacaactgtcagattgaggatggtggcattgcggctgcttttgatgacatcaaaaacgaagtggttggcatgaatgggctgaccattgacactgatgatgacctttgat

SEQ ID NO: 42590 - DNA, 579 bp, Arabidopsis thaliana columbia
taacggccgccagtgtgctctaaagggtcaaactcaatttgacagccgtcacccctgaatggccgaaagctgcacagcaaaagaaattccggaatcgacatgaagcgagaggcgccggggcactcctgaatcttgacgggccgagactgagagcttccagaggcttgtgcaggtttccagcttctgcagcgaggattgccttgttcgggcagtgatcagacgccagagggtcaaagtcgcttacaggcctgtggtgccgccccctcaaggacgataatacgagcggcgatcgaggaagtcaagctcgagacaaagttggccgttaggggtggatatgcggcttcatttcccctgcgaacatcgtcattattcctcagaacctgccatgtgggcgcaaagtcaaattaacaagcatcacccctgaaacggtgagcttgctagacaattagtaaagggaaggatctccctgcctcgtctaaagcttttactctgccgggcttggtgccgttattttcggctccttgagctatcagtgctaatttgacggggctccactttgcgtgaacggttgctccacag

SEQ ID NO: 42591 - DNA, 477 bp, Arabidopsis thaliana columbia
attcaaaatagttaaaattaaaattccttaaaacaatcaataatgggtacaacatcactaatcctcaagaacaaaaatgaaatcctcttaatcagtttcaataatcctaccaaaacttcaggctggtttttctctctatctctctctgaaacaaaccaaaaaaacagatcaatcaaaaatgagaaaccacattacaaacaagaccttaactctctatcactctctacgtctcttattttatctcatcgaatcgaatctcaaattagagaaataatggtttgatcggtaacacccgatccctgttgtttgtacatactgccaaaaacactgctttcactcgcctgcaagcattgcttgtaaccgagctcgggcttcgtcagaaacacagaatcttaatcttcttctttgcggttgtttaggtgaagacggaactgaggagaagcagatcactataaccgtcatattatctgatgactg

SEQ ID NO: 42592 - DNA, 526 bp, Arabidopsis thaliana columbia
tctataaaaggtgactctctctctgtgtcagaagtgtcttcctttcctctgcattctcttcttctttgtgccgtgtgggtgtggcatttctcttgtagcgacaggaattgtgccagagctgcaacagcaatggcgacggaatcaatttttctcaagcctgtatctttcgcatggtttacgaaaaacccattgaatcaatttcataaaagaagacaactttcctatcgaattcgtcgttttcgattcggtgtaatttgctccaagtcatctgattatcaaggtaaccgccaattttcgactcttgtgataaaattcggaactttcaattcttttgctgtctcaattgggttgtgatggttctgaatgatcattggagtttatgtcaaattcactatttttcttgtctctgattttgttaattcaatcattggaatgttcaagatgttacctttggttctgttttcagatttccagagttatgcaagacctttgcgtctcttacgagcagaagaagtgaaagttttag

SEQ ID NO: 42593 - DNA, 452 bp, Arabidopsis thaliana columbia
gtttagaacaaaaatattaagtacatttcttttactttctataaattacctaatattacatatctacgaattatctcatatgaaaatatgctttagatctccaaaatcttaggaccaatcctgtacatatataatcttgtgtcagcccagtacatatataatcttatgaatacaaagactcatcgttaacgctgaattacatatctccttcgtaccattccttcaggtcttccatggcttccgaatcaacatggactccagctgacttcggaaggttcgagattatgctatcattgtcaacaccagacaaagtagactttggatacattgccaagtatctgggaaagcctgtagaagaggtcgtaaaccaatacaacgagctcttgagctcgaatgatccgacgatgcaaaggtaagagattatttcttgttcttgggttatttttgctaat

SEQ ID NO: 42594 - DNA, 546 bp, Arabidopsis thaliana columbia
  unsure (1)..(546): unsure at all n locations
tcagcagctgcatatcctgtaaccaaaagatgcaatttcactctcaagttgattagaaagattcatatgagcgagcatcatgttctcataatagtatataccttcaaacaagcagcagcaattcgttcctggagactatgaatctcctcttcttgtgatctcactttcgcataaagtgcctgaattttcaaaagctaatctaagtttgattcaagaactagaaatcataagattcttaaatcagcaccagtaccatttcttcaggatcttgtattaacttagtattagtatcttctagcttcctcgacgcaatagtatctttctcaatctcatgcctataagagagacagatcgaagaacaagccactaaatattcaacaacactgcttcaaaatcaaacgctttgtttgtgggtttaaggcaaaacagcgataccttttgattgattcagaactccgattatcatccatcgtgtttaagtcgtaaaacgaagctcgactttaaggtcatcggatttcanagtctatgatttttgttttnttttgt

SEQ ID NO: 42595 - DNA, 541 bp, Arabidopsis thaliana columbia
ggtcaatatcagcaccccatttttcattagttgatctgtattaggatatacttcaaataatgagatgtaatactattctaccatataaggaaatctcattatgtataaatactcttcttatgttaatgaataaatcaagttctttttaattatatcatggtattagaaccatccaatcgttggatcatccagtggatgttgtttcaacatatatctacgcttcagagccaataatatctgaacgtaagaagggtgttaatgaagaaaatcccacatcgaaacttggagaaattattaagtagtatataaagggttagaaccactccatctattgcccagattaggtcgctggtaccatgttaaaaacccaaatctatcatggtagcagtgacctaatttgttttttaaatggccgtcgttgcttcgtttcagcaaccgccgcctttgttctaaaatcattaacctagccaccgatgtactaactagtgttgcttccattatcttctattttctacaatttttaaactataaatatatttga

SEQ ID NO: 42596 - DNA, 556 bp, Arabidopsis thaliana columbia
gactctagaggcaagagtatgtccatagaaaacaagaactaagaacaagaattaattatttaatatttttaaacttatgtcctaatttgcaattatggaaaattaaaggaccttaaaataaaaaatgtttagaaaatgggacccggtgctctggcacacccagcacaccccaagagtcggcactggtaatatcacaactaatatactatatatagttttaaatttgaatagtaaaacttcgagtttacaatcaagttacttgaaccacacgtgatgtcagattcacaagtaagtaggaaacactgacgatactggtataggaaaaggaaccacttccaatttacattcaatcgtatcttttacctctatataaacaatctatatgtaggaaatgatgtatgcttcatgtcgacatgacgaaaaaatcataagacaatgtcgtagttaatgttatacattgttatgtacttatgttcacacttaatcgatatgtatgttgtattctttgtttcgacataactagaagaaccataatacaattctgtaatacgatgag

SEQ ID NO: 42597 - DNA, 497 bp, Arabidopsis thaliana columbia
cgttcgcaatgattctttatcatagaaggcaagaagctgtttgacatggttttgccaagctgcaacactttgaccatctacagtgacccaatccacaactgttgatgcaggttgttcccaccattcatcaagctgcattcgaaacacaaacaaacaaaaaatggtattaagcttgaagtaaggaaaggtagtgaagaatagaaaaagaactagaaccgtaaactttatttgcaattttgtaagcaactgtcaaatgaaaacctgatttttttcatacgcaagcttaacaagtcctaaaggagactaaataaaaggttgagtagccatcgtaagaggattctaaatcccaaaaacacgcaagcactattaagccatactctgggagtgatatgacttaagaacgtccacgtgaagacacattaagacagtcaccataagttaataggactagcttctaaacataacgtaaaagcatgaccgttgctagaacacacttt

SEQ ID NO: 42598 - DNA, 414 bp, Arabidopsis thaliana columbia
taaataacttctatcaatagtgatgaaattaagtcgaatctatatatactttgaactttgactaaatccattgacttttttttttttttttttttgataagaaatccattgacttgtaaaaatcttatttcctatgaaaatttccaagataaagtttctctctagcttttacctttgcaattacagtataagttagagaggtagtcatattttctgctagggatacaataggtaatgaagtcatgaagagaaagcagccgaccattgggcaatgaatatgcacttgtgactttgtaagttgttggtgaataacttcgtctgagtgaataaaactagttctaagagacaatatgacatattaaaacacttttattactcgaagacaaagatatcaagaaagaatggcaacaaaga

SEQ ID NO: 42599 - DNA, 540 bp, Arabidopsis thaliana columbia
tttccagttacttgtatccattgacatggtagttctgcactcaacatcatatctaccacatgagaagaattttctgaactacatccatacatatccacatcccttattggcatactattcccgatgaaaagagcagatttagaagttagtgctttagaaagcatatgtgcaacgtaaggttcagtcagggagctttcagcagatatttgaaatgacatttcccgggcaatctgcatagaagaatgaactattaaaagcagtaagagttaaattgatctttttgcaatctacagcgatacatatgtttcagaaaacggtcatgtttgatcttataagggattttaagggaaagggttgtctggaggacatacagcgccatccaatgcctgtagatgaccatgcaacttgcttctcctccatggaaatcgagatttaagcacacaattagcaaactgaacaatgttgctttggaccctgtgagtgaccaggtgtgatgggtcatgtcggcatggatgcttatcaactgaaatgtatgcaaat

SEQ ID NO: 42600 - DNA, 463 bp, Arabidopsis thaliana columbia
atctgagcaagcacgaatgtataaatcaatcagtcaaacagtgccataaatcttcaaaaagcttattaaccttagggtagtcaagttatttatttatttttgcatgaaatgtcaataatttatgttttgtcaactaattatttaaattaaaatagcaaattatgggtcatatttagctaatttacacagaataatgtatgtgattaggggaaaaaaaatagacaggttggtccggaagagtagtagtaattgagtatgacagaccacgttcttctcttatttagtatctccgttcccgtttaaggagtagtacagtgtacggacaaagaacttaacggcgttacttacaatatcccgtcacgttgtgttgcatgtgagaaaaagggtttgggtgcgaattttcttcatcttcagaaaagagaaaaaaaaagaaaagacacagcgactcacagacatgccattg

SEQ ID NO: 42601 - DNA, 474 bp, Arabidopsis thaliana columbia
ctaatggacgacaaagagcgtaaatcataatcgtgaatgacgtgacgtggttttagcaatgcaatatattgaaataatgttggcaacataagtaggttatatttttttctatttgtttaaataaattttgatgtatgcaacaaccatatgcattaaaaccaaaaaaaattgtgcacaacataaaatacattaattaatttattagtgtttacatttcattttttaaaagaaattgtaggtttactttttagccttttgatcatgtgattataatatattaatgtatatgcataaaatacattagctttattatctggaaatttcaatattttaacccgacagggtaggtcgattatactttattctttcggatcatgtgattatattgtatgtgtaggccaaacttgaccaatggacgaccaagagcatcactcataatcgtgcatgacgtggttttagcaatgcaatatattg

SEQ ID NO: 42602 - DNA, 523 bp, Arabidopsis thaliana columbia
  unsure (1)..(523): unsure at all n locations
gctttttctctgggggttttctaaggttttacttggaatccaaatcgatgtttattgtgatgtttagctagttatggaattgttgggtggagttgttcgcagtgacgtagaagtagcatactctcgagtgcagtgatgattctgaagcagctgaaacaatttacctgtaacaaagctaaaccctttttactcatgtttcctttcaatgtctgaaacttgtttgctgaatgtttttttttccaaccttgatgtcattttgcagtgtctgctactcgcagaaatgctgttttcaaaactgatgttaaacggcttgcaaggttctatggctctcctgctgtttgcgaatctttaacaacatctaaaattcccaaaagactctcaaaagatgatcggcgagctttggtggagtcctttgtcaacgagtaattctttctccatcgattagtttcccatattctgtagaggttccatgtcaactagatagcaatatgtgcagctgtatgaacncaaggtcctgaacata

SEQ ID NO: 42603 - DNA, 294 bp, Arabidopsis thaliana columbia
tcagaggatacaggatcccctcatctaagaatttatttgagaaaaaaattcaaaatgtcaagggtgcaaaacttagatacttacgaaggtgcagacattagtgtatcctaagaaagtgtgtcagacacacctgatcgtacatcattgaacgctgcactataaagttggtcatagacactagtaggatgagagtagtgtcaggtgtgaacgattcggatacggatagtagtttctggcgctgggatcggagagtgaagaggatttaaaaaacgggcgtcgacgcaaaatgccaat

SEQ ID NO: 42604 - DNA, 461 bp, Arabidopsis thaliana columbia
ccatcgtcatattgtttgaaagcaacttgataatgatcacagacaaagatgattaaaaacacttacattatcacatatactaaattgatgttattataattaattatagaagggttgattaattaagagaaatggcgaaatcaggagtggggtggtaggtgggagaaagagaggtcgagcacactgtggtagttggtgagtgtgtgggggagccttgtacttaggttttgccgacttctttagattccggttaagcttttggttttggttccggtttaagttagagatcttaaattagtgattatacaagaaatctcatgtagtaatattattctatttgtggtccaagatatggcataagatttaacgaaagaattgaatgttataatgtgttgcaagtagaagctttttacgcttttaattaatgttcttagtttaaccctatagttatgaagacaaat

SEQ ID NO: 42605 - DNA, 545 bp, Arabidopsis thaliana columbia
attcatgattgaataacacaaaatcttacgtaatattttaagtcactaaaactctatttaaataacaaaccaataacactgcttaaattgtctaaattgataaatagatgatatttttattttatattttgaattaaaatatgatgaaaacgattttgtttaaagtcggtcaaggagactgatgttgtttttgtcacagaaaactgtttttttcttttaataatatatttcagtaaaatgagccggtgtaaggagtaaggaccatacttagaacaaaggcatcttgaacctgtagcaaatcttatttaaaaactagtagctatatgttaataagtacaactagagaagaaaaccctagtgcaacacacacataatataatatataatactaatcaatagtggcacgaataacaatattacaaataaaataaaataaagagcttaaaagaacaatctgtcaagaatctttgtgcttcaatctttgaaagctaaaacagtaataatagcttcagtagccaacagctcctttgtctgtacactgctgg

SEQ ID NO: 42606 - DNA, 819 bp, Arabidopsis thaliana columbia
caataaaatgagtgaaaatatcaacgaagaagaagaggaagaagaagaagtagttaaagagttattttatctcttcgttctcatgtatgtgttgtttgtctctcttttaatttgaaccattgaattaaaccgagttcttaaaccggatctgattaagtacgtcggtaggagtatgactccctctgaccttaactttgtcgctcgctaatcatcaattcatatgatatatatggagtttcactaataaaaaattattttctataattcatatatttatatcctgaatgagaaaaaaatatattatttctttattaaataaaaaaagtagaaatttcattttggcatttaaaaataaattgaaatcctaccaactaatttgtttcataatgtttgtatcaggaaaaaatggttataagttaggtttttgatgtgacaatcttaacttaggaaaaaattaaaaaaaggttaagccatgcaagagaagtgggtcatgtgactcgtgtctgagcttctttcgtggcaattattcaatggtggagctgctaagcgacttggtcgacgccgatggcatggcgcattgcgctgtttctagacgaccatactcatctatattataaaaaaaaaaattcacatagaatatcacacttcctcaatataaatatagcactttttacatgaatttcatatgtattaatctttctaacattatgcattgtaaaaaaaaaaaaaagtttcattactatgtatataaatataaggttgtgtcattgtgtatggattgaattcttctcacctctttcatatgtttttggcagtgtt

SEQ ID NO: 42607 - DNA, 548 bp, Arabidopsis thaliana columbia
tttcgtaccattcttataacaaggtctctaaacaaagaacaaaacttaggattatccacattgtatgaaaaaatgtgaaacaagagggcataactgaaataataaggaatatagagggggcaaaatgagctggtggatgatccttcatcggattcaattatctcatctcatgaagagctaatccgcaggaagattctttccagattctattgcagcaccttcacaaggtttaactcccgtctatggaagctgttgatgcagtgccaagagcaatcttccaaacatcacctctcacaagttgaaccacatcgtatttagccacggttgcactaaccaaacgatagaacggcattaagtttgaacatctgaagcaacattaaacacaatcaacataataaatacaagtcaacaagcttttaaatatcagtgtttcatctcgggacgccactgtttatttcagtgtttatttcatctcagtattaagttagaatattagtgtttgggttacgcttgtgcttccttatgctatttgacttttgtttgagatt

SEQ ID NO: 42608 - DNA, 509 bp, Arabidopsis thaliana columbia
cccattcgtcacttcacatctctgtctcaagtgtaagaatttattgaaaactcttttgtgaatgtcttcaaatcacgtacattcttatgactagtctcattatcaatctgttgcagttgctttgattcccatcttgtgccgggcacttgaacaagtagccaagttcttgaggcgtaactttggtcggtccactatatacaggtaggtgcatcgagctgattagcaggtttgaatgtagtagtaggttccatgtgtggattcttactgatgcttatgttgtacatgtgtcttgttctgtaatggttatcagaaagtacttggaagacccttgtgtgtgggtggagtcaaacactactaccctcaacatcttgtcatcgcaggctgagatagccattggcttccttctgattatctctctgctctcgtaagctctttgaacctgttagaagcgataatagtttattttcgcacttaagtttatattctcactaagttcccagctttgcatt

SEQ ID NO: 42609 - DNA, 836 bp, Arabidopsis thaliana columbia
attataatattggaagagagtactcaggacagttctgactatacattaatttattttaaaaaaaaaacttaacagatatatttgcaaatacaaaatgatgaaaaataaaagggataccataatctaaaatctgacaaagaaaatatacaaaaagtcaattacgatacttaggaaaaagaactatatatttttgggtagggaagttcaaaaacaaattaccgatttgctgactatatgagcaattattacatacttttatttatttgtacaacaattattacacatacttgtgtggaccaacatgattaattttatattggccatatggtgcgtagtaaatgttataataacttgaaattaaataataactaagctcgactcgatatatagatccaaccagtagcctctcttattcacacctaatcttcatcttcatcttcgcattcatagtctctacgatcaggtaatccccctctctctatctatctttcatatatgtgtgtatgtgtaaactatctatattctgaaaatagatcaatcaattgatcttttcctatctcaattgttttcacaaccatcagtttgacttttgatcgtttaaggctcgagagaattatcattcactgtagtaaagatagtttataccaacaaacccatttggtgttgacagctttcacataagtatgagttagagctagaaccggattagtattaatgttacttgtacctgttcatagtactaaccaaaaatgatccaagaacatgaaaataacacataaaccatttatggttacacagatagataaaagacgcaacaacgatgtcttgggacgatg

SEQ ID NO: 42610 - DNA, 502 bp, Arabidopsis thaliana columbia
cagtttttaatagtaaaaagtgtattctaatatttaccctcacttaattgtcttattttcgaagcgatgtttagttttttagtaaaaccaaagcaaagtagattccaaaacactggtgtattagtacataataatactacgtgttaactttttagttataaaatacaagagtgacccatacacaaaaaaagtaagatcccactgggttttgctcctttcccacacaccgtgattgatggtcactctccattctccacactctcacacaatttctcgatattctctacatattacatacccaccactccactcccatcttttcttttattactcacacaagcatgggtttactttatctgtaatattacacaaatgtaatccccatttcctcgaataaaatttgaaaaaatgaataacccactgatattaaatcaatattttgttctgtgtgttttcacttttgacctcttatatttcactttaacagatatagtcctcttta

SEQ ID NO: 42611 - DNA, 424 bp, Arabidopsis thaliana columbia
  unsure (1)..(424): unsure at all n locations
gtcctatcatgtgcccataacttttggtaggaagttgtaacttgtattactaaacaccaatagttagaaactgaacaacttttttcatttatttcaaactaatcgttttgcaagtgttgtatacactgagttacaatgaaaaaattacaataaaaaaacaaacaaaatcacactaaaataataatgaacgttacattgatgcaatgatttagagtataaattggatttgataagccttacataggagttaaaatgtgaaattttatattaattacactaaacatctggggaaaaaatatagcccgatgacagaaccattcctaaaactctttttgttgtttgttaactaatgttttagatttctactaattatcgttatgtcaaacagacaactatatgtctattcagttanaaaagagaactg

SEQ ID NO: 42612 - DNA, 2107 bp, Arabidopsis thaliana columbia
attcctacatagctggtaggacccacggcatatggatcataaagtctttaaaagagaatagatatgattacattgcatgtagtaacacgtgcgatcataccaacactaatgcaccggatcccatcagaactccgcagttaagggtgcttgggcgagagtagtactaggatgggtgacttcccagaaagtcctcgtgttgcatccctcgtttttttcggtttttctctattttgttttgttaaaaatgtatgactctataacttttagaccgtgaggctaaacatggcatgcgataccttttccgaaagcccaaagagagctctccgatgaatgaggaaggaaaatggaattcttctttttgttttttttcaactccaaattttgacctaaatgtacttttttgggctttttcgtgatctttcctatattacggggggaaaattatatgttcggacattgttttccaatattttgcatgtatcaaagctcttataaagaagatagggtattactacatagttggtgggacccacggcaaatggatcataaagtctttaaaaaagaatagatacgattacattgcatgtagtaacagatgcgatcataccagcactaatgcaacggatcccatcagaactccgcagttaagggtgcttggacgagagtaatactaggatgggtgacctcccggaaagtcctcgtgttgcatccctctttttttccgtttttctctattttgttttgctaaaaatgtatgactctataacttttagaccgtgaggccaaacttggcatttgataacttttcggaaagcccaaagagagctctccgatgaatgaggaaggaaaatggaatttttctattgtttttttttctactctaaattttgaactaaatgtactttttcaggccttttcatgatctttgctatattacgggggaaaaattatatgttcggacattgttttccaatattttgcatgtatcaaagctcttataaagaagatagggtattcctacatagctggtgggacccacggcatatggatcataaagtctttaaaagagaatagatatgattacattgcatgtagtaacacgtgcgatcataccagcactaatgcaccggatcccatcagaactccgcagttaagggtgcttgggcgagagtagtactaggatgggtgacttcccagaaagtcctcgtgttgcatccctcgtttttttcggtttttctctattttgttttgttaaaaatgtatgactctataacttttagaccgtgaggctaaacatggcatgcgataccttttccgaaagcccaaagagagctctccgatgaatgaggaaggaaaatggaattcttctttttgttttttttcaactccaaattttgacctaaatgtagttttttgggctttttcgtgatctttcctatattacggggggaaaattatatgttcggacattgttttccaatattttgcatgtatcaaagctcttataaagaagatagggtattacaacatagctggtgggacccacggcaaatggatcataatgtctttaaaaaagaatagatacgattacattgcatgtagtaacagatgcgatcataccagcactaatgcaccggatcccatcagaactccgcagttaagggtgcttgtgcgagagtagtactaggatgggtgacctcccggaaagtcctcgtattgcagccctcttttttcggtttttctctattttgttttgttaaaaatgtatgactctataacttttagaccgtgaggccaaacttggcatgtgataccttttcggaaaacccaaagagagctctccaatgaatgaggaaggaaaatggaatacttctattggttttttttactccaaattttgacctaaatgtactttttcggggcttttcgtgatctttgctatattacggggtgaaaattatatgttcggacattggtttacagtattttgcatgtatcaaagctcttataaaaaaatagggtatcctacatagctggtaggaccacggcaaatggatcataaaacttcaaaaaagaatagatacgattgcgatgcatgtagtacaga

SEQ ID NO: 42613 - DNA, 4163 bp, Arabidopsis thaliana columbia
atttattcttttttgaagacttaatgatcgatatgccgtgggtcccaccagctgtgtaggaataccctatcttgtttatgagaggtctgatacatgcaaaatattcgaaactaatgtccgaacatataattttcgccctgtaatatagcaaagataacgaaaaggctcgaaaaagtacattaaaatcaaaatttggagtaggaaaaaaaacaatagaaaaattccattttccttcctcattcatcggagagctctctttgggctttccgaaaaggtatcacatgtcaagtttggcctcacagtctgttatagagtcatacatttttaacaaaaaaaaagagaaaaaccaaaaaaaaagagggatgacacacgaggactttcctggaggtcacccaccctagtactactctcgcccaagcacgcttaactgcggagttctgatgggatctgatgcattagtgctggtatgatcgcatccgtaactacatgcaatgcaatcgtatctattcttttttgaaaactttatgatcgatttggcgtgggtcccaccagctatgtaggaataccctatcttgtttataagagatttgatacatgcaaaatattcgaaaacaatgtccgaacatataatttttgccccgtaatatagaaaagatcacaaaaaagtccaaaaaagtacatttaggtcaaaatttgagcagaaaaaaaagaaatagaagaattccatttttcttcgtcattcatcggagagctctctttaggctttccgaaaagatatcacatgccaagtttggcctcacggtctaaaagttatagagtcatacatttttcacaaaacaaaaagagaaaaaccgaaaaaaatagggatgcaacacgaggactttcctggaggtcacccatcctagtactaatctcgcccaagcacccttaactgcgtagttctgatgggatccgatgcattagtcctggtatgatcgcatctgttactacatgcaatgtaatcgtatctattgcttttaaagactttatgatccatttgccgtgggtctcaccagctatgtaggaataccctatcttctttataagagctttgatacatgcaaaatattggaaaacaatgtccgaacatatagttttccccccgtaatatagcaaagatcacgaaaaggctcgaaaaagtacatttagttcaaaatttggagtagaaaaaaaccaacagaaaaattccaatttcctccctcattcatgggagagctctctttgggctttccaaaaaggtatcacatgccaagtttggcctcacggtctaaaagttatagagccatacatttttaacaaaacaaaatagagaaaaaccaaaaaaagagaaggatgcaacacgaggactttccgggaggtcacccatcctagtactactcccgcccaagcacccttaactgcggagttctgatgggatccagtgcattagtgctggtatgatcgcatgtgttactacatgcaatgtaatcgtatctattcttttttaaagattatatgatccatttgtcgtgggtcccaccagctatgtaggaataccctatcttctttataagagctttgatacatgcaaaatattggaaaacaatgtccgaacatataattttccccccgtaatatagcaaagatcacgaaaaggcccaaaaaggtacatttaggtcaaaatttggagttgaaaaaaaacaaaaagaagaattccattttccttcctcattcattggagagctctctttgggctttctgaaaaggtatcacatgccatgtttagcctcacggtctaaaacttataaagtcatacatttttaacaaaacaaaatagagaaaaaccaaaaaaacgagggatgcaacacgaggactttctgggaagtcacccatcctagtactactctcgcccaagcacccttaactgcggagttctgatgggatccgttgcattagtgctggtatgatcgcatgtgttactacatgcaatgtaatcgtatctattccttttaaagactttatgatccatttgccgtgggtcccaccagctatgtaggaataccctatcttctttataagagttttcatacatgcaaaatattggaaaacaatgtccgaacatataattttccccccgtaatatagcaaagatcacgaaaaggcccaaaaaagtacatttagttcaaaatttggagtagaaaaaaaaacaatagaaaatttccaatttccttcttcattcatcggagagctctctttgggctttccgaaaaggtatcacatgccaagtttggcctcacggtctaaaagttataaagtcatacatttttaacaaaacaaaatagagaaaaacggaaaaagagggatgcaacacgtggactttccgggaggtcacccatcctagtactactctcgtccaaggacccttaactgcggagttctgttgggatccgttgcattagtgctggtatgatcgcatatgttactacatgcaatgtaatcgtatctattcttttttaaagactttatgatccatttgccgtgggtcccaccagctatgtaggaataccctatcttctttataagagctttgatacattcaaaatattggaaaacaatgtccgaacatataatttttcccccataatatagcaaagatcacgaaaaggcccgaaaaagtacatttagttcaaaatttggagtagaaaaaaaccagtagaagaattccattttccttcctcagtcatcggagagctctctttgggctttccgaaaaggtatcacatgccaagtttggcctcacagtctaaaagttatagagtcatacatttttaacaaaacaaaatagagaaaaaccgaaaaagacgagggatgcaacacgaggactttccgggaagtcacccatcctagtactaatctcgcccaagcacccttaactgcgaacttctgatgggatccggtgcattagtgctggtatgatcgcatgtgttactacatgcaatgtaatcgtatctattctcttttaaagactttatgatccatttgtcgtgggtcccaccagatatgtaggaataccgtatcttctttataagagctttgatacatgcaaaatattggaaaacaatgtccgaacatataatttttcccccgtaatgaagcaaagatcatgaaaaagcccaaaaaagtatatttaggtcaaaatttgtagtagaaaaaacaccaatagaagtattcaattttccttcctaattcatcggagagctctctttgggttttccgaaaaggtatcacatgccaagtttggcctcacggtctaaaagttctagagtcatacaattttgacaaaaaaaaaaagagaaaaaccgaaaaaaagagggatgcaacacgagaactttccaggaggtcacccatcctagtactactctcccccaagcacgcttaactacagagttctgatgggatctagtgcattagtgctggtatgatcgcatccgttactacatgcaatgcaattgtatatattcttttttgaagactttatgatccatttgccgtgggtcccaccagctatgtaggaataccctatcttgtttataagagttttgatacatgcaaaatattcgaaaataatgtccgaacatataattttggccccgtaatatagcaaagatcacgaaaaggctcaaaaaagtacattaaaatcaaaatttggagaagaaaaaaaaccaatagaagaattccattttccttcctcattcatcggagagctctctttgggctttccgaaaaggtatcacatgttaagtttggcctcacggtgttaaagttatagagtcatacatttttaacaaaacaaaaagagggatgacacacgaggactttcttggagatcacccatcctagtactactctaccccaagcacgcttaactatagagttctgatgggatctggtgcattagtgctggtatgatcgcatccgtaactacatgcaatgcaattgtatctattcttttttgaagactttatgatcgatttgacgcgggtcccttcagctatgtaggaatccctatcttgtttataagagctttgatacatacaaaatatacgaaaacaatgtcggtacatataattttttgcccgtaatat

SEQ ID NO: 42614 - DNA, 595 bp, Arabidopsis thaliana columbia
tgtttgtttgtttggtaattgggattggagaccattatacttatcaacttgttccatgtgtactgtgtaggttgcgcccgtggcgtctcagatgcagcaatgcttgccccagaggaaatattttccgggaaaggtgacattaaggatgagtctgagctcacacaggaagatagaaagaggaggagagcgaataagaagagaaagtttaagggtaaggaagtgaataacaaaaagaatatatactcaattggtaaaaaatacaaaatctgagtgcatcatgttgcattttagacgcataataacctctttgcttttcacttgtgaaacagctgaatctgcaaatgaaccgcctaaaaaggcgctggatacaagtaccaagaacccttaaactggtattttctgtgctcttacatgactgactatagattcaaaaagcatcaaaaaattaaacgttgcttacttttgtgaagttacatgttgaagaaaggagagagttacagaggcaaattcaagatgataagatctcggtcaagagcattgctacacagacagcttgaagattagataaaacaacagttttgaatgagagaaatat

SEQ ID NO: 42615 - DNA, 554 bp, Arabidopsis thaliana columbia
attacgggtattcctacctcctcttcagtcataacataaatcttaatcctttcttttatttgttgctcactccttttttctatatgatttagctacttggtgggctgcgataacctccttgtgcggttgcacacaaagcatcctgaactctgtgacaaagttggcggtcttctcgctatgcatatcgacgatcttcgggtcttggcccctctctggctgtcaaagaccgaagacgttcgccaagatacagctcactggaccaccaatcttaccggagatatttacggcaaaggttggatcagtgagatgtatggttactccttcggtgctgcagaggtaaagtcaccactttcctaatttctcttgctcatgctctgactattacagtcctcagtacgtctggtttcgattataaaactttgtgattttgtttttgatccacaggcaggacttaagcacaagattaatgacgacttgatgatatatcccgggtatgtccacgagaaggtgttgagcctgttcttatgcattatggtttacgtttttccattggg

SEQ ID NO: 42616 - DNA, 540 bp, Arabidopsis thaliana columbia
taccaggaagaacacaaaaataaaaataaaaccaactttattgtaatagagatagacaagacatagtgatattgtaactcacactccagtatgccgtaagtcttgtacggtcatcgccatataatgcaggaatcaccttaatattcatacatataagaaaaggttattagtaaaaaatttaaaccatgatatttattcgaatgaactaattgcatatgctaaaagctggttgcactaagtgggtttatctttgatcaagtatatcacgagtaaagcaaataaaattcttacagcccaaccaaactgggcattggtgcgttcgccattatactcagtattgagccacataaaactcatgctaaattggtctttatttgtcaatttaggttggtaaatactaaaccatgcagatgctccacgccatggggtggcatcgattttcttcattactgcagcctgtatatatataaaatatgttataaatatcacatcaaatggtttggacatatatagtaagggttaaattttagtcctttcatg

SEQ ID NO: 42617 - DNA, 534 bp, Arabidopsis thaliana columbia
aaaatatatactataattactattcttttatcattgttttgaataaatcacttacaaaataaaatgttttggaactattatgtatgagtttatatcaacaaattattttttaatttactttatcatacatttattttgtaaaaataagatatgatatgtttattaatatatacatgcataaataacatataaaaagaaaaactgttaaaatatgagcaaatgtaagatatcaaattttaacagcttttaaaaaaaattaatcatataagatcgaaacaaaattattttaattaattattgtttaaaagaactaaaaatggaaaaaaatcttatagaattggagaattatttgtagttgtgaactattaatgtgcagtctaaaacataatatcatgtcaaaatttaaaagatttgattttgtaattagttaagagagttgcaattatgatagaaaaaaaatcatttcaaaattgtagtttaatatgtagtatttttatagtttaatgactattttctagataaatgttatattta

SEQ ID NO: 42618 - DNA, 502 bp, Arabidopsis thaliana columbia
aagtacaacgacatgaatcctgtaaaagcgcagagtaagtgagcaaaaaaaaaaaacgatcatatcataagagtatggaataaaccaagtatctaccatcaaaatgaaaacattttctgtatgcgtcattttcttgagtaactccttctctgtatatcagaaaaccaatcagtcattacaatttaaagataagcaaagcaaaagtcacatatctaaagacaatttgtatgtatcattgaacatggtaatttcaaagtacttacagatgcaatgttgtttttttccaagaacctttgtattcaagaggaccttttgctcttctgagacacaaactcatccacaatggttcttcattacatagaatatacatcacactgtacatcaaacatatacacataacagattaatcacaaacaatgcctcaacaaatcctcatctgttcataataagaccaaaatcctgacttgctaagaattcgaattgatctagttagactctagtt

SEQ ID NO: 42619 - DNA, 546 bp, Arabidopsis thaliana columbia
ctatcaacatccaatatgtctgtttcacgttaactcagatttaatatctatatctgatatttttgcagattctaatatcctgttttgtcaagacttcacgttttgaagaatacctgtgcgttaaggtatgttaaagttaactgaatacacacttttcatcacatgagtgtatctctttggctgctaagttatatcattcaaattatgtgtatttaatcataccacactaggagtagtctgatcaactattttgacatgtctcattttcatcactttcccaagacattgttttgtgtgtgctaatgcatgtgtacttgagtgcatctccgagcatatgttcccgtgggcacatgtgtttatgtgtttgtatgtgtatgtcccaatgtcatgaccttatgtgatagaaatttgtatctttgaacaggaagcagtgctcttggatcttcttactgttattaggcatcacggggcacgtctagcaactcccattagaacagtacagaggatgcgtaatgaggctgaggtggacactgcaggatttcagac

SEQ ID NO: 42620 - DNA, 528 bp, Arabidopsis thaliana columbia
gttcgaatcatggcctgtactaacaaactgcttcgcatgacaggtaattgagggcttgaaagaagtcttggtgggcatgaaagctggaggtaaaaacttgaaacaacaaataagattttggtcttttgatgtaatctcatatttctaatgactcgcacataatggtcttttgcggatgaagggaagcgtagggcactgatacctccatcagtagggtacataaacgagacattgaagccaatccccgaggaggtagtcagatctttactcttcatcttccacaatgaacttgctacatacgtatgtctcaaatgatctctcatatgtgtttgtggatgcagtttggaccacgacgcagccttctatcgcatgcgaacgagcctctggtctttgaaatccagctcttgaaagtattatgatatttgtcctgtcactgactgttaatgaagtattttggctgtgagattatttattttctattgtaaatctgtaacacaactgcttggaactcatacttgatgagtctgc

SEQ ID NO: 42621 - DNA, 577 bp, Arabidopsis thaliana columbia
  unsure (1)..(577): unsure at all n locations
tctatttataacacaatatttgagtttgtaaattattagtattttgctctcgttatttatttgttgatatgtgggttcttttttctctctctctctacctagtaatctcattatatatatataaataaaataaaaaactaactataattacattactaacaagtaacaattattattacactactatctccaccgccatcgtcaccgtcttccccaccagtaccttcaccactaccgtcattgccgataccatcgtcatctcactactaacaattagtattaccacatcaacgtcaccattagtgccacagccaccactaccatcgtcatcgttaccaccactattactactgtcaacgtcaccgctacggtttacttcagttatttggattgccaatgttgtatctattagggtatagtatttttttgtcacaatgatttaactcgatcttttggattgtctacgtatagttaatactatgagaatatgtactagataactatgaaatcgataatattatacaaactaattatggagctacagtacatgtcggagagatagaganaataccatatg

SEQ ID NO: 42622 - DNA, 994 bp, Arabidopsis thaliana columbia
ttatcttttttcaagaaatttagaaactagatagcttgtgttttggatcccacgtattaatggttagataaaagatctaaaaagacattgatttatatgctcgtgaaatgatgtcttccttgactaatgtaagtaattgccgcgtatagaataagatttttttgtattccaaaaggaagtggagtacacgcgccgaaatagttgacccttgaagaaaaagtttaatgaaggatgaaaaaagtctaggttaaatggaaaacggatattaactagccctaacaaaaatagtaaaaagcaacagcaaatatcacgtgtccccaacttacgattaaatagcctaaaactcaaattatacgttctaaattaagactaagagtctcgatgattatcttcatgaatccggtgattagtgccgttaggagaacgaagaggaaacaggggcaaaagctccggtgccggctcggagccgcttctcggactcggaaggaagtagaaccctttttccgctatggctttttgctcttccttgtccggttgcgcgtggtgttcctcacgcgctgaatgtggactcacgcgcgcccagaatgggtctaggtgagagacgggagagacgaggaatcctcggtggaaatggctgaaagcgtcgttagggtttgtgatgttgttgaccttaagctccattttctttgatgattgacgccgttcgtggagtttgaacgctggctttttgggagttaatggaagcttctggtgtgcggctgagacggcggagaaggatgaggaggagatatcgggtggtgctccagtgagcttttggacgatgttacggaaattagaggggtctgcttgaacgaacatggtgtttggctcggtggcatagctcggcggctgctggtgactcatggtggttgagatgactaaagagaagaagagaagagagaagagaagcttgtttttgtttttgtctaaaagacattcgtctgcctactgcaca

SEQ ID NO: 42623 - DNA, 555 bp, Arabidopsis thaliana columbia
gtaataataaccctgatttctggtaaatgttgttcatatttgagtcgaatcacctaaattcgacacaaaacccggtttagtttagattaagaaaataaaaattaatttatttttgatcgggatatactacgagtttatctgcttgttatcagaattattagtttgagcaactaattaaaaaaaaaaagactaaatttacttaaattgaaataccaaacataaatctaactctaactgatattagctagatttatgttacacatgaattacacatgatatattttagatattcgaattatgtttatatatgccccacattttcggctactaatgctataattttaaagagattcacaatttcttttttttattacttttcttttccaacttgcaaaagcttaagcatattaatattctttttttcttcctcaaataaaaatatagaatcagattctaatgcttaaggaatgttttaaatctccgacatgaagaagatgcttcccaaaccaatcttcctcttcccaatctcatcgaccacactcagatctttacata

SEQ ID NO: 42624 - DNA, 493 bp, Arabidopsis thaliana columbia
cttcctcttctgttcctctagttgcacacagatcaccagcgacgataccctcagcaacctcatcgctccctctgcatgctgcctgctcactagaacagttctcttcaacagcctcctctgtaatcctgcaaccaatatttccaacctgcgtcacctccaccctatcagttggtacacttgtttatgtctttttcatttcagtcctgacactttcttctgcctccaagctaaaatgatcttcattacttaaccctgccaaacctacaactgcagatacaactctatcataaccgctggatggatcaggaaatgatctaaccgggtttgatgatcccccatctccaaattttctgctcctattgtggtggcttgctctttatggatcagatcgtcccaaaaattgtaatcatactcttcttcctcattcgtatcatatggctcccattcttcactatccacagactctccatcttcattaaaagcatacaccatt

SEQ ID NO: 42625 - DNA, 582 bp, Arabidopsis thaliana columbia
tgaaagatttaataggtacatttgtcaatatactaaaactataaaggttttttttgtttgtgatcctatttaattaattcaaagtgtattggatcacgagaatcggatataaccggagctaaaccaaaagtaagtcaagacctctacaaatcatataaataacagactaaaccaaatcatgaagatgcagattccaacaaccagctgatggacatcatcaagcagtggtggaggcagtggcggacccagaattgttttttacctggtcaatgattttttaaaacatataaaattactaaaattactaaaaaaagtgtcactgagtaggctcgaaaccaagttatcaagaatttgaccaactgaactagtatctcttcaaacacctcatatgcattaaaagttatttgtatatttaacctgagtcaactgaaccacctctcttcttaataggtccgccactgggtggagggagtgtataatcatggggtcaattgacccatggattttagaaaattagtttaggttttgttaatttctcaaattgacccttcccaaaattttattgcccccatcaaatatata

SEQ ID NO: 42626 - DNA, 516 bp, Arabidopsis thaliana columbia
tgacaattgtagctagtaaaatgtcatgttttaaaaaattgatatcaaacgaaaaaatttacaccgtaaaaccaatcaaattcttaaatatattggcaattaagaaaaaacatgtttttaaatttgatatcaaatgaataaatttacacgggaaaaccaatcaagcttttagatatattgacaaatttagctagtaaaaagtcatgtttgaagtttgatattatatgtagcattctatgcaaaaaaatccaaccaagattcaaattaatatcttgactattttacgccggacaaaaattcctatgtcactttggtatcaaaagtaagaagagaggtgatgctcaagctcaagtgacataaagtgaatccactaatcttgataatcttacaaaactaaaatcatcttgagatatgtacacaatttaaaataataaagaagcaacttctagatgacgtcaattgtgccatgagagcacaatctcctcaagctctacaattagctccgaccaatgagac

SEQ ID NO: 42627 - DNA, 552 bp, Arabidopsis thaliana columbia
tgattaccacgatcgggaactcaataatctgaatatcaacatcaaaacaaaaaggctaaaattaactgaaaaatatccactagcaaccaggttatgaaagaaagttttagtacccataggagacgcagagtgagagttggatcagaaatgagatcgacagagtatttgttacggaccacgtgaaatccgaagatcagaaataacccagtaatcacataaacagcaaaagccccccaagttgatatcgtgatactaacggagatttctggattcttcttctccttcgcctctttcatggcttttcctttctcgtcttcgaaatcacagaacaagtgaagaaagaagacgtaaacaaaatattgaaaatcctccagaacttacactgggccttttattctatatacgggcctacaagtttataccatatgggctttaataggcccatttaattatcaagcggtcgccggagataaaatatatcccggtcggtgaatccagaactctcttgtacgtttgcgcgatttctccacctttcacaatcccctgggttgt

SEQ ID NO: 42628 - DNA, 605 bp, Arabidopsis thaliana columbia
cgactctagatctagtaagggattaatactatatattatcttgaagaataaaagcacaatatgtatggaatgggttttgatcatagctttgggttatggttcatggcccgttggctaaagccagatatgatgattgagagtggtgcttttaagggacattctacttgggttctgcggcaggcgatgccagatacacctatgatttcacttactcctaggcaccctgagaagtatctgagaaagggacctgcttatgtagatggaaactgcacatactttgcaggcaaagattttgttgattttggaagtgttgattggaagaatgtgttgagaaaacatggtataacagatctcagccgtgtaattgtctttttcgatgaccatcagaatgaactcaaaaggtagtttttcatttctcatctctttcccggtattgtatgtgctaagcattcactgattttattttacatattttcaaacgagcaggctaaagcaggcactgaaagctggtttcgacatctcattttcgaggatactacgatacaggaaccggggacactattcgctgagacagatatgtgatcagtcacatataagaggtggga

SEQ ID NO: 42629 - DNA, 597 bp, Arabidopsis thaliana columbia
cttaatcactaactaataatcatttgagtacgtcctatactcttatgaagaaaaaaaagtttcaattttcaaattctgaaaaacaaacaaacatagattttagctttttatgcatcttcaacatatgaatcaagtatgcattgggaacattaaaatccaatatgatcactccatataacatattcttaagaatctaaaatgactttaacctcaccagaattagcacttggtgatttttaactcttttcacttttgttttttaatggctcttttaaatatatgttcgcaaaacaaaaaattagcttccaaaacttataaaggctatatagatcttactaaaaaaaatcaaaatgcattatgttttcaatcactttctaatgaatatttttgttctacatatatcatgaattatgacaaataacattcaatacctacatacaacttaacaaagtttcattaaacaaaagaagtccgcggcttggcgcaggttttgccctagtaatattaataatgtcctaagatttatctttttttatactaattagaattgatggagatatattaaataagaaaatcctagtaattagaaatattaat

SEQ ID NO: 42630 - DNA, 463 bp, Arabidopsis thaliana columbia
ccgtctatgaagacttattattcatgtcttgacaattcaacagatggagctaagcttgttaattgtattattcatctaagtccagcttctgtaacaaatagttctacataccgaagctggatgaagagattccattctgcccagcacattctcgctggacatgaagcgtgagtcttctcaactatggttctttctcataaaagaactgttgaatttatttgtctgatatgtagttttggtgtttgtccaggaagaatatggagtttccaatcctgagagccagttctagaatcacagccagacttaactatttatgtccacagttcttcccagctcctggattttggtctcatcaacatgataataactcgataaaccccacttctttgagcaaggttacaaacgcttttctgatattttctttttgagttgaatctggctgtgttcatttagtcaagttgtg

SEQ ID NO: 42631 - DNA, 592 bp, Arabidopsis thaliana columbia
  unsure (1)..(592): unsure at all n locations
taacaaaaagatttgaggacaccaattttttctatgttctctatatttgtagattctgtaaactccagtgtaaggtcacaaaaaccaaagaaggaagctgttatgaaggaagaagaggaacaagattcttctgagaaacggatcacaaggagtaaagttgaagaggaagaagaatgagctaagtaatagtgtagcccgacgaacatcaaaacggttagctggtattgagcttgaaccaacgcctgaactgaagacaagagccaaagttcaacgaatagtaccgcttgatgatgaaccgacgcctgaactgaagacaagaaccaaagttcaacgagtagtaccgcctgatgatgaaccgacgcctgaactgaagacaagaaccaaaattcaacgaatagtacctcctgatgatgaaccgacgcttgaactgaagacaagaaccaaagttcaacgaatattacctcctgatgatgaactgacgcccgaactgaagtcaagaaccaaagttcaacgaatagtacctcctgatgatgaactgacgcctgaatttaagacgagaaccannagtcaacaaagaatacatcctgatgat

SEQ ID NO: 42632 - DNA, 462 bp, Arabidopsis thaliana columbia
tattaagtcatcctccaaatcatatttcactaaacttgcaaaaaatataaaaaagtatatatcttcataattaatgaatggtaattaacctactaaattttcattgatttatgtataatggttatgtgtttttatattacatatatagtttactagagtttaaacattccaacataattccactaaaactcaaccaaaaagggggtacaaaaaaagagaaaaaaaaaattaaatgttattgagtgatgggtagttaaagaacttatggtgttaggctgtccaaaaagagaagcagttaaagagtttggagtacaatgtcttaaacaagaaaatgtctgtcccattataacatctcgaaaccaaacacacacacacacacatataacaatctcttcttctctgacattacacaatggtggtttgagtttacagaagataataatggggaaaactagcaaatgg

SEQ ID NO: 42633 - DNA, 581 bp, Arabidopsis thaliana columbia
ctattatacataacctgcaaggctgcaactcaaactagtggtcatggacatggttttgatcatagacaagagggaagggaatgtaaagatttaaaaccttaaccatgttggaagagaggtgaaggatgtcaatgtttctcatccaaccaattgccatcgttaggttatacatgtggaaagttcttgcccgtcccttccatggtatatcaagatcacggcgggatcaacaaatcgaatttgactatttagggacatctttttatattttttaattacatcaacaatcctattactagttaatgattttttcaatagtcaaaagcctactctttcggtggacaaataaagaaaatctcaaaaatttcgaagtttattcaaattagctaatgacttttccaattgtcaaaagcctattttccttgatatataataataaagacaaaagaacccctgcatgtctaccagtatatatattttatacacacataaacattgttatattgtaaaaaaaaaatcaaacaaagaaacctgattaacacgtcacctctatttacacactggtacttttgttttgaatattg

SEQ ID NO: 42634 - DNA, 545 bp, Arabidopsis thaliana columbia
tgtagacaaaaagacaagatgtttccctaatatagaacggtctcttagctatcagacataaaagagaaaacttgagactaattgaccaaagtggtaaaaggggtaaaagtgtccacacattgctacaaaacaaaacaagaaaacacataattgaaaagtttcaagctttattatcaacctgttgcaggatatattctctctacgatgttttaattttgtctacaagcaataaccattgaatattacaccaatcatatctaatccgttacctatctccatatcatgaaattctaatatccaaaaattcctaaggaatataaaatgtcacatctctataattcacctacacataggtggactcctatgtaggtccagtttcataattcatcacatgagactgtatatgtgtgactggacaggcatggaggacacagagggttttcgcttcaatgagacactgatctgagtaagtcagagaacaaagacagactctaacaggaccattttcaagtaagctctgcaaaaacacaacattattgttttga

SEQ ID NO: 42635 - DNA, 217 bp, Arabidopsis thaliana columbia
catcttaatagctggagtcttctccttatgagagcattcctcttatttaactggtcatggttctgcggaggtaacttatctaactgtgtctattaactgagtgtgatgcaatatgattatactctgtgccatataccattttgtgaatgattgtgtgttaagctacagtgttaagcttgcttattacatgtgagagatgaaagcttattgcagagtt

SEQ ID NO: 42636 - DNA, 500 bp, Arabidopsis thaliana columbia
tcataaataaaagagtgaaatcggaatacaccagggaatctacaacgacaaaaagtgtcaacaactcttctttagcagactaatgcaaaaagttactcagaagcatcttccaataacatttgcccaagaatcacaaaaatacaggttattccatcaaaaaaaaacaatctctctccaatgaaaataaaaacaactataagaatacaaaccagagagtatcaaattgatcatcaagtgagaaaggaacctcaaattcaccaaaagactggagtctgtcgagaatttcccccatgggagctgagaaaacctataaagcaacaacaacaaggaatgtatgagcgagaacacacgtagtaaaaaaaagacaaaccggtcatcatggagccgtgtaatcggaatctgttggtcagtagaaaaacgcgaaagacgagcaacaaacaaacaaaaaaaagggaaaacagaacctcggagccgcatttcaccttcttttccatgacgca

SEQ ID NO: 42637 - DNA, 564 bp, Arabidopsis thaliana
  unsure (1)..(564): unsure at all n locations
ttttttgatgaatatgttataatactattatcaattcaattgcgttaatttaggtctatccgagatggttcaaatggcctccaccggcaaccaccacctcttcccgtcgtcatcatcatccctccctgatttctccggccaccaccaattccaaattccaatgacttccacaaaccctagtctcaccttatcatcatcctcaacatcacaacaaacctcagcttcactacaacaccaaaccctaaaagactcatctttctcaccactcttctcctcttcctccgaaaacaaacaaaacaagcctctctctccaatgtctgccacagctctcttacaaaaagctgcacaaatgggctctactagaagcaattcctccaccgctccgtcattcttcgccggcccaacaatgacatcctcctcggccaccgcttctcctcctcctagatcgtcttctccaatgatgatcaacaacaactaaacaacttcaacaccaatgtcttaagagagaatcataatcgtgctcctcctcctcttagtggtgtnccactagtagtgtggataata

SEQ ID NO: 42638 - DNA, 556 bp, Arabidopsis thaliana columbia
gtcattgaatatgttacgtaataaccacacgaaattaggcaaaagcgacggatgatgcatcaagcatggtctctttacaaaagccatgtgaagtatttgatttctaccgctaacctcactttattatttttatcatctcccttcttccacgtccagctgaattaattaatgcacgtcttcgaaacattattaaaaatggtcaaatctcaactcaatcaataccgattttaataaaattcaactaacaaccatttttataaagagctgtctttacgacgttcgacgaacattatgtatgttttatacttttatccgtttttattttatttttctaaatacttattttatgaatttagaagtgtgttacaaaattaaattgagattccatttacagacatacaccaaaaaaataaaaaaaactagtatctcatcaaattcttcccaatttatgaaaatgtaattttcatcaattaactatttttttaaaaaatatactcgtggaaaacaagaaatattaaaatgtaaaataacaaattattaacatgaaatgtgtttg

SEQ ID NO: 42639 - DNA, 471 bp, Arabidopsis thaliana columbia
tgaaactactaaattttcatagtttatttttcttcttttcgtttcactttcgaacaaaacactacgcgtggcatttgcaatgaattccacattatatggaataacaccatgatgaacattctacatatataattattatgtttaagcacttagacagcataaattctttctaattatataaatctaaccttgttacattgtacatctataaattacttgaagaaataacgagttctatttctttttaaaaattaaaaatactataccatatctcagtgattaagttgaaccaaaaggtacggaggagaaacaagcatttgattcttccttattttattttattcatctctcactaatgatggtggagaaaaaaagaaaatacctaacaaacaaatatatattgtcatacaaaaatatttctatatttttagttaattagtttatattcctcacttttcagggcttatataa

SEQ ID NO: 42640 - DNA, 531 bp, Arabidopsis thaliana columbia
tccccgcttcttttcccccagcatctatccaagatatatatcttccatacaagtgtaacatcgaatctttctgttcaagactatgtataccctaacaatagagcagtacacacagcaacttgttcatgaaccttctcgttaaacaccttacgtgaatcctctgttctttatgaaggttgcataaaacgttatgagcgaagtagggacatacttcattaaataaataaaaccctaacttgatgatgaagtcatgaactttgtgtaaataagtgaatgttcttgaggtcgaattttttcgactcttgaacaaatcaagagcttctccgctacttgcattctggtctaaccacataacattaattattgtctacctttaccaaactgaaaaaataaggaagcatcgtattccagttccacgccgcataatagcaacagagagaatcgaagaagatgaaaatattctgttattcacttaatgattctgttacacgatactctttatatgatagagtatctcggtttaatgtttgg

SEQ ID NO: 42641 - DNA, 544 bp, Arabidopsis thaliana columbia
cctggtatggtgtgagcaagagaccgaagaggaaaccgatgatgatgtttgcgttagcgtttgcatgattagtaaagatggaatagtgaagaaacaaattgatgcaggacgatgtgatttgtgtagtgataataggccttttgtttgcggttatgcatatgttccaagtctggttccagttccagaataaaacttcctagggttgctactggtttcaggattttttttttgtatgctctaagctttgttttgttgtatttctatcatataaagtttcaacttcaagtgttaactatgagacttcaaacaagggactttgttaattcaagtaatcactagtacaaaattgtattggttctaagacccttaccacagggtttccaaaacaaaatacatgttcttaaaaaaaacaaagaagacaaatagtttatagtagttttgaagtgggtttagataatcaaaccttttacctcttctgcctcttgtttccgctagcttttccacacggaaaccgcctttgaaatggtttgtcgctctgctgtgt

SEQ ID NO: 42642 - DNA, 338 bp, Arabidopsis thaliana columbia
aaaactttcaaatagggatttttatggtatatgattcatatatgctagatttatactagtaattccactgcaaaattatgatttaagtggatcattccaaatcaaaatcaaacagttgttaatatttattttgtctctaataaaatgaggagcatgatttgatgcagcgtggcggagtgggtaatgatattgtggcttacgtctaatcacttgtgtcaactgtttattatctacaatgcttcttaatcccgaacaaacctctaatccgatgaagtcgactataaacctgattattagtctcttacaacggtaccgactaaaatttttaaaaaagttca

SEQ ID NO: 42643 - DNA, 419 bp, Arabidopsis thaliana columbia
tgattttaaatgctttgattctgttatctgattgtattgggattaaagggatcaatagagggatattcggagttaagtcggataaaaagacagagatcgagggactggtgaagcttttggaatgtcggaatccgacaccggagccgactggagagttagacaagatcggaggttgctggaaactcatttacagtacaatcactgtattgggttctaaacgaactaaattgggtcttcgagatttcgtctctcttggtgatcttcttcaacagattgacattgctcaggtagataaaaaagaaattgatcagttcagctttttagtgatgacgtttttaatgtgtttctttttcaattaacgaagggcaaaacggtccatgtgttgaaattcgatgtccggggattgaatctactcgacg

SEQ ID NO: 42644 - DNA, 467 bp, Arabidopsis thaliana columbia
tcataatcaaacaagtaaaagtcgaatgtgacgcgtcttgccgaacgcaaaaacggaccaggcaagaaggtgtagttagttaattcggttaatattcagctgagagaaatcgaaccggttccatatcttgtagattatccggtttactttccggataagatttataagcaaaacagagttaaagtagtagatttcttctatacgagaccaaatctgaaaacccaagtcaagctacaaaaacttaactccaagcgaacaaatctcctcattcattaaacaacaaaattgttttccgacaaaaaagtgaatatcattgagttactgcgaaatcccaaccgagagtgacatctcaaaccaaaagatggagtctatattaaagagacgaagactccaaagtcaagctacaaaattttcaagcaaagattacactgagaaaactttccgaccaaatgtgaatgtttatgaag

SEQ ID NO: 42645 - DNA, 512 bp, Arabidopsis thaliana columbia
aaaaaggtacgatgttgtttataaaaaaaaaaaaaaaaaaagtattaattggttcttagaaaatgttaacgaaaacaaatcctagaggttcactttcgttggctactttaattatgctaaaaataggcgtctatcgagtgaaaagtatagattgtgacatagataccgcaaaacatatatgttttattccaaaacaaatacagaaaaaatgaaaataatattaatgatgcaaaaagtgaagagtaaactaaaattgttcccgaaatgacgcacgtccacatctgttggaaaaaaaaaacatcagtcatggatctattgtcttcgatctctatggaatgatcattatcgtttactttacgtcaaatcttattatgaaagattagtttgcatggttaggcacttcccatcaatgaccagagtctcctgcctgcccattttgggttctggccgggtaactcaaccacatcccggagaggtcagcaatcgtgtttcgctcccaaaattccggtggt

SEQ ID NO: 42646 - DNA, 551 bp, Arabidopsis thaliana columbia
atctaatcttacccggttcagattgaaaccgacgcaatctcaagtaaaccgatagaatgacgggagaacaaccggttgagcttttggagtttacatcggtttattactttcttgttattttcttaacccattggttcatcaaagtgattaaataaaccgggattatccggattttaccgctacgttccttccctcccatttgtcatcttatcttctgcgattactggtaaagtgagaaatccgttaatccctagagaaactgtaatcgtcgcggtgattcggagaaattcttctgcttccgcggaaaatgtcactaacccagatcgtgaatccaatcatatatccatctcgcacaattccacggcgtttcacggcgatctcgccttttaaaaccctaagtccccaattttcccgacaaccacctcacgcactgtctcgtagactcttccttccttctgtttcctctatatgggatgccataaccggcggcggagattcgaaccctcgtgaggccatcgcagcggttcgcgcggaatgagctcttcagacag

SEQ ID NO: 42647 - DNA, 438 bp, Arabidopsis thaliana
tgggataccctctttgtcctggatcttggctttcacgttatcaatggtgtcagaactctccacctccaaagtgatggtctttccggtgagagtcttcacgaagatctgcatacctccacgcagacgcaagaccaagtggagtgtggactccttctgaatgttgtagtcggccaaagttctgccatcttcaagttgttttccggcgaagatcaatctctgctggtccggaggaatacctctttgtcttggatcttggctttcacgttatcaatggtgtcagaactctccacctccaaagtgatagttttcccagtcaacgtcttaacgaaaatctgcatgccaccacggagccctgagacaagatgaaagggtggactccttctggatattgtagtcagcaagagttctgccatcctccaactgctttccagcgaagat

SEQ ID NO: 42648 - DNA, 583 bp, Arabidopsis thaliana columbia
atcttcaaatttgacgcaataggattgaattcgtagaagatgagggtgacattgatatgatagatgcctgtgtaaacatcgttgactatgttctcaagcatcattgtgacatttaaatcggatctcataaagagcgaggaatacctagagacgtctttccgaacattccagaagattccggatggactcggctccgcgtactggtgcgaagtagctccactccgccgagccacaagccggagatacgatcgtactgatcgccactcgaggcggcgcgtaggtcaagtacaacataagaccacggcggcgatatgcagctggaagggggagtgtatggagtggtaaaaggaggtctgttgatggtgttggcgaatgaatggcggaagaggacatgcgagcatgacggcgttacgtgatcggacggtaggggccgcctgagctcctcgtactcctgaggctcgaccggtgaccggagacaagtcgaagccgatctaaggaatcgatccggcgaggaaggacgagaaaaggcggtacgagtgagaaaaagcaagtgtgaagaagaacttatcggcgccggttttga

SEQ ID NO: 42649 - DNA, 403 bp, Arabidopsis thaliana columbia
caggaatatctatttccttgttctcgaatttgcagtgttatgagtgaattttgctggtgatggttatcgcaggaacattttgttatcaagtacgagcttatggaaaagagaccaagcttgctgcagctttgacgacaagtaggtttgttcaattagtagcatcttgacaatgtaaagctgtgtctcttcatttctctttctttcttgctttcatgcaagttctattgagtagaaactcaaaaccatgacatatcacattttcaatttttaaccccaagtttcccaaaaaggtaatcacaattactttccatggtcatttcttctggttcaagcatgacatgaacaggcaataaataagttgagattttgatcacagtaactgatacttgaatcgaatcattta

SEQ ID NO: 42650 - DNA, 495 bp, Arabidopsis thaliana columbia
tttttccttatagaatatgtggattattttttattgttcacgtttaggccatgatattgttatttctttattattatatccctctaatctctattgtatcgaaatgtgatttccttacctgtcaacgaatatcttgatttggaagaagatatcagtactgactgtattattgggatttttataagctttcttcttgggaagtgttttattttgttccataaaaaggagggtgataaagcttgaccgtaccataatatagtctactaaaatgacgtttaaagtaaaaaaacgcatgataggatagtactggggtgtatgattgaatccgctgtaccagtcccattttttgtgttagtcttcaaagaaactgtatttgctcgtggtaagaacggtattgaagattcaaactttttgttaagtttgaatctgaggaaatcacacaaatttgttatgcttgtgttgcgttgtagttagcttttttttttctttttttgg

SEQ ID NO: 42651 - DNA, 560 bp, Arabidopsis thaliana columbia
tagaggatgtttaattaatcaaataaatgagttggcttttttttttgggtcaaataatgagttgactttgctatccattaagttaatggttgaaaagctcgattacatgaatttgatgaatagttttacagacaaaaatctgaataaagctatatttaaaaattttaattttgtttttttttcctcttttttctttacaaaatgcttaaaaataattaaaaaatgttctagaaattttagtatgacttttatatattattattatttgtgattatacaaaagaactagaaggcctaaatgttttatttgcataaagcattcttacatggcggaccggttctgcatgcagacgggaactaagatgacgccgccaaacataagcgtcaccaatggtggacccataatgatcgacggaaagccggtgacggggccgttagattcaccggtggttatagatgctctgaagaagacatgattggaaaatcaagaatacagtgaagtgatagttattaatagtatataataagaagtccaagcatatatatatataagcatatatc

SEQ ID NO: 42652 - DNA, 432 bp, Arabidopsis thaliana columbia
tgatgatcgagtgataacagcctttggtcgcctgatgaatgcagtgataagtcctaatggtagacatgcaataccaacaccaccaaatatctagaaatatttgagagaacaattagttatcagattttttttactgacatgtttcggtcatacatctatttacttcaatggatactggtttatatcttgccatgcatctcatctgtagacagtacgtgttagtcaatgcagactcaacaatattcgacagattagatcctttcgtagctaacaatgcacttctcgacctgatagaacaatggtcataccgtgcaaagaactgagtcaacaattgtcgcatgagcaactgcatattctgggatagtagatcgcatagtccatgtcgtctcagatgtgggattagctgtaaatgcagagcactgcattgatagc

SEQ ID NO: 42653 - DNA, 347 bp, Arabidopsis thaliana columbia
atttcttaatctaaatggaaatttgttttctctctgtctttcacaacatgatcaacacagagcaaaaaacagtttctggcctaattactcataaaattggctctgagggaatattacaacaacagccagatcagacgatggcaaaggaaagcctctatctgcttatgaattgtctgtgtcgttatcatcacccttaagtactataatctaaggatttgtgtatcgttggtctcattcatcatacatgtattgtgttctctcaaaagatcctgaacatacaatctcataataattcttcaacacagacgagaaacaacttttgcaaattagtttaataaacctagcag

SEQ ID NO: 42654 - DNA, 376 bp, Arabidopsis thaliana columbia
caagtagtagcaaagaacctgatgatcaggacaacaaaccaacaagttagtacgaatcagggaataaaggcttttcttgctagataagttaatagtcaagattgtgaatttcaatgggtaaagtcatcctacgttcacagtctcacagataaatttataacacatttaataatagattttttagaaatttgcaaaattaagggatagatttggcacaaactcattaacgtcacacagaatatgtaaaaaaattaaaaggacgaggcagaaaaagatcatgttgttttctaacgtcgatacaaaaaactctgatcaagttctctttagatgtgtatgtttattaaaaaaagaatgccaaaagagtcgacgcatagag

SEQ ID NO: 42655 - DNA, 495 bp, Arabidopsis thaliana columbia
gagtgagagattagatgaattgttggaaaaatgtaacatggtacagaatagcatagccgagaagctctgtatttacttctgattttcgtcagccctttttgttaatgtttgttgttgttgcatgtcagtttttgtcaaagaaggtattttgcttcccctacacgtgtcatcatcagtttggtagaagttttgtacttcactgaccattagtacattattactactagtcttatatgttccaacactcgcactctcggcgcgtgaacgaaacccatacacttatgtattatgtatagagaagaaataaagcatgcctccagcgagcgcgtgtgacccatcatgtttataattactaccaagttaacatgaaaaacttcttgtctaaaaccctaaaccctatagatacgcgtaatctatcagagaggaagaaggagaaaaagatagggtttgatgatggagaaacaagatggagaagatgtgaagagcagacaaaga

SEQ ID NO: 42656 - DNA, 570 bp, Arabidopsis thaliana columbia
tacaacaaacttaattaatgtctctctattgcattagatagtttcggagcatatccattatgtgaaagccacattaagttataactaaaagtagttttcgaaagagcttaattaagttatgttctgtttcaaaaaaaaatgaacacgaggatttttttttttttttgacagatcattattaacaaaaatgattacctgaagaaaggggaaaataattatagctgattacagatcattattaacaaaaagaattcttgtcacatcatacattataacaagaaatattatattatattaatttaatctttcgctaacacgcccacaatatattaatcatatacgtaatttagcttataaaaaggacggaaagagattattactgcgcctaaaaaactcactaattccaaagaaaaaaaaaaacttgtattttttcttgacaaaccagctcacaggcattgcatgatcaaactcatcaggtaggttttgattcctcttccataatttcccatcttgaggaatcaaatttggagagcgctttactaaatcctgccttcattttttcctttggat

SEQ ID NO: 42657 - DNA, 575 bp, Arabidopsis thaliana columbia
cctggtgttttcacaaaaactacgtacagtttctgttttcctttatgagttgtcacagttttatctatttgttgctgtcgtatatagcttgctgctgctgctgcacggaaaggagtacccgctgtagacaggcagaactccgagactctatattatgcagacgatgaagacggcaatcgtaaaaagtactcaagaagaggtgggagaaaaaccttatcgttcttacctctcttgtctgttttttgctttactacaagacttacgctagagttgtgcttctcctttcctcttattgtttttgttttctgagatgcatgtgtctgccttccattagacaaactccacttttgtatgaatctatagcattgtcgcgatgactttgactgattctcattttttttttcatgtaaggtcctcttcgtcacaagtttctacgagctttactacctttctggtctagtgcattaccaactctacccgtgacagcacacctcgtaaggatgcagcaaaggcagatgatggttctgaaggtcgtgtaaggcatcaacgatcatcaaaaatggatataaggaaga

SEQ ID NO: 42658 - DNA, 559 bp, Arabidopsis thaliana columbia
tcaaattaatttaatcgatcgactttatgaaaaataaaagtaataattaatctattacaattggaaagaacgaaaagatagacagtatagcaatatacaacatccgactagctctcgatcttgtctgtattatcgatacgtaaacgagtggtctttctacggtattacctttgcacataaacatttggtttctttatcaatgaatttaacatttataagaaaattaattatccatttatgaaattgtcatatttacctccgacagatgttgtattcgaacagatcagtcaaaatgcatcgtccgaaaccaattggaatttataagtattaaataatgataataaaaagccatgactaattaatttatttataactatatatataacgcccgtagacacgagtgtactctcttcgtttgccaccattgcatgaatacatcctaaaagacaattctaatgtgatatttgacttatttataactggcctatagaggttttaaagacaattttctcttatgctacaacatgcattatgcatatttatatttcaaggtgatgta

SEQ ID NO: 42659 - DNA, 591 bp, Arabidopsis thaliana columbia
gacatgactaacaaaattcatgtctcaatcagactaatcgatcattaactttatagattgcgcatgacggaagcaaaagaaacaaacaccttctcaaagtttgcaattttagcctcgtgaaactttatactctttcaaacgcaaactccctttttaaaagtgtacattcctaaaatagaatatctgcttttatgaatttttgcctccaataaacttgataattaattgatatctagccggcagctaaatctaaaatttctcaagacatcaatccaatttcatccttagttttccgggtacacattttttccacacaatctacgagagaccgctatttaatcttacatcaaaattatattattgcactagttaacaactgggatagtttaaagcaatggccagtgacaactgacttaatcctacctctttcactcctttttaagaaactttacaaccatttctccggtcattaagtcttgctagctacaacataattagacatttaacttttaaagatatcaatccatccttccttcaatatacctagtattcttccaattgttgtttgtgtaatgaggtatatttttttgt

SEQ ID NO: 42660 - DNA, 525 bp, Arabidopsis thaliana columbia
tactttatcgattctttgattcaagaaccctaaactcacgaaacaaagtcgtattactcaactacgatgccttgtcattgccacgatgtcggctgattcatcgccgttaagtgattaactaacaccgttttgacatatgttgattttggctattttcatataggttaggttggaaatttaaatttttagtgagtttacattgatattttccgagtatcgtagtttgggtattaaaaaatcaccagaaaatagtccgaattgattttggttattttcccaccattagtacgtctgttcatatagcgtccaagttgttgttaaagaaaccgcaaaatctctaatgtatgtggcctgttggaagatgagtgagcgagctctcacgtctgtaagaaaacctattaggaaaaggtgaaaatgtttacacttataaaagcccaacccaacttacaatatagcccaaatacaaattttagtgaaaattgacatatatgattgagagatttgagaatttctccggctgtattg

SEQ ID NO: 42661 - DNA, 474 bp, Arabidopsis thaliana columbia
tgtatctggaatatatttataaaatctctttctgcaaaattattattctgtcacaaaaaatttgggttcttctagtctaaacctaactagttgttaaaaaaaaactcaaaaaacaaagtcggatcgtgtgaataagttttcatacaaaagatagtttgatcaacaagtattttgatatatacggtttgacctgattgatttggatctgtgttccaaaaggtcacaagacaacgaggaataacataaactcattcatacgtcccattttcaagttcctctgagaaatggaacaaattcggtgtgatatgttttgattgactccacagcagcaacagcattagcttcttcttcgggataataagcgatcggatcagatagatgcggttctggaatcttcagcaccccttcgagcatggcgtggaggcagtaagctgcatatgttacatgatacccgccttcttgcaccataagcaa

SEQ ID NO: 42662 - DNA, 352 bp, Arabidopsis thaliana columbia
gtgaataaatatcctgtccaactagctcaatccccctccaacacctcctgcaccggcctcgtctactgatcattccctcaacatgggtaacatgccatgggccaacaatccttctgtctcaacacctgatcactcacaaggtcttgtcaatgcaccttgggcacctagtcctcctatgacacacactgttggccattcacagagcatggcgaacgtaccatgggctcgcaaagctccagtacagcctcctgcagacaatccatcctctgtcgcacagtctgactatgagaagttcatggctgacacgaagtagcatgcgtgttctgatgagacactccctagtgcagaggta

SEQ ID NO: 42663 - DNA, 283 bp, Arabidopsis thaliana columbia
aacgtccgccagtgtgctctaaatgtgtaaacgagtataaattccacattatccgggagtaaaaagctaaaccatcgtactatgtcttggacagacccactttcttgaatccacagaacaagagtagatcaaagttcgaacctttgtaatcttatacataatgaaaacttagattgatgatgacaaaaattatcaaaaacgaatgcaatgcttgagcttaggaccaatccatgtcttttatttacaaaatagattcctactctttccttccctcatacacaca

SEQ ID NO: 42664 - DNA, 499 bp, Arabidopsis thaliana columbia
tattaagtaataatccattgaataagaaaataatcatagaagagtaaaagacaaagcagcaagtatcctaagctcattctcctaaaggtttcaagcttatgaataacatataaccaaagatgccaaacatagaaaggaacaagaaaatagtgtgacattacattaaaagatcaagccaatgtccaaagaacgaaagaacaacctaactaaaaacacatgaatgaaatatggaaattctctaaattcggattataagtacttagtaatgccatctcgcattagcctatcaaagccaacaatgaagggattgagtccaaatttgaagatgtgttcttgttgtcagctgtggactctgaaatggtacgacctctatgagtagcagtagctttggctctcaattggacatgcgagacgccatcccgcagtttcagtaccccaacttatgattatgatgatgatcaaccgttgatgatgttgctgatgatgttgtagatgatga

SEQ ID NO: 42665 - DNA, 485 bp, Arabidopsis thaliana columbia
cttctctccctaagcaatggatacgacgaatgtgcaacaacaaccaaaaaaaatcccagctttactgaaacaaagaaagactctatttgatccggagggttctcatgttcatggggggtccatgtctcacgtgtgagcacttaagtttggtggagtggctcgttgcctcgtgccgtgcattgcctttggtttttattagcctcaaaagttaaaagcagaagtggtagagatttgatgggcaataacatacttgactgcagttcaacctatgctgcatgacattcatgtgaacatgtcatggtaactttgttttgttatgttactgtttttgtaatccccgagaatgtaatcgcattgcaaataagatagctcatcatattttaactttagagacggaggcctagttttgtttcgttttcaatgaagaaggactgtttgtcgagctttaaaaaacagtgttgtcgggtaccttcataggttgtaga

SEQ ID NO: 42666 - DNA, 260 bp, Arabidopsis thaliana columbia
ggagtggtgaaggtcagaggattccttaacccaatcataaacggtcgggttggagctgctatcctccggacgactcccaaagtgagcgatctgcagtgcaatgttgtcatcccagattcgctagcagactggaggcctgaggcgggcagggagaatgctcgatcaaggggatcgccttgagatggtgttgtggcgtcagcgcgtctgtcgcaatacgcccagcgatcgacaggtcgagacgaggactcttccccacccca

SEQ ID NO: 42667 - DNA, 500 bp, Arabidopsis thaliana columbia
caatgacacggaccttggagaccactttccacacaaaatccatattttttaacaaaccgacccagcccaccttctcacgaaaaccacctgtaccaacagattaggcacgattttaaaaaaccattaaccaaattttatattattaaagaagatatttaatttatagaaaactattgacccaaccttatccaaaaaccaataccacacgtcaaagccacactatatataccagttgcgttgaataacatctaacatagaaccaaagataaccgaacatcagaggtagataaaccggagataaccgattaaatggcggacatagcgattttggtggcggaggagtacgagaggaggatgaagcatacgacggtgggttcgagatcatcgccggtggaatttgattggtggaagataattccggcgaagatgactatagcttttgacaagatgaagattgagagtttgaagaagaattttgaagctaaatctgagtttgcttt

SEQ ID NO: 42668 - DNA, 573 bp, Arabidopsis thaliana columbia
tttagcccgcacgtgacgggtggccagtttgtgtcttgtggttgtcgcgcgtgcacacgtgtgaaccccttcttttttttgttttgttttgtccgatccctatacagtaataatcttccttcctcacgtcacctgtgggctccataagctcgagaaaaatttggcaaaggaagtagtaaaatttgctccattaagatttttttcttgctccattattttctttgaaataactattattatttttttggtttttgtaaagggtttgctacttaagtatgagaactaaaagttttacacaagaagaatgttcaaaatttagccttgccgaaattgtgagaccaaattttaaagctttttaatgtgtttaaattattttaatcataagtttagtaatttaacaacatcaaaattgatatttggtgtacaaatttattgatactatatataatcaaaaactaaagtaactttaaggaaaccaaaatattacatgaaaatttgcccaaaataagttatagtaaacaaaatttctctttatgtttagatcagttcggtgttatcttaatagtagatgac

SEQ ID NO: 42669 - DNA, 507 bp, Arabidopsis thaliana columbia
tcggccgttccaaaaggttgtattcatcctgactccggtggcttatggcccaccgtaccatcactgttgttggttggtgttgttgtagcatttgatcctctgtttgttgttgaagaacttcccacatctgttgggacaacaaaccagtcacgtctctcaaacacttcagattggcctctcttgcgcttgaagaactgctcttgtgtgtcttccatagcaaaagtatgacgcatagcattgtagactaattgaggcgacttgatgtcttctggaactgaagagggcggtggaggagttttcctcttctttgagcccgacggcgtttcagcggcattagatgccataggatctcttttttaggcgtaagtagatcatcagggacatctggaaaccggtcttcatcatcgtcgtcatcatccgccggttcgtcaggggttggattttcttcatttgggcattcacggcgtcgtgactcacattcacagagggtatgaaattcgcagtttt

SEQ ID NO: 42670 - DNA, 472 bp, Arabidopsis thaliana columbia
gggagtttgtctgtgatctctatggaaacatgcatctacttgtgtctttttaagtttgaacagttcttctcatatatgctgataaattattttccagtttttatggaaacatgaaaccttatacgtgtgtgtgcgcgttatacaccaagaaagagacaagttgtctattcacttatgtacagaagaccaaagtgtaatgtcttgtagtatatgactacgaatgtatattttgtaatattattttgtactaccctcaaaataagtcaatggtttttcacaatgaagacatataacaacccatcgccgtaagccgtaaatatatttatttgaaatgtgtgtttaaatatatatatatatatacttaagactataattcacacttgtatttccccaattatatttatcccacatctcgttgttgtgtgtatgtagagaaatgcagaatcgggtcgggtcctcaaaacgagtggta

SEQ ID NO: 42671 - DNA, 591 bp, Arabidopsis thaliana columbia
taaattcatcttcaagctgagacatagccatctgcaaagcactatcagctctatccaccatatcaggcttattctcagacgaaagatcctcaagcaaagagataatctcatcaacagctgaaagaaactcggtagcttcctccggagattcatcaaacgaaagagaaaacgaagaggaacgatagttaccagaagacgaagacgagtgacgagaagaatcattaccaccatcccaccgatgaataaccgattctgcagcctctaaacgcgccacaagagcgtcgttttgattctcttcctggttcgtcatcgcggttttgatatttgataaacggttatcgaagcttgagaagataagtaacatatcttcacgaacctcttttggtgtgttgaggcttttcatgatctgttgcgccgtagcgagaacacggtcttcagctcccccaccaccacctccggcttcggcgttgatactcgccgccgtggttgttgttgcggccatctatggagaaattcgaaaagggagaaatcaaaatagagaggtaggtgaatcagaaagatgaagacatggatcgtgttgtgagatttaga

SEQ ID NO: 42672 - DNA, 548 bp, Arabidopsis thaliana columbia
ctagattaatgcatgatgttttgcgattaaagccagacgagttgtaatatccacagccttgataagctctacatgcagtgaacaattttatacatttagaaaaaataatcactatctcgaccatatagaccaggccactacattacagctaatctctggatttacttgataattaagacaaatatagaacattaaaatactaactcgatgcctcaccttagcctcctctcaaattgtcaatatctagatggagtgttacatccacattcctaacagtttttactctttattttaatatatccttcaacagatcatcatcagaataatcatcaaatcattattatatatttaactagcccaaattgtaccatacctatcaatttaaatttctctttctatctactataaaaagtgactctctaagaactccaaagattagaacattgaattgaattagccatggagaagaatacttctcaaaccatcttctccaacttttttcttctccttctcctttcttcatgtgtctctgctcagctccggacagg

SEQ ID NO: 42673 - DNA, 550 bp, Arabidopsis thaliana columbia
tgcacatcatgtgtctcagcatgctagctgcagggtaaaaacgagtgtaactctaatagtttcactggttcggaaataacttttaccatggattaatgattgattagtgtgtgatgcaaagtttccttcaaaattaatactcatcgaattgtcatatgactcatatcgtgtagtattttttgtttttttgttaaacatcttgttgaatttttccaacatatatattgttgtttgattctgttaatgtgaactatgcatttatataatatttatgaaataatattctatccaaaaatcaaacatatgttaaaatggactcattatttgtatatccgaaaaactgaattcgaatttgaatcaaagcaaaaattataaacttatctatagctaaaacctccatttatttgaaaactaaagatatatttgatttaaaatcgaatacaaatcgaaactgttatagaaaagagtggtgtgcttaaacccatggtgtgtggtcgtactaaaggaacgtgcgaccatgaaatagacacaaatactattaagaagaaga

SEQ ID NO: 42674 - DNA, 287 bp, Arabidopsis thaliana columbia
ctgatgcggtggaggaggtgagctgtagtagtaaggtggaggcggtgagtgatgcggtggcggcggtgagttgtagaggtaaggtggaggcggtgagtgatgtgggggaggtggtgagctgtagtagtaaggaggagggggtgagtgatgtggcggcggtggagaagagtaatgtggcggcggaggaggtgaataatgtggtggtgggggaggcgagggacatggcggtggtggaggacggacgcaataaacttggagctggtggtggtggagaatgatatactggc

SEQ ID NO: 42675 - DNA, 389 bp, Arabidopsis thaliana columbia
ctgtggcagcagctgaaactggtatgcttttctcgatgatatactagcgacgttatcggatctttggaaggaatctaaagagttccgagcgacgaaaatcaactgactcaaacatatccccccaactagaatgactcgtggactttgtttggtttttgtgcttttttcattgacattggttttatgcttttgcaaagtaactcttatgcctccagtaccatcaccttagtccaaaaggaagtccacttttaaaaaattcaactttttcacttatacttgcacttatattttctgaaaaagaaatagaattaaaattactggtagtgacttgttttggcggcctcaatatacacgtcgtactgtactcatcctataactacattacatca

SEQ ID NO: 42676 - DNA, 402 bp, Arabidopsis thaliana columbia
  unsure (1)..(402): unsure at all n locations
nnnnnnnnnnnnnnnnnnnnnnctaaagcatgagtgtataatagatcacagaagcgcaatactatttccccaacactggattttagtgtgatactctatacaggcgagatactagaaacgtgccagtcagtctgcctggctagtcatctgaccagtnggtcacgaggcttagcctgtttgctatgtttacctaactcttggttaacagttccgcattgcgtcattaagcagaagtccgcaaacaatccgcagggttttgcggtcttggattccagaccaaacccgcaccagcatgatttgcggtcttagtctaaagaccatgtccctttggttttgggtatggttgcggttagccatggtctttgcggatagtgccgccgtatacacgctacattccaggtc

SEQ ID NO: 42677 - DNA, 1025 bp, Arabidopsis thaliana
  unsure (1)..(1025): unsure at all n locations
atttcagtaactctacaattaacacacaaaggttgatgatgctttcaaaaagcacataaaaacaagtaaacaaatcgaacctgaagcatctgcattaactttggatgttgttccagtagctgacacagcttgtcacggtcacttaatagagcctgaagaggagttttaagaattatggtcagctgtggcacgtaatactactaaacaaaacaaatcagcgtatcattcattaccaaggatgtggattacaaacctgaatggcttcaggggacttgaagtaatcatgtaatgacattccagattcttgttgctgggaagtccagctccttgctgaccttgaacagcatgatgctgttgctgttgctgcacctgggagatctcttgttgttgaggagggtgatagtaaggctggacttgcgtctgttgcatcagctgcatctgatgcattggaatctgaaatgggttttgcattgatactccttgctctgatggttgagatatctgtatgggtggtctaacgtgctgaggaggctgcatagggcgttgtaattgtgaaagctgcatcgatggcagctgagggatggactgtgtattgagtgattgaggaatggaaggaaccaacaacatagtttgcggcttatcacctccttgatgcgaaggatttccatagaatggcacagggagagatgatggcctgctaaaattatgggatggcattaaatttgggggagggtaagacgtcattccggtaacagatagattgccagactgatgatcaatggttgggccactctgttgttgttcagtggtacctacgcctgcgtggttgtatccaaaagattgaactgtagatgtccttggtggtaaagatgcatatgggttagatgagtactgaggaattgctgaagggagcggtggcataagccgggtgggtcctcctgaagattgtgtcccatgactaataaacggggaggattgattaganagagaatcagaagaatgtggtatccaggtgagactgatgg

SEQ ID NO: 42678 - DNA, 231 bp, Arabidopsis thaliana columbia
catgattgatacaactaagaaagacgtctacaaaattgttgagttgatgaatcgagctgcattgtcgatatataataatcattcaaattgtcaatctacacctccgttacagttgagaatgagattctaccatgctcgtgtgtgtcgactgatattattcaaagggtcgatcgactcctgactaatctgatgaacgactgtgattttcactaagaactgcgttgccacagt

SEQ ID NO: 42679 - DNA, 573 bp, Arabidopsis thaliana columbia
  unsure (1)..(573): unsure at all n locations
nnnnnnnnnnnnnnnnnnnctaaagaagtaacctcagcaaccagcaatgcaggcgggagtttattgcaagtatacttatccaatcatagaccagcccgtttcgttatcttcacgtttatactcatggaatatgccaactgacctacctgaagcgtggaccacagcggctgaccatactcgttatccctgactgcctagagggggcagctatatggacgtcacttgaatgtataactattcactgcaagagatcttcagcaccacagacccagccatcatctggcttctacggagctcaagtcaccagccaaggcccatacccaagacaataccttcatgaatgtcgacctatctagcaaactgcagtggttcagcatttctttcgtgatcaacaagttcaagagacctttccacagccaagcaacattgcctttgttgatgtcggcggcatcggcaacgcccctcactcgttgcgagacattgaggggagtttgcacaatctcttcgaagttgaagcagtcaagaatgccagattctactccttgtcgaatattgaggaatgcgtagtaataa

SEQ ID NO: 42680 - DNA, 598 bp, Arabidopsis thaliana columbia
  unsure (1)..(598): unsure at all n locations
nnnnnnnnnnnnnnnnnnnnnctaaagtagcaatgctgacattcccagttgacgttcattgtcgggatcctctgcatgatcttcgtggtcgacttccccgataagggttacaacacttggggcttccttacgcagcgagaatgcgcattcatcctccgtcgactcgatcgagatcgatcagacgccaaccccgagccgttcaacctcgtcaaatttcttcgccccgcattggacctcaagatctggggatttgcgtttatcttcttgtgtgtcacccccagacgactatctctcctcggactaacagtttaatctagctccatcacaacggtcacgtacggaatcgcatacttccttcctattatcctccgcgacaatatgggcttcaacgtggccgaagcgcagtgtctaaccgcgccgccgtacgcactcgccggtatccttatggtgagcacatcgtgggtcgcaacagataccgcatgcgagccccgatccttgtcttcaacagcgttctcgccctgatcgggctgccgatcatgggctttgcaaaagcgcggccgtcgctatttcggtgtgttcttgacaacgcgggagaaat

SEQ ID NO: 42681 - DNA, 539 bp, Arabidopsis thaliana columbia
cgattgctcctatggtcattacaccgcaaataaggtacacaatcttagtagcaaacactaaaatcagcactagaaacgccgaagtatcaagcacataaccaccagccccggtattttcagcggaactcggtaaggtctctttagctgaggtagttttcttcttaaccaaatgaaagatgcaaactctagaaacatccctagagtgtacaagaaattcgccgaggatatgatgtctgtgaagttcatgtacgataacccgagcgacatgagagctgagattagaatcccgacccaaggagtgttgaaccatttcgaccgtaccccaaagaatttaggcaagaaccctaattccgccatcccctccagctgataagcactactgcttaactgagcttcgaaaagtccaatgctcgataagacagcaccaatctcaatccatattttcaaccatttccctgcaatcatctcagctgcttctgcgtgaaacccgttttccatctgctctgatctacgagaccgcaccgtgacagcgagaagag

SEQ ID NO: 42682 - DNA, 598 bp, Arabidopsis thaliana columbia
taatagcacatattgaatattcatttatatttacttgtatagtcaaaccattatcttagacaaccctaattaacatcaaatgtttagtccttcgttagttatcacttaccactctgcattctataaattattaagtagaaccacaagtctcgttgcttcaatatctccaataacacgtttctctctttctctgctagctctctcatccttctctctatagatggagggagttagggttcctattgcttgcgctctaattcttctcgcaatctcttccataacttctgcctccattgtggaacacaccttcaacgtaattccctcctatcttcttcctctaatattgatttatgatggcatgtattttattagacctatttatagcactacataaaaaactagatatattgttttattgccattttggttattctttattggtttcaaacttataacaagatttttctttgaaaataaaattgatgtttttagcaaatgtttcgattttatttggttaaaggggtgaatctttttggtttgttttggcaaaaaatgtgtgacattcagtaggagtttatgttacgaactagtaagacca

SEQ ID NO: 42683 - DNA, 544 bp, Arabidopsis thaliana columbia
ggataatatccggaagctgtatatgcatttgccactttagacctcacaataattatttcttatgatctcatagtgaatcaatcacatttttacaaacacaaataataagatacatgctctattgctcttgagagaggcacaaaaagagatatgctgctgaattccatatatcataatgagctatgattctatgaataaaccttttattttcttccactttatcgtttgttctcgcttttttttttcccctttgtttgttcaaagcatgctcgtgcctccgaagttttgatttcatgtggtcaccatatataaagaaatagttccttttatcttctcaaattaaagaaatagttctttcttctctgtttgatatttttattcacactttcaaacacgtctcctttgtggcagaccacccaaaagttcaaaagccttactattacttattttcattattattgataccaactaataatgactatataccatcaacaataagtttttagttgttgcaataaaactgcacaacatcgaggtgggagtg

SEQ ID NO: 42684 - DNA, 694 bp, Arabidopsis thaliana columbia
tctatttgagactttatctacaagctagctatttgaacatctaactaaactacgtatactcaaattcgtaggtaatttgaactaaaatttcaatttaacacgcattactgcaacaatgaaattcaattattgactttgttaaagatttgttcctcatatcatgagttaatcatcacatatgattttgtaacaattagtaaatacatattcatgacatatatacaagatttcatttaaacatgtgctgaaactaactaacgtctaaccctcacatccagaaagccggaagagcattatatttgaatattttttgtagtaagaaataggaaaacgatatatattaatatgtgatagtgattaatattaaaatgattgtaatagtattaccttgtagctattgcatgaatcatagtgattatataatgatatattgcagaaaatattattggaagtaattaagggacaatgatttcgttatgcactgcaaaggaacgttctttgtcagtcccgagaagtatcgtcttgctgcctaatttataatacaaaattaatatttcttcataaagttactaatagtaatagtatttgttttcgagtgtgtgtatgtatcagtatacgtaatacgagtagtggagaccaacccgctaagtatattagattatgtctgcgcaatgcatgaaagatctttgataat

SEQ ID NO: 42685 - DNA, 914 bp, Arabidopsis thaliana columbia
atgatatgaaaacaagttgaatgtttggaatcactaacaaccgaagcttgatccaaaatccggttagtttcatatatctttttgtaaatttagtatcaaacaaaataaaataaaaaaaccaaaaaaaactttaaaaatttcaaagaaaaaactttgattctaatctgtataaagatgatatgaaaacaagttgaatgtttggaatcgctaacaaccgaagctggaaccaaaatccggttagtttcatatatctttttgtaaatttagtatcaaacaaaataaaagaaaaaaaaccaaaaaacttttaaaaatccgaataaaaaactttgataccaaatctatataaggatgatatgaaaacaagttgaatatttggaatcactaacgaccgaagctggatccaaaatccggttagtttcatatatctttttgtaaatttagtatcaaacaaaataaaggaaaaaaatcaaaaaaagtttttaaaatccgaataagaaacttcgataccaaatctatataaagatgatatgaaaacaagttgaatatttggaatcactaacgaccgaagctggatcaaaaatccggttaatttcatatatctttttgtaaatttagtatcaaacaaaataagacaaaaaaaaacaaaaaagctttaaaaaatccgaataagaaactttgataccaaatatatataaagatgatatgaaaacaagttgaatatttgaaatcactaacgaccgaagctggatccaaaatccggttagtttttatttacatctctttatgtagattcagtataaaaataaataaaattaaacataaaaaaaatcttttaaaagtaaaaatcttttattacagaaaaagataattaggaaacacaaaccttggttctcgctggtgatcatgattatgga

SEQ ID NO: 42686 - DNA, 561 bp, Arabidopsis thaliana columbia
atttaggtcccctttggttatcttcaccgagtttttgaaccgcacaagcgttcggactcgctcacatactgcaaagaaggggagattgagaaagataagaggaggatgaggagaaagaaaccgggattcagaacagcagcagccatggattgaagagaggagatgctctttttctttttcttgttcttgttgggatgttacgtcttaaaacaaggacaatgtttttgataatgatgatgatgctctatagtttgttgaaaggtgtggttttgtttagattgtgtttgttgttccaaactttggacattgtctgtttgtgaaggttgagaaggaaagggtggcattttttctttgattgaattagttgtcaaagtttagacttttttttaagccaaaaatagtgtttttgttataatttttgtaatcctatttgcttgtttctgagagctttgagaattttttgataaggatcttgaagtttaatcttatacatttgcatctctatctatttctttttcacaggtaaatgtctcacactgttatagaactgaaataattagt

SEQ ID NO: 42687 - DNA, 502 bp, Arabidopsis thaliana columbia
cttccgaaaataaaacaaaaatatcgatacttctagatcaaaccaagttgattaaaacatccctattccctacgattctgatcttgagatatattatcatgttaagatctaaattgacaagaaaactgatttttcatttctagtaggaaaaataattactattagtgatcatgattgtcgaccgtaagaggtggtttagttactctccatctttctttgaagaagtcagaaagtcagaaattatatcaaattaaacatcaatattgaacacatatatctgtatggttctacgtttagaaaattccaatatttatatattcctagggaaaaagaagcttattcttcaaattattgttatgagtcgttaaaatatggataagaatatccagtctaaatattaaaaactcagtttgctttgcttttacctctccaagtctccaaagtcaaattaattttagttaattataccataaaaggtttattagtcaaacttagcatgcaa

SEQ ID NO: 42688 - DNA, 548 bp, Arabidopsis thaliana columbia
ggcgatgcttaagtgggtttcaatggagactcagccagtggatccaagtctcagtcgcaatctgttttgggaaaagtcaacggaacagagcatttttgattcggctctgagctcactcgtctcttctcctacgccgtcaaattcaaacttttcggttggcggagtaggtggagaaaatgtcattatgagagagctcatcgggaaactgggtaatatcggcgatatctatggaattacggcgagcaatggaaactcgtgttacgcaactccgatgagctctccaccgcctggaagtatgatggagacgaaaacgacgacgccgatggcagaactgtccggcgacccgggattcgctgagagagcggcgaggttctcgtgttttggtagccggagttttaacagcagaacaaactcgccgtttccgattaataacgaaccacccatcacaaccaatgagaaaatgccacgtgtatcaagcagcccagtttttaagcctcttgcgtctcatgttccgccggcgaatcgtccggtgaacttcccggaaaaga

SEQ ID NO: 42689 - DNA, 574 bp, Arabidopsis thaliana columbia
cgccagtgtgctctaaagccatggtccctaccacacacgagcctcctgaagtgcccgaaccaaagcaagattccaagcgcttgtggcataatgatcttcttatacctctcctagagccaagaaaaaatggatatatatccttatagaaagttatcgcaattgggttgggcctcttaatttagatctataattaccctaatatggcgataagctatctaactttaactgattcattataggcacccggccaagcgggttaccgttctgtataatcttactgcatgtgggatccatcctgtaccatgagcccgttcttgccagttccccccaatcaagactatctgggattggatgaagggctggattcaagaacaatatctagaggaaaagcagctattataatggtctgtataagcatgtacacgcttctagggtactgtttagaagcacttattgaagattcttgttaattcatgctggtaaggttttaggctttaattgacgcaaaagggtcatgcagaatcctagcatcgttgggaatagcttcaatgttatgctggaagtacttgaagga

SEQ ID NO: 42690 - DNA, 544 bp, Arabidopsis thaliana columbia
gcttatcattaagaaccttctcaccagaggtactttcccatttcccttgcaaagacaaactcagaagaattttccctacaatacaaaggtaaagttcatatccaaaacctccatatacacacacacagatacagagcccaattcctaattcactaatgataacacacacacacacacacacacaattgattcactaactagagacttaaaattctcacctaacaccagaaaacaccatttcaaatgaatctacaagttacttaaccaatgctcaaagcatgaatcaccaaagaagacacaaacatgccatttcttctcatgcttaaacattcatactctatggaatcagttttcctgatagacgaaggtaaagttcatatccatagataaaccaacacctccatatacagagacttaaattctcacctaaacaccagaaaacacaacttcaaatgaatctacaagccactcaattcatgaacacaaacatgacatttcctctaatgctaaacattcgtactctaatagttctccacaagtgatt

SEQ ID NO: 42691 - DNA, 889 bp, Arabidopsis thaliana columbia
aaccggttcagtcagatctggttcaagccaacaagttcgaccaagtgaatggctattcccaatcatgaaccaagataacatgttcaacaaagcaccacctaaaccgcgaatgacgtggacagaagttattcaaccggttcaatcaaatctggttcaaacacaagagttcggccaactcaatgactattcccagatcatgaaccaagatagcatgtacaacaaagcagcaaccaaaccacaattgacgtggaccgaagaaattcaaccggttcaatcaggtctggttcaagccaacgagttcagcaaagtgaatggatattcccaaagcatgaaccaagatagcatgttcaacaaatcagcaaccaacccgcgattgacatggaacgaattacttcaaccggttcaatcagatctggttcaatccaatgagtttagccaattcagtgactattctcaaatcatgaacgaagataacatgttcaacaaagcagcaaagaaaccgcggatgacatggagtgaagtatttcaaccggttcaatcacatctggttccgactgacggtttagaccgagaccactttgattccataaccataaacggaggtaacggcatacaaaacatggaaaagaaacaaggaaaaaaaccacggaagccgcggatgacgtggaccgaagagcttcaccaaaaatttctggaagccatcgaaataattggtggtatcgaaagtaatcaaacttttctttaatctctagctaactctttcattaatctcttgattaatgttggttcttatgtaattatttttggattcaaaatgcagaagctacccaaaggtacttgtcgaatgcttgcaagaaatgaggatagaaggaattactagaagcaatgt

SEQ ID NO: 42692 - DNA, 533 bp, Arabidopsis thaliana columbia
ctgaatcacgctttttgcagagagagatacggaggttagagaagccagacatctggatcgaacaaacccgacccgcaaaagattcgtgttgtttgtgcctaattcgcataaacagcatgtcgtttcgattggaagtaaaaacggcccgtagtttagaagcgtgaggaatcaatgttttaacttgctgacgtatggccattctcgtcacttactttgtctcaccccctaattaaattacctcgtaattatttcgcagttccttgagatcgatcccgtcaccaagaactcgaatatctctttctcttcgatcgtttcctcttctgatcccgccatcttcgcctaactcccaaatctatataaattattccgacacctctccggcgagaatttcgggttaatcggctgactaactaatttatcggcggaagattttcggttgacctaaacctaaccgagtaccttttggatgatgagaaatggattcgattgtatgcacagcactggaggaaatctgttgtcaaggaaatacaggg

SEQ ID NO: 42693 - DNA, 518 bp, Arabidopsis thaliana columbia
tcccctgaactccaccatacatttgataatttaaactagatttaagattaactattttagactacttttattattacgtatttatgatttttgtcatattttttaaagacttttgtcgtttctaaaaatgattacgtgttttataagattttatgcaaaatgacattaatgtcttttcattgatatatccgtcacacaatatatttaatataaataaattatgtcatatttaaagtcactttaaatttggtaaaactaatatctttattttggaaactatattgatatatgtatgtgtcttatgaataaattttagtttctcaaagttagtattaactaatatgatctagtacttgtcaattaattgattggattgtgacacgggttaaactttaacaactatttaataaacccactttaagaatatattttttttttgctattattaaccaaatttcttttaatcattgctatatttacttacctgtttttcattctatgtcattgggtgcaaaatg

SEQ ID NO: 42694 - DNA, 523 bp, Arabidopsis thaliana columbia
ttatgcaaataaaaaacaagaagaagtgacttattggtggaaactctctacaaaaaatctttggcctttgggagataaatataataaccaaagagtatttcattaattattatgatttcgaaaccgaagtaaaacaagcatcacattgtcttaatttatttgtgctatttgtgagaatttctcttaaaagttttggtaagatttgagtagaatttaaaactacgtatataatcgttttcgaatcaagtaattgtaaatatagttatttaggattgattatcaaaatttactaattagaaaataatcattcattaattgctttgagttttaagggtgtgtttatgcaatatttttaaatactaattaataacatcgagattttagtaaagatttaatgtaatatttgaattttggaagaatgattggttgattgtcctaatatcttatttgattaaattgtatgtttgataaaggaattgggaattaagacacgtgggagcttactagtggtagaatataattg

SEQ ID NO: 42695 - DNA, 522 bp, Arabidopsis thaliana
accgatatgtatagagagaaagagaaagagttgaacctcgtcataaggaggacgattatggttgtcaactaaaacaggaggaggaggaggatggtgatgaatgggcggcggatgtggtggagcagctgatgatactgcggctggaggaggcggcgcacctgccggcggccactgctggtggtatgggtggattccggcgccggccatgagataaaaaaaaaacctaattactcagagagtcagagattgattgttcgaaaaaacttctgcggaagaattgacggcaaagaaggcaaacttattttttaagtcacatgcatcgcacgtgaacactgtaccactttaattttatttctttctttttctgttaaaaactttaaaaagaaaattagtttttaatttttttagaattataattactttaagtttttcttttttcaattgtttttattggaaagaaactttaatctgtattttcttactttctaaaaatattaaatacctaacaccaaatttatagta

SEQ ID NO: 42696 - DNA, 444 bp, Arabidopsis thaliana columbia
tcccctatatctcctttccgatcttccgtttttgaattagattcatagtcacaagtttatttttgttttgagtgtgtcactctcagtgactcgcctaaagatcatactgcataattctgtaaaatcttgctgaacctctacgtgtgtaaacgtactgaatcgctcgcaaacacacagatcagagtttggctggaagcaaccagatgcacactcaagtcaactactagactgaaggtatacactgtacacaaaatctatctcgagatcatcgactaaagattacgactagatcttgggctaactccaatatcaatgagatcactcagtatctaacttcctcacattggtgcttacgagttacaacttgtgtatgcggtctaatgtctagagagacagagacttcctattgacttctcttcatagataagtctgcaagttaacttt

SEQ ID NO: 42697 - DNA, 809 bp, Arabidopsis thaliana columbia
ggttccacgttcttgtaagcctaaaactgacacaatttatgtttctgtcttgtagtatcataagcactgtgtcaaggacactaaaaatctgatggggaaccaaccagatttgattcctaaaagtttatcatctcatctggagatcttggaatggagacaatacaacgacacagcgcaagagagagaagctgcaaagtacatcctagcaaacgcgagtggtctaagaaaggcgacattctacacagaatctacagagaagcatgggatgttgaaagaagttagaatgtgtggccagaggttcaaaaacatgtcagcttgtgttaagtaaacacttggtttattcatggtaaaattaatatgtttctcaaatctgtgtttattattgttgagtcagggattgtctatctcaatgtctatgcatatccgtttaattgattacaaaaacattctgtttgtctgttgaatttcttacaaaagaaaaaaacatagttccatatatacaaaaaaaaaaaaaaaaaaaacatagttctatctttcagatcggttgctttgaaaatagctgattaaaataaaaaaggatgctctgtaaaatttacaaattcatggattgaagagtttcctgaagggacggtctttggcagctccagtaagagcatataacttcatgaagctagtggttcagctgaagctgctctggttaacacttcctcactgtttgctttaaaccggacagctggagccacattagtgagtgcaagtggcagtgcatgtgcttctggcgttttcgctgcaaccgagagttgtgtgat

SEQ ID NO: 42698 - DNA, 479 bp, Arabidopsis thaliana columbia
cgttcatcgtgttaagctctacatttgattcgtctgcttcttcttcgttagtcgccatgcctgaatcgtctacttcctcgttaatcatgatgtctgcttttgtgtttgtcgccgtgcctgactcatctacttccttgttcaccaccaagttttcgtcgtcaatgtccatcgaatttggaggaagaatgtgaaatcggagaaggaatgtgaaagaatcgcaagaaaatgagagagatttctcaaagaaaaagtagatttgagcagagagaagatgacgattacaggttgcttctcggcgattatggggttttaatttcgacgggaaatgacccgcccaatctttttagaatttacactttaaggccctcaagttttcttttgtttttaggtttgaaccccaagttttgttaaccccctaattcttagtttgattattgtgtgagagaagagaggacgtggagaatttgatacagattctg

SEQ ID NO: 42699 - DNA, 618 bp, Arabidopsis thaliana columbia
ggatgcacactaaattaaatggaatagtatgcatttaaataaaaaaatcaagaattttcattcttatttcggccttctaaaattaattaattagttaaattagtttgtgattttattttgttgtggttgtcactagtggtaaattattaataatttaaaaatctaatattttcaataaaaattaatgatctatttttaaatattaaataaaaatagttaaaattatagaaatttagttcatattgatatctctctaattcatttggaaaaatatttttagcacagacaacagtttatgcctgcatcattacaacaattttttttactattttctcataattttttaatactatttgagttataattgaaaagctaattacggttaaggagcagctatagataacgaattaatagattagagaggttaattatagagtcgtcacatctctctcacatgcctctctaagttccctttagggttttcttcttcactatagagactcatgctcttctcttcccaatcgccgcctctgatctctcttcctcgcttctcagattaggtattagacattcactctttcttacattgttataacattgatgaagtagaaggttaga

SEQ ID NO: 42700 - DNA, 957 bp, Arabidopsis thaliana columbia
agatcaatggagggtaggttattataacaatcaaaggatcgagattgagagaacaaaccactaacggtgtcggtgggggtcgataaaacctcgtctctaaaattaatcggatcgtctaaatgccctaaagaaatctcaatcccaatctcaatctccggcgagaaaaagttaaaaacagttggaaacggcggctgagtaaaataacgaaagcaacggcgacggaggcgggatcgaagaagatctggtatgttggtcgatatcgtagagaggacgacgacgagggagcgagcgagcgagagaatctggtggttgagagacgatgagactctttctaatcaaattggatcacgaccgttggatttgaccaatagaaataatccgacggtctagaacgagactatgttatataaaaaaaaaagtgacgacgatgagagtgtgtgaagaagaccttgtttggttgtttttgcgatttacatactcttttgacgctaatctctatatcgtatttataggcgaagaggaggccaagtttggttcgcttctattattattgcgtcaaaaactaggtttttcatttatttatttatttttatttcttatttattactatcttattatatagttttattgtattattaatattgactggtgaattgtttaagatttggatactctattactgtctaggtcccctgtgtcatatgcttgtgattgggttaaagaatataagctttgtttctatgattatatatcaataattaaattcgactgatttcgtatgtaactaaatttgtattagactacacttttttttctttcataaaatcatgtgggctactcttgtcacgaagaagaaagttggggattggggcaattaaaatgcattatttattggttgtgtcgaatagattagtactacataggtcatgtaatgtcatatagcttttttttttaaag

SEQ ID NO: 42701 - DNA, 724 bp, Arabidopsis thaliana columbia
attccgggagatactgggatttttgcctgatgggtggagagacacaaacagagaagctccttggccgatgctcatttccataaaattttctcgtagtccacttatgttgaatcccacaccttcattgaatgcttcacgatttagcatgtcaaacaactggtaagaagaccaaagaagtgagaaatagtcgtgaagagatataccaagcgtactacaagatatatgacaaaaataccacctgctcagcaaaaattgatttatgcacctccctcagtagcgaatgagtttctttaacatatttgtcgtcacttgcagacaacttctctgatgttccagggatatcgtgaccagtagtcgagtctatgtgctcatcagattcgtttgagttgccaatcggatttaagccaacatacccaaaccgaagagagtaccatgaatcttggggtacattaatggccagcataccagctgaatcatgatctacacgaatagtggacagtgtagatgggcgaaaaccagaagtcggatcatataatgaactgtcagaaagatcaatggtgaagccctcattgctggcatttgaagcaagcatgcgttgtcgcttgactttccagttccgctgcaacctataagcttgttagtatagcaaaaataaccatttgcacgtataaatcaatctctattttggaagctgaagtcagcttatcattttatacaaattatg

SEQ ID NO: 42702 - DNA, 610 bp, Arabidopsis thaliana columbia
gccagtgtgctttaaagatatcaacagttgtagaataactaaaggtaatctgtcatcagcttccatctcaggtaagcctaaccagtgtcagtaccagtatattgctatgtaggagaaaagaactataaaagggcctgctgcactagctatgctcgaggtgtgggcattttcctcaaaaagttgctttgtttccaggaggagccattgaagggtcatttctgcccggctgttcacaagcgagcagtctattgtgtcaagccaaaagcaagcaagtgcctggattgatgctgttggatagaaacagtaatctaaatggcccctgaccaaataggaatctacaagccagtctctgtaggcttccttgctgaataggttatgaaaaagggcagagatgtctctacagagattccctgcattttccggcctcgcgcgtatgaaatgcagcaggaagaaatctttcccatagtccataagccttctgagccatctgttagtcaggggagtagatcattcgcgtagcaatatagtgctacgtagacaaagttgaccttagtctggtccatgttaacacgactggactggtttcttggttgtctaaagacttgtagac

SEQ ID NO: 42703 - DNA, 647 bp, Arabidopsis thaliana columbia
gactctagactgttgaacatggaagtgaagattggtacaagaaattggatctccattttaaatggcttcttcagtatcggatcagtccgtacttttgcaaatggggtgaaagcatgcgtgtcttgacatacacctcaccatggcctggtactgcaacctcttcttaattttttatgcaccatctgtatttgttttgtgttgtgcaagctaatcgttttgcttcacgctctgagctctccatttgcgttccactttttggtttcacagctgatcatccaaaatctgatgaatatctctctgattcaaggcttgccgcatatgcagtaccgtatagacaagttatagcagggtatgcatgtgttatcccactcaagatttttttgtaggtacccaaactaactttcatctgcctgttgatgtgcaaacagggatgattcaagggaaagttatctgcggaaagaagttgagatattgagaagtaaaccccattggaacaaagcttacttttacttgtgggatgaggtatgcttcattaatattttcactgattgtcaaaaggatgtagttttacatgtggtaatagtaacattctattccatttctatatctcatgtaccatcgttgatgtgctgtctacgtttaataac

SEQ ID NO: 42704 - DNA, 278 bp, Arabidopsis thaliana columbia
tataatcactcatgaatgaacacacctaagatcgatacaactatacaccagatacttacctcatcctccgatcaagaaatctatctattcagtcccttcactcaatgttaaaacacatgtgcacgtctaataaatatatatcgtacacagaacgtacgccatactatcacaattcgtcccacgcaaaatttgttcacacccgataatattggaagctgccatcatcaactagtcgcaagtcctctactcactaacggacgtcgttgctctcctcgcag

SEQ ID NO: 42705 - DNA, 503 bp, Arabidopsis thaliana columbia
tctgctatactttagttttccgagaacaacaccgtccacaaaacctccagatagaagcttatagcttctccgaaaactaacgcaaaacgaacgagcaaacatggactaatacactagctcaacgaaaagtgaaaccactaaaacctattcgccacctctattcacctcacctaaccttgcaatgcaccaagaagctaaccatattcacaaagattataaactaacaacaccttaacaccaaaactcgaccttacaacaaccgtacatgatgtgccagggacgaagacaaaaggacatgatgatgtgccagggacgaagactttacattttgtgacagtgaatactcctaaacttgatgtttaaagcttcttttgtgcgggatactttaaaagatcgagtctagtaatgtaggaatgcaagaggctcccaaaatagagatggtcccaatcttgactccgcttgttatgtgagagaatggatgatcatcgtacattgcgatagga

SEQ ID NO: 42706 - DNA, 484 bp, Arabidopsis thaliana columbia
ctctcgggacgggcgggcttcggtcgtatcagccatctcggcgctccccctgcgatcctgtcctccactagggacgcaaccgcggcggccgccgtgtcagcctccgccccgtgcgggacgacctggtgggcaagggcctccccgtcaccgggtcggccacgatgacggtcgaccgctcggtccccacgagcacgcgcacggtgagctcgacgaggcgcccggatccggggccgtcctcgatggggtagaggtcggcaacgcgttcaccggggcggccgggacgatcaggcatgcaccgaacctcgcgccgtcggagcccaagggcaagcccgggcgggtgcggaggggccttggcactgtcacggcggcggtccacaaacgttctcgggccacatgtcggccacaggtttggtcccgacggccacggattgcggcgcatgaacgtgaatgaacgaatgcgaaaccagtcgcggtgtagagggga

SEQ ID NO: 42707 - DNA, 500 bp, Arabidopsis thaliana columbia
taatgtttttgtctgagaatgaatctatagaagaggaactgtgttctaagtttttttttgtttttgtttcattactgtgttgatgttacagaattgcgatcctttttcatcagacttattcagagataactcagatcagcagtctgttccaatcctctgcaactcgaccagttcagcaaattccacagagaatttttgctctgagacatgggagacatgtcaaaacgtctccatatcgggttctcttttcgctgcctcattacaaggccgagctggagcgccgtcaaataaaaatgcctccaagcttgctgatctatggcagtccaaaaccgatttctgcagtgcctttggtggagctagctccaatgaaactgtttgcttcagcggtgagccagttgctcttaatgacaatgatactactcctgacaagccgccttctggtatatgccttgagaaaattggaaacggttcttacctcaacaatggttctcaccctgatg

SEQ ID NO: 42708 - DNA, 588 bp, Arabidopsis thaliana columbia
tggtttgtttgtggtaatatcaaaattctaaaaaaatctatatacaaaaccctaagtttaggtttttgagtttttagtaaaagtaaacacaaagttgtggttttgagttctcggtaaaaataatagaattgtggatttttttagtaattatcgtataaggaaatttcaaaagtgctttgatgacttttaaaagggttttcgattattctagattagtactatcttatactaagagatatttgggaaacattatgtgctcaatcatgattgggttgtgatttatttaattctagtctaaacaattgcgtcacgagatggtattccttattggaccacatactccactttcagacaagttctagcagcggacgaagcaactgcaacctctaatatatcggcacgtcacgtagcttaacagttttagtgaacactgtgtatacttttcagtgtagtaagtaatctctagttattttgagttcaagtcaaaaacgttgaaatggatatcaggagcccattttaacatccctgtatttcagggccgttacaaatacaggcccacatatcggtaacagtcgttttggtctagtc

SEQ ID NO: 42709 - DNA, 549 bp, Arabidopsis thaliana columbia
ataaagaacatatattagtattattttgggaatacaataatttgggtggatctcgttcgacgagagaatcaaacaagtcttgcgttttgtaagattcgttggccacaataacatgcatagcgcatgatggtggacttttcccaaatattcaattaacattaaatgaaagtttctaaattttcgttaacaaaaaaacaaaaaagagaaagtttctaattttttatatgaatattactactaaaataatttctattttattaatctgttctcgtgtgtactttctctgcttttccttaggattcatttcgcctggacaatgtttcattgcatgtgtgtaatttataatcgcctctcgttttgtttaatgctttgcttgtacttatttgtatttcattaacttcttcaatggacatatcgacagtaacgtcttttttttattgttactatagtagagtgaattaatttattcgtgtttatagtgagacaaaaacattttggtacacatgtacatgtccaagtaaaaaatatccaaagacattggatgaattt

SEQ ID NO: 42710 - DNA, 1833 bp, Arabidopsis thaliana columbia
catcatttcattggactatcatccatgggcctaataaaacttcattatgggccatctagtgcaaacccgtttggaaaaagtactttacggtgagatcaaaatcgctcttctcatattattgtacgtacaccaagctaagctaacataatattttatcaagaatcttttttctttatccttttatcccttgaaataatatcttcaagcgtgatccaataaaatctcacaacaaaaaccgaaacacgtatacaaaagatacatttcaagacttaatccattagctgttctttccggcttttcggaatttgactccatcaaaaatgagaaaccaaaatacaattcaaaacgagaaagcaaataaaatgtgacatgtgatatatgcatgtgatatcccaagagcttggcgataaatacaactcagttagctacattatgatattatcagggactagtgtccaaactatatattattaaaaatttgatttataccaccaatcccccgatcccatcgagagatttaatttgatcagacaataatcgtgtattcattctcttatattattgcactaagagctcacatgagctgctagctgtatatcaattagaatctacttgattattgttaaaaaattaggagcaagagatcaaatcttatatatctataactagtcgtagtagatggagttttgggaagtgacccggtaactaatagtatggagaacgaggtgggatggatgaatgaagcgtcgaaggatagcagcaacaatggtgaatctttcattgaaatacaaatcaacaaagcagtcagaaccacaggattgagcatctcttcttcgccatctcccgagaacgaaatgcagacgacgacagcaatcttctcatcggccactagttgcttctcagcatacagcagcgtgacgaggttgatgatgaaagtggggtgtttgagtatagtgggagtcataagagagaaagtaaacgtgggagagaggtgggtcctccaagttatacagagacgacgaaacaagagccccctacgatactactacgaaggcagcatgagtaataataaggatgaagcattaacggacgattccctcaaggcagctatcgcttactgcaatgcctcatctctctcccctctacaaacttgattattattattataataccttttctacagaatcatgttggaaccaaccaatatttgttgatgtgtccaaatcctagggcatcatcaactatatcattgtttttttttcttgttatctttttgcttttatttccgtttaagaatatattttatagttgtgatcctcattatcccaaatcccaagtcaggtcaaacatagttttgaggcttggtcagctgatatttttacaagtttgttgtaaaaacttgtaaacttgagtattttaattaaatgaaaataaaccataaataaatgaagttctaaacttgagtaataataaaaacagaataaaaaaaaaggtatgtggggaagttttgaaggggcttttgggcttagaaaaggaaagaagtaaaggaagaagcggcgcacgtggcaggcagtcacgagagtcacgagagatcgagagaagtctttgattctcttctctcatcaaatcaaaatatcatctcagagactccgattctctctgtttctcctccacttttcaacccaagtccaccctcaaaattctcagaatgattgctcggatccttgccgccttagccgattccatggagatgccggtggctgccggtggtggatcagtgctcggtaccatcaaaatcgctgtgatgccaattgcaaaggtattcacatgtgc

SEQ ID NO: 42711 - DNA, 553 bp, Arabidopsis thaliana columbia
tcacgatcgaactctattataaggttgtctcttttgatctacaattattcgttttttttagcaatcaaaacttcgtataagcacttaaaagtcttaaacattggtcatccgacaaaatatattttaattcaaaataattgcaaccacaataagaaaaagtccgtaacgatttggttaataatagcattgtctagggacttaaagaaaagttccttaaaaaacttcacattgacatcaaatctctaatagcaaaacccttaaaactggcgggaatcggagtggtgtatagtctcactttctacttctctcagacctccacgagctcacaaaatcacacacattctcttcttttcccgctcacccaaagccatgaatagatccggtatttccaaaaagcgaccgcctccttcgaataccccaccaccggcgggtaagcatcgagccactggtgattcaacaccatctccggccatcggaaccctagatgatgaatttatgatggaagaggacgtgtttctggacgaaactctcttgtacggcgacgaagatgagg

SEQ ID NO: 42712 - DNA, 547 bp, Arabidopsis thaliana columbia
cgtcacaagtttttctgtattgatctgcttcttctctacaacatttactgcgctgacagagggatttctttttatgaaagatgcatgatcattcaacggcagagaatgcttagaggcaatctttgcagctcctttcgacccttcaggtccattggaatcagttaccttaacaccatcatcacctttggcggactcacttgttttggagtcgtttgcagactcttcgttagcatcttcatcttctacagtcccataaaccgaaccaagcaatgacaaagctccaccatccttctcactttcgttctttttctcttctacagaagactttcctgtcaaaagctcttgatggtcaacaagaaacctaaagtaaaggtgaagatgatggtctggcattaggaaccaaatgtagggttgtcccttgtttgactctcaagacaattcagattgccaccgtgtttgcttcaaacttgaagtctagtgataactgatgtattctcagttggagctgaaagaagagagaaaaaatatcaagaaaaattagtatgtg

SEQ ID NO: 42713 - DNA, 868 bp, Arabidopsis thaliana columbia
attcaaatgtgtgcgtaaatgactaaaacgcccttcattatcttcacggagacgaacccatggcctggtactatgacgagaatgccctatgactcagagatggaagatgactagatgttttgttgcatgagttaaagaaaaaagtcatatgtaatcgaatatgtgtaatattaatgggtctttatttctcactatcttcggttttttatttagaaagatttgtatgacttcttatttaattaaataccagccgggtcatctttttgaaataatttgtgatatttgattttaaacttatatgatgttagtatatgttaaaatactggttgaaattgagtacgaattagcctaatattgagtagcatacgtttaagcacttcattcttacatcgtttgagatgcaatttcagatgtacacattggaactcattaatagagaggttttgtcttacaagaatttaacacttgagcatccattttggcacattagatttaacaacaaagttttaaaaattaattaggttgataccaaatgttaaattaggcatttatttgttttcgtgtaagggttttaattgaaacataagacaaatttgtcttttgatatttcaagaatttttttttactctgctgaagctaaggttaagatattgtgctctagcaaagttaatcatgtggaagatgatgaaagttttagggatctcaaaggctatttcgactatatgactgatttccagtatctgttcacaataaacatcccagccactgctgccaacatgaatctgagacaggttaatagcaaaagagaatacaaaaggtgatatgggtgtagtacatccatatatcgcacaagaggatcaaatgtgag

SEQ ID NO: 42714 - DNA, 517 bp, Arabidopsis thaliana columbia
ttgatgaatgttttcatttatgtagaaactaacaagtgtggtggtcttcaaagagaagtcgctgatcgaaaatcagtcgctggtctccaaacaatgattctagtattctaggaagaatgaactagttttactttttaaagataaattagggtagtgttacctagagggaaagttgaaacatgattgatcaatttggttccatttgatcaataaaaaaaaaaacagagagagatggtggcagatttattcatgatccgtgattgagtgcaaagacaaatttataataatacattttttgtcgtaaataataatgacaaaaaaaaagacaaacataaaaataaaataatcattaattcactattaagtcaactccctggcttccccaccaccgcacgttcgtctctctgtccactcattgactccatcccctaccttttctcctctatcgtgcgcctacattccttggtgctaacttaatttccacctcatctcattaacgtgcgccgtcatccttttt

SEQ ID NO: 42715 - DNA, 875 bp, Arabidopsis thaliana columbia
ctctctttcctcttttcacattctaattgtttttcgttcatgatcgttccaacaagagtgaacatgaggaccctcttatacgttaccatctcttcaaatattataactacaaagttacaaacctcactcaatagccatgaatcaagaatcaataaccaaagaaccaagaaccacttgagccttatatctttccaccatcgacaagcaaacaaattgtgtaagataaaatttaaaaaaaaaaaaaaaaaaaaaagagaagtgattttagaaagaaaaaaaggtgtttacttgtggggtgtgtgtgtgtgtgtgttatagtggggcaaatggctctggaagtagctcgaatcctccattgtcaaacatgagtccgtgatctgacgaccggtcatcgatgctatgtaaccagtttgtgtttttgacgtcctctttcagcaacaatgcatcataccttgagctctcatacatgtccatgtcactcaacttccccatcagtcttctaccctcgtttgcttcattcccgttctctgtgccattgctgctgatagaatccgaatgattattccctgaacggattggctggatcttggatgaggctggtctgatgctctgagggaatagcgttgtggttgatagtgcgcaaccattagtctttccatttcttatgtcctacacacaccataaaaaatgttgagatattcattgcatggtataaagctacttgcatttagtgagaagagacatatgtaccatgtgtctaatggccatatcgagtgaactttttgagaatgacctcccaagcctcgttgttattgtccgtgacagttgtcgaggtcttcacggttctccgtgaagttatgtcagaaacgtttgaa

SEQ ID NO: 42716 - DNA, 880 bp, Arabidopsis thaliana
  unsure (1)..(880): unsure at all n locations
gagagagcaattcagaaacaaaacctggcccaagtaggagcgaattttttgttggacatgtcgtcattgtcgtcttcctcttcatcttcgtcatctgagcatttgtatggagagatgttgtacgactcttccatttcttcaattcccatgttggcttcttcagacatgttccctggattgcttatcacctgcaagcacaactattgtcatcaattatgattggtttcatctctaaattgtctacaaaagatgagagacttataccttgaaatcattttctctagagcttcttgaagcattggtatcatcactagaattactctttgatctcaccgctgggatcctagaattcgcttgcctggttttctcagcattattttggtcttctttgagttccttttgtgcttttattctcgcatcctaaaaatgtcgttatttttaacttagcaaaatctcctacaccacaatagtcaaacaaagttttgaagaacagaacaagagaagggctcttaccatagcttgtcttttcaattctttttcagcttgaagcttttcatcagcctctctttgttgtctttgaaaatctgcaatgcgttgtctttttttagcttccttcaaccttttgtcttcttcttccctctgccttttcctatcagccatttcaaactcctttctcttcctttcttcttctttctttttcttttccatctcctgcttccaangccatttctgcctcctttttctttcgatcttcttctttctttttcttctctatctcttgctttttcagattttcctgttcctgttttgcccgttcaagcttcatagcttccttcttcagcttacgatcattctctttctgttcagcaatacgttttga

SEQ ID NO: 42717 - DNA, 800 bp, Arabidopsis thaliana columbia
ccaagaaattcgaatttgggttcagatttatttaagatttattcgaattcagataattctaggatagtttattatctgaattcggtttcggtctggataggtattagattatgatctatttcatatcggttttcgaggaaaagaaactaaaaaaattgttcaatattttttttgatatctaggttacttaggatatttttattatttattataaaattataactaaatgtacccgaattatattaagctataattttaaaaaaaattaacaaaagaattcctaaataacaaagatatcagaaaatatttacacgtattcatcaaaattatacatatttttgcaaattttagcttggtcaacgatcaactttgtgaattttggcttggtcaacgattaactttgtataaaatggccggtcaacggttttatatgtattaaatggccacatacgaagttcacatattaaatgaccacattttgaaagttcacgtattaaacgacatttttccctatttatccatatccatagtacaaagactgaacgtgatagtagtgaagaaccttgatttcactttcactagaacactcaggtcatagttttggttcacctctgccattgtacgtccttcctcagaagcccctcaccaccagatttcgttaacggcaagagctccatcttcccaattgcaccaaccggataattcatgactcactcttgatctatcggacatgttgacgggagcacttggatcattttacatgcgctcgctttgtcgaactctttgacgacgcaagtcag

SEQ ID NO: 42718 - DNA, 523 bp, Arabidopsis thaliana columbia
catgatcaaaacttcatcctgagagtagatgaagcaatcaggggagaagaagattacctaactccttgagctgattaaccctagtgactgtttcgagtacttcagcatccctgcactcaaaaggataagaaaggatttgattgattgataatctctttgggaagatgaaatataaaagagatcagacaaacctgccactactccggccgagaagataaagagcagcggcgctgaggcagcaagtaactccaccccaaggaatcatcagactctgaagtcactcttacttgtttgcagaagaacaacaatacctttgaagttattgatgagcagagagatagaggtaggttttgaatctggatgcagcgaattgaatgaaatagagatgggagtgaaacgaatctggatttagaacacagagagatggaagaagatcatgcgaaattagctaatgagagttatgagtatgaatcgaggaagagtttgaagaattagaaactagaagcagtgagagaagaggaga

SEQ ID NO: 42719 - DNA, 547 bp, Arabidopsis thaliana columbia
cggaaattacaatatagaaatttttgatctgtaaatatcatgtaaagtatatatccaattgattatcatttgaatgcatattaaattattaattatgaagacagataaatcaatatatgtttgttgatcttgctgtagtacattctggactaattctttcaattggagtgactaaaaaggacaaaatttatgcataacgacgtcatactatatgtaactcgatttgtctagaatatttagataaggttaagactagttttctatgaatagaagaaagtgtaaaatatataaataaacatactaataacaattaacaacagaaccagaaccagaaaattcacatttctgtgcttttattatctaaaattcacttcgaaaaacatgagaaaaaagagttggctgacgtggaatattcgtctaatagtagccgaccaacgtagccataacgataaggtttgccacatggcaaaacgataaccatggaactgcatctcctgtcttttgtttggttgcacaatttgcatttttattgggatgtattgttttg

SEQ ID NO: 42720 - DNA, 945 bp, Arabidopsis thaliana columbia
gctgtaaatggcacttacaatataaccaatcaaacatttaaacttctatatataaaagctacgtggcggatgattattggatgtagaagttggcagtcaacggatagccagaagattttcccttatttggtggtttcaatgcaatttcttcaattttattttaagatgattgcgagttgtttttttggcaaatgcgggagatacggttttttctttttttaggaaagccataagtaattctaatcatcttattgagaaaaatagtatgcatacacagtaaccactatgtacaatgtatatatattttaaatatatagtttggtaatttactttatttcttaattataacttatatgattatatctacataatttgcaggactagtttttattatagtcaacaacttcccaaataagatgttttgcttcacgcatcggttgttgtcgttgttttcttggagaacttaacgccgagcaacttaaggaaaccaaacacaatcaccgcgaggaccagtgcaatgacaatgcctattatgatttcaatccaggtttccattgtaaaataacttcaagagatctcttcttttttcggttagagatggatatcgaagtctattgtatgtccaatgtttcctgcttatctttcttcctataacatttattatttatatatagaacttcttcttctgcatgcatggttgaaagaaacgcgatttattgcaattgtgtctagtagtaattgggtatgcataatgtgtatcaaataaacacacaacgcatattaaacttttgagttaatttattaaaaaaaattaaaaggaatctaataaaactataaaatgagaaaagctaatatatatttaaatatttttacaaagatatagatcctttccataaatagttttgttttaaatgcactttaaaaattaaatttatatactctcaa

SEQ ID NO: 42721 - DNA, 586 bp, Arabidopsis thaliana columbia
tgtcacagattttgtaactttatactccatacatttacaaacttcaagctttttaattgggcttttggaaaccataaccaactgagtccatatcttttttgttgtatcttgaattttgtttcagattaaacttagagggttcctgtcgcatgttcagcaacttcgtgtcggctattggggtgcttcttcatttaagcagcaggccatatctgctgggttgccatccccgcgtccaaaagatgtctctgtctctgatgaaacccagcaaccctcagaagcttctggaaggagttgggttcagagtatgtttagcagagatacagcatcgagagcgaactcgttcagtcgtgttcgtaagtgggtatctgataatgcatcttcaggtatacccatgattattcttctttctttgtggttgctattctggcttgttgttgctgaagtcaataacttggcaaaacagacataactgctgctgcgcagaagaaaattcagaccaatgtacgtgttctgaagggtcacggtggtgctgtcactgccttgcactctgtgacaagaagggaagtctgtgatcttgtgggcgatc

SEQ ID NO: 42722 - DNA, 657 bp, Arabidopsis thaliana columbia
ttttttttattattgaaaaattacaggactgtgaatactgaatagtgaagaaaaaatacatgaattagtaaatgctgatatttttaccccttgcaacaacaacaaaaattgtgttttctttcaattttataggaatgaaaagcttcattaaatatcactcggtttatcaagtaggggttaatatgtattttcacctaaagaggacatgacgaagcatgaacccataaaaaggtacgtatcgctcgttagcacaaacccaaaaccaaacaatccaaacaaaaaacaaagctgcaagctttttgctctctctctctgctttcatggcgtcttttactaacctctctcttctcctcctctttctcttcaccgctacactcatcaccagccaacaaagcgacgacgacgaaaatgcgtcaccacaactcgctctagacccgtcggagcaagaagcggtctaccgagttctcgactcagtcaactcagccatctcatggcgaaccatcttccccgacgacatctgcgcttcaccacctgacggcgtcgtttgcgataacctctacgcttctcaaaacggcgtcgcaacgtctgttcacgtcacggagttccatttaggctacctctcggattacactcaaaaccctccttgctcttctaatg

SEQ ID NO: 42723 - DNA, 922 bp, Arabidopsis thaliana columbia
  unsure (1)..(922): unsure at all n locations
ctgcagaagatgaagttgtatcttgaccagacacaacttctgcttgtgacggtaacgcatccagaacttttatgtgcacatcatcagataacagacggaaaccaacatccttagcaattgagctcaatttactttcttttcttctgtgaagaagatttttcagtatctcctgcagggaactgccttccatacctggcgctatagtatctagggctacatgtttacccccatccataatcataaaagaaaccttattctcgaacttaattttcttaaacttttggacagttttcggaagtggcacggaccccgattcttgatcagtttgactaacggggttctcatacataatatcattctcccacttttttatgtcagacaatttatgctgtgcagctacctgtctgaaggtatcaagtgcttttatactccttctcatctcctccaaggacccacttgatctatccacaaaaagaataactgacggtttacttgcaggtagagatgactcatggtcctgccagtcgtcctccagctacataagaaaaacaaagaaaattgatgtatgtcaggcaagatagaaaattttgaatggacataactatataagcctaatagacatgtaacgacagattcaaattgtattgactcaaacaacatagagattttgctttgacggcaaaaagccgcttattgtcactggagtaatacaaaatcagttaaataaagatacgtgaatatgcaaaatcaactaagcatacagacagaaagaaccatacctctgtaactatcggatttccatctttaaaaatctctgaatgtcaccccggccttgaaaatcttagaacaatgtggacatcctgccagctgaaggaccgctgcgacgaatcagattttcanaattaaatgatgaagccaatga

SEQ ID NO: 42724 - DNA, 783 bp, Arabidopsis thaliana columbia
tgtatcggctaaactagtaaactgtagatgcaaacaaaacaagagtgaatacccacaactacgtacactgctactaagtagtaacataggtcaaatcattaattgcaggttatgttttgataaaattcataaatcaaatcattaattaccccaaccgcaaatcttgactcttgcttgtctcaatagtcaatgatcattaagactccatattaaccttttacgcaaattgagaacaagcattgataaaataaagtatcaattaattcaaggtttattcacatctgtattcgctgttgggtttcatttataacattaaagcacatttcttatactactagctagatatttgcaccacttttttttattacaaagttatgttttgcaagttgtgtaataacttgagttcctataaatagcagaggacggtctaaagccaatttcacaattcgaaccaaaatggaaaccaaaatccctaagtcaatgatcgccggagtacagactgtcatgccggtggaagtgacgcaacaccgggaaatccgctccgtatccgtcgtagatcccgtcggagtaggaatattccggcgaacggttaacatagttacgtattacaaagaagcaggtgatagtggtggtgagagagggtggttagtcgccgggtggatcaaggaatctttagggagagccttgacggagcagccgatgctttccggtagctacggaggaggaagacggcggggaatgatggtttggagttagtgccaatgatagtggtgtgaggatggt

SEQ ID NO: 42725 - DNA, 1002 bp, Arabidopsis thaliana columbia
tacacgataattctttttctttaacacccaacttagtgatttcaaataagagtttagatcagcattacacagtaacacagaagacagaaccattgaaaacttgtaacataataaaactgaaggatggtacggggtggaattgaaggaaatgagtatttgaaatcaagaagtttggtgttaaaatgttgctttgggagagaaaatttttgaatcttaaaaataaactgtaattatttacttaactaactgtcactaattgactttttctgaaatgaaaaatacaaaccatttatattgataaatttataaacaaacaaacaagatttgattcgtaacataatattcgaatctgtgactaaatatatctaattatagtagtcattttcacgtagagatgtgtgtacttgggacttcatcaatcgtgttcgactgtttggtcatgtcggttaagtttttccgcggatgcaaaatcatttatttatttattatcaattaactaattcaataatcacgtattttttcttctttcttaaagcccgactaatacgtgtccattgggccttctcgacacgacgacgccgtcggtcgccgttggtctctgtattgggatttaaataatcggcgaggccaatgccttctgatcctcaccaaaattgaacaccgtgggtgcccagaaggaagattctcgccggagatttcaattgtattacgattccaacttttctattgcaaaggttcaatttttatctttttcgcaggcgccggtgatttccggaataacgatttagggttttaggatgatcgtgttcaatccttgatgaatcaatctacgtcaaagagaaatctgggttattagaaaagtggaaaattgtgttcttagtgaaggtaatatgggtgatcaaagtatatctaataagcctctggatgagaaggtttcaatggatttgacttgtggtcaggaggcgattttggaagagcttaggatttgtttaccaaatgggt

SEQ ID NO: 42726 - DNA, 713 bp, Arabidopsis thaliana columbia
ctgattttcttataaaaaaattgatatgtaccttctaaaaatccttcttaatatttttttatttatataacctttttcacctattattttatatgtactattgtgacaaacataaacacggttatgttatataaaaaaaagtgaactttcttctcaagttctaaaacttctaatatttactttcttcttatatacatatataaattgtattatgtaaggaatttttccaatttacaatgaaaatattaggaatttttttttagtttttttttctttttgtcggccaagtttcgtattaattattaaagcccaataaagggtattacatatgctggtgaaaaagtccgatctcttaccatttacaactttgatttaaatctaaggtccagcttaacccacccaaatttaaagataaggttaagaaaataaagtgccacgtagcagacacatgtctaacgtgagatgaagagatgttgaaacacaacggcgccggttgatccacgatccaccttgctccggcggtcgggcttggtcaaatcaacaccatgtgcttctccacagtattcgcggctcttagtaactgaagcgccatgccattaagaatttttaagagagaaaaagggagaaactttttaagatttttttaaaattatacccggaaatgtgcataaaattagagatatgtctagatactatgaattgtaaagatacaa

SEQ ID NO: 42727 - DNA, 537 bp, Arabidopsis thaliana columbia
aattaatattagaaaataaaacttgattatcaccttaagatgtgtatgtatgtgtaatgtgtatgtatgtgatgcgcatgggtgagttgtgcaacgtggacgaatatgattgggtgacgtacatgggacccaaagttcagctctacgcctctctgtgccttcgcctttttccttttcttgattctctttttttccaaagattctttcttttctttttattattatatatatatatatataaagaaaaaatatttttttgtcaactatataaagaaacaatatgaaaccagcaaaagttattttatttaatcatatttatttatacttatcatgtaggataagttttcatatcataaaaagattataacaacctatgacctatatgttgctgtcattaactgtaaaaatgaaaaaaatctaacatgtcatgataacacagggcgtaattaatggcataatttacatttaagttttgtttctaataaagtgtttaattacatttatttagaaagtgtttaattacatttaaagtgttta

SEQ ID NO: 42728 - DNA, 511 bp, Arabidopsis thaliana columbia
agtctgtagaatgaatctcaaaaggacaagacagaaagaaagaaatctaatctcgtagttcgtaagacttgtcgactataataaggatgataaacgaaggtatttagctaatcctattctgtgattgtaatcatgatgcctaaacgtaaatatacgagttttgtcaatcaataagagttatattactataacactgatttaacagagaagtggaccagaaaattacctaaactaatgttacaaattttgtaagttaatcagttttactaatttttggaagggtttaacacgagtggctttgacacgactcttcgtctaccttcgtactacggtttcttgcatcttacacaaagcttaaccctaaattcccgcgttttctacggtgcccgccatgtgactcctccggctattcggatcggatccaatccggttcagagtctactactcttcagggcaccgactcagcttaccggatggaaccggagttctcgcgatttattgggtcgtcgtg

SEQ ID NO: 42729 - DNA, 587 bp, Arabidopsis thaliana columbia
tctgcctcgccacgcgattcctccacgccttagcatcgccggagaaagaaatattgattctctgcattgaatttcattttttccgggagatagaaacatttgtcatatgaaaaagtgtgacttaaaaactatagattaaagtatttcatatacataagacgatgtcttggtttaatttagacctttatgttgccatttgtccattgttatcttttatttatcgatatattatagtttgtcttgaataaatcaaacttcgatatatttcattttgtgtttttccatttgtctaatttatttctcttttatatataaaaacttttcttttggccatgtagcaaatattgtttttttgtttatagtgaatctcatcacaataaatagccatttgtgaaaagaaatcatatcttcgtctatggtttaaaatttaaatgataaacttcaacaaatggccttgatgttgtaacttttgatacaatgtaatctaatcaaaataaataggcattatgaaaagaagtcaccttgttttgtctttcgtcgcaatttgaatactgtagattatttcttgtgattcaattaattattaa

SEQ ID NO: 42730 - DNA, 1378 bp, Arabidopsis thaliana columbia
atgtgttttttgccaactatgataaaatgaaatttcatatcttgatttgtaaaactcccaaatttcagacaaattagcgtaaaaagtcccaacttttcagacactcaatcccagaagaccgaacaagtacaatgagctaaggaaaaatagataaatgaagcagtagaatttgggagagaaacagaccgaaaactctgtcgcatatctcgagcaaaccatctggaggcttgcggtagaacaatttgcgaaacaatgccattttatcaaagtcttaaaacctctcttcgaatttcaaaaatcgacaacttttgagttttcgtttgattacagaatttgtagcgaaagatgctcctttttggtatgaatctgttaaggtgatgttgattgatcttcgaacagaggaaaaggtcagctggcgcgttgtatgacgtggatcccacgatcagccgccaactctctacccgacctgacacgtgtcttctcatctacggacgaaccggcatttatctctcggcccatttaattcctcttaatgggcttttccttttcggcgcacaagttgtgatatctcgactctgttttgctagcattgtttcttcattctctctaattgcaagtttcagtctttgaatccgatgaaactcagatagctattggagctctgttttagcataagattgcttaaaatagtgagtggctatttttatccagaaaatgagctatgaatctgatgagttggtttaaactacattgatggctcttgtttttattttctcttatttgcggacattaaggcgccagtttaggggctaatcagaggaatgaatgattctcaatttccaaggtatctgtgacagagtcaaaaaagtgtgaaaacccctaaaaaagtgaatttttacattaataaccaaaacactactgaaatgagaaaccacaacaaccacccactcctccactcaccaaatccattgacaactttgggatttggaaaaattcacaaaaggtctgagacagattccatttatcatatttttcttataactcactagcgaaatactttacctaattataatctccacatatccctttttttgactttcaacgactctctcttctcttcccactttctccagtgtccatatacgatacaaccaaaaactcaactctcaactccggaactcccccaaactattcaactcttatcttcttcttctgaaatttcatagctttctgactaaaagttctgattttttttgaagctgtgcacgtgaaagggatttcaatgtattctaaactatcatcacctctatgccccagtgattccattatgtcttttcttcgtttcacacagtcttgtcttctttctgagctttcccat

SEQ ID NO: 42731 - DNA, 301 bp, Arabidopsis thaliana columbia
aataaaagtagagagtttttctaatgtagtggatttctagagttttaacccttcaagttcgacgcatgctaatctcagagattctgattgcgtcattaggactgcggactttgaagctagttctgatatccttcatgcaaaggtacccagcaactacgagtccttcgtcactactatgtatgcattcatacattagtcttcagcagccatgcgacttcaactcgatcatctccaagattgctagataggactgagatccgaatacctttagaggaatctagcacatccactggaaagagta

SEQ ID NO: 42732 - DNA, 613 bp, Arabidopsis thaliana columbia
atttatatatcaaattatacgttgaaattatcatgttatggaaagtctaatggtttattaaattatcagataattaattagcaaagtaggtatatcgaattagacttttccctagagacaatgtgccaaatacctaatatatatttaggtggtagaaatgtataatatcaaatattgggataatcaaaaaatttagtcgaaatgacgattgttgtaaataacaatagcatgatacaattatataactaagtatttttactcatctagttatgaatgaaagattcaataaatgttgttgtatgtacggaagactcaatagcggtcacagctctcttggcaaagacaacaaaccactcctcgctcgagtcttcaaagtcatcttcatcgcaaaacgatgatagcaatgactaaagagaagaattagagagcagtctagtagatggacagtgattccttacgaaatgtagtgcatacatttgaaactgctaaggagtagattatagcctataataatttagaaatttctaaaaccttttgacgctcaattagggttggacacgttagatgttgcgtaatgtcctaattacgttttgtgttaaaaagtgtttttttt

SEQ ID NO: 42733 - DNA, 859 bp, Arabidopsis thaliana columbia
tgcattaggatctgcttttgttttgctgatcttgttcttgttcatgaatgattcccaccgacttatttgagtttaccggttgtgcatgaatacagaggagcaacctgctagtttggacatcatgaaggagcaggtagttgatctgagtctggttatatctccattgaaatgaagattcatagagagaaattttaactctttgagcctttttttctagcagactgtcccggcaaacaacgagacatcagcctcttttaagtcctcccaggaagctccagttgtagttcatccagcaaaagttgctccacttactggaccttatggtttagccggtgattttgccggacacttacctagcagcatcctctctcctcaagcacaaggcttttactatagaggttggttttgtgattcatgtatgttttgtttggcttctctgatcagatctctgagctcatggagtttacatgtttcatattcttgtggatgtgtaagtgtaatactagtggccatcgaaagggcaagtataagccttcctctatccatgattgacttctctagttcttgaattgcatatgagctgttagaagctaatctgaattactttctatgttggggagccaggttatgaaaaccccacaggcgaatgggacgagtattcctcgtatgtcaatgttgaaggattggacatcacatctcctgtgtgtacaccttaccatctcttctgggatctcttctttaaaacattccaaattgttcatattcttctctgatcaaatcaggttggcttcaatgagaatgcttctctggtctaccaaacgggatatggatacaacctcaaatgccatatgggccatat

SEQ ID NO: 42734 - DNA, 1064 bp, Arabidopsis thaliana columbia
taatttgtttggtgcattagttgctgttgcttggattattccaagtgccattaacaaaatactctggtctaatcttcagcaacaagctaattggactgccctagcgtaagaaataagaatctctctcttttacttttacttgaggtgtaagcaatacaagtctcttaaaataaaggcgttattgaatgtagattgatgtggaagacaacaccgtttactgtcttcttcttgttggctctcatgccatggcttgacccacctggagttttgcttttcaaatgggatttaactaactcttccgcaatcctcatctcggctcttctcggctttcttctccaatggtctggtgcactcgctctcgggttagtctttttgttctcttgctttggttggaagttcagtcttgaggttataaaatgctaactaaatttgttgtttcttacagggcaacatcagcaacatctcatgtagtattagggcaattcaagacatgtgtgatcttgcttggaggttacgttatcttcggctctgaccctggtttcatcagcatctgcggcgctatcgcagctcttggaggcatgtctgtctacacgtggctcaatcttccggggaaatccatcgatcacatgtcaaacaagcagctgccaaagcaaaacgtcaccgtttcaaaacctaaagccgaggctgacgacggaggaggagagaccggagtaaccgtagtttctgttgacccacttctctccaagacgataactgcaaatatcgtatagttttacaatttgattagattgccaaagagaaaaaaaatgagttttactttttcttcttcaggttttagtttgtaaaattggttcagttttgatatcaaattagtgtagtaaagtatactaataaaaatattttgatatcataatgtgacaagagggcttggtgggtttatttgtacgataatgaaatagatggtgtagtttagaagtaatgtaaaacttgatgtgtatttttttttttgtcgtcacttgatgtgtattatgaggtgcaattagtaaatataataaacctttttg

SEQ ID NO: 42735 - DNA, 558 bp, Arabidopsis thaliana columbia
gtctttccccttttttatcctgcaccttattttaattatttcttagctaattttttattgctacaaatactagaataattttattttatttttgcatcacaagttataaccagaagaaacttatgtagtaattagtacacataaaactcaattgcattttctttttacatttttttttttttttttttggacaaatcattttctttttactaaagtaaatgtttttagtgaacacattgagtacaaatatggacacaaagtataaattattatgagattttgcagtagatattaatttattttagctatgtaaataaaaccgtaaaagtaaaaagcttttatcaaattcaacccacctggcgtttcagttttcattttttttttacctttatgctgtttttatgttcttgcaagtctttctcgcgccacacaaaagaaaagtaatttcttttagagttatgttttattttttttggaccatgtcttaaaaggatctcgagattggcgtctgagataaagacctctactttgcttcctttatcttgctcctcttatctc

SEQ ID NO: 42736 - DNA, 1060 bp, Arabidopsis thaliana columbia
taatgtttgaaaggagatgtgatatattatatctgttattccaggcaattggtgctgcaggaggtgcattggcgatcatggagttcataccagagaaatacaagcatatgattggaggtccttctcttcaggttgatgtgcacactggagctattgctgaaacgatcttaagttttggtattacctttgcggttttgctaattatcctcaggggtccacggagattgcttgctaagacgttcttgcttgctcttgcaaccatctcatttgttgtcgccggatctaaatacactggaccagccatgaatcctgccattgtaagtatacatttcttgcttgctctttcagatgttctatactaagaagagattgaccccgaataagtcacctgataaattacagaagcaactttatgtttttgggccatatattcacatcattccaacactcttaaacccgagaattatgattgtatcttcaaagatagatgattaatcaatatctctcttgtgtttgcaatgcaggcgtttggatgggcatacatgtacagctcccacaacacatgggaccatatctacgtctactggatcagttctttcgtaggagcattatctgctgcattgcttttccgttctatcttcccgccacctcggccccagaagaagaaacaaaagaaagcctgaggaaaataaaacaattgggagaataccggtcagattcttcaccggtttgggctgtagaaagattcacaaagctgttccattctaaaataaggagaccaacaacaacaaaaagtcaaaagtctccttgtcattgtttagatccacacgcttattttacagatttgtgcgacgtaacttttctcttttatgttcataaatcattcagactctcttccggtttagaaacatttatgattacatggctggtttagtttggtttattatcggttcactctctattctggttctgatttctgacaacaaatcaaaggcaaaagttgtggatttccaccacaaaatttgggaattgggctcaaaatttctttcaagggtggaag

SEQ ID NO: 42737 - DNA, 744 bp, Arabidopsis thaliana columbia
cactacatagtggtctgcaactgaccttttacatttctgactactcttgcagttattggttctcacgggcctgcatataaagatatattgattgatggatttgttcccccatccagcagcgtactccaatgttcccatattatgataacacatctgaatgggacgactttggggagattattaatccagatgactatgtgatcaaggatgaagacatggaccgaggagcaatgcatgtacgttccttgaattctggtcttggtcttggtctttcttagctcttgttatatttgcaaattagacctcttaatttccatgatgtttgcatagtggtggttccttttacgatttttgtatcaagaagaacaaagatgtaagaaatctgcatgatatgctctgaggatttgggatacagataggaaatcttttgccataaagttgcttaggctcttgatttggtatgagtgcagttcttcaaatgagtgcactggttctacagttccatctttatattttccttaacaactgattgcttactagtaaaggtttagggtcattctatgtagagtcttgtgttgcttattaaatttgtgatataattttccatttcagaacggaggtgatgtggacggaaggcttgatgaggcaactgctagtctcatgcttgatacaagaccttcgaaagtcatgtccaatgagctcattgtaagtagactctaattatatccaaagaacaatacattg

SEQ ID NO: 42738 - DNA, 825 bp, Arabidopsis thaliana columbia
cacattggggaagctccatcagcagccgtcgtgtgtttccccaagtcgcagcctcactggtattgtattttcccatcccaaggaagtgatttatttgtttgagtttgaaagcattaaacgtatgaatgagcagtttgatttttacagcggaagtgtatctgtacattattgttgtttcttgagagataaagaaagatgaatgttgttttagttgcaaatctgtctggaatggaacatgtgataataaaactcgtaaggtggttgtgttcatgaagttgccactgtttcataattagtctacaagcctaagaaagaaattgctctatatagagaatgctatctagatatagtatatatccagctcataaaggagattataatccaaggtttgcagcaatatgaggtctgtattttatgaaattacaaaattagaagaaaaatatcaatcaatttaaagattgttgttgccacgtcaatgacactgtctctgtagttccaatgagcttggaataaccaccgacagatctcattcatagggagcaagctgccattggaggttaattccatttttttcataataaaggttaactgtccaaactcgaaaccctgatttatttagttttcaataaatgttttcatgccttttaagagtgtgtgctaagctaacagatgagctgttattaccttgaaaactctaatctatcttaatttaataagttcttaaatatctttccaactttttttacgctttaagaaaagaaaaaaaatcctatttcttgaaccgtaatgttaatggaaggagtcaagttgtcttttgaaaattgg

SEQ ID NO: 42739 - DNA, 941 bp, Arabidopsis thaliana columbia
tcatcattatttgggacggagctttcgagatcagttttctttaattcaacttcttaacataaacttctcttttatccaaaaaatacacaaacttctctttgttgaaaaataacacatagttcatttggtactaggtaacgactcgtgcataatatattcaaaattaattgaaaattttgttctgttaagattaatatatttaatgtatgcattatagtctatagatggatagttagtgaaacaatataaaatttttgagtttgaatatattttgaagacttgccaaatcttagtattggaatttaactataactgttattattaccaaaaaaaagtattttgttgttttaaatgtatgaattcatataatggtttgtttatttagataaatattctaattagataacatagagatttcataatctcttttataattagttgtaaatgctaaaaataatttatttaatcatctttctattaatttatgtataaatggaatgccaagtaaaaagtgatacaattgttagtcatataatttagtgattatttcaattataacaaaacgatgcattttaatataatatatattcaaaatatctatattttggttataaaaattcgaaatatttaaatatggtaactttacatattaaaaaacttttgtgtgtttgacaattgagttaagaaaataaacagaaataatatttaaatacttggaaataaaagtgtttggtaatagggattagaatttttttttgttttaaatggttgaggaaaattgtgagcttggccacataaggactagaaaaactttgttccattataatctcctcaagggataaatttataaacagaaaaacttgattaaatctacctgctgatctgatttatatatttactaagttcttcttgttgtattttcgttttgctgtaccaaactt

SEQ ID NO: 42740 - DNA, 1168 bp, Arabidopsis thaliana columbia
taaactaatttaatgaaatagcattgagtactttgggtatagactagagagacatgaaatggaatatataatcatctttgattttatttctgtaggtatgagttggttttccactttccttgatttaagacaaaagcagtctcatgtttactgacttaatggcccatttgttttgccattttaaaatgtgaacaaaatctacttgtgaattcattaaagtctatgtctatctaaatttacaagcatgtttatcaatttataattttggtcacgcaggtttatcaatttaatattcttaaaaaagacaaaatctacttgctattgtctttttttttttctttttttttttcttttttgttcaattgtgattgcataggttagatatatatcgcagaaaatatgaaaacttatctagaaaacaatacgagcaacctatataacactttcagataattgaaggtggaattggcatggatggactattattagtttgaaaaaaggcatgaaatgagcgtatagactcgaagtaggtcgtgcatggctaatttggcttatgacaactatgtggaactcacgagtttctcacaatatttattcctttttctttcaaattgaattttacatatcatgaaagggactaaaagagaatatactcagtggctttggagaaaggaattcagaaactattgtttttaaaaagaattatttatcatttattctcatatggtttatataaacctattagattctccttttttctctatatattaaataaatgtttagcctgaatgagaaaaaaaaaaagtaatttagattactttgtcagggtgaaagaattcctcagagtaggcaccaattcgagctcaagtggtgacataaccacataggagacacaactccataagaaagtattatattggtgacataaaatctaatttaattgtaattatctcttacaaaacaaaatcgaacgagcccggtttagaccggttcgaggatctcttgattatgaaaaaatatccaaaattaagataattgttcgcttagtttaaaattccataaaaatacattgagctcaaccaaaaacaagaaataatgaacatgctttatacaaatagatatttaaaaacacaaaaaccctagaatattcttaattagaatacaaata

SEQ ID NO: 42741 - DNA, 525 bp, Arabidopsis thaliana columbia
acggccgccagtgtgctctaaagccaccgacatcaacaccggaatggggtgattactggcagaaaccttggacgctatgttgaagagtgtacgctgacccttatcccaagagtaggctggtttatcgtataagcgtcgttgagcaatgtcagtatcactcgtcaggtacacacttgccacagcgacaccctccgaatgtagctcagttgcgatctcgccaggatcaccgtctgttgcatggccatctgacatcagcacgagaactcgctggtcacaatcggaattcgcttggaatacggataatgaccggctcagagcctcacgcattggggtgtcaccgtatacgaactcttcaacagatagccactgtcgagcccttgtggaacgctgctgaagcagttgcaacaatcgtaccacatcactcactggccgagggatgaagatcgcaaagtctcggaaccactctctgcaaatgcgacgcgcgacatcagaccttctgaggagtcgactacctcgtctgcatat

SEQ ID NO: 42742 - DNA, 422 bp, Arabidopsis thaliana columbia
  unsure (1)..(422): unsure at all n locations
ttatatatgtaatgtctccaaattcaaacatataccacacatatggatgtacaattcccgtaaggatccatatatgaacctttttacgagagagtacgaacaaggccttaccaaatatgtgaattgccaccaaacttaaagttaacgtgtatttctaaaacaatatatatatatataaaatactccgcgacgttcccacaccgagagttagaggggttatcgagtgatacatgaaggtttagggtcagtccgactcagaactagttggcaatgagtggattggaattaaccctttatgttgatgatttctccgacttttggtgtgagactttctctcatgtgcgctcacctcacgttcatgcatgaacatctgaagtgtgagcatgtgtcggcctacctcccgtgggtgntgtgtggctttt

SEQ ID NO: 42743 - DNA, 445 bp, Arabidopsis thaliana columbia
atcacaaacctcccaatgaccaagtggcccacgcacattgtttggaatggaacgcgcatgtaacaattactctactttattgggtccggtcataacaggatttactaataaaaaaagtacggactttagtagattgtctaaattcaagaacacagacaaacagagtttctggcttctttcagctaacactgtcggttaccttctacgattttttggtccttttgtgaacaaccaatccgcattaagcagtgtttatttttgaaaaaaatgtgaaattcttgtgagtgaaacaagcagacgaaattgcagaaagtgagagtttttagcaatgaagaaattcggggaaaataaagtttcttcatttaaggaaataaaccaatagtaagacaggacaaggaaaataaatacttactgcactgaacaatgaagtaaccagtaaatcaaa

SEQ ID NO: 42744 - DNA, 505 bp, Arabidopsis thaliana columbia
ccctaaaacctccaaccaaacaaaatatatcacaatctatgaataatattgacaactactaaatagatcgtaagttttagtttatgcaagactatacatacagtagttttgtaaagttacttatattggcaaacaaaatataattctggtattcagtttgaaaacatacgttaatttacacaatatagttttgtaacaacagatttaaactccatattttgtaaacaattgtaggctatagattaaaatatagaaaactcatacacgactactcatactggacccagtcatattgtaaggtaaactgcgtattaaacgtcgtgtaatcagtcaattatgattcaccatgaacagcaatacagcataatattatagtagtaaaatactttaaaatccttttttttcgtttgacaaagcgctatactaaaaaatatagcaaactcaagtatacactaaaataaaattagtacatttgctagtcttcacctctagaagacaagagtat

SEQ ID NO: 42745 - DNA, 297 bp, Arabidopsis thaliana columbia
tcaaaatctcaaaaggtgatcgatgcccctatgcatatgcaacaatcctaaatgaaacactctagactcgatcctaaatgtgatgcaactacatgaacattcttttttttttttttatgaaatcattttctgaaatttttcaaattttttggttttttttttttttttttttttttttttttttttaaagccttaaatgaatgcagacccaaaattttacacattgcagcaaaaatttcttggcccctccccaaatttgggttcacagggcccattttgtaaaaaatttgggaaggg

SEQ ID NO: 42746 - DNA, 553 bp, Arabidopsis thaliana columbia
taacaaaaaaaaggtaaaagtatatctcttttgccatagttagactcaaaaatacgacatcgtttacctcacacgtgcacactcaccgacttacagaagaacccacacgtacgttgagggtactttagtcatttagcatcgaacgaaattgtctgagcggagaagaggagtttccgttatccctttatatattatctctctcacctttcttctctttttctttgatttttattaaatcaacaaaaatagaaaacaaaacataaaactccaactccccccccttcacgtttctcctctctctctctctctctctctcgagccaccaaatctgaattagggtttttgagaatattcatctttagatttcaaattcttcacccactgtgtaatttcactcgtcaggattcatctgcggaatcatgattacagattcgatcaccaacgcttctgctacttcagctccgagagattccggaaagaagaagagggtaacgttatcctctttgataatctcattcctttctctgaattgattcacagttttgattttaat

SEQ ID NO: 42747 - DNA, 573 bp, Arabidopsis thaliana columbia
tgttccaatacttcgttaagaggaaccacttcttcgccataatagggtttgtttagatcaaatttgtgaggatttgtcttgctaatgggttgatcatcttgtgatttgctttcttgttgcatttttttttcctgatttttgatgtatgaaataattgaaatgtagcaagataatgaatatatatatatagatcatgaaaagttaacaaactaacgatgaaaaagctaatatcctggactaaatatatattgaccaaacctttttaattattgttgaattgaaatatattaaaaatatttttagatttatctaaaattctagcttttaatttaagttatctaaaaatatcacacgaagagaagaaatatgcaaaacgtctttgcgacgtgagatacggcgacgtgagaatatgattccaagccacgattataggaactagttttaggagtgggaaactaaaaacacttaggcggtgtaatacccagtaaaaactattgaaatttttggttgtgactaaataatattaatgaaacgttaccaataccctagaatattttttaatatattaaatga

SEQ ID NO: 42748 - DNA, 564 bp, Arabidopsis thaliana columbia
aaataattatttaacctacgacaaaaactataaatttagctaaatatgcatgaaggggagccttgacttctttggactgcgggggcggagtggtgaaatcctggaaaagtaaaagttttgttataaaatgtcgtatagcaaaaagtatagcatgtaaacattttcagaatacctcatccgaatcctgaacaccacccagaaacacgagcgagaaacaaatgggaagttagaaagataatatattagtgaataatttaattattgaaaactaaaaatacaaactttaacctcccgggcagatgaaacaatagaagacgctcccctgctaacatcctacaaatacagaggtaactataaagtttacaagttagtaacttaagaaaatcaaataatgtgtcaactacggcgttaacctgattatgataatcttgaattggttgattgtcctggccggtaaaaacatcattataggcacatccttgacatattttcactgtgtaatgagacgacaatgaatatgacataaacatctaatacaaattttttttaatattattaacaaac

SEQ ID NO: 42749 - DNA, 532 bp, Arabidopsis thaliana columbia
ttattggaaacatgtatttccaagaaagtaatcagttctctgtacgcctgaattcgattttcataaagctcacttccttggattgctagagcaaacatttatattgatatctgcgttaacatcataacatgtgggtttttagtaattctcaacagtatgggtatttttgctctctctagagagggtaaatttgtgattccatctgcaaattattcctcctatatatatatagaacgtgatgaatcaaatttcttaagttgcaagccatgactaatcttgatgagtttcttgaagagctaagttctattgaatcacattctcagaaaatcgtgaagatagatgagcatttaaaaaagttggatgaagagacgaaagaagatgaagatgaagatgcggcgaagataattcaagatcggagtaccgcgagagaagcaggttaatttcttctccttcaccttgtaatttaaagttgtcctctctcattctcaaatcttgttgggtcttggaaacgcagaaattgctctacttatgg

SEQ ID NO: 42750 - DNA, 477 bp, Arabidopsis thaliana columbia
caacctataacagtctttccggaaacaaacccgaggatcaaagtggttcccgctgtggcaattgttgtagtgaacctggaaccgactggatcaacgagcttcttcagttctcctcgttctaactcttgggtgtttttcatctggcatgaccaaaaaaacaaacatttcaagtgacagactgagacaatagagcaactaaggatcattaaggtacaaaaacaaaacactgaatattttaaagtgtaaaatagtcaaccacgtaagtattagcaaaaaaatctatattattaacggaaagaggactaaattcagacaactacgctgtaagttcatgatagaggatcaataactagacatcataagaggaagcaccaagtcatttgcaagaagagcagctatatgaatccaactatgcaaagcagctaaatttaaagcaaatatgcaatactatgtgcaataaactttggcaaatgaggg

SEQ ID NO: 42751 - DNA, 526 bp, Arabidopsis thaliana columbia
tcagatgatcatgagctaacatctattcttctaccaaatgtatactaaagctctttccaaaaggaaaggaaccgcacagtaaccacaaaatccccatcaaagagtagaaaggtgtgacttttcttaggaaattgaatgaagatgcaagaaacaagcaagctagatagatacctgacactggagataacccttcaactggaagctcaggatcatcttctcgttggcttcagtagaagaaagcaaaagaccccgaatttaacatcagtcagatgaattaattaaagatctctctttcgagtccagaaacataaatctcgacaatgacacttaagaatcagatataccaaatcaaggagagaaacaaaacctgaaacaattgtgaagaattgggacttctccggatgttctgcaatgagacccaaatgaagaaatcatccgctgacgcaatttacggctgaaatgatgactcttcgccatagcctgagaaggactgagaaagaatgaagagagctgcacaatcttagca

SEQ ID NO: 42752 - DNA, 632 bp, Arabidopsis thaliana columbia
ctctgttttcgatacctcctcttgaactggttctgctacgtctttaactgaatcttgaactgagtctgcgtttttgatcgattcctgaattgggtctgagttcttgatcgactcttgaaccggtagtgttgtgatctctgtgatcggtgtcgcttcgtcgtggacgtcgtgaggttttgaggtggagaaaggaaactctgcgatggacttgacgtcttcattgtacatgaagatcccgaagaggaaaacagagaagactacgacgaagattgagagattactgttcttcctctgtttcattgtaactcctgtttcgaacaatggaaattttcttctccaaggttgcatctgtttgtttttttaatatatagagaagaattgaaacttgtaaacgaaaataaaaaagaaaaaaataattctctgtcgaggctctctaaaatgtcagaatgtttgtgagacaaggagaaagatcgatggaaatataagagcaacgaataaaggaataaaagaattaaatttgtgaaaaaattgttattgtttgacgttaattagttttgtgattactaaagtttggtgagatgggtttatccttgactggtttttaaaggctttcaggtgaagaatttaaaata

SEQ ID NO: 42753 - DNA, 305 bp, Arabidopsis thaliana columbia
  unsure (1)..(305): unsure at all n locations
gccagtgtgctctaaagttaatgtacgtcaatattgtaatagtgtgagactggaggagcttttgcgtcttgtaagcagaataggcaggtctggttcgttttattgagttagcagncagttgaaaactgaggtgtaacgantnncgcaataactagacctgtattgctggnngaacatcagcagctnnctcagtagnagtattatgcaaatagnttgggatgttctcagttgggatntgtccngattctngagactccattgttgtgactgcttagcagccgatgtgctaaatgctttgatagttg

SEQ ID NO: 42754 - DNA, 501 bp, Arabidopsis thaliana columbia
ctgtacaaaatagttttggaaaggtagaatttttatgcatttgtacactttagagttaatatataaaagactttcttagaaaagaaaaccagaaaaaaacaatacataacattagggaaaattagttgaaccaattcctgaaatttaaaaatttggtaaaaagacatttgactaatgtttgttgcaggtaaaatttgaaactcttaaaaaataatatacaaaacataaataaacaaatgcatcttattgtatagtatgaatacctccaagatcaactaatgcaatttcacatcagggttccttatagatttaagccacatatccgccattactctagatgacaagctccacaacatctcctcttcttcttcttccttctccttcttctttatattactcttcttcttccctttctttcccattccgtgttccacaagccattgcgccgcggtaagcctccgcttctccagcgcatctttcttcactcccccaatgtgcaaa

SEQ ID NO: 42755 - DNA, 634 bp, Arabidopsis thaliana columbia
cttcttcaaatctacccaaattcatcaatataaaaagaaaactcaattaaacttaaatcactcgaaatataagattgaatacatccacatataaccaaaaagaacaaaacattttcaggaaaaaaatgatagatttatgcggaattagagcttttgatcttaacggatgaagagaaattgcggtgagagagaagccttctccctccacgtaatgccagcacagtgacatatctcagatggctcaacggcgacataatcgacacaattagggctcactcttcttcttttcctagtgcacacgtttcaaattgggtgttaaatagggtataatcggcacaattagttagtgttcgctcttcttcttttcttcgtgtgaacgcttcaaatggggtgttaaataaggttaaacggaccttctatttccttttatctctctatcctgttgggccttaattattatcaatgaaaagacccatgaaagtgcccaaatcatttgaaaggcctttgtcattttctcagcagtcagcacccatcaaactccacaaggttcccttacttccttacatgaagcatctatattacattttaggcaatgaagaggatagagaatctaactatggacagtgatatctta

SEQ ID NO: 42756 - DNA, 581 bp, Arabidopsis thaliana columbia
atcccctagatcatgaacaaagagataagaaagaaaaatatcaaaagtttgacaaaaacataacaaaaaatagcaaaacaaatatttagagaacttctaaattctactacattcgatcgatttcatatattttactggtccgacgttcaaaatacattagaaatgtttagatcgtatacaaatttaaatagcacaaaactttattaaatacgtacgtgtaggtataattggagttcgatgcatgtactacacagtagacattataagacattttgaaaccgtagacgtagacatgaatcctcaatagtctttatcgtcgcgacatacttcagaaaagtcgtaaaagattgttttttccgaccaagatcaaatcaccggaagtatacatgtattcaaactaaatctcgaataattgtaagtgggaggaggtaaagaattcaaaggttgggataaaagaatgggtctattcaatgattttatatggttgatgaaaaataaaatccaacctaaaaattaaaaaattaagcgaacgtgggattgggataatgttgaggaggagccaccgataaagaccagtgagt

SEQ ID NO: 42757 - DNA, 740 bp, Arabidopsis thaliana columbia
cttctttttaagtttcttcactcaatctcgcttcctttcaacttcaccaaatctaatctatttgtcttatcttacttgggcatggttaactttgtcctttgagttaacgttaatgaacaagttctacgatgtcaagaaggtttgggtaaggtacacaccatctattcaatgattctatttccttgaaacttatgagttctaaccttaatagtactataacggttcaacctaatcttctaatgtttttttttttttttgaatcaggcttttacttaggatttctaattcttaacatctaatggatgaggtttttctatgtcgattccattgtttgcgttatacagatacatacactaaataaatgtaacttaaatataaacaaatcatcacaaaacataggcaatcacaacatgatattaaacatcaagtttatacattactatcttataatgttacgttatacataccgcattttctaatcatataattacatttatcctaaagattttacaagtacaaactatcctaaggttacataactaggcgaaggacttcattagtcagactaagccactattctacaataaaaggattagtaccctacataccttcgccttagacttgctataagttaacctaaccgtaaatatttctacacataatacatggacatatacaactaggccaataaccctctatggttgctgaatcagttgcagtaaaaggaaacatatgagaca

SEQ ID NO: 42758 - DNA, 485 bp, Arabidopsis thaliana columbia
agccgcgtttgccatgaaagatgatgtgcccttcttaatttgttctttgacatagttgatgtggtgtcaaaaagaaaacaatatataatcacggtttggagacgatgttcatgtgatatagccaacaaccaaatgacgacccgtagtagattaagtcagcagcggcaatttccgggaagatttatcacactaagaagccaccctagatactctcataagtggattcaatggacttcgtccatgcctttactttacttaatactaccacagtaccactattggttccatctagtattttgtgctactaaactatttggcatgtcgagtttgtaactggagttaaataaaatgcacttgagtgtaattggaattaaatgaaaaagataagcaatttttgggggttttacaacaggtgaaaacataagataggggaaaactcagaaacgaggggagcaaaagttgacactttaacgctttttcacatt

SEQ ID NO: 42759 - DNA, 544 bp, Arabidopsis thaliana columbia
tatatgtctcggttcggtacaaagatggataaaccaggtgactcaatcaataaccgaagaaaattcaattttcaaatgaatctggtatgagtggtttactgtttgatttctctagtgatttctggtaaagcttccgtcttcctccttccatcatcttcttactctcattgactgctacgaaaatatctctccaactatattcttactatcgcttctgggtttcccgaaaatatggaataatctccggcgacgtttttccccaatttgactcttcttccgttaggtgaagtttgtttaaagattctcgctttttcgtctctaatttgtttacgatcagattcgaaatgttatctgttgagtatttgtttgatttttcgtattgatcgtgtagccaagtgttttagaagtcgtgttgcagtaatattaaagctcaaatcttacatttggagtgtgtgcatgtcaattatttccacagcttctgatgaatattgatcgatcttgttaaattgaatgaaattactgctcatgctttgatttgattaga

SEQ ID NO: 42760 - DNA, 592 bp, Arabidopsis thaliana columbia
gtcgactctacaacgtccacaggatccctgaatatctcctttcaagagataacttgcgattactaaccggtccttctcccacagcctgcacttgattctcctcatctccttgaggatcataatctttcccaagtggactaagaatagtgtacaaacccgcagccgtaggagctgctattgcaaaagatatacatatagctacaccaatggcaggtctctcggatcttctatagcctaagttaagaccgcaaagcgcatactgagcaaaacagttcaagtgaagcaaaagaacaacaaccatcatgtgtatccattcgtttggcttgtaagtcccgttcttgcagaatatcttcctaagcgttgtaacatcgtcttgcttccatctacagagaagcacaaggtggtaaaaccgtttcgggtgttgatacagacacatcagagtaaacaatgcgttgaggatttggttgttaacttcaaaccagacatctctctgtgatttcttgggcaaagcatggttcaacataccagtcataaccatgaatagaatcgcaccggagacagcaaccacaaagaccacaaaaacataaccatg

SEQ ID NO: 42761 - DNA, 530 bp, Arabidopsis thaliana columbia
  unsure (1)..(530): unsure at all n locations
tgtcactgattataggttgatgaagaggagaaaacaagcttgttggatatttggaaaatgctagaaaaattgacagggacgattacggtgttggagagtaaattcccaactcttattaatcagaaagtgagtgctttagatgaagagcttagtaagagacttgcaactctagagactaatttgaaagggtttcatcccgctgatgtacccattgataatgtcacgtccaacaacaatgaatatgatgaggcacacaataaagaacttgtaagttgtatctcgctaaaaattgtttttcatatttagcatgaattatgatggtgaaatcttaaattacttgattatcgcagtcttggatggtagaagagaagccatcttctaaagatggtttgtctggtcaaagagtagtgaagaaagtcgtctactcaatgaagaacaagacaaagacaaagaaagagggagaaatataaaagaatctagttctttgtgaaaagaaatatggcacaaatngtatagaagaagaaagtggg

SEQ ID NO: 42762 - DNA, 470 bp, Arabidopsis thaliana columbia
tacaaaatatactctcattagtctagtgtgcaacttacgcctagtattaattaaaatatatataaaaaggctagcgttcaaaacttaaagaatggttcaaacatgattttcaactcttaaacacacaatttctattatgacaagttgaaaacatcatattcaattattaatgtatccaactatccataatccatttgtaatttagtactatagtctagttatatgacaaagcaatcggtctccatactttatattatacacacaatatatcaaccaggtaatagtgcctacaattaatttgacttgctccttgaatttttggtgtagtagtagtatttatttagcaagtaaagccacaagaaataaataagcaaattgtcattggcttgattaaagtttctagaaaaagttgcaaaaaacgaatcacagggaacaagtctctatgacacgccaactaagactgagctgtg

SEQ ID NO: 42763 - DNA, 285 bp, Arabidopsis thaliana columbia
catcacccgtctggcatgtccattttaaatgatgatccaaaatctccatccagatcgaaacccatatccctgagaaagagacaaagaaacagaactatatgagacactaggccttgttgccaagcaacagaaacttatagtagtaatcatgataaaggaggaaaaatttcacgattgaactacatttatttaggtgcaaacatggtttaagaaacttatcatattggttacactcacaacttgaaggcattcttcttattttttgctggagagccaaagccaaaa

SEQ ID NO: 42764 - DNA, 503 bp, Arabidopsis thaliana columbia
caacactcttaacaccaaatcaacagatttaacagcgaaataagcttaagcccatacaattatccgatccaaacaaatataatcgaaaccggcagaggaataagcaagtgaatcaaaaagtatgggacgaggaagaagatgatacctgaatgagaaagtcaataaccttgacccgaatcgtttttgaagaaaatggagaaaatcggttgtatggaataaaatcttcgaatgatgagatatatgatctctttggtgtcagtcacatggcacacgctatcaatttagaaaaacgcggtggttggtcaccagaattactacttctcggtctgatttggtcatatccgtattaagtccggttaatattttccataactggggtttgaacattcggtttctttttttcagttagtccgatttggagttttgagtatggaaaaataatactgaatttatttgttcaactggtttggaaaaaatattcccttaattacgaatataattaa

SEQ ID NO: 42765 - DNA, 551 bp, Arabidopsis thaliana columbia
tattcaaatttcttaaaattatccaaaattatttgcaatcgaccaaaatatttaaacttgaagccaacatttacttgctggaatagtgatttcaaatactcgaattattcataccatacttaactcatattttcttatactctaactatttataccttaactactcacatatatcttgtatctactgcacaatctttttacagaaatgaaaaagcctagtgaatgtctgaatggaactactacaatgtaaataacttttttattacttggatgttttgtttagtagtttccgtgaataatggtatattttcgaaactttagtaactttgaggatctctttacaattttcaattatttaaaagtgtaaccaaatttttaaaaccagctaaaaagctcatatccccatcctttataataaagtcataatgaattccccataatcttttgcatccccaacacacactcctgtctctctttctatctctctcttccacttcaaacttcaaagacgcacaacttctttgagttttgtaatggcacagatgaaatga

SEQ ID NO: 42766 - DNA, 606 bp, Arabidopsis thaliana columbia
ggatcgcaacgctcaatcttcttcttctccgtctccatctccaccctccgacaagaagaagaccaaaacccgacccggaaccataaccactaaggagagcgaagagacggttgcgaagaagctcgacgttgctccgccttcgcctcaatcaccaccgtctccgcctacactgaagttggacgatgtgaatcctgtgggattaggacgacgatcgcggcagatcttcgacgaggtgtggcggaaattctctggattaggtcagatgtcgaggacaacccgacccgatgagcaagagactcttgatagtctactcattagagaaggacctatgtgtgagtttgctgttcccggcgctcaaaacgttaccgttttagtcgtccgagctactagtagaatcggtcgtatcgttgtccgtaaactcatgctccgtggctacaccgtcaaagttcaaaaaatgctgatttttataatataaagtagtattggtgtgtttatcaaatgctttagagttttaagagatttgaggttaccgtttaggcactggtgaggaacaagatgaggaagtgatgagtatgttgcaagggcagtggatattgttgttggaga

SEQ ID NO: 42767 - DNA, 506 bp, Arabidopsis thaliana columbia
ttaagggactagtaaattaaaacctgttttagagcctcgctcttgagaatgcctttgtcaggtaatcgaccatccatctctctcttgctcgatcgtgagaatctcttttgagtgttagcaaatgtgtgtctatgttggctttaaatagtaatacctaactgagaaataaaataaaactttggtcatatcatttgggtggatatgtaattttggcagaaaaaatggaattggaaaacactagtgtgcatatgcatgtaaaattgaaacacacatattagatgtccccaaaaagctgaaaggtgtttatttaatctttacacaactctttttaatagtttacaaacacttaaaaagaaaaaaaacagtaataataatgtgtcgaccagaaaaaaaaaaattataatgttacaacaattattattaaaagtaatttagtgtactaatagttttgttgccagacagatcaacattgacgaaaccacaacatagaaggaggataaggagtg

SEQ ID NO: 42768 - DNA, 324 bp, Arabidopsis thaliana columbia
tctagtatcggccgccagtgtgctctaaaggagcagacgaagaagagtaaggcagacgggaggggcaatgcaattcacacactctgcactcagcagttgagccaaacaaacctgcgctgacagtagtaataggtaataatcggactcgaaaacgaggattgattaggtcagaaaataaaaaaccggtcttcaactatattttattagttatgatgtctatttatcttcaacccaacctggtgcatatagatccatgcttttaagtgaggatccggcgactttcgtgcaagcagtgtgaatccgatcgtatgagacaggtcaagg

SEQ ID NO: 42769 - DNA, 358 bp, Arabidopsis thaliana columbia
ctaatctatgaaacagtggaatcggaagctcaaagaagaacccaggatctctatcacacattacacatagtgcgaaaaatccggagagaaagagagagaatcacagtacattaccttcttcgtcttcgtctagttactccatcatcatgctgctgcttcgtcgtcgtcgtcgtctatatctggaaattggccaatggctctctcagtgtgaaggaggagggaccaatgggcattgatttggtcccgcaaatctcgtagcgaacgcctcttctctctctctctcctttgtatttgttgaaccgagagaatgcggtggaaggaagatacctttggaaatacctaaattacccctgggaac

SEQ ID NO: 42770 - DNA, 518 bp, Arabidopsis thaliana columbia
ccagtgtgctctaaagctagtattgtgtatcaagaactacctaggctgtatggcacccatacacgacatcaggtataggcctgatcacagacactagaatatatatatgccattatgtcaaacctgtacttggaggatatgttcttgtcgtatgggatggctttatcctgctcccttcaactcgggcctcttccgcctggaatatatattccaaggtggcgatactttctcaggctcaactgtattgtataaactgtattgtatttcaccaatgcgtcgaagcttcgttcagaacctcgctcagagtcttgtattctgtatagcatgttgctatggcatccatggcacgggactgggacaagctgaagtccaagagatcgaatacgaactgaaatcagatgggattgttctagatgagtagctgtgttagacaaagatgagttcgtgctctaagtttgagtgctttaagccgcatgcgggacgtgccctggtgcagcaagacggacaataagatgccc

SEQ ID NO: 42771 - DNA, 492 bp, Arabidopsis thaliana columbia
gtatatataaaaaatgactacgtctttggatgtacgagtaaagacgttgtgcgtgtttaaatacttgaggaagacgtattgttgaataatgtcgtaataattatctgtgcctgcaattctccatatatatgatcggaattaaattgcacgaaacgttatggttggtcgatgaacaacttgagagaatgagagcgatattttatcttattcatttctctactttttgatttgataaattcatcatcaataaattcacctagtgtatatagtattcttctcattaagataggaaaatatatacatagccatgtttacatcaaaactaccgacgaaataaacacaagccaaatttaagtattcaacactcaaatggaacatatatctaagaaaagttgtaccccattatttatacatgtattctcaattgtccccttatttgttctgttgatcaacgctagtgattaaatttgcgatggtctctaaacgcttgga

SEQ ID NO: 42772 - DNA, 487 bp, Arabidopsis thaliana columbia
gtaacgtattcgcagttgtcaccatctttcaaggccacacctgcacaaatatgtatatatgtaaatttaaaattgtgttgataatatggcgaattcggtatatagaaaagtctaattaacaatacaactatacaagtggtgcataaattctgatttttagaaattacggatatgtagtaaccgaaacctctaattttctatgatagataattttcagataattcaaaacagtttggagaaaaataaccagttaaattaggactagtcttaagtctctaagaacaagtaaataaatttcctgagatgactaataaaaatctcgacatatttgtcctttcataacactttaaattaaaatctataacattgctaccacaatcagttcaactgctaaccaaaattctaactatatttgtattagtgttgtcattgtatcataaattggggtgttggtttggttgtagacataaaaagacagaacagcact

SEQ ID NO: 42773 - DNA, 280 bp, Arabidopsis thaliana columbia
aatattttctcaaaagatccgactcatttcttactctctttaggcaaattattataagatgttgcaaggaaaaaaaaacagtagataagaataagaataagtaaaccaaataaaagattgtgacttgagcttatcaacacaacgaacgccctaatattaatattatccaaaattgagccgtaaaaggtggcaataagtctttggcttctttagctccacaattaaaacacagcctgtaacactcatcaaatgattgtgacatttacatttttacaagtta

SEQ ID NO: 42774 - DNA, 858 bp, Arabidopsis thaliana columbia
atacagtcttcagccaccatgagcagatgacttccggaaaaacagctgcatcagaagcaggaggaacaacaggagcagcctcatcgcttcaaacagcaaattctaggactcattagtcattagaacagaaaggccaaagtcacagtgcaaataaaacatgaacttttatatagtagatagaacaaggaaccgatttgaattgtgaacattatataaacacaagaagagcagtcactaacaaaattagcaaacaagacaaagagaaccttaagaaagatgaattaacaaatgcatataaaaaaaaacaagtagaaatgaaaatccctaatccatagccaattcagcagattcagaactagaaattgagagcaatgatccaagaaaacaagaaaaacatgtttcctatttgaaggcgtttcggatgagtaagaaattcgatttatctgcgatttcacaacaagttcaacaatcgcatagaaactcgaaacgcactaatgacgcagaattgagtttcagaatccacgaattaacctccgatggcctctggctgtgcgaacgaattagatagatacacgtgtaatctttttttttataaaataaactcactgattgtaacttattgggcccgtttaaaaagcaacagtgggcctttcattaggcccacgaattattagtcagtacagaaatcgctgatatctgaagttaattgcctcaaataaacggttaaaaggcccaccgtgagacagaaaagccccaatactacataacaggtcttggggcttatcgaggatttttgcaattaataaattcatccctccggcatccccagaaaagccccaatactactacataacagtt

SEQ ID NO: 42775 - DNA, 559 bp, Arabidopsis thaliana columbia
tttaaaaagggaagggagagtttataaaatataaattagcattgacattggtgtgaggttcttcacataatcatatcattctgaccaaaatattagtcggaaaatggttagaaacacaccaatatgagttgttttcttgtagttctgagaaaacatagatgaaccaatatatcaacgtaagtaactaagataaattgtgaatcatgagaatgcaagaaatattttctcatgattacatgagatgaaatactaccttacaattcatcaaactttttgtagaaaaaggtattgaagaaatgaaaattggatgtagacaaaaaaataaaaaattcttgctgcaagatcctggacaaagacaataatcacattaagaacaatgtaaattttttaaaattagtaaaaactctctataaattaataattcacaccatttaaattttagaggaggtgatgaaaggacattatcatcaattttggtagttacccccaattatttaactaatcaagatacaaggggtacaactgtaatatattcatagtttggtgtgtttctacaata

SEQ ID NO: 42776 - DNA, 504 bp, Arabidopsis thaliana columbia
tatagtaaataagaaaatatacttgtctttcaataaacgtacaattcgaagaagaagaatgaagaaagagattcatcgaataaaggaggaaagttccacacctgcgagattcttggcggctacggagcagttggcccctttttctgacgcggactcggtcatgtgctgcgtttgcattgtttgatccaaaattatagtggtcatgaatgtttagctttacttttaaatttactaggtgctattgaattttgtatttctatacatttgaatgtattttgatatcaaggtcatgaatggttggcagattttgagtgatttttaagattatggccgtctcattggttatcacgtttaaacgaggctgttaaattttttatagcacttgtagagaaggcggtcaaagatagccaatgaaaacgtgagtatggtaaaacagagcaattaagaatttataacaagaattttttggcgggtggggtaaaatgctgtcggattctatggatg

SEQ ID NO: 42777 - DNA, 1004 bp, Arabidopsis thaliana columbia
agtctcgcaaacctggattactgcctaaaacaacgtttttgctttgcggttgtgcgtaaacataaaccgcaaactctcctatgttttgacttttaagccatatgatgagtccatagacttaataagttggaaagagatatggtctattcccatagatattgacatcatcaggtataagatatagtgaggtaagcatcattggttgtaacctttggtccgacaaagaaggtccacacaacacactgctccattgctgcagctcaatgaactatagtgtcttcaccactaaatcttaatatatgagtttttgtaatcggaacatcatcattgactttgaaaagaaaaatactatattccgtatggtcattagtcttccaaatttttaattagaacaatacatatctaaaaggctgcttaaggctgaaccaatttggtagacatgtgtttcgctttcactaggaattataagtgaaatgcaaatggcagtgcaaaacatagcttttgcatgccaggttagtttgtaggagatcacttgaaacttgagaagagaattgtttcatgtaataattctacaatagtatgtacatatataacatatgctgcaacgtcaggttacattcataccacattcacgcagttttaggtttctgatcaagaacttgtcatgtgttatgagagcagcgcgctaagcgattcacacaggtgaagaacctaaaatgttgcgaaataaaggaaagcaaaaacaaaaccaaaactatagtttttgtgggatttctccttttgtttcgtaatatctatactatatggaaatagttagttgggacatgtacattgcatgacaagacagtcagattgagagagagaagcaaaacataaacgccattgccgttctgcaactacattcttgttttcattttatataaataacatctcctcaacattcaagacttgtttcttaatctcagaattcagtccttttggtgtccatatgcgcttatagagag

SEQ ID NO: 42778 - DNA, 522 bp, Arabidopsis thaliana columbia
  unsure (1)..(522): unsure at all n locations
taccccgtggagcgctgaatcaacaattcgaaactaatacagaactaattaatctgcattaaaattttaaaatatcatctaatatgtcaagaacatattaatttagaaaatcactctacgattgatagcccattttggaggaaaatagtttacaaataagatttataaagtataaaatttagagtaacgaactagacaatctgcataaaaactacaagagcgaacaatattataaaacgagaaagaaagaaagaatcacgaagttggccaatctcatcaagtagattagagaaatcttgaaacatcagacgcctgcattatcaacactagctcgttactatcagttttgaacgcctgatcacaatcaatccttttaagatgatacttttcattgcccataaaagagtctccatttccgtgtgaagaagagagagactcgtccaatgacattttgctccaagtagtacagtttggttgtctcccgaagcaccaccatctanaacttatggttgaaccgattgt

SEQ ID NO: 42779 - DNA, 619 bp, Arabidopsis thaliana columbia
gaccatgtttatgacaatgatatgacattaatatatatccccacaaataagcttaattttttcttatcctattatagtttcagaaactatattgtccacaaaaatcttcttgttctattttttttattcccattaaaatcatacagcgatgaaatgattggcgatggaaaaaaaaacaaagggacaactaaaaataatactacaaaagacaaaataatacttaatacacgtctaaattagcaattgacgtcgctaaccatgttttgccataattaccaattttcgaaacgataaacatggagtattctcagaacataatcagaccaaaacaagtgaaaaacaatagccattgattcaaaccaaaatgagtttcacttcacacaataagtaaacaaaaggcgaagacattgtaatgataccgttgtaaaagtaagtcgacaaaacagatgagaaactaaaccctaacacttatgagtaatctctcagttacggtacctgcttccacgttcgcgaccgtagtctctgtctctgtcccgatcatggtcatagtcatagtcacgctccttgcctcttccctctctcggcttctgcttctgcgtctatccttatcgtagtgatg

SEQ ID NO: 42780 - DNA, 563 bp, Arabidopsis thaliana columbia
tagaaattattgttttattcttaatatgattagtgtgtagattaattttggttttagatttcttcaattgtttctggttttgaaagatttgcacttgattcatttttttttcttttggcgttgaaggatttgctctagattactaacctatgaagattcagtcttagttttagtgtgttcttaaatttaatcactgaagaacgtgattagatgttcatttgggttattgtttacattcatgtgggggggggggtaaaaatgtcagttcaaactgacctgatttcgtaagtcattaagaaagtacctgatcttataatattttaagttttttaagctttctagataaataagtcttgttaaataggcgcaatccaaataaaagtaaagcataatggaaattgaagagttctaaagattgatcatgaacaagttcttttactttacgaactcattctagaatataacttttatggatgatgttaaatgagatatgtctagagggaaagataaagagctacaattcgaagtaacaaattaaagaggaataaaagcggtagatatat

SEQ ID NO: 42781 - DNA, 580 bp, Arabidopsis thaliana
acattttgtcttctcataatatttttgagaactatactatataaaacaccactcaaaacaaacaccaatcggactaatttgttaatagcaagggcgtttaactaagactaagagacataaccacataagacaacatttttgattaaataataacctggacgaggaccggatggtccgggatacccggcgggaggataagcaccgggtggaggtgggtaagcggccggtggatagccgtgaggtggtggaggataaccttgcggagggtaacctcccggtggaggataagctccctgcggtggaggaggataagctcctggcggatacccatggccgtgatgattatgatgtgagaagaatcttttgtcttgttcgtggtggtcgtctttacccatctttaattaaaatcaagaacttgagagataataagatgatatgaatagagagagatacaagatatggaaaaatgaactatatactatgttatgtttagacacatacatgtgtgcgatatttggttatgtgtagcgaaaaaggctcttagctattgatttaaaccgaaatggacgcgttgatgctt

SEQ ID NO: 42782 - DNA, 328 bp, Arabidopsis thaliana columbia
cgccagtgtgctctaaagctgacttagatcaaatggagtaagatggatcttagttcgaccagattggctgctgtctactggccgaacaatgctcgaggagactataactacccctcctcctgccatttttggtgttccaagtgaacttgtgaaggaaaaacgaccaatctaaaatagtagtgcccactgcccagcacatgccacaaagctgaaggaaaatcctatccaattatgtccgtaagactctaaatattctgtctacattctttcattgtcaatctatcactttacgacagatatttcgtaaaatcgtaatgataaacaccca

SEQ ID NO: 42783 - DNA, 484 bp, Arabidopsis thaliana columbia
tgtttaagaaacttcagtgttgggtatgtttttgagagtttaacgcaatagttgaaacaattaagtttagtccgttttcacatgcctacttatgcattagttcttggcttcttgcagaccttgcgatctagagatcagtgataagatgtacatactacatagtacacatacctacataaacaaacatgcatatacgtatatatgcgtgttcatatatatgtagagagaagctaaggatggggctaacgagagactgcaacagaaggctaaggcctgatctctatgtttcacatagactcgacataattcagtgtctactaagatgctatatgctcatacatattaactagaccacacttcactgacatatttttaatgtaacatcaatctatattgttcaatatacagcacaaatatcgatgttttaacgaataatgcacagagtttttattttttcacttgggtatgacatatgatgtggatg

SEQ ID NO: 42784 - DNA, 335 bp, Arabidopsis thaliana columbia
tttactcatggaattctttgactttgatgattgcttctgtgatttgtggattcgatctagttgatcacgatcgcactttttagtttgctttagtactactatagctcagtgtaatagtgtgattctggaattgcatttgacggtgaatttgggaacttgtagttgatcataaatcttgaatcttcgatgttgtgagctgttaatggtacaaatgatcaccaaatccttgaagactggacttgaggtttcactatgaaaactcccaagtgcaattatgtgtattaagtagaaattcttcatgttgtaagtaaaaaaggactgtgttacatgtttga

SEQ ID NO: 42785 - DNA, 533 bp, Arabidopsis thaliana columbia
tcttgaaagtgaggtcgagggtgatccattcccacctgtttcaactagtgttaatgcatcctttggtgtaagaggacggttgagaagaaaccatgaaccttctgaaaagtctttttcgtccgtgctcttgcctccttcgagatttccggcattgacagagaataaggattgcggaaaccaagaacgagggggttgttgtagaagaaagccggacactttgagtctcccggtaaacagtcatgatttagccttcacgaagctgaaggaaatgaacagctgggcggatgataacttaataagggatgtattgttatccacagaggatgattttgaaatggccttagcttttttgaaaggaatggtttcttctggtaaggaggatgaggagccaacttcaaagattgaggggtatcatccgataacagaagatcggaatatagaacatttgagaaaacagttacaagttcggtgaagatggctgcaaggtccacatttgaggatgctggcaagtatgatctggaaaatagtgatgg

SEQ ID NO: 42786 - DNA, 466 bp, Arabidopsis thaliana columbia
ctatataaatctggccgcaacaaaaaataaaataaatatatcttactctgctcaaggttaacggtggcatacattgttgactttgcttctagttatccacacaagtcacccatttggccatttctaaatttgatgttccatttcgttggagaaaaaaacccctatgtgtgtattaatgtatgacagaataccaaaagataataaggatattcattgggatttaacgagaaataaaaggcacaattctctcgcaaattggtcaaaaatacgaataaataaatcaactaaatacccaaaaaggtgaaagaattagagacaccccaatgtacttcatatagtaaacatttaaatatgattatcgcttggcacaattattcactcgagtacccctatatatacccattccttccatttgtagattccatattattcacgattctcatcacatcatctccgatactcacaa

SEQ ID NO: 42787 - DNA, 515 bp, Arabidopsis thaliana columbia
  unsure (1)..(515): unsure at all n locations
tgcttctcttcattcagattcccaggggccttttgaagattatcatcatatcttaagaatgaagatgttttattcaatcaaattcttgaaggttcgatgcctaatcattctaatcctgggacaaactatgaaacaagatacaaaaactccgaatggaaagttaaaaagaagaaaacgaaagctacggttcaagaaaatgtaagctgataaacaaaaaaaaactgtatgaacgaagaagaagaaaaaaagctaagaagaaatgatgtattgtgcggaaggcaagtcgagtttccgttgttcaacgaaagcttcatgaggctcaaactcgtgtcgttcgctagaaacctcttctaaaggctttacgtcttcanattcgacaatgaaaccagccttcatattcactatcgttgatgaatcttgaagtcgaagacacacatgtctgcttgtaaccactgaagttattacggaagacaatattgttgttgatatggtcttgaatgtgatcagagggtaat

SEQ ID NO: 42788 - DNA, 496 bp, Arabidopsis thaliana columbia
caataaaccggccacaagcttttcttcttttgattctctgcctcttcttcattcaccactgcgacgcctcgagattctcgtcatcaagcgttttctacagaaaccctaattatgatcatagcaataacacggtgcggagaggccatttcttaggattcttgccaagacatttacctgttccagcttctgctccttcacgaaaacacaacgacattggtattcaagccttgttgtctccttgatcactctctctgtctagatatatagtactatatttatatctaatgcatgcactcatacacaaagagtacaagaccattcatcgatctccgatgtttgctttgacatgaaattagggtttcagatgtttgaccctataattgttccttgatcttttgattatttttggtttgcatgtaacctattttagattagaagtgagagatattgtgattaggtttgggttttgttatcccactcttcttttttttttttt

SEQ ID NO: 42789 - DNA, 360 bp, Arabidopsis thaliana columbia
tgtgggctgaatgtggtttatgtactacattggattgacataaacaattggcttaccaattcttggtgtcgtaagtcttcaaaagattggttgttttaagtacaagacggagatggagatgaaagggaaattgtggggtgataagaagtttcaaaagaggcttatatgccactttagacagccgacagtttcttggctcaagacaagctcttatgatattgagagaaatccgtctcatgacaagctcttgtggatgaaacttcatggtagtttctttacgatttgttgcaggaatattcattcgctcaaccatggggtcatggttgtttgggagggaaggatttgatatggtgaagaaga

SEQ ID NO: 42790 - DNA, 486 bp, Arabidopsis thaliana columbia
tagacaaatgttaaaatgagacataaaaaagctaattgtttcagggaaagagggcattttccgtaattgatcaacggctctctcagaaatatagccgttaccgactttccgattatagaaattagagtcatccaaaaccctaaattggctctacccctttataagcaacccaaaatttcgtaccttttcactcacttcatcaatctgctctctcatctctcatcaatcatcagccaccaacaattcttcgctctctctgctctgatatcactgctcgaacttactcacgattacttctatgcagggacatcgcaatctcatttcgttaactcatgagatatctaagccgaatcgtatactatcgctattcttgttttctgtttgcgtgtattttgggattttctttgtgtttagtgataatggatgcaggtttgaatcggtgccacttcaagaacactttcttccagaaaaaatccaaggaaaatg

SEQ ID NO: 42791 - DNA, 310 bp, Arabidopsis thaliana columbia
ttcgcctccccggaaaatattcattatcttacaaagataatagtttataaattttatatcattatttaaagaaaataatatgatgtagaactgtctttttaaatttctattaaaaacttaattttagaagaatttggattttctttacaaaaatttttagaaaaacttctcaactatttggtaattattttcttggacaatttgttctttttccagataaactattagcttggtaccataatgacaaaatagtattttccgttctttacttggtctggtctactagctaagcactaaaatatcttactag

SEQ ID NO: 42792 - DNA, 507 bp, Arabidopsis thaliana columbia
taatgatagccctattcttttctgtgtagctaatctacgacacaataaaaagcggcaatcctggaactgttgggtttgagaattgcttagagttcttccctgcagaaatgttctctgggaggtaggcttctattgcatgtttgcatgttgtcactagttgggatctaaatggaactatcctttcagatctggagcatggacaaggggtgatggtgcctgggtcgagctctctgggaaaatgcatgttctctccagacttttggccaacctacgtcgaaaaactgatgaccgcatagtccttgtatcaaactacacacaggtatgctggaaaatgtcaattcgagttggatataaagttacttttatatttatatgaaagggacagtgcataatattggtcatagagaatgaagtatgaaatgcctccacatggattttgaatagattcagctgctggtcgtcattagtgatgttactactgtcctaaatttcaattatggatgttgc

SEQ ID NO: 42793 - DNA, 556 bp, Arabidopsis thaliana columbia
tcacccttcaaacaagtcactctgaccgcgcctgctcacttaaaacttcgctcttttcctgcagaggaagaaacagcgcataggataaggctactattgtgtttattgattgtagcgaattgattagaaaggcgatgttctacctgctcctccgtgtttggtggcaaacttttgcctccattgcaacggaacttgaatgactcagaataactagtagactctctatcgatgatgaactctggagaagagatagtcgaggatctactggtcttacgaggagaacacggctggtttgagtgataggcctctgcttctgatgatgataattcagagccagctccccgtggacatataacagtacttgagtttccgactatttgaaagctttccatggatggatttttcggaatttctacaaggagatcaccagctgaatgattctgttctgcagcaaccatatcagattcacttgccaacttcttccctggaggaataatacagtccaagtcaactggatttaccagcagcttttactatatgattcgacacaagatga

SEQ ID NO: 42794 - DNA, 459 bp, Arabidopsis thaliana columbia
gggtttaatttatgtgataactgatagagaagcccatattgatatatcgaacgttgaaggatgtgtttggtaaatctttgttcgtggataaagtgtgtgtgtagctcgctctgcttttgttattggtatgtgcattatggatggcttattatggaatgtgaattatggattgttatggtgagattgtgtgaatcgtatcatgtgatgagtaataggtgaacaatcccagcaaacaagcgtatatgtggtgattgtggtacaacgatgtccatatgaattggtggttacataacacttgctgaaaaggctacagtgcagtggctgcaaagcggtgtatagaggacattgacgagtgatcgaaaaatcatgtctgaatggtcacctagtatctgacatgtcgtttcatatccatgcacatatttagacatgaactgtaatcgtcgatcagtaagtgttgag

SEQ ID NO: 42795 - DNA, 516 bp, Arabidopsis thaliana columbia
  unsure (1)..(516): unsure at all n locations
nnnnnnnnnnnnnnnnnnnnnnctaaagttgcggtgctacccatgcagcttttatcctgcttggtatccttgttggagtcgaggtcatcatgggcgttgcggcaggagtggggacttggcttgagttgagcgtcgcgaggcggcgtgggcaggaacagtaccaacttgagaaggttgagacgtcgtttgggtttaagaggtgatcgccgtttaggatgttggtatccttggttggttattattgcagggggtatgaacctttggttgatcctggaaattgacaacgtcattgagaattctctggcttgttgacgaggagatatcctcttcgttgtggaagtgtgtgtatatactcttgtctccaatagtctatggtcttcaaagcgggcgcgggaatgtacggaacatatctatgagttacaattcaaccctaggctatggtcgtgataggaaagcagttcgtctgggccaaacaaacttcttctagttctacgcttacttatccaagatatgaga

SEQ ID NO: 42796 - DNA, 553 bp, Arabidopsis thaliana columbia
  unsure (1)..(553): unsure at all n locations
tnnnnnnnnnnnnnnnnnnnnnnnctaaagctcgtattcggtctatttggcctcgtgttcggatggcgctcggagcatgtaagaatgggacattcaaccgaatggttaactgatctagacctttcagcccgctcggttaccttagcttggaatagctggaggaggtaggtttgcccaagcaaacagtagaggcgccatccgcagtatatagctcggctctagctcaatagtccgataccagacgagggtggacctgaaggaagggaactcttcatgtttttaataacaaactcagttgatattaacatgacgtcgtggctgggtgcattctgaatcgagctggtaaaggttgatgtatctacacatgcaaagcacgcacctggatgacggggacatggacgactggttcgcatgaaggtgccgtgttgcttctgccactgcttctgctgtaaacccagcccgtcagggaatattgtatctcattgattcgcgggcttctacacgtcggacagcgaagtattgaagggatggttgatgtagagatggtgttatc

SEQ ID NO: 42797 - DNA, 506 bp, Arabidopsis thaliana columbia
tcgatctagaggatagaggaagccctgtttctgtttgaccattctcatattacttcaacttttgtcttttatgttgtttttgttctgccctgttttctttctcattgcaatgtctctatcctctgtttcttcttcccatcttctctctgttttacttttaatcttttgtcctgtatatgaaactttttatttgctacattggatatgataatttttatttcaattcttgcatccaagttttatttactttctctgagtttttctaatgggaaattgctttgggttttccgcaaaagtaggtaatagagaaagtccttatcgtggtatgcaaccaaacatctctcttctctaagatttctctacttcttgtcatatcttatttctgattataaagtcttaaattgagttgagacatctttgatttgattaactgttgattcatcaggttcgtcaagaatctctgccaaaagaagtcaatcgtctcggctttcaagcttaacaataca

SEQ ID NO: 42798 - DNA, 503 bp, Arabidopsis thaliana columbia
attagaaaagaccaaatataaaatccaagggccaagattctacagctggaatcctaaaggacatggagaatctagtagcatgtgaagaggtccaggagaagacgaaaaacccaacagacgataactcgcttcctgaaacagagggttctccaagtaatctcgtacgtcaatttcgttaccgttcgaagactgctctgttttcacgccgaggttaaagtcgaagtcgtcttcgtcgttgttgttgttccctgaaggaaagatgataccgttgagctgagagacgacagggttgattaaggctttgagctcgtcgatgttgtggcctgatgatccatgaaggaagttgttattattgtagttttggtgtggatcatcgtagagtagtgatgggaagttggttagggttttgttggaaggttctataagcaaaggtaaggcttcatgatgatgatgatgtgttgttgagagtgaatggttatgaaggtagctgatgtggttatgga

SEQ ID NO: 42799 - DNA, 428 bp, Arabidopsis thaliana columbia
cgccagtgtgctctaaagctttagacgcaacctaaccataaatatgaccattagccctgccgggaaacctccccaacgccgaaccagacagcaaagatcttgagaccgaaaatcattcctccatagcgtcggcatcctcctctttgataacagtcattctactgtccagagtcgcccggctatcctcattctcatcctcctccatgatactgggctccacggatacaccgcggcgcccaaagccaggctctacggacggccgaacacttctggaagatcgaacactgccaatgtcactttcgacactgctctcgcggccgcgtgcgctagaaggtcgcatgggagccgccagtagcttgagcaccacgttcttcaccttgacgagggcatttcggctagcagcatcagccggcacaccttcttcgatg

SEQ ID NO: 42800 - DNA, 499 bp, Arabidopsis thaliana columbia
aagtacaacattaactctggtttcaccgaaatcagattctatgtacagatatatggtggtgcttgtaatgtggtatggtaacttcagctacctgtaggtgatctcgtagcagtggattcttctggtgttgggctcgatggagtttgtggctgctccaagattttgttgtcgctcggtccagcgtggtcttgatcaaatgtaatcatctggttccagtctggtccagctaatgatgaaagagtcaaggagctctaaacagatatcatatttggggaggaaaaaactcaaaagctcaaagagagattagattaaatcacagaaagtgatagagatcaaggatacattcatctggccacatgtctgtgatgctgacttcgcctacctctgatcgaaaccagtaatctacacccatactgtatataatgtaacatacaggtaaatatgaattaagtcaagtatgattttctagatatggttacttttctagactgtgattatg

SEQ ID NO: 42801 - DNA, 454 bp, Arabidopsis thaliana columbia
  unsure (1)..(454): unsure at all n locations
nnnnnnnnnnnnnnnctaaagttcagggcggccggatccgactttgagtgcataaaatctgttgtgattgatgggccaagcctggtttacaatatctacgcacgcctattatcatggtttttgacgaccagctctaatatggttgacgccttgccgacctgcgacgaagtaagccgcggggtcatgctttatttgatgcatctgaagatgcttggcgttgagatgtatatacaaacattgtatgccggagactcttcgaactaaccagcttcagtgagaacatctatttcgacggcgcattgcctgcacataagcgcgaaacccgagttgcccgacttgagaatcaaaggaataaacttgaattgttttgtgcagagactagaaatggcttcgacatgtccaagcctcccgtctataacagaattatcaaacctgataatgtgctacgcagccg

SEQ ID NO: 42802 - DNA, 393 bp, Arabidopsis thaliana columbia
ccagtgtgctctaaagtttgcaaggaatttcagagtactctactgtcatcatatatacgccccatggtccaggcccggctgcagcttgtccttttgtgaccttgaattggtatctcgtgtggcggaatgcaacctcgtatcccgtcagcgtgtaatatgaacgagtaataataatagtatcgtcattgtgcaacacgggcctgatttggacttaccccgcgaggacgggaatatctcgtattagggcaggctgcatacttaaagtgtcttgagtgcggagaaacaggcacagtggctcacccaacttactcataactcactcattgagacccttctggccaggctaggacctcctcttagactgtaacaagatggcaccaagcaagaccgaga

SEQ ID NO: 42803 - DNA, 606 bp, Arabidopsis thaliana columbia
atatcccccactttttaagcaagactcgtgattcttgcgtcgtggattcgaggaggtctatcgcatactctgtcgtcatcaacttgttttagatgcaaatttctcatgtccatccatacccaaaaatgataaatgtttttttcttcgaaaatatagaatattttttattttgtttttatatgaatttttttttttaatgaataatttttgggtgttttggaatgaatagtgttttttgttttttagatgatgtttttctgttgtatttttaataaatctgaaataggtttatataggaaaataagttttcaattttctacacattttttacccatttcctacgaaaatatatactattacatctatctatataaaatggtcttctacctactaacatagccaactagtatttgttagacagtcgtctgccacatgttcacaaaagccttacaaatttcctaccagtaaattggtaggaaattgttttatgatattcctttaaaacttttatgacaattgtacgtaagaaactggaaaaaaagtttttttactaatttcctacgatttatttttctaattttctacgataatatatttttgcaagat

SEQ ID NO: 42804 - DNA, 343 bp, Arabidopsis thaliana columbia
gagaaccagtcactacttcgaacatgtgaggctgtctgagaaggcaaagaagtctgagacggctgaacggaagaggacggagtcccaacagaagctagtcgagagcccattaggcggcggagggctgccgtgcgcaaggagttgatcgacagagagccagatagcgggtagggctttacttcgtctccaatcaatataagtcactcgagatctagacggtgtgactgttctacgcacaccagttaatgcgtacatttaaattagatggtcaatacggagtatgtaatggcactgaatacgcctggaatatcaagtgtgtaaaaaaatgaatgggtaagaatga

SEQ ID NO: 42805 - DNA, 488 bp, Arabidopsis thaliana columbia
gtgtgctctaaagttcagaatggcagcatgaacaagcttctcgatttcggagtccggaacagggctgttactgcccaactgatagacggttcgtcgagctttggccaattccaccaggatgtctgtcttaggggatccattccgcgcggagtaagagaacggtcgaacagctacagccttgtttggtgagaaaccgcggactccttgcggtattgaaagaggcaatgtaaaaaatagccgagaagcgatgcgtgggattgccatgctgacttgggtggttggttgtcagagccgaaagaccaaaatatatccgcacagccgacctgactgccaagactgagatctctttgtcacaactgactcatgattagaaagctcttgtggaggacggcataatagacgtaatggacgcaagtcaggtaaccaattgctgttatttaaaaaaaaagtctcgatctaccctagacagccgaaatatcgctcccgtg

SEQ ID NO: 42806 - DNA, 1010 bp, Arabidopsis thaliana columbia
cacttctgtttattagcattcttgaatcatctatgatcgatccttttatgtactaccaacgaaccatccatatattttactggaacgaaagcacgaaaccatgtccgatgttaatatgtttaacgaaaaaccacaaatacaatacacaaattcaagaacgttcttatactaaaaatttccacaggacttgtatatttgtgtaaagcttcatcgataagaggcaaaaaacaagaaggcgttatattatacagaatgagatctgttttttttttctttttttttccggtaattacttttactctcttccaaaaatgtaataataatagaaaagaaaaaaactcacttcaccatcatcacagtcgcaggaaaaaatctcgatccgctcactctgtataatcagactagccggatgggttaagcaatgatgaaatgaggaatgaggagtgtgtgtgtgaagggaccaagtagaggcttcatgcttccagagattcgagtcatttttgttgaagcaaaaaacaatggttcacgagtacttcttcttgctaatctcccagatacgatttaccagatctgctttcaactcctctggaatctgtgatttcaaacttgatttcacatcttcaatcaacctccttctgcacaaaggtccaaccatccaaaacatgaatttaaatatgacgattataatgaagcatgaagccaaaagaggtccaaatgcaatatatgcagattctagctattatactcaagtaagaggaagagaatgtatgagaagatcatagggaacaggaataattcgtgcttcacttacttcaagtcgctaccatcttctccacctgattgctctgtacgcaatctcttcttggcatgcatggagatgagaaccttgtcataccatccgcatgaacgtagatgtgacagcgcgtcttttttcaggctgtggaaatgtgcaacacaatcaattataggttagctatggcgtcggaatataatagcgagtatttagcaaa

SEQ ID NO: 42807 - DNA, 448 bp, Arabidopsis thaliana columbia
ttactgctgctgagattgcttacaacgcaagaaatcattattactatgctcagcatcagcaacaacagcagattcagcagtcgccgggaggagattttccggtggcgatttcgaataaccatagctctaacatgtactttcacggggaaggtggtggagaaggggctccaacgttttcagtttggaacgacacttagaaaaataagtaaaagatcttttagttgtttgctttgtatgttgcgaacagtttgattctgtttttctttttcctttttttgggtaattttcttataacttttttcatagtttcgattatttggataaaattttcagattgaggatcattttatttattcattagtgtagtctaatttagttgtataactataaaattgttgtttgtttccgaacataagtttgtttctgtgatggttatgtattgataggt

SEQ ID NO: 42808 - DNA, 3955 bp, Arabidopsis thaliana columbia
tatcttgtttatgagagctttgatacatgcaaaatattcgaaaacaatgtccgaatatataattttcgccccgtaatatagcaaagatcacgaaatgcacgaaaatgtacattaagatcagaatttggagtagaaaaaaaacaatagaagaactccattttccttcctcattcatcggagagctctctttgggctttccgaaaaggtatcacatactaagtttggcctcaaggtctaaaagctctagagtcatacatttttaacaaaaaaaaaagtgaaaaaacaaaaaaaacgagggatgcaacacgaggactttcttggaggtcacccatcctagtactactctcgtccaagcacgcttaactgcacagttttgatgggatttggtgcattagtgctggtatgatcgcatccgttactacatgaaatgcaatcgtatctattcttttttaacgactttatgatccctttgccgtgggtcccaccagctatgtaggaataccctatcttatttataagagctttgatacatgaaaaatattcgaaaacaatgtgcgaacatataattttcaccccgcaatatagcaaagatcacgaaatgcacgaaaaagtacattaagatcaaaatttggagtagaaaaaaaaacaatagaagaactccattttccttcctcattcatcggagagctctctttgggctttccgaaaaggtatcacatgccaagtttggcatcacggtctaaaagttctagagtcatacattttaacaaaaaaaagagaaaaaccaaaaaaaaaaagagggatgcaacacgaggactttcctggagttcacccatcctagtactactctcgtccaagcacgattaactgcggagttttgatgggatctggtccattagtgcttgtatgatcgcatccgttactacatgcaatgcaatcgtatccattctttttgacgactttatgatccatttgtcgtgggtccaccatctatgtaggaataccctatcttgtttatgagagctttcatacatgcaaaatattcgaaaacaatgtccgaacatataattttcgccccgtaatatagcaaagatcacgaaatgcacgaaaatgtacattaagatcagaatttggagtagaaaaaaaacaatagaagaattctattttccttcctcattcatcggagagctctctttgggctttccgaaaaggtatcacataccaagtttggcctcacggtctaaaagttctagagtcatacatttttaacaaaacaaaagagaaaaaccaaaaaaaaagatggatgcaacacgaggactttcttggaggtcacccatcctagtactactctcgtccaagcacgcttaactgcaaagttttgatgggatctggtgcattagtgctggtatgatcgcatccgttactaaatgcaatgcaatcgtatatattcttttttgacgactttatgatcgatttgccgtgggtcccaccagctatgtagaaatactctatcttatttattagaacttttatacatgcaaaatattcaaaaacaatgtccgaacatataattttcgccccgtaatatagcaaagatcacgaaatgcatgaaaaactacattaagatcaaaatttggagtagaaaaaaaacacaatagaagaattctattttgcttcctcattcatcgacgagctctctttgggctttccgaaaaggtatcatagccaagtgtttggcatcacggtctaaaagttctagagtcatacattttaacaacaataaagagaaaaaccataaaaaaaagagggatgcaacacgaggactttcttggaggtcacccatcctagtactactctcgtccaagcacgcttaactgcagagttttgatgggatctggtgcattagtgctagtatgatcgcatcagttactacatgcaatgcaatcgtatctattcttttttgacgactttatgatccatttatcgtgggtcccaccatctatgtaggaataccctatcttgtttatgagagctttgatacatgcaaaatattcgaaaacaatgtccgaacatataattttcgccccgtaatatagcaaagatcacgaaatgcacgaaaatgtacattaagatcagaatttggagtagaaaaaaaacaatagaagaactccattttccttcctcattcatcggagagctctctttgggctttccgaaaaggtatcacataccaagtttggcctcacggtctaaaagttctagagtcatacatttttaacaaaaaaaaaagagaaaaaacaaaaaaaaagagggatgcaacacgaggactttcttggaggtcacccatcctagtactactctcgcccaagcacgcttaactgcagagttttgatgggatctggtgcattagtgctggtatgatcgcattagttactacatgcaatgcaatcgtatcaattcttttttgaagactttatgatccatttgccgtgggtcccaccatctatgtaggaataccctatcttgtttgtaagagctttgatacatgcaaaatattcgaaaacaatgtccgaacatatgattttttccctgtaatagagcaaagatcacaaaaaggcccgaaaagtacattaaggttaaaatttggagtagaaaaaagaaacaatagaagaattccattttccttcctcattcatcggcgagctccctttgggctttccgaaaaagtatcacatgccaagtttggcatcacggtctaaaagttctagagtcatacattttaataaaaaaaaagagaaaaaccaaaaaaagagggattcaacacgaggactttcctggaggtcacccatcctagtactactctcgcccaacaacgcttaactgcgtagttctgatgggatcttgtgcattagtgctggtatgatcgcatctattactacatgcaatgcaatcgtatctattcttttttgaagactttatgatccatttgccgtgggtcccaccatctatgtaggaataccctatcttgtttataagagctttgatacatgcaaaatattcaaaaactatgtccaaacatataatttttcgccacgtaatatagcaaagatcacgaaaaggcccgaaaaagtacattaatgtcaaaatttggagtagaaaaaaaaaccatcagaagaattccattttccttcctcattcattggagagatctctttgggctttccgaaaaggtattacatgccatgtttggcctcacggtctaacagttctagaatcatacatttttaacaaaaaaaaaaaaaaaaaaaacccgaaaaaaagagggatgcaacacgaggactttcctggaggtcacccatcctagtactactctcgctcaagcaggcttcattgcggagttctgatgggatccggtgcattagtgttggtatgatcgcatccgttactacatgcaatgcaatcttatatattcttttttgaagattatatgatccatttgccgtgggtcccaccatctatgtagaaatcccctatcttgtttataaaagctttgatacatgcaaaatattcgaaaactatgtccgaacatataatttttgccccgtaatatagcaaagatcacgaaaagacccaaaaaactacattaaggtcaaaattttgagtaggaaaaaaaatgaatagaagaattccattttccttcctcattcattggagagctccctttgggcttttcgaaaaggtatcacatgccaagtttggctcacggtctaaaagttctagagtcctacatttttagcaaaaaaaaaggagaaaaaacaaaaaaaaaaaagagggatgaaacacgaggactttcctgaaggtcacccttcctagtactactctcacccaagcacgcttaactgcagagttctgatgggatccggtgcattagtgctggtatgatgggggatatcct

SEQ ID NO: 42809 - DNA, 484 bp, Arabidopsis thaliana columbia
taaaactagctagcttttgaatattccatgactatcatgtaaaagatgattaggtatttttgaatccccatattctactattcatcaccgaattggtgtatgcatatttatagtatacatctcttgtatgagctaaacaaattatatgtacgcattaatgatgtacaaagatcagatgtgtacataaaggagattgtagtagagagactagagaggatgggaccggacgtgttcatgaaaacgcggaacgccaatgtttctctgttgacggcaacccaagaacatggccatgtgacctacccactctttcttcaacatgattgtcatttcttcatagatttcatttttgcctaagaatctaccccttaaaggtgtcggacgtcatagattgttacatccaccgtagtagtaaaacattattgacttgtatcattgaataggctatcttatatattgctaacttgttttaggtatgagaatccta

SEQ ID NO: 42810 - DNA, 4035 bp, Arabidopsis thaliana columbia
ccgttactacatgcaatgcaatagtatctattcttttatgaagactttactatccatttgtcgtgggtcccaccagctatgtaggaataccctatcttgtttatgagagctttgatacatgcaaaatattcgaaaacaatgtccaaacatataattttcgctccgtaatatagcaaagatcacgaaaaggccttaaaaagtaccttaacgtcaaaatttggagtagaaaaaaaaagaatagaagaattcaattttccttcctcattcatcagagagctctttttgggctttccgaaaaggtatcacatgcgaagtttggcctcactgtctaaaagtaatagagtcatacattcttaacaaaaaaaagaggacaaaaatcgaaaaaagaaaagagggatccaacacgaggactttccgtgaggtcacccatcctagtactagtctcgcccaaacacgcttaactgcacagttttgatgggatccggtgcgttagtgctggtatgatcgcatccgttactacatgcaatgcaatcgtatctattctttttcgaagactttacgatccatttgccgtgggtccaccagctatgtaggaatccctatcttgtttataagagctttgatacatgcaaaatattcgaaaacaatgtccgaacatataattttcgccccgtaatatagcaaagatcacgaaaaggctcgaaaaagtacattaaaatcaaaatttggagtaggaaaaaaacattagaaaaacaccattttccttcctcattcatcggagagctctctttgggctttccgaaaaggtatcacatgtcaagtttggcctcacggtcttaaagttatagagtcatacatttttaacaaaaaaaaagagaaaaaccaaaaaaaaagagggatgacacacgaggactttcctggaggtcacccatgctagtactactctcgcccaagcacgcttaactgcggagttctgatgggatctggtgcattactgctggtatgatcgcattcgttactacatgcaatgcaaacgtatcaattcttttttaaagactttatgatccatttgccgtgggtcccaccatctatgtaggaataacctatcttgtttataagagctttgatacatgcaaaatattcgaaaacaatgtccgaacatataattttcgccccgtaatatagcaaagatcacgaaaaggctcgaaaaagtacattaaaatcaaaatttggagtaggaaaaaaaaccaatagaagaattccattttccttcctcattcatcggagagctctctttgggctttccgaaaaggtatcacatgtcaagtttggcctcacggtcttaaagttataaagtcatacatttttaacaaaaaaaaagagaaaaaccaaaaaaaaagagggatgacacacgaggactttcctggaggtcaccaccctagtactactctcgcccaagcacgcttaactgcggagttctgatgggatctgatgcattaatgctggtatgatagcgtccgttactacatgcaatacaatcatatatattcttttttgaagactttatgatccatttgccgtaggtcccaccagctatgtaggaataccctatcttgtttataagagctttgatacatgcaaaatattcgaaaacaatgtccgaacatataatttttgtcccgtaatatagcaaagatcacgaaaaggccagaaaaaatacatttcggtcaaaatttggagtagaaaaaaaacccttcctcattcattggacagctctctttgggctttccgaaaaggtatcacatgccaagtttggcctcacggtctaaaccttatagactcatacatttttcacaaaaaaaagaagagaaaaaccaaaaaaaagagtgattaaacacgaggactttcctggaggtcacccatcctagtactactctcgcccaagcacgcttaactgcgaagttctgatgggatctggtgcattagtgctggtatgatcgcatctgttactacatgcaatgcaatcgtatctattcttttttgaagatttgatgattcatttaccgtgggtcccaccagctatgtaggaataacctatcttatttataaaagctttgatacatgcaaaatattcgaaaacaatgtccgaacatataatgtgcgccccaaaatatagcaaagatcacaaaaatgccataaaaagtacattaaggtcaaaatttggagtaggaaaaaaatcaataggagaattccattttccttccctcattcatcggagagctctctttgggcattccaaaaaggtatcacatgccaagtttgcgctcacggtctaaaagttatagagtattacatttttaacaaaaaaaaaagggaaaaaccgaaaaagagggatgcaacgcgaagacttttctggaggtcacccatcctagtactactctcccccaagcacgcttaactgtggtgttctaataggatcatgtgcattagtgctggtatgatcgcatcagttactacatgcaatgcaatcatatatattcttttttgaaaactttatgatccatttgccgtaggtcccaccagctatgtaggaataccctatcttgtttataagagctttgatacatgcaaaatattcgaaaacaatgtccgaacatataatttttgtcccgtaatatagcaaagatcacgaaaaggccaaaaaaaatacatttcggtcaaaatttggagtagaaaaaaaccccttcctcattcattcgacaactctctttgggctttccgaaaaggtatcacatgccaagtttggcctcacggtctaaaagttatagagtcatacatttttcacaaaaaaaagaagagaaaaaccaaaaaaaagagtgatgaaacacgaggactttcctggaggtcacccatcctagtactactctcgcccaagcacgcttaacggcggtgttctgataggatcaattacatttgtgctggtatgatcgcatcagttactacatgcaatgcgatcatatatattcttttttgaagactttacaatccatttgtcgtaggtcccaccagctatgtaggaatcccctatcttgtttataagagctttgatacatgcaaaatattcgaaaacaatgttcgaacatataatttttcgccccgtaatatagcaaagatcacgaaaaggccagaaaaagtacatttaggtcaaaatttggagtagaaaaaacccccccttcctcattcattggagagctctctttgggctttccggaaaggtatcacatgccaagtttggcctcacggtctaaaccttatagactcatacatttttaacaaaaaaaagaagagaaaaaacgaaaaaaagaaggatacaacacgaggactttccgagaggttacccatcttcgtactactctcgcacaagtacgcttaactgcggagttctgatgggatctggtgcattagtgctggtatgatcgcatctgttattacatgcaatgcaatcgtatctattcttttttcaagactttatgatccatttgccgtgggtcccaccagctacgtaggaataccctatcttgtttataagagctttgatacatgcaaaatattcgaaaacaatgtccgaacatataatttttgtcccgtaatatagcaaagatcacgaaaaggccagaaaaaatacatttcggtcaaaatttggagtagaaaaaaaccccttcctcattcattggacagctctctttgggctttccgaaaaggtatcacatgccaagtttggtctcacggtttaaaagttatagagtcatacatttttcacaaaacaaagaagagaaacaacaaaaaaaagagtgatgaaacacgaggactttcctagaggtcacccatcctagtactactctcgcccaagcacgcgtaactgcgaagttctgatgggatctggtgcattagtgctggtatgatcgcatctgttactacatgcaatgcaatcgtatctattcttttttgaagattttatgatccatttgcagtggg

SEQ ID NO: 42811 - DNA, 559 bp, Arabidopsis thaliana columbia
taacacatcaccaagatgaatccagatataagattaaaaaaaggaacttaatatgaagtttttcaatatatagcaggaaagaacagttaatacttcgaaattacggatatgaatagcacctgtacgtattcttacctgtacgtattcttatctcaatatttcttggggcagaggcaagtgattgtcccgcaaaggggttagaatgtgcggttcctgcttgtaagcttccaatactcgtgcccagccgagaggagtgtgactacaaaagttaaaggtaacacaaaggtaaggtgagcaggacaagtggacacactggtaatggtgaaagaaagtaacaaatagatagaccggcaagggatttcgccctgtaggggatatgaacactgcaggtccagcatcaacaacagcatcatcctgacatgtaacataacaagtgtcatatagatgtatgggtgtatcatattctgtgaacaaaatcatatgcaaactaatgcatcaataataaaaattgcaagatttagatccacaatatgtagcaaaagaatacgcacaggtgttt

SEQ ID NO: 42812 - DNA, 557 bp, Arabidopsis thaliana columbia
ttttccggcttgctcactgcctccgcaccgttctccaccgtgctctgcacaacgcatcatctcattcgccgcaagctcatgaaacgtatctaatttcaccgattccgcttgatctaccggtgatgaagacgtgataaaacttgatggggatcgtgacggatcgagagacgatgatgatatgagaaacgatgatgagaagagagttcatcatttgcagaagggagacgaagatgagaagcgtagagcttcggagcaaacaaggaggagagaaggcaacgaaggaaaaaaaaaattgtttgtatagtcttccaataagagaatgacacgtatacgaaccttaaaaaccaaaaaacacctaatgcaaggtgcgaacctctcttaataccacaattctgaattaatttttgactttttttctttagttttcttctaagaaactcataaggtcttcccaatggacctgctctaatgtgccgcaaacatgagatgaagcgtcagaaattcagaataaaaattgtcacctgttttagggagcatgactactaggcccaatggag

SEQ ID NO: 42813 - DNA, 443 bp, Arabidopsis thaliana columbia
agtcaactgaagcaggtccagtgtatcttaaatccatagatgtttcggttgtaaaaaacgatgtcactgccttactatcgctagtaaatgggctcgttgaggaagttggtgtgcataacgtgactcaaattattgcatgttcgacctctggttgggttggtgagttaggcaaactcttttcgggtcatgacagggaagttttctggtctgtgagtgtatcccattgtttcgagcttatgctggtgaagattgggaaaatgcgttcctttggagacatacttgataaggtcaataccatttgggagttcatcaacaacaatccctcagctttgaaaatttacagagatcaaagtcatggaaaagacataacagtctcctcctccgagtttgagtttgttaagccgtatctaattctaaagagtgttttcaaggcgaagaaaaac

SEQ ID NO: 42814 - DNA, 561 bp, Arabidopsis thaliana columbia
cattcaaagcttgtagctgttttcttcacggaacggcaaaagaacttggtttgacatttctactaactgatcacagaatttcgagaaacagagacaacttatacctcaacagctacactgattccaatttaggaatacaacttgacaatgatatgaaacacagtggaaacagcttaatacttcacctaaaatctgtaatttcattccaaactaaggtagtgcagttttgagtctaactaatcaaaaccatatcaacgttcaatatgttttagacaaaaatcaaacaagtttttacatttggatactgaatcgaaaatgttttttttaacaaaagtaggacatctttttcgtctcaggacttgcttgtatacatctgacctctttgaatgtcaaagactgaaaatacaaacagatattacacaaagtaatggtgataaattggcaacagaaatgcgaaaacttgagatcaaacttcattaaaacacttgaaagcataccatatccgacccttcaaactttcaatgcgaaagactcgcgctcggttttggcgaccacgacgct

SEQ ID NO: 42815 - DNA, 514 bp, Arabidopsis thaliana columbia
ataatctaaatgccaaaagacatgtaaaatgacatttttttttttgttcaaatgacatttctaggtaccactattcagtgcataaaaataattttatgattaagaaaataaattcgagcccaagcgcaagactcaaaaataaatcgacatctcaaaacgggcccaatataaagccataattcgtaaaggcccaatataaagccttaattcgtaaaggcccaataaagaaagtgagagtgtagcgttagggttttaagaaatcctataaattagttcattcgtctctttcgttcctctctgcgtgccctagttattcagatcgccgaatttgcagtaaggagacgaaaatatggtgcacgtttgctactaccgcaactgtaagcttcttctctccttttcgtcgtttatatcacagctcattttcgattcgatctacgtagtgatttctctcaatatcaaatgatagattagggattatctgaggtttttgattgtgttatatatatagattgtg

SEQ ID NO: 42816 - DNA, 274 bp, Arabidopsis thaliana columbia
tgcaatttatctatgtaatgatctaatgactacaactgatcttgatttaattgccaatcataaatctccccgaaacgttagagtagccaagtcttcctttacgataataacaccatgtctcaaagatgacgagagcgagatcctcttgtaagacttggtaatatagtatccagatcctttcttgacctgcgccactaattcgagagagcagatgatcggaaagcatttgttcgtccagactggttttgggacatctttctctgatttaaaattg

SEQ ID NO: 42817 - DNA, 600 bp, Arabidopsis thaliana columbia
ggatccctatagagatttgttttaatagcatgtttttcaaaaatgttacttgtattttttaatatatttttggttaatagaactgttataaaatatgacaattctaaaaaacacgcttttaagtaaaaataacatatatctaaaagaaaagtatatatattttgttgaataacatgaaaattatctaaaaatacatgggattttgttaaatctcatgaaatattgataaatataaagaaatttgttttactagcatgttttccaaaaatactacttgtatttttcatacagatttggatctaagaaatcgatttatgagtcatagattcgtatggtaattgtagaacatgaagatgggttacgaagaatatcaaaatcagagagaaataaaagaatatggaagtgaaagagatatgcaagagtagaaagagacatgtggctcttgaaatcaatggaggtggaagaaaattgaaaattctaaatgactaaaaagattagtgaatttttctttagagctctattgcagatgccagaggaacaaggattgtagtggcggtggagttgagggtggtgttgatgatgatggtgccatggtggaaa

SEQ ID NO: 42818 - DNA, 487 bp, Arabidopsis thaliana columbia
tgaagagacaacaatatatttcattcagaactaacaatttcattagtgcttactctctccaagcagacacgaggaacgcagatgcaaagacaactcggccggcggcataagatatggcattttctcgatcttttttccatatctaaccactgattcttgggttttctccatgttttttttttaaattaaggaagattgattagtgtatgtctatgtttgtttaaatgtatgagatagacgaagagaatttgctatgaaggaaggtgatgaagtatttggatcaccaaggagacgactaaatggtaaatgatggaataattgaaatatacaaactataggttatatgattatataaaaggaagaagaatagtaaacacatataaataaaagactaaataatctctatgtcaagaaataacatattgtttaaaatactacaacttgtgatattaaaaaaaaatgactttcgaatatttgaaatcaaaga

SEQ ID NO: 42819 - DNA, 548 bp, Arabidopsis thaliana columbia
gtcatctatgtatcgaatattatgaattgaataataattaagtttttaaaaaataaaatatttatatattttatcttttaaatatatttaaattaagaatcccaatttaatatattaccattgagcttgccaaaaaattaaaatcttaccaaaattcttaataataaaatttcacaaattaattcattaaaaaaaaataaaaaccttagctaatagactaccattaaggatggtctaacattcttcttgttaaatcccttaactaaatatatataggccgaacctctttgttgggccaagaattttgaccatctgaccaatatggtccaacaaagagaaacatctatggtgctgtagtgtctgatttgtaacattacaaaacaatggaacaaggaataaggtttttttttttttttaatccagtacttttatgatctatgagtttaaaactaaaccaaactctagtttttttctagactcaaagactaaaagtctcattgataactttcaacacgcgtcatgcagcttcattgtctagctctacatgc

SEQ ID NO: 42820 - DNA, 533 bp, Arabidopsis thaliana columbia
agagaaaaatataaagatcactattggaaatacccttaaccaatcgaagttgttttatattttaggttcattaaaaaattcggcgagccgaagtatacactttttgagagaattagttggatagtaagggtatggatcaccacccgaaaaaaaaaaatcattttctatatagctttgataccactaataataccccagccaaatcaaacatgaatttgtttctgaacccaaaaagaagtacccgttctgattcggtagaagaaaaataaaatcgaatacgaaaccatgaaaatctcttaatcgaaattaataagtaataacccacctttttgtccaaaaaaaaaaaaaagtaataacccacccatgttatgtttgtctacggaccaaaaaaaaaagttatgtttgtctacgagtccaaagacaatgagattgacgtggcaagctcccatggatagaacaagtgtcaggtctgtgttactcttccccaaacttcattagctttaattctcttcgtattaatctttgtccaatat

SEQ ID NO: 42821 - DNA, 472 bp, Arabidopsis thaliana columbia
ctaggataacttctgtctttatgaacgtgttcctataacggatgaaaagtcaccaaaagaaacagattttgatctgttggtaagtcctatgccattcctcgtagtcgacaaccttgaatgatcttatctcttgccatttggtatttgctgggagcattacattatattgtgattaatatgttcctgtcaataaaaattttcaatacactatgatttcagattaggaagatatctcaggctgacattaatacggagatcattttcaattgtcaaatgggacgtggacgcacgacgactggaatggtgattgcaaccctggtctatttcaaacgtactggggcatcaggtacttcatcatctccaaccgctcaacttgcgaagaagcatgtgagaagagagtataacaaatgctctttcagtgaattatatgttattcggaaaaaaaagctgaattggggatacattattattg

SEQ ID NO: 42822 - DNA, 559 bp, Arabidopsis thaliana columbia
tagcactgtgttactatcaatgatcgttaaattcatcatgctttttttttttttttttttttttcttcgatatagacattgcatggagtttttgcttactaggtgacattttggtattgattactacgtgatgactagactattagtgtactgtgcctgtcatgctctcttttgcttatcccctttttttttcttgttacaacccaacaataacaggctaaaaaggtaagaccaatctatccgttgaagttcacaaatccaaaacctagaactaagcccacactttaacaagtctgaaagttatgctaacgtgggataaaacaaacgctaaagaagacaacagttcttggagctctcaaaactcatagacgtccgttgcgaaacaatccatagaaactaaatccaaaaaatgtgttatactcgtggtacttactagttagtctccccgttttttttttatctagcgtttttgatctctatgaaaagttgttctttcttgtattgcaaagctacaatttgtattgctggattcataaatatttttgatattttagtaggc

SEQ ID NO: 42823 - DNA, 268 bp, Arabidopsis thaliana columbia
ccgagtccccaaaatgtacagactttgatccctagtgaattcccatgctaatcctcgtagtcgagaaccctcaatgagcttatcacttggcaaatgtgacgtgccaggagcattacagtatcttgcgacgcaatatggacctgtcaattgcgaatttcgctacactatgatttcacattaggcagatgtcacaggctgccactgattcggcgatcacgttcaattgtcagataggacgtggacgcacgacgactggaatggtgattgc

SEQ ID NO: 42824 - DNA, 528 bp, Arabidopsis thaliana columbia
gtaacgtccgccagtgtattataataacatatccatttcaaattatcgaaaactatttactaagttgtttttttaccttgtaagcacaccattgacccaattcagcaagagtataattgatagctctaagtttatgaatcaaattggcagcaccatcgctctccgttctttcagagacgccataaacctgtctcaattcatcctttgctccagcatccctagcccccataaattgccacttgcttttccttgaacttgcttgtgccgcttcttcaacagctgcaatcatttgctttattgtctcatgaagagaccacatagtagcagctttgtcatactcgacgactatctctgaaggcataggcacatgtttctctaattcttttcgatcttttatagtacaaaccgtagaatccaacttggtctcgaggttacgtatctttatcgcacaatctacttggcttgaaacacatacgtttacaaacaaaaagtgtcactttcaagaacattggcaagctttagagactg

SEQ ID NO: 42825 - DNA, 521 bp, Arabidopsis thaliana columbia
tagtaaccccggggatcctctagtaacggccgccaaaacgaaaccaaaacaaaaggtaacataaattctcaccgacgcattgaaaacggtttgcctccacttcttggttagatcttctgcaagtagtgccctttggtaacttccatactacaaataaaaacaaatgaacatagtcaaaaaaacacagcaagacttcaacttatatatctctcaactttatgttcagatttgtgcataggaacacatttatcaaggctcttgaaaacttatcaagttaacataacaaaacaccccaacatatgactcttaaatatcaattacctaagattgtaactctttcatgaaaagcaatttaccataactatccccatgagtggaaagatcaaactgtttctgtatataaatgttaggtccacacacacaaaggataaagcttccaaactttatcggaggattctaaagtatcagattaaacggatccagacaaaattaacaagtagtttagcaagaaccaatcaatt

SEQ ID NO: 42826 - DNA, 484 bp, Arabidopsis thaliana columbia
cactatgagtcagtctatgacattgacaaacaatttatatcttctttgtagagtttctttctttattacgtcaacaaagtgaaaaaaaaaactcactcttatcttcacccttacttccaagcatctcaaaagacgttttttacataatagccagatttgtgctgaacactttcgtcgatgagcggcaccatttcagaagttaaagtacgtcgtacaccttacgtggggatgataatgatgtatgcaaaaaacgtctcataagtgtgaatcaagtttcttttagtaatattgtaatgcaaattggctactaaataaatttctatgataaggtctgatgattaactgattaacaaaagcacagatttttctttaaaaggtttatagtttgcaaatgcacagattaaaaaggtttctttaaaaggtctttttcagagtaatttcgtaaatagtttgcaaaatacattaaaatttaatattacaactc

SEQ ID NO: 42827 - DNA, 572 bp, Arabidopsis thaliana columbia
aaatagaaagatttcaggcatgtggcacatatttcctttattaaagtttttgtgttttgataaacctcttatttttagttggttaagaaaaataaataaatatgagaaagtattttgatctttcagtataaagtatatatatgtgggatagttgcggtcccaaagatagtcatctagcgtaatcttttgggttagctgataacactaaaaggtcaggaagaattctgggatttcttctttgggagtttttcttaactaaatattttcgttgctcctggagcatttttttatttatcgaaatggatctgtctcttagctgtaacttgatatacttcacaaatgtcgtaaatgtgccactcgaccataatgtgatacggccattcatccgtaacttggttcaacaactcataacctaattgttgacaaatatgaagcatctcctccatttgttgtatatttctcttcgtgatcaaccgattatctttcagcttgaattttcgaagtcagttctaatatctgtgttctcaaattcacttttgagatgcagtccggcaatttgctaataagattgg

SEQ ID NO: 42828 - DNA, 460 bp, Arabidopsis thaliana columbia
  unsure (1)..(460): unsure at all n locations
tttcataactattattatatatcaaatatgttattatacttcctaaatcaatactattatttgagacgtatgtttagtgaggtgggcagaaagttaaaaaaaataacaagtttaccattggattaaaaatttctgtcataaaaaagtcgtttaagaagatgcggattcttttgacgaaggttttaaaataacaggtcataatttttaatcttaaccatccattacaattaatagaagttattgatttttttccagtaaaaatcaaatcctacagcaagattttaaggaaaaaatctttatttatttccaattaatttattcacttattcaatatcattcataattacgtgtgtttcaaattgaaaacaaattatacacctatattataagaatttataatattctttatatatattcccaggctngtctatccacttttgcattaatcaatagttttgag

SEQ ID NO: 42829 - DNA, 445 bp, Arabidopsis thaliana columbia
caaccaaattattcttatgctatgtgtacctacttagaagcttacacagaaaaaaaaaaaaaaaaaaaaacttctaaactttggttttcttttttttcccatcatttataatattcacgtgttacataataatttggatgtatataataaatgatccaataattaacaaaataaatctgatcatccaatcataataaagttgcgcatactaaacaatattttattttcctaaacacaacttctttgatatatggattggtcgataagaataataagatatgggttttaatagaagacaatcaatcttcaggggctttcttgaaattacagcgtggtaaaaaacaatgacatcaatctggacccgatcacgaggacccggatccgtatcgataaacagtgtagctttcactaccccatttccccggaaacacctctcaaaaatttc

SEQ ID NO: 42830 - DNA, 601 bp, Arabidopsis thaliana columbia
  unsure (1)..(601): unsure at all n locations
attagttacttctgtggttgattttgatgcaaacaggtcggaacaagagagaagagaggaagagcatctacaaagatgtgaagaaggaagaagagatagagtcttggtctgaatcgagccatccttgtcacaaaacagctgaatctacaagtgggagattgacgcagaaacaggagcttaacttgagaaagaaggaagccgataaaaccgaaaaatccaagacgagtaagaagaagaaggtggaaactgttagtaacgactctgaagccggtacttcatctcttattccagaattcaagctcaccataaagaaatcacaccttctgttcttggtaagattaagcaagacaagaccagtgacacactgtcgaaatggctatgtataaaagtgtgtattaatctaatgaaaatctgtgattcaggggatccaaagaaatttgtggatatgcatatgccaactgagacaacgatgttcangattcattatccgagagganagaagtcatgggatgttacatatgtgggcactgatgtacaatcaagattctctggtggatggagtcgtttggccaaggagttaggtttactgtcggagatgttt

SEQ ID NO: 42831 - DNA, 452 bp, Arabidopsis thaliana columbia
gatccccggcgtcgatgaaacgatccgttagacctctcttcagtgctcttctcttcgccttcttcgccgctacactcatctgcagagtggcgattcgtcggagcagcttctccttcgcttccgccatcgctgagcttggttcctccggtctcatgactgaagatattgtattcaacgagacattgctcgagttcgccgccattgatcccggagaacctaacttcaaacaggaagtcgatttgatttccgattacgaccacactcggagaagccaccgtcgacatttcagctccatgtcaataagaccaagcgagcaacaacgccgtgtgagtagagacattgcttcctcctccaagtttccggtaacgcttcgttcttctcaggcttatcgttactggtcagagttcaaaagaaatttacggctttgggctcgtagaagagcttatgaacct

SEQ ID NO: 42832 - DNA, 515 bp, Arabidopsis thaliana columbia
caactatgtttgcacaaaaaaaaacaaagtacattagtcaaaatttatttatttactgttaaattataattaacaaaatcgttatgttttttttttttttataatatttagagaggcttccaaaaaacctttcagacacgactaccaaaacacctttactaaacattttttccggcatcggtgaagtttttgcttaccggctttgggatcccatctgcatttcacttcgacatcgcatcttttccttaattgttttctttattattctgtttttgatgtttttatcaaaaacatttctcggtttaatctttaccaaacttttttgaacactttatatcaattgcatggcatatatacaggctgctttttaataagaaacgaagaaggaaagatttgggatctgaaaaatcacgcttcttccttttctctcggcagatcttgttgcccaaaagtttccgacttttgtaaactattcaccctgaagacctttcaccgagcttatttgatgcaggaga

SEQ ID NO: 42833 - DNA, 708 bp, Arabidopsis thaliana columbia
atcgtcaaacgattgagtcttgctttaattacgctttctgacaattccttgtcatcgactggggaaatgttgattctcttgtccaaattcacatcctttggcttgaaagcatagtcagccctgtcagaagcagttttttttcaaatctatgagagattatacaaaacaacacaacataaatttgacacaaaaaaagaggctgttggtggtaatacccattgatgacggtgtcttgtgaaatacttgctgatgcgcgtcccaagagcaatgctgtttctctcctttttaagtaagagaacgcatcagaaactgagattgaaagatgaaagaaaagtgttttataactaaaaagctggtttggagacagagtcaccttatttgttcttcttcatctttctgtatcgcttgaataggagctgtcttggagaaaagtaagctatggtggctaactccagctataccaagggtttcgagaaactttacatgggattccagtttttcatctctgtaaaaaacaaacaaagataagtgaatcgaaataaaccatcatgacacaatttttgctcagaattcagtgtttgcttacagtttgatttggttatagtgctcttcgtatagttgctgttgtgtaggtgaacatcaaagcctcccttgggaagactaaaaagttctcgaaggtcctaagagagatatcatatggtataaaga

SEQ ID NO: 42834 - DNA, 478 bp, Arabidopsis thaliana columbia
tcttttaggtcttgtcccttctgttttattgtttgtaggagatctgtagacttacatgcaagttagttcaactggattaccgattacctgtaattatgttttctggacagggtgcttcaataccacgctgtgcaaatggtacaaatcttctggtacccttaccagggccaattagttctgaggatatggctgttactggagctggtgcacgtcttcatgaaaaagatacgtcaagtctttcactgctatatgattttgaagaactagaaggacagttggatttcttaacccgtgtagttgctgttacattttatccagctggtgctgttagaattcctatgactcttgtgcaggtacttactagtttccaaactatgaattgatgaatatctattagcttcatcatgctctgaactcgttaaagtttatgattagctatcatcaaaagaagaaaaaacaaacactttttctgcattgt

SEQ ID NO: 42835 - DNA, 255 bp, Arabidopsis thaliana columbia
caagaaataatgtaacaatgcaatcgaatgttctttattttatttacgaatgaatgtgccttgttagatagaatcgtctatagtgaatttatgtttatgaattatgagtaatatggttggatgtgatttcgttcatggaaccgaacgatatccaaacgttacacagaaatatattcttaactcacatatcgaaattcataaatcatcatgcaaaaatattctactgtactacagagcatatagtctactgattat

SEQ ID NO: 42836 - DNA, 435 bp, Arabidopsis thaliana columbia
tcggtcattagcattgctgttactccgataggggttggtgatggtagccacgtggtatggacattccacttcgagaaggttcacaaagacatcgatgatccacattccatcatcgacgaatctgtcaagtactttaagaagttggatgaggctattcttaattttaaagaataatctaaaattttatacaaagtggaacccatatatatagttatttatatctattattctatcacactaaatgatatagttaccgtaaaaaaactgggatttatgatgtatttccttcaatactttgaaaatgcataatcaataaatatttgcttgttggagtcaattagtattcacaataattttctcatgattctgcgtaatttatttaactcacatgcatgtactactggtcaattaagtgggatgagacaaaatgcaaat

SEQ ID NO: 42837 - DNA, 547 bp, Arabidopsis thaliana columbia
gcaatagttattttctggtcgatccgacctaagcaagttttcttgatctccttttgcttttgttttcctccaacctgaccagtgcaagattcatcgattctcctccggatacgcttaaaggcttccggagaagtttcgcgagtcgatggatccttgcgttggccatcttccttcaaaaagtattaatgctcttaagtaaaccttttgcattcattggtcaaaagctcacatattggctcaaccttcttacggcaaatggaggcttcttcaacttgatacttaaccttatgtcaggtgagcaaatttaacaatatagcatactttagttcgttatatttacttatccctattaccaaatacttgaactcgaagaagattacatgtatttctttcttacatatgatataagtacccaaagttttttaaaagaatcaatattgaaagatctcaaggaccacatatcatacagttccacatattagtattcccatggacctttggacaaggaccaatgacacttacacaaatcaaacggatttgagacaga

SEQ ID NO: 42838 - DNA, 481 bp, Arabidopsis thaliana columbia
ttaataaagaaaagacgagagtgaatttgagtgtgtaaatttgtaatttacagattctagagttgcataatacattcccaagtgtgtaaagcttgtcttgtatatactgttcgttgatgatgatatattgatatggattcaagaagacccttaacggaaaacattttgttctagttttgtttccagctcaatggggcaagaattaagtcttgatccctttgtcacttttctaggccttttctagtaggcctatatattatatctcattgcgctcaacggcccactacaaatcttccggagtatattagacgtgaaaaaaaatgtgagattttttttactcacgggcctaatctttgctttataggtacagagaatttgcactatgtcaagtgtcacgccttgtgatgacaggaaaaaaaaaaacagagtataatctacgcctacatagaagaactatggacgtcgagatttgaactaaaag

SEQ ID NO: 42839 - DNA, 484 bp, Arabidopsis thaliana columbia
ttgtattagatccgattaatcgtcttcctggtcgcttgaactggtatgtatgctttgatctattctttatgaaaaagtttcggaatcaatgtctatgaagatgctttgatgttgactcgttgctagttggattatgtatctttaatggcgttttctggatccctcgttcgccatgttcgtatggattcatcgtttagtgtttaagactcgcgattcgtagaactacgagaattgtttacttagcttttctatgtagtggtcgtagtgttttagcacaatgtgttgattgaatatcaattagacgactcttgtttcaagtttatccagtaatcaatgaattggtagtagcttggtatatgcaaaaatccaaagcagcacagggctagaaggagctgcttatcgcttctggaaggctcagtcccaactcggacttccatgatgggatgatatgcatttatgttttgggttcgatgtaaatgatatg

SEQ ID NO: 42840 - DNA, 409 bp, Arabidopsis thaliana columbia
tagaggatccctgagacatgtaaatgtaattacattaacttatttttgttagaaataaaaggtgagcaacaacgaataataacaaagatctgaaaactgatgaagtgtgagagaaaacaaacaacatatttactccatcgtccaatcttatctttaagttatgtaccagcgcagtccttacaaaagattataaaattacatccattgtcgaccgtttcggatccataagacttccattgactcgtcaaccgacagacattagacctgcgaatacaacattaccagactctctctagctggtttacaggtctatgaaccctcaaatataattcgagtttttgaccaattaaggacgggggatgcgagggggacctgataagggaatgggctttccaatttttaggctttg

SEQ ID NO: 42841 - DNA, 318 bp, Arabidopsis thaliana columbia
gatccccgtcaactcttccatggttaatatcatttggtaaccacttggtggtcttctggatcagagtgatcagaagctgtgtcaggtaagaagatattcaatcaccactgaggcaatgaagtcgcggtgctactcagagactcggggaattctctatagaataattcaatattcgccggaaattggaacgtttctcctattcctactatcacaaagggaagtaccaggcatgacactgacatggaatggcccatagtcactggttttcacctctttgcttccacaatggcggatatcgcatgcttaaaacggtgaaaa

SEQ ID NO: 42842 - DNA, 487 bp, Arabidopsis thaliana columbia
tattctctaacaataccaagcattacccttgtactaaaaagttaatttatttgctctaataggaagaaagaaaataaaaattctaacagtgattgattcttaagactatagacaagacaacgaagcgcctagtagacctacaagtcatgagatctcggttgatgtatgtagtatagagttgtaagtatttagatagcagtaaaaagattagcactaaatcacaaaggaatagaaggagatattagataaaagacaaactgacctccatgatcaggaaacttttttaatatggcatcagctgccttgagtcccttcttgtactgcttagtctcatatgatttctgcattataagattactcagaataactatatatgatgtacttacttgcgaaaattacataaagaaaaaggtcaactattcaaagcaggttgaacaatataatggttaacccaaaatctatgctgaaaccatatatatattgataa

SEQ ID NO: 42843 - DNA, 136 bp, Arabidopsis thaliana columbia
tgtctttctcctttcaatttgcagcaatccggtgaggaccaaaaggtgagccaagtcgtatacatgtcggtaggtttgagaatggaaggtttgaatctttaactcatttatttttgcaggaacccattgtttatgt

SEQ ID NO: 42844 - DNA, 457 bp, Arabidopsis thaliana columbia
cgccagtgtcgccagtgtgctctaacgatatgtatccacatcttgttattaccggaaactgagaaaagaatcagatcaactttctcactaagcaacacgccctgtgacggacgagccccacatccggaaatggaacgataaaggctggtgaggttcaacactcccacctcactgcttctcatactcatcaacatcattccctcagcctgctacgggcagaacatcacaatcatggcgatacccgtccagtcctcgaccacatctgtggagttgtcctcgacgactggcactggagaacgcctgcatcgagcagacccttccccgctctccgcccacgatacaagcatgatgcaagcatctgccgaagttgactcgcagctcccagacggcggctatggatgggtggcagtatccggctgcgcagtgttgacatggtggttcacgggacatctacagt

SEQ ID NO: 42845 - DNA, 523 bp, Arabidopsis thaliana columbia
aaattcaatctttccttagttaggggttctcttgtagagttttaagagaagtgggatgttcataggaattttacaacacacggtgatccttttggcctgagtgatcttcacattggagaagtaagtgaacttacattcatggctataataggtttaatatcttttgactttgagaaagtaatacccttagctattctgattcttgttatatcacagtacccttttggattctttttacgataagactcagtactcatcattagctttaagcacttgaaggaagctttcgctccttagtaatgtaaacaaatagatacaatagtgatgtttgtgtgatcactgttcttagtacattggtgagtttttgtacctatgcgtgggagagagagaactatgaaatgcaaaagtctgacccaagttctttccttttcaaccctaaagataaccttagaccaagatcgatatacttgccatcaaaaaattctgacctggaaaaaaagaatcatgggattgtactcaatgt

SEQ ID NO: 42846 - DNA, 346 bp, Arabidopsis thaliana columbia
aggggaattcatctttttcgatcctatatgaagatgagagacatcgttttgaggcataaggaaataagacacgactccccataattcttgtattatatatttctgtttttcgagcaaaagtttatctctcaaatctgggttttgttcctcacgacttgttctggtaatcaatctaaatttctcctctctgatttgtatttcgacaacatctcttgtgttgttctactagggttgatccttttttctagaaacgatgccttcgtttcctctccctccacgtctgttagcttttggcgaagaacctcgcggcgagaaattttatgtgtattagaagatgaataatcaa

SEQ ID NO: 42847 - DNA, 411 bp, Arabidopsis thaliana columbia
aacgtccgccagtttgattttctctttctctagtgttatgagcagagtactctaggcgggaacacaatgaaactaactaatgagagtgttataattactgggattagcttgtgcccttgaagtttgatttttcagttcatatgaatttaattcgtttttgtgactgcccttaattgtttcagtcatctccgttacgctcgtgggtcaatcctgacaattttataggatgaaatgggtttaccgcgtaaagcgtttggcttgggacctttaaagtttccaaattgtttcctcttaggttgagattgctgtatgggctagtttactctcttgcatgattgatcagtaaaatctattggcagtgctatattgatcttaactgtcatgtaggtttacgattaccaacacaacatg

SEQ ID NO: 42848 - DNA, 449 bp, Arabidopsis thaliana columbia
  unsure (1)..(449): unsure at all n locations
nnnnnnnnnnnnnnnnnnnnnnctaaaggttagagcggaggtacggacatgggtagatggatggctgcgatcatatgaaccaggaacagtagagctgcagctgcactgggcccctggaggagcatcgcatgcacaaggacaggcactctagtggaaggacaaggagggactacctcgtggccgggtcactgatcgtgggcagagaagtgatgtcttcctgcgtctactgcttgtgttgttcaaagcgccaattaattaggcgatacaggctctatcaacagaactggacatcccactccaaccgggtatcctgaacaatttaacgggaaaaacgcgcatcgaacaatgccaatgagctaactccctgatcggaacagctccaggaattgtgcagccactgatatgtgccgaaaacaacctttttgcccccttaacggcgacgagagaag

SEQ ID NO: 42849 - DNA, 549 bp, Arabidopsis thaliana columbia
  unsure (1)..(549): unsure at all n locations
agatccccttctgtgaaccctaaatgcttcttctcctttcataatcgccaacaccaaaacttgtggcagtctcttttagtcgtcatcgatcttcaaatccaacgagggattcttcaacttctctgttttcaggtaagaaacccgacaaacattattctcttctatttctgtttggattcaatctaaattctgaagctttattcttctctctacctgttttgtttgtttgcttgtttcatgtttctgagtctcttctgcaaccctaaagcttcaatttttgagtgtgtatttcactctctcgaagcctcaatcacgctttgttcatataaaattttagctagagtctagttttattgctatattgatgattattttcgattgttaaaataattatgaagattgtatagtattgcattaaaggtactgtctttgtgttcttatatttttaaccatcttatcagaatctccatcttacttttactattccttccaagcaagcttcttcaattcttaaagnaaagtaagttttttgttttttttgttgagttg

SEQ ID NO: 42850 - DNA, 386 bp, Arabidopsis thaliana columbia
gtgtgctctaaagaatgtccaacaccacatataccggaccatacggcccactcgcctctccaacgggcttcagcgataggccatagaagcatggttatggatatttctgctcatgaccgatggtcataccagtgagacagtgatctttcatccagtgtcattaatctgtagcaacccatccgaagatgcgggtcagtaactatatgtgcatggttgctctctattcagtgcctggctgagtctagcttccaaagaggcctttgtgcaaacacgtcaaacacgtcaaactagtcaatagtgaaggcatatactactttgatccatatgtgattgcagcggaaaggcacgagtcgatctccaacgcggacaagcttgaagcattaggg

SEQ ID NO: 42851 - DNA, 559 bp, Arabidopsis thaliana columbia
tgaaagttcaatcctttgaagaaacagaaattttggtaaaaatgaagttgtctgtagattcaaagctgtcttaaaagagaaaatgtgaaatcgacgcggggaagaagagagagagagatacagagagagacagagagacatggcaattaatttaaacatcaaacatttcgtggtgttaagctttaataattgttggcaaaatcaaaatcaatcagtagagaatttaatgatcatgtacgactctcaaaccctttacaagcgatgacgtacacgtggcattatcaactcataataatacgttagataagtaacgaaattaacggcgagaaaaaaaaaacactgttcttatgttgctgcctaattcactgctagtgagtatagtctattctactctatagccagtttgactttggtggtacaaggagaaggaacaacagagaaatcaaagttcgttttactgttatagagaatgtgtaaaaaaaaaaagatcataatcatacaaaaactggcatacaaaactagatatagcctggctatgacacacattagcagtttagta

SEQ ID NO: 42852 - DNA, 927 bp, Arabidopsis thaliana columbia
atgttgcactgcgtctgtcttagaatctgtggcagaattataattttgggtacttgaatcgatttgataagacacttgttcatttgtaacagcatttctcggctgttctgcttcttcttctccatagaagttagtgtcgggatgtctgaatgatgaatcatcctctgctactagtggttcttccaagttatcattcaaggcactaggttgaccagatcctatcccagaagaaaaacaaccgaacattaagtgcaagcattccgaggtatggacttgcaggtgattggggattatcaccgcatgtttttcttcctttggtaatgcttcctgctcttcttcattgtaaatagttagttgctgaaaaccagtagcaacagaagtagaaacatcttcatctgaaaataatggaaaaagcaaacattagaaaacatgacaaagaggaagaaagagataaaaagaagactcacacagagaatatggatatctcaccttgattttcctcataagaatgtctttcagctttgttattttcatcgtcacatactaaggaatctctagattcatcgtcaaccaaatttctgcttgatactgaagctagcggattgtgatccacatcaggaggagacccagttggataagtttttgtttcgcggtggatgtcatccaaaagagtctcatccaaatgttgagactcactaaattggtcggaagaaatcttagattcagcagatggtttcaagacagaggatgatagataagaaacgtcttgcttctcaattgaagggcattcatccttcaaaggggctttactgctgctctcttgagcctctgatgaacgaggcaaagcgacattcttctgcaggttaggtctcccattttccaatttcagcatagttctttgccagggttacgctaccaagctgattg

SEQ ID NO: 42853 - DNA, 233 bp, Arabidopsis thaliana columbia
acggccgccagggggcgccaaaggagccccagcgagcgcagcggcggcaaccagacaggcaggaagcgagatacggagaaagccaacaaagagaaagaggggcagcggaatcgcagagggcaagcagagcaagagcaaaccaaagggaatagccaaaccgaggtgacgcagcagaaccgtaaacggaaacatgatgacgaggaaaggtacgaagacgccgaggacgaagaggg

SEQ ID NO: 42854 - DNA, 368 bp, Arabidopsis thaliana columbia
cctcatccttgggtaaacacggcacatctccttcgtcactgctatcgctgctggagtcagactcatatgctatgtcaacgagtgactttgcagccattgctctcttctttaatgggagacactctggctttgctgcatcacgatcgagaaataacagtatcaagatcacgagaatctctggctttatcagcagctgttgccatcaatggaagaaagaaaacggataaacagaggaatccaaaaacccaagctaattatttcatactcggaaaccctagttactgaagattgctttcgaaatgctacaatgggagaattcaatacaaaacaactcatcggaagttttgttgtgacgtaccgggggaagg

SEQ ID NO: 42855 - DNA, 500 bp, Arabidopsis thaliana columbia
ccattgttattgtcgcaaacctccaatgtaataacaaagttatcataatcatagtatctttaacttcttttactgcggcaaatttcaacatatattgttttatcataactataaaatatgtctttaataaaagaaattaaaacaataataatatatccttacaaatattaattatttacgagttacaagtatagattggcgtttttgttattgtgggcttttgggtccaagattgtaatactgagcaaagatttgattggactctctgcttccttcgaggaaaaaaaaagtagagtgttggacaagctttttgtccatctgttagtccgttaattatcgccgttaaacatggacggacgccgtttacacttcctggcccggtaactatttttgagtgcatatatctctttcttaccttttttatcttctctagcttatccgaagccaaaacaacaaggtaaggtaaagtaaaaagaattttgagagtaaagtgaaacgaa

SEQ ID NO: 42856 - DNA, 545 bp, Arabidopsis thaliana columbia
caaagttaagtcgtaaaggttcatgagacctatctcggggaaatagatttagggagagggattattggtttaacccaaataattgttttcttttggtgttcttgatttgtttgcaaaaaaaaaagttggtttttctgtttgtgatcctttagctctatcattattcatgtaatttttggttttggtttactggacacagattctgaaaagttttcttatgtttccctctgcaaccaaacagccttggtgacgagcacataggatatcaacgcatggacttcccatcttttaagctcagtattgttggtggtcgacccttttcacatggtggggatcgattgtttcggaaaaatctgcttgtccagaggttagcatttgacttacatggcaggaatttcatttatgttgtgtatgaagaatttatttggtcaaaatagctttcatcttgcaaaaatagagcctatgaatgaatttaggttcagaagaagatgagctgcctagatctttgtatcggtaattgaagaaaacgaattgacagtttagtg

SEQ ID NO: 42857 - DNA, 659 bp, Arabidopsis thaliana columbia
atatcgacaagcgacattggatcaggaaccaaacaggggatttagtagatttaacaacaaacagattgtttcagatcactttcttcaccgatttagatcaaataacactagttttcagagcaaaaagtcccagaaaataaaagagaatgatcaaatcgcatagacttgttaaagattagttgactttgggcaaaggactttgtcccaaattccatgtgtcttgaacagacgacaagacattgtcaattttttaaaagcacgacggagtattggagattgtccttttttttttgaataaaatatagtttgctgtaattccagcaaactagtcctcatttattagaagataagaatcaattttataatacaaaccatccggtcgaaccggttcagtcttggaagaaggcctttatgaaatccagtagctatcacaaagttgtgaaaatgaatggaagaatcagatgaaggagtatgtcgctttgcggaggaagatgatcaagaaaatatatatatgcaggtgtacgagcacacaagtttttatatgtcgctttggcaatctattttggttccgtttgtgactcgatggaagaggctaattgtttaccaaaaggatggggtggaggaggctacgacttggtgggggaggagaatgggaggga

SEQ ID NO: 42858 - DNA, 462 bp, Arabidopsis thaliana columbia
ccacccaccaccaccatatggatatatgccatcgccttaccagcagcagtatcctcctaaccatcatcatcaacctagtcctatgcagcactatgccccgcctccagcagcttacccgtacccacagcaacctggtcctggatcaagacctgcaccgtctccaaccgcggtctctgctatatcacccgactctgcacctgctgggtctggagcaccttcgggatcctctcaacaagctcctgatgtttctacagctactggttcgtctcagtagagaagaaatatcgcttaaaaaatgtactgcaagtttcccgctattcaggacgaaggttttttgtattctgaatgaatcattttcttctgctttttaaagtacttcggactgtattgcttcttcaaaacggttgttaacgaaatctatcagttatagaggcaattggttccatgaagagtctgcagtta

SEQ ID NO: 42859 - DNA, 461 bp, Arabidopsis thaliana columbia
tgtgaatttcctagatataatactcatgtgcagaagatagttgtaatggctacaatgggactacataattttataaggatttcaaatttttcagatgatgattttgtagaagaaatggaagtgacagaggttattgacacaaattctgaaaccaatgtagggatatggaagctttagatacagttgatggtgatgttatggcaaaatgacaagccacataagccgttttttcattttacgttacaggaaaaagaaaaaaacagacaattaagggtaaaatcgtaattcttcctgcgttttaaagccgatccgagccgcatcctgaaccacctgtttcacagacgcgcagatcctttagtaaacctaataggccttgattgttgtcattaatgcttcattaaccctaatattgggtttcactttctcgacttctctccgcctccaactctacgaaaccatag

SEQ ID NO: 42860 - DNA, 637 bp, Arabidopsis thaliana columbia
tcattacgaaacttgttaatctttgtttgtcaacggtagctcagacacatttgacagacctggcatgtctttggtcacactcaacctgcaaaaaaaaaaaacataaaagaaacaaaacgataacgaccattaattttttaattagacctaatttattgatctaatacaaaagaaaggaaaaacagaggtcgtttaaacgtctacaaaaaacattactgcagtgatttattgtcatttatgtaacgcaaatatagttgactctgataaaattgttacaactagtattcataagtcataaccttataattaattaattatctttctgtaaattagctgtcaaattaaatacataagattctcttttaacttttttgtcaaaaaggaaatattccaattagtaacttttctttttttcctttttctctgcaattatgaccattttctctctcttagccggctctagagagagaagaaagacagagctgaaactcttgtaaaccaaaaaacacaaaagtctctttgtcaaacactcgtttcgcgtcgcgaaataaattttccaaaaccataccgaaaaagcgatatattcatgaattttggacgaggagcgagaattacacggttttgagagagagagatg

SEQ ID NO: 42861 - DNA, 336 bp, Arabidopsis thaliana columbia
caaatgattatagctatagtacttaaaaaaacagaaaagtaaaaaaaaaaaacaaaaaaatgactagcttccgtaaaaaggataaaaaatagaatgacaaatacctgaaataggaggagtggaaaaagaaagaggtttcgaaaatgaaggttgtggaaacccgatggcttgaaattgatgataaggatagacagtgtagaaaggcaccattggacttgctgccccaaccataactcgtcgtccaccagacatgtgatggtggtaatattgcggttatagctgcgattggggttatggttgcatttgtgcatagtatccgttcatataggttcctcc

SEQ ID NO: 42862 - DNA, 528 bp, Arabidopsis thaliana columbia
tataaattacatttaatcagaaatttttaaatcgtgattctcgtggatacatttttgtcgtgttcttgatattatacataataatatagtataaccagttataaattaacatttaatcatacagctctaaaatttttaaatcgtttcttttccggtctccactttgtacgtggaaggttaagaatatttgttctccaaacgtttactcgaatattgaaaacctaatagattggatctcgcacaacatatccactctatttgatcaaaaactatctattgataattttttccaagaaagttcatactattatgatcaaagtggtgaaggcttaaaattaataatgcctcgaatcgcgtctacttctgcatctacgaaggcattgaacttcatgtgcttgtatatgttggtgatttggcgatgacatggaaccactcttagccattcgcaccttcaaaagctatttcagtatgtattttcacttaacgatcttgaaaattgaaaacacaacgaagttgcaagaagggaat

SEQ ID NO: 42863 - DNA, 395 bp, Arabidopsis thaliana columbia
gtgagatagtacgtaatgcagttttcataagtcgtcttcacttgtaaaatgctctaaatcgtttcaaatcaaacacaaaaagcaagaactaaaacagcgatatgcagggcaaggttaacaagcctgatgcgtgcccttaattccagagggccttcgataagttcctgtgtaattcaattccggattctattgtcttcaaccagaaacaagcgtcagtcggaagttccgacgtccttacaaaatacaacaatctccgtatttttcgtctccgaaggctttgctgggttcaaaacaacgtcgtcttcaaaggcttggtcggatccagattcatagctttctttgatgctcttttcggccaagactttagcaccacattcaataatgtcgaagtcgtg

SEQ ID NO: 42864 - DNA, 811 bp, Arabidopsis thaliana columbia
tagtaacgtccgccagtgtgctctaaagacgctgccactgcaggaggctgttcaacgtggaaacatctgggatgatgtgagcagtggggcagtgccaaatagcccccaaaggcccaactgtagactgtaagtaaagcaaccctgctggttctgtggtgactaatagtgtataaggcgcgcaaggcttttcgagcaaacctccagtttaactagaacagactgcggcatacttctttttgactggaaagagggcaaatcacttcttgtccaatgcgtcctatatgattacaacgatgtcaacatatatattctccaagaacgctgtaagggcccctgatctggttacttattcctgctaacaagctgaagttatgaggctgaaccaagagtacccaagtttcgacccggaatatacagacaggagcagtaaccgaccatcactcagggcaactttgcagcaatgggacggtcgtaggtacacatttgaattcgtcgagcttagggaacttcttattctgcaggccgccatgaccaagcaatacgtctttaatttgtatgtgtgccttgcaacctactagttacgctgattaacaaaattgcaagctcctcgttcaacttgcgctctttatctatttcagaacatagtattccgttttctggtcgacgccgacttgttctcgaactaaacagagcggtagtccagttgtggtctgagaaccacttcgggaagatcagatcttgtggcccgcactcccagagtcgtcaatcctcgaatgcacattgccgttatatgcagaacgagaagaagttg

SEQ ID NO: 42865 - DNA, 1219 bp, Arabidopsis thaliana columbia
tctagtaacagaggatcccctggaacattaaattgcatgacattcgttaggatagtcgtagtaggtactacttttactaggtagagactagagagtggtctctcttaaattgtctaatatggttttgtatactttttgatccaaacatacatacataaaaaaagaagatgttagcaaaccttagtaaataattccatcatctcctccgtcaggaacccgtcattttcatatacctcactttgcattcatttgtcggcattgccacacgtaactcccgacacgttgatactactatcaatatactattgacttagaaattgatctagatactatattactattactaatacatacttgaaataacagagtcaacaagaaaagccttgataaaagaaaacaacaacaatttgagctatacttttgaagggatctcactcttaattctcttattgcatgcatgttcccgcaattttgagctttacttttctttgcaagcgaattaccaatttgcctggcttcataaactagaagttataaaaaaaaatcctcctgtgatttgacggttttacccttaaaatctcacttaattcacaaaaaggaaccaaaaagccctaatctttatgttgtcgacactctttcagttctctcgacgccgtccatcgccctccgtcatatcgccgccgctaaagtactggcagaggtaaattcgtctcttgttccctgttctgtgggatcagaaagtattaaacttgttctgtttctgtctttcattgctctcatccttgattatctctacctagagttcacaacaatggagtacgtaaaccctgaaggtcttcgattagatggtcgccgattcaacgaggtatgtttgcatctctattcactgtctttgtaagccactgccttcacaagttaatcggtctattcgtgattgcttgtaatgaatctcagatgaggcaaatcgtagctgaagttggagttgtttctaaggctgacgggtaaaactcaaaatctgtctcttatctttttccgtatctcagttctatattcggcacttttatatgaacaaaaattccaactttgtttccagttctgctgtcttcgagatgggtaataccaaagtaattgcagctgtttatggtccaagagaggtacttgattactctgttactcacctatcaagattgatactttaattgtataattcagcgaattg

SEQ ID NO: 42866 - DNA, 563 bp, Arabidopsis thaliana columbia
gggttctattgttgatgtaaacttaaatcaaattatagtcaaccaaaagacaaatgtatattggtatctaaagtactgaatgacaacatttttttgttttaatttatctataacacaatcaagttgtaaagatgattttgtttgaacaaactttaccaaaaataatctctatccattatactatttcgttaatagctaaattagtaaaccaaacgcggaaaataaacgaaacaaacgcggaaacaaaattacaagaagatcaattagtgattttacagttaaaaaaaagcaataaaactcagaaaccctttcacatgtatgtataagaagaatctaaaactttcccacttccaccaatttgagttttgaaacatttacggctcgacagaaaagaagacgccattatattttaacagagagaaatcaaagagacaaaagccacgatccgccatagctgtttttgagatcgatcccaccaaaggagcctagcctaaatcatgccttcaggtgctaagaaaaggaaagctgccaagaaaaagcaagaggaagacaaccacaacaag

SEQ ID NO: 42867 - DNA, 571 bp, Arabidopsis thaliana columbia
gggaaaacaccatagttgtttaatttggttcattgtagaaacgtaacagatccaagtaaccaaaaaagacgatttataaaggcagattgaatttttctcaaaaaagttgtcttgtttttcattgctctagattgggaccttaaacatcaaggaaggccgacactagtttgcttgtctatagcctctcaataatattccgagttaagttatttggaaggaagaaattctaacactgcacatcaaagaaaaaaacaaaaatttgactaatttttattttctttggaaaaccaaaatataactatatatttactcttcagtttatctgtcaacatgttttcctttatcatcatgtcgtgaaaatggaactcgacgggaggaatccatgaagagtgaattgttagaggcaagtccaagaagcttgaatgcaagattcacaacacgatctaatagtaacattcaaaatttggttatatgtatggaggtagtgatatagaaacaaaatcgtaggagttgaagtggataatggttgacttgagaccacgtgcggaaatgcgagaaaacacgagcacag

SEQ ID NO: 42868 - DNA, 524 bp, Arabidopsis thaliana columbia
agaggaacaataaggaacatgttgttcctatccattcctttcctaaaaagtagtcaccaatcgaagcctatctttcaatagcataccttcttgattaattgcttctataaaaaaaatcaagatcgttttaattaatctctatatgtttacaaaaattaacaattctgaattgttaaaagcattatttcagaagaaaaagatgatgaatatagaattggttaggtaatccaagatattctgacattcacatgaatcacatggatcactagatgctatatgtcatcatattttcttcttctttggtttttccataaaacctttagttggataaataataattggaaaaaaaaacatcacgatattgttttctagttagctacttttttctaaaatttgaactaccaccatagaacatggtattttataatctataccattcatgggtcctatgtgacttaaaacggttaaaaacatattaacagtaaaaaagcgcggaaaatagtacacactgtaaaaaaaaaagt

SEQ ID NO: 42869 - DNA, 362 bp, Arabidopsis thaliana columbia
ctgtgtgtttgtgtgtgggacacttttaattcttgcattctagttgaactggtttactttgtaacacattatggttcctcaatactctagataatcattctcgtgttccatatatgatagcttatgaacaactatgagtatgcatatgcatacatatctcctttgtgactaagtgcgtattatatcattggtgaaactgaacaaacgtgatagacacacaaacacgagaattctccaaacctcggcgcacgagtttcaacttaattataaaaaaaaaattaagatgataaatgtttagtcaaaaaattggtcaaaattcgatattgtttcttgtagtatataaagttctcacacatatttgt

SEQ ID NO: 42870 - DNA, 510 bp, Arabidopsis thaliana columbia
atttgtatatttgttccaaaaaagttacaagcattgcatatttgcattgaaatgatagaactgtggcttcttcttaatctatctacaacgagagggtcgcttttaaccgaccggtcattagtagtccttatacattctagtcaaatatggttattgaaagccgtacgatgatattgtatgtaatcttatcttagaaataatgtaggtgaggcgtgagaaagcaatgaaacatttgtcgaaaatatgaataagacgaagcgcgaaagaaacgacacgtgaactccgtcacatgtgatagatatattgggccgttggggacaaatgctcactttcagaacacctacacgttatacacgtaggcatgcgaacttgttgggccattgtaacgaaggtccactttctgaacacctactacacgtgcctacgtttatctgatttttcattttgtcgtttttatttccttgcattagttctcacttctcaatgcaaaacatatcgattaatactatg

SEQ ID NO: 42871 - DNA, 485 bp, Arabidopsis thaliana columbia
tgcaaatgaagaaaggtgaaaagaaagtaaatgaagtactcagagagaagtgtgtttggtttagagcctaaggtagccttttctttcttggactatgtttggtatcttcttaaacgatcttctgttaagagaccaacttcttttcatatctctcgttccccaccaagacgctatgcgactatataacgctggaaagccgaagcagcacaacactagaaccagcattatcaaacagatgtacatcacatttctgaatccgtctcttagctccggtttgtcttgtcccgtccaaggtactcctccaacattcatcccaaaaactggccatttagccacattaacaacaacaggttaagatactacttccgtgacgaaatggaaacagagaattggttttgggtgctttggtttactccggttataattgatagaggaaggaatatgatggaaagaaaggagaggtaatagagctttcggttgatttg

SEQ ID NO: 42872 - DNA, 571 bp, Arabidopsis thaliana columbia
ataatactctacttattagaaaatgacataatagtttgacgtaaacaaacttaggaccgtacaggatatcggtaagctcgccacgtgttgagttcacattgaaccacgagggtgatgtcgcttcaagtaccacaccgtacctaacgtggagacaaccgtatctttttgacggcacccaaatttatgacacttttcatgtcttcaagaatctttagatctgttaattggtaactaaagccaattttatgtctttttaatttacgaaggaccaataatatagttacagaaccgtttaaatatgattgatatcatctaatcatagtggcttctgtaaagttcattggtccccaattcaatgatttaactatttatttgtagtaataatacccaacttgcttacggaaaaaaaatacgtatacaagttggctaaactttctattattgaaattattgcccaagtaacaacttttggaactctactagattacacggcctatattaaaaggtaattcccgttaataatctaaagagataatctttttttttttttatgaataaatgtttacatata

SEQ ID NO: 42873 - DNA, 524 bp, Arabidopsis thaliana columbia
tgtgtgcagttcagatgatccccggttatacaaatgaaaatcagaaaaacaaagctcaagatgcgttcccgatacgaaacttcagaaaaatccatttaagaactaagtcctcacacaaagattatgaaaagacagtatcagttccccaaccataagaaaaaacagagaacccatcaaccatataaagaagagggaaatatatcttcgtttatttcaataatccctttagtgctccaaactttcaagcaatgtgccagcacccggagaagttaggtatgagtgtggatgccaccttttagataaagaattggaaagtctagctctactacgatgaaaaaagtcaatatggagactgaggcatgaaccaacatggaaagctaattatgtaaaacaactattgaatcaacaacatgtcgtatactaacatagattacaaagcatggccagaatcatagaggctgcctcaaaaccaactataagtattagtttctctcatattgagatcgagagagaaacagaattgt

SEQ ID NO: 42874 - DNA, 464 bp, Arabidopsis thaliana columbia
attttttctttacttttgctcatgatctttggttgtttttggatattatttgttgtcatcaattcgttgtgttttgatcttttatattcttcttcatatcacagtcttgatgctattaccctaacttaatctttatttgaggttacaaaatggtctctgtaatcccccaagtccatgtttctgtaccgtttcaacaacaatggaatgttctttccaaacttcactcttactcttcatcactgtatcatactttgtagtaacagaatccattaaacctaaccgaatggcgatgaagctgatacaccgtgaatcagtggcccgtctcaacccaaatgctcgagttccgatcactccagaagaccatatcaaacacctgacagatatttcatcagcccggtttaagtatctacagaattcgattgacaaagagctaggcagcagcaatttccaagttgatgtggaac

SEQ ID NO: 42875 - DNA, 539 bp, Arabidopsis thaliana columbia
gtatagaatcaattggtttttaattttcatttttaaccttattttatattaaaatgttgtttttacaaagttaaaaaaaattagaaaaaacttaatttatttctactccaatgattaagaactattgggttcttaaaaaataacttcggatacccactcaatacacaacacatgtcctcttcttaatattatgaaaacatcttaattaagatataaatcttagctaagatttgttgtttgtattatattcaatcagtttaatagataagaattagttaagaattatctaagatccaaggttggagttgctctaagttacagtgttacacactattattcttaatcaatccaaaatctaaatttccataaacatgtattttatttcaaatacctacaaatattgaactagaactaatactatctttatttcagctaacaaagacgaatgcaataaaacttagtgcacagtaatcatagtaattacccaaagacagatgccaacaatagacaaactaaaacacagtacacaaagaccggtg

SEQ ID NO: 42876 - DNA, 509 bp, Arabidopsis thaliana columbia
ggtcagaggtgtacaccaacttttctgcaaattctcagaccagttaaagttagaaaaccggaagttgtacatcgagtaatcccgcataaagttcaaatcaaactccaaattccaagtatggtcatgaagaaatacatacccctaagtgcattatccactttctcagcttttgaaagactttcagatgactcagtgattaatctcagtgtcttgttatctattatcctacaaggtacacaaaagccatatttagataccccctaacatacagtgttccccgagatagactaaggtattcgaatgacggtagaggtgagcagcacaaacgagaggaagtaccccaattttagcggatcaatgcattccatgccacgagggaatgattgcaaactggtaagaaccactttcttgtcagctccagatacctttctatcaaggttctgagtcacggatggtgctgttctcgactcccgcatatcacgaaccttgcgtgcaagctgccaaatgtc

SEQ ID NO: 42877 - DNA, 431 bp, Arabidopsis thaliana columbia
cccaacgtgtcctttagataccgccacgattatgctttgatcataggaaaatcactgggagccaatggagagttcataatctctaaacaacagtacttgatatggtatgccactggaaattgaatataaactatgaaagcatgagagcatttttttccaatcaaattcatgcgatcagcggcatagtaaaaatggttcaaaatcagcgaaactaggttgaaagataatagtctagagaatgcgaaaacgatcactcacatgcgtctttgggatcggagagtgaggagaagaactcattatcgtcctactcgccgacggagagcacagccgaaggacgatctggtggcggggaagtaagatgcaacgagcgatggatagagtttcacatagtcgaagaagcctcgatttatcggcgacgacaagagacgcat

SEQ ID NO: 42878 - DNA, 321 bp, Arabidopsis thaliana columbia
taaattacactttctagtcccttttcatgtggcgtatatagacttttctagtctatctaaaaatacactacactatcgtgcacatcaatcaataaaaacatatattccaataacaaatctggagaaattcatttcaattatataaagttaaggttactgaaaactgccaaaaattcagaagaaattacggaaactaaatctcgttactataattacgatgtaattaccgttaaaaaggccataaatctagtactagtgattaattaacgggtgcaataaattcagttatgtgtgttttaagtgttaactacgagacaattc

SEQ ID NO: 42879 - DNA, 634 bp, Arabidopsis thaliana columbia
tagtaacaggcgccagtgtgctctaaaggtctattatcactgacaaggtgctgattcaggggaattagagtaaaagtcagatttctggccagatcttaccagaatcctgtattatttgcttttcttatcctatatctataatcaggatagtgtatacaactggtcccctatcaaaactgtagaccttgactcgcgaactttagctcagcaccacagcctgaactgatgctggaaagctctaagatatttcccagttagaattaagtaccttatctatatcctgtaaatttctcagccttgttagtaactaaaagtacaaagagatgctcaaccaaaaaaccaaggcgatgcaagacctgtttgccaagacttccctaacaacaagcaaagcgctgctcttcatatcttcgcccccagtggattaggcttaatcacacgcactttagctaacaggaacatgcactgggtgtcacgggccgacgccggagccagctggcgacgacctggccctgtgacacgtgacccctatccctcaatgcccacgtaacgcggacgggcgccttaccggtgtctatcgtgcagtaggaatatgagggatcgcagagccgtactggtcgccagtaggatatgaggg

SEQ ID NO: 42880 - DNA, 487 bp, Arabidopsis thaliana columbia
ccctcacatgatatgattgatcttcttcgctggagttattggtcccttcatcaacacaagtggagcttgatggatcaccgatgcatatgaagctaccatttccatttgttgtgcactttggttctacctcaaagggatgacatatcaatccagatgacttcttgctatacttgtctggtgatatgattaagggagctggccgaagagttccttttcctgaggcggccgttgcagtgaaccttgaagaagagctctgcgtaggagattttgtagcttctgatatctgtctgtctgaagctgatgaatacaagataggatctcgacggtctacctggttaaactcgtttggctcttgggtcaaagatctagaaacactgtgcccttcactctcttgatcagggaaaagtacctgcaacattccgtttcaggtgtcaaaacgtttgctgagttggtgtaagtagcccatcaatatttaatgtggagtttg

SEQ ID NO: 42881 - DNA, 520 bp, Arabidopsis thaliana columbia
tatatcctttggaccaattttgttaggttaaaacccaaaatgtttatcagtggaatcatagtaatgtaagacctgtgtggttcagtttctgccttgggatccagttactggttgttttattctcttttctgaatatatatgttcttagaagtaaatgtgacatttttttggaataaatttgtagcttgaatggatcagacatcagagtgaaagatttaagatctcgggtgagattgtataactttctagttttctactcatatatttgcctctcaattatttattaaatatgactcacaatacaaaaacccaatatgcattaataaactgaagtcaattaatgatagctgttgaagaatgaaagtgtaacgacaggaatcgatgtgctcccattgaaaggtaagctatggcttcaagatctgggcttgtgcagactaggccggttgcagaagatacggccattggcctcacgagtgccgcgacactacactgatgcccgcccaaccagtgagaaaagcaa

SEQ ID NO: 42882 - DNA, 546 bp, Arabidopsis thaliana columbia
cacaacctataaaatcgtcccacgtcccttgccttcggttcaatgtcattttccggacattgactcgcttgtttgtttcccattatcctcaagagaaagagtggctcgaatgtctccatcagaatctttgacgggactaaactaattaagtaacatgaatgtgcaaaatgattaagaaacattaaacacattagaaataaccaagttttgttctcagactctgtacacgtgattcactagacatccacattgtgttgtgtgtccaattctgtaaaaaaacactttcaagtttcaaaaacatattacacaaaacgaaatcaataagaatcagaaaggtgtatgcttttctctattccgtgtatgatttttcagactcttcaggttggttgaactattttatcttgcgtgagatttctatgtaattcaaaagtttctttaaagccttcccactgtcaatagcttcctttgctctctcgattgccacagctacatcctctgcaccttcacattccaacaaatggtccacaatcccagcatttaggacga

SEQ ID NO: 42883 - DNA, 504 bp, Arabidopsis thaliana columbia
aacttagagtgcaagcaaaacctgtataattgtgtttccctctgtttatttttcctctctctttgaatttgcaatggagacatttgatttcatcatgatgcttttgtgattcagagatacttaaattatgcaagtagatgatacgtggcgtgatgtgattgatttacaagaaaccaaagcaagaataagttactctaatcatatgaaaaaaaaaacatgtcattttcaaaatttattatgaaaatataaaataatgttgatgacgagtcatcatcatcaaaattggctttatcttttggaaaatctttggttcacattttgagtaacttgtttttcccagctacctacctattcattgtcaccaaccaacatcttagccatgtagttagatggtattaattactattattatcataacaagattgtttgcttaaaaaaaaaaacttaaggtcgtaataaaaaaaaaacaatatttggtagtgttgattttagcccattaatttg

SEQ ID NO: 42884 - DNA, 554 bp, Arabidopsis thaliana columbia
caagattggactttcttttcttttctgactttcttgacacatctactcaggttcgtctccatcatcgctgagtccagaagcttctcctccagtgttagctgatagtccaagcagcgataatcttgttttgtctccattaaaaagtcaccatccatatcacttgacaatggttccgactattgggattgctgtcacagtttttgctcttgtgatggttgtagtcctaatagttcttatccaaagaaaaaaacgagaacttgatgactccaagagcatcgcttgtaatctaacaaggacatctccttctccccgcccaaggtcgatgattcatgaaggtgaagagttcttctgatggtacactaacaagggatgttagaccatgtaaaacaaatgtgtggttttgatttttcaggtaattcgtttggttttcggaaattcagctacaaggagataaggaaagcaactgaagatttcacgcggtgattggctgtgggggctttgggactgtttcaaagctgagttcagtaatgggttggttgcagctgtaaaaagat

SEQ ID NO: 42885 - DNA, 464 bp, Arabidopsis thaliana columbia
gtgctctaaagcatgatttagaattcaacacttcttcatcaaaactagggatagtgtgtccttttatccttcacagtttcatctaaagaactagtcatatagtatttttttaatttcttccttcataaccgtatctccgacactgagaatgatcatgctccttgcctttttgatcttttatttttcccattttgggctcaaatatgcagaaagtgtaatcacctctcctaataatattttcttcttcgaacattgcaaaacacatgttgagagagtcttttcttactctgtctcacagtcatttcgtcgaacaccttgtgtgcacagaaaaaacaaaaacaaaaaaaaaaaaccctaaattgttttacattgctctatcataagctacaacatacacaggtctgttaaaagagtacggaagtttccgtaaaagccagagccatcactgcaaacaaacgacgctc

SEQ ID NO: 42886 - DNA, 545 bp, Arabidopsis thaliana columbia
ttttttataaattatttatctggttaagatgataaaaatatggtgtttattgaatagcaggaaagtaccaaagaagaactcaggtttaaaccaaaacgggtatacgattgctttgtcagacagaagattttgattaaaaaaacagaaagatggaaaaaatgtcaccgagggagatatagcttaaggaggaaaagaactacatttagagataacaatcacttggcttcataatcttattgagaaggagaagaagagttggtttagtgatgagcctttgcttcggccttaatctgcgaattcttctttatctgcatatgaagaagaagcatttgttggtatcatcataacttattagcaaatcacatcatagtagaaaattagattccacaatctgaatgaataaggattgggatgctctaaaggaagcaacataggctctactttcataccgattttcttagggtttggaaccagacacaacatcgcaaacttatgcttacaaaggcaagaaattacatttcagtgatcaagttgcaaatcattga

SEQ ID NO: 42887 - DNA, 433 bp, Arabidopsis thaliana columbia
tgctgatttaatgaaatctctcattttcccctaataaaatagtactaacaaacaaaaaatacagtaactataatagtattacaaaattcagtctaattttttaggatgtaataaaacattttcagcatgaaatgtgtaaggttggatcatgctgttatactactcactcctaagttcttttgaaattggttacaaaactgataatagacttttacatgctaaaattgagcattttaatatttttcagaagaaaaagatgataagttagccgatcaaaaagcagagccagaaataacttgtaacacatttagatctaaccaccaagcggaagacatggagaaaatagacctagaaaagaggttaaaaccccaatttcaaagtaacagaattaacgaccacaagataataacaagcgaaaaatcgcaactgtctt

SEQ ID NO: 42888 - DNA, 580 bp, Arabidopsis thaliana columbia
tttgaatatttgttttcaacttttattttcaagtatttgaaacatcagtataagtggtaaattataatttcaatatttaaataattttgttttaaagctaaaaataatagttaaaaaggtctcaaaagttcaagatattgacatggtttgattactctatgtcagggtgatattataatataatcacacatgttatattttctatatacataatgaaataaagaggtattaagtgacctgttggatttgtattgacgaagaatagaccgagaagaagggtcaaggacgccaagaatcggagatccatcgtcgttaggtgaagaaagagatgatttgtagaaaattaagagcgaggtggaaatcatttactgttatgacattgatcctagctagcataaacaatatatatagtaaattctagagaaagaacattaatatataaccaaatgtaaaatgtcaatatgaaactaaaattaatacacggaattaggcaacaagataaaataatgagttggtaatctctgaataattaatacaatggtgtaatatatggtaagctacataatcagagacagagaga

SEQ ID NO: 42889 - DNA, 574 bp, Arabidopsis thaliana columbia
cggccgccagtgtgctctaaaggtttctcttcttaaggtggacattaccgacatagctcacaacctgcgcacattgatacccgagcatgactccgctccatattttcgatgattgaatgctctgaatgaggatgcttggaaatccttttcttgcaaactcaaaaagaaaaagtagtccagcgcgaaaaaaagggtgaaactacactgtgacatgacagtcccttacatagaagtcgaggagaaaggccaaggctagggaaaggcacgtgagcagtatttggtaggggcatgctgtcccccgcatttccccgcatctacatcaatcgatcactaacgctttcaggtgcttcaaatatatgtacatatgtaattgttttacgttactaaatattaggagagacaatgaagccgtcatcacagtttctagttcctaatcaatgtgtagcgtcatcaaacttcttgtgacacccgccacgagcccggatgtgtatggcttcgggcgattcctgcgactaacaaccctggagttcattgctgggtagaatcagacatatatgaaggatgacgttgccca

SEQ ID NO: 42890 - DNA, 453 bp, Arabidopsis thaliana columbia
tctagttttggtttgttaactatttaatacctaacttataaccaaaaagcatgtcattatcacttttaaactcttcatttaatctaatcgaataaaatgtttaaataactccatcttttatggagtacattttatttttctatttctattcattcattccgtgctttacacatcaacgttgaaattaagaaccaaaatttaatttaaaaaatcacgtaatacagtaaaacctatcaataaatgcatacgatgcgacttgccactgaaaagagtttgaaccatattaatctgatttctccttaaccggattcggtttaccatagaccaaacccaaaaccggcttcaactaattacactcaattcctcgggagattgttaattacacagtagacaaccctctgactcactagacttctgaatctatcacagaagaatacgtctttgtaggctttt

SEQ ID NO: 42891 - DNA, 480 bp, Arabidopsis thaliana columbia
gccagtgtgctctaaagatgccttgataacatcacctctttaaccatctcagaccatttgtaccatgttcttagtataaatcatacatataacactctaagagttgccagaacagactttttacagtccatttgcctctctccattcccattcgccaacgcgactttgccaccagaaatattcgatattttgccaacctacaagagcgtcacactctaccgttgctaccctgttattcctgaccttgcaaggtacggatgtcctgcgataggttcggtctcagtgtctgacaaccttgaaaatcctgttagctgcgaacgccgtttcaccgtgaacattcctacgagtttcgttccaaacgagaaaaggttgaatataacaagtttggtaagggatgtaagaaatggatttgaggtgaggttgagaatcgatgaaaatttgtgtcaagaatgttcatcttctcataaatattgcggcttt

SEQ ID NO: 42892 - DNA, 523 bp, Arabidopsis thaliana columbia
gtgtgctttaaataaaatttagcatcaactatatagcaatgttttgtgaaagctagttataagatataacacaaggcttttgcatgtatacataagccctcaatttgactatccaaattgtgcattcggagggcctttgggagagattaagacgaaatcatttgcttttgttcttttcatggcctgatgtatatattgatctcatcatataaatatataatctactatgaatatttaattaattaccatataaaatttgttaagagaagaatatgaacaaaaaatgtaaaccaacttccaagtaattattaaattacaaaaactaataattcagatctgtcttccatacttgcaatttcctgattggtttataattccaataactttagaaaataatatctcctaataatagtggtattgataagaatttttttataaaaagatttaagcatagccccacgacttgcctaaatagaatagtgaaaagtgtcaagtggcctgtgagtagggccatgacccgtga

SEQ ID NO: 42893 - DNA, 479 bp, Arabidopsis thaliana columbia
tcattcttgtctaagaatgatcgcttactttggttcttccctctcttactcctctgtgaaatcaatattttaactaggtttgcataggataacgattccaattggttggatctacataagtagaagggctcgatcgataccaattggttggatcttcatcgttaatggcaaaaatctattttcacgtcaattctcgtccaaatatctcagataggataatgagttttatgattatcccaaaggaaaagtatatattgatttgatcttatattctccttccgagcgttaaaattttcatatttcaagattaaatttcgtacgcttggtttaggtaatgttgtttggtcgaaagagaaaaaaaaggtgattttatttggtcatttaatttgtgaaaagatgaataaagcacgaagtttttttcaaactttatttcacgaatatacgggatagaggtacatatcaccaatctcttggatggt

SEQ ID NO: 42894 - DNA, 574 bp, Arabidopsis thaliana columbia
gtcgacgataccaagctgttgacagtggtgatcaatttgatggtgtgggataaacattcaacgtttgttggaaccttggggctcttggtttgtatgtttggtggagtcatgtatcaacagtctaccatcaagaaaccgaatgctacacaagaagctaaaccgcaagagcaagacgaggaacaagagaaacttcttgaaatgcaggagaacaaggagagtaacagcgtcgatataaaggaaactctgaaatcagaagagaaactatgatcatagtggttggagcttacagtggctggagtttcttcggtactgatacgatttagtttccaagtatagaactacattgtacttagtggttatgaaattcttttgtatttagaggtaagagtacttcgttcctgatccagtagttgaacaatatcgatttcttctttacattttgatgtgtttggatatttttcttgtacccgattcagatttatatgcgaatgaagaattcttatgtgtttcctctttgtgttgagatctgttaccaggtaaaagttaaggaagttcaaaaaatatttgtttgaga

SEQ ID NO: 42895 - DNA, 471 bp, Arabidopsis thaliana columbia
tcttcctctataagaataaactgacccttgaaccactcaaaaacaggtatgtctatattaatttcctaatgtgacatctacacacatataaactctataaaaaaaaatcatgtgactgtagaaactgattagtaaatagtaataggaaaacaaaataattagtatagagttatatagagtatagagagagggatgggtccaaatagttgatgatggaccatgtgaaaaaaacaatgaaagcccacaccattaattgtggtaaaggatgagaatctagtgttgtagttttccatgtccttaaacggttaaacctatcttctaacaaaattctccaccttcccttctgacatctcccatcacttctctcttgatttgttccatccattccaccagatttatagtttcacttttttatctgtagtgtgtttaccttgtgagtgagtgaaaagtaagctagagaggttctgtttt

SEQ ID NO: 42896 - DNA, 453 bp, Arabidopsis thaliana columbia
atcccctttcctaaccccaccgagcaagaaccttccattgcaccaactcatccaggagaggcaaccctggatgatcatgtgatgcttgagctagatggtacaatcgctttagatcctcatcctgagattgttgggggtgtaatctgctgtttattaaacgtagaggatcctgatattccgtgtaatgatgacattttcctgtccaacaactcccgtccgatgtcagtttcttctttagcccggcggaactttaaggataccaatagtccaataactacatgtgtaagagacgtctccgccagtaaggaaaaaagtgagggatattcactccaggctcaaaagaaaaaaccaggacgtttacaggggtctactcaaggaaagccagagatgggccaaccaagtaaaggtagcaaattcagggcatcgactagtactgagttaaagaatactgta

SEQ ID NO: 42897 - DNA, 582 bp, Arabidopsis thaliana columbia
taatttcaataaaaataataatttaaaagtgatcaaatttgtatttaattttagttaaatcaaatcagcccccacaaaaacattaaaaaaaactccattaaagaccaatataagagagaacatgagagtccaaacttcattcaattcaagtctcagttccaagaataaaaacaaagattttgtattttcatttaaagagatgaaatcaatcttagccaacacttctctcgactcttcattctctctttctaaacgttacttcaattggaagaagaagaaagttcaagaagacgacgacgaagaagaggaagaagaagaagacgattacaaccacaacgagaaaaaagtcttgacccgtttcaatttctcctctgacccgacccgaccggatcagttcaatgcccaacagataatgaagaaaaaaaagaaaaagactctcgaaaagatccgttacgctctcgggttctctaactcgggtctgggtttccgggtcgtgggtacgttattcggtaaccgtcgtggacacgtgtacttcgccgtacaagatgcccgactcgtttactgcggtgttgatcagttacg

SEQ ID NO: 42898 - DNA, 545 bp, Arabidopsis thaliana columbia
tgaaattgcgactttcgatttaaaactctctttaactacaatcgctatccacgaacaatctgattgattctctctctgagatctctctatctatctatctatctctcttctcttaccttttcaatacgatttcggattctgagctgcgatgcttctttgattcacttgagaggtactctctttctctgtcttcttatggaattttatcaaatgccgttaggtttctgagaaatccggtgataattcgatgatttcttacatagtagcgattattggtttttttttgaattgtccatttcgtgcttctctgcgattatgattctctgatttcatttcacgtcatcgcttgctctttagctgttttcatcgcttttttgcccaaattttttaattgcaactttttctgtttgtgcggcttcggcatgaactgtgaggaaagcgagggtcctactgcgtaagtttaggcttttagcttagtgtttattggtcaaattcacttttttggcaattttaatttcatggaaagctagaaacaaccttaatat

SEQ ID NO: 42899 - DNA, 468 bp, Arabidopsis thaliana columbia
tatgacagctatttaccaaagaccagacaaaaacaacacaaaaaactaacaagactcttttcaaaacccaaattcaaagaatgaacacttttttttcttcttttccagagacttaaactttataacacaaaaaaaaagcattttcatccccaagttttgctaagttattggcttatattcatgaacacgactacttacattggggattgtcgaatatcattcttcaacatatcttcccagggattttgggataacctaaaatcgcctgatgtggttttcggctactcgctgcctctcctagagattcagataatactgatattcttctgcattgtcatgtctcatatgttcctcagatgcatcggcatttcccagatcgcttcatatatgattgtaagcaagttttccatatctaacttggcaagcacacaagatatttccaattattagagctactaaagtagatgt

SEQ ID NO: 42900 - DNA, 217 bp, Arabidopsis thaliana columbia
  unsure (1)..(217): unsure at all n locations
nnnnnnnnnnnnnnnnnnnnnnctaaagagggcgttcgacgtcctcaaagattaccggcgccgtcgacgatcacaggagagatacctcggtcacacatgatgcaccaaaagcccgagcggagtgtcagtgcaccaaatcgtctttgcgacaagcaccacatatccacaacatgcgcagtacctcggtcaagcctaagaacatcacgctcggccgaca

SEQ ID NO: 42901 - DNA, 393 bp, Arabidopsis thaliana columbia
tgttagacaaatggcgatgaccaacgtggcgtcgttggaaaaatcgaaatccgtcaatcaccggcgttttggtgggatcagtgatacgaaccgatctataaaaccgctaaatcggtttaattttgggttgctttggtttgattcctgataaccgaacataaccgaaaaattctaacacgaaataggcagactcatgaagcctcataatgataattgaatagaaacctaaaccgagaagaaccatgtatgattgtaaaataaaaagtgttaaccaattcaataggcatgatatataatttatataccatgtaaagaaatgaaaaagaatgtgacaaaaagcaaaagcaacaacaggttctgtgaaagtatcttcataagttcttctctataaac

SEQ ID NO: 42902 - DNA, 596 bp, Arabidopsis thaliana columbia
tcttacctcttttctcttctcgaaacccaaatattttgcaatcgccagtctactctttttttatcattgtgtcaattctcatgaatatcaacaaaaacaggaactcctggatctaaaacaaaggcaacgctcgggaactcagcttgtccaagaaataagaaagcaggctgatgatgtaatgttttccctcgtattttatttcatttctctgttttttcttcttttctttctatttgtactaaattcaactttaaaacctgtacaggccaggtcttctactctgtctatgccatatcgagtgcagcgaatagaagagtttgtgaaagaactcgattcaggcgatctgaaactccgtgttcgggttcttgaggtaaagcagttttttcatggtctaatcaccctgacagaactggtattaaagtaaataagctttgtcatggttttgtaaagcaatagataccattgtggattttgtttgttcgtattggttcagtcggaaagagcagcccggaaagcgacaatactgcagatggcgacgatgtatacagttcttggaggactctacttaatattgggggtacatttagcaccaagga

SEQ ID NO: 42903 - DNA, 438 bp, Arabidopsis thaliana columbia
gacttcaactacattttttcagatacaaagatattcaacaaagaattaagtcgacatacgatcctcgcgtgaagtcagtgctgcgaactgaagtctaaaacgactctcggcaacggatatctcggctctcgcatcgatgaagaacgtagcgaaatgcgatacttggtgtgaattgcagaatcccgtgaaccatcgagtctttgaacgcaagttgcgccccaagccttctggccgagggcacgtctgcctgggtgtcacaaatcgtcgtccctcaccatcctttgctgatgcgggacggaagctggtctaccgctgtgttacggaagcggtatagacgaatatacacaaggatatgttggatgttccgaaaataagtttataatcctctactgataggtacattagaatttgataatctagatcagtgtggggaaaagg

SEQ ID NO: 42904 - DNA, 537 bp, Arabidopsis thaliana columbia
cacctcatgatttcctgtgcggagatgcacctcaatgtggtggacccgcagggacacggtcacttccagtgccgtaatgccttcagttccattgactataaactggctaagagactgcgtacgtcgaaacccttcactgaaactagaggtaaggcaaagctatattcattatccacttccaaagacaagaatgaaagtctgatttttgttttcagacattctggaatagaacagaacattaacctctttggtaccggcttatgtttggtttctaatgatgctttgtgcaacaggttctggtcacaggatcgctacatcttgttggagatctgctcaggttgctaaagagatgattttatttttcaccaacaaatcttcaaaaagactccttaagagtaatcttacagagcttcaattgttctttacttcactgttttgttctcatagttactatttgattctttggtccattttatctaacatgagaagtgagaacctccacttaagctgtatgtttctgcgtaattttaatgtata

SEQ ID NO: 42905 - DNA, 585 bp, Arabidopsis thaliana columbia
atacattgttacggatgttaattaataaaactattatgttggttggtgcagaaaaagtattgggggcagaatcaccgtacctctatagaactcacggacgagataaagggctaaaaagaggaatgcattttgcgtttggggggtccaaaatgttggactcctctccgaatagtccattccccaatataactgctcaagtgaattttttggtagaccttgtcctcgccggccgtgtctacggagacattactccctccgatgtttctctcatcagctacgctggaggcgactatatttattacatcgaccaaaatcgtcctgccgctgtaagaaaaaaaacattaatcttagatgtcaaggctaattaattcagaaacattattacaccaagttctctgcctttacatgtgaaagaacacttttgtttgtttgttattagaaaaaaatcataacgccaaatgtatatatacttttattttgggtgattatttgattcttatcttcattaaaatttgcatgcagggcttaaaagcactagtagagaaagtcgtggataatttacgcgttaatatgatagtattgggt

SEQ ID NO: 42906 - DNA, 361 bp, Arabidopsis thaliana columbia
ttccacctgaaaaagccacctgcaacaacataagaacaatttaaacaaaactattactcacccccgtaaaacgttgcttcaataaagagagggcatatcaaaaaaaacattacaattcgttcggatatttgaaatgctaagctcttgccaccaagcacagcagctgtggtacacaatgtttgtaccctgtgcaaacagagagattagtcagcagtagagaaaggagtatcaatatgatacaaatcattatgtgaagaacacttacacaattccgccaaggaccacgccgagtggattttcatctgcagccaaaccaatggtcgcaagcaagaagaaatagagtaattatcagtgagtatgt

SEQ ID NO: 42907 - DNA, 569 bp, Arabidopsis thaliana columbia
gatctatgttctaccgtttcttcctatggtgttactcctttcgtttttttgcgattctttactgctgtgtgcagtcccttctatcagatctgtacccgttccgtgtctttgcggttctttactgctctatgcagtccatggaaactagcctattcccagatcttgggatatcctctcgtttcaagtggatatgtttcacaggccataacctttgatgtccacgctgcccctcctacctcaactcagagagcctctcctactcgttccatggcccagacacgacaacggtttgttacttctgtaagatggtgtatgtctttgtttctggttttaccctcattcaaaatttcgtagtggtgcgatttaatgctgcagtatgcagtctctttgaactcaatctggccttttgtgctgtttgttttgtttctctttcttggtggcagtttgaaaagaaactaattaatacacctcgcctgatgaatctggttttatcgggtatttggtacctagtagcttcttatcggagctagttatcttccaaagttcctcgtcagtggagtggtttggat

SEQ ID NO: 42908 - DNA, 511 bp, Arabidopsis thaliana columbia
cctactgtctcaaaggaatcagcttcacaaacgagcaggacaataatcaaggataagccaacatcattctttcattagagaggaagataacatacttacaaatcaactctttacgagttgatacttccctactactactactacattacattactactactactacactacgctatactattctacattactactacattatgctaactatactatactaatatctaaaaaaccagtggcatctagccactggccctgttgctgccgccgctgctgccgcccctggtgctgcccctgctgccaccccggttgttgcccctgctgccgccgccgtcaccgtccttgctgccgccgccgctgcccctgctgctgccgctgccgtcaccgtcaccatcgccatcgccgtcgtcgtcatcgtcgtcgtcgtcgtcatcgtcctcgtcctcgcctgcgccgtccgagtcctcctcatccgagccctcgagcccggagcgctcgacggcccggatgt

SEQ ID NO: 42909 - DNA, 535 bp, Arabidopsis thaliana columbia
ggtattaccattttgcatatattgtgccatgttgtgactaaaaccagacaaccaacctagggtattagtttgtaagtggaatcatgttggaattgtttgtctaaaagttctgcttgctagtgctttacatttttactctttttttacatgtgctctttgaatttagctggatcaaaagactatcgtgtattattagcttgaatgcacatagaatggtctgacatgaagtagaactgttgataagtcaaatgatgtttagaatatatattttagcttcataaattagatacaacatattgaattaggggaaaactctttatttgcctctattttgatcactacgatgaagtcgagatttactttcttacagaataccgatcttagcagattattattcctgtccaaaggttatcagacgtatgcctgggatgatctaatcatatgagtgtactgacttgcgtttgcccacatttgcatgtgaaaatggtgctagatttatacgtccagcgtttgtggtcaatgtctgcagagtagg

SEQ ID NO: 42910 - DNA, 514 bp, Arabidopsis thaliana columbia
ccaagatcaccctgacggaaatagctatctccagatgcaagatcatacctttaacgaaataagatcaaaagacagccattagaaagatagctgaatggtcaattttccattagcaaaactactcagggttctatagagccataccacatgcactgcatgtcatgaagattgttgagctgatccccctctttggtaaataaaacagcagttttctcagccaagggcaccttcaccagaaaaaattacagaatggagaactggcgttgaggcttaacatcaaaagagatcgacgagaacaatataatacgaacaaaaccgagatgcaaacctgatctgcttgtaacatacgcttaacgcattcactgtttatataacgatctgctaggtccatgcctctagcttcatcggcaagtgcagcagcggcagtcaagtctcctgcatgcttcattattcggctctgtgttgagagaacaagtacaagggttaagaagaacaagaacatcctcacacaaac

SEQ ID NO: 42911 - DNA, 1077 bp, Arabidopsis thaliana columbia
ccgagattgtgggtaagtttgttgtatcctcctttgagcaagccttgcattgatcatttgatttttctctcatttatctaaactcataagtgtttgtttacatgtttagatacaacgtgttgggcctatcaacaaccatcggagagacattctttaaatgcttagatgctaactatgttgcaatggcactcatggaaaatttgcagtcgatggaattcaggcacattcggctgtttattcatacctttataacttatatagtcaaatcttgtccggcggatatgtgggagtcatggctgggagtgcttctgcacccattgtttatacactgtcagcaagctctcagctccgcctggccaggtcttctacaagagggcagagcaaaggttccggacttgtttggcatacaaagtggatcagacatgaaacttgaagtgatggaggaaaaactgttaagagatctaactcgggagattgcgactctcttttcaacaatggcttctcctggactaaacacaggagttccagttttggaacattcaggacatgttggtcgtgtggacatgtcactctcacggatttgcatgcgttcagatccaactctatggtggggtaagtatactacatctatatttcagattaaaagttgtttggataaaatagataataatgggaaaaaacaaattggattgcagtttcctcttgaatcacaaaagcgtactctaccagcactgcagatctgtttagaaacttttacctggacagatggagaagcgaccaccaaagtctgttacttttgtggtgttgttgttcttctagctaaactaacaaataacgtggagctccgagaatttgtttcaaaagatatgttctcggcagtcattcgtggcttgggcatggagtccaatgccattaacagccctgatttagttaatatatgccgtgaaatatttatctatctctctgacagagaccagctcctcgccaggtgagtttcaatcagaagcattcatggttgagtccttttacctgttgtaatgaattttgccttggtttttttgatcctggtgatttgat

SEQ ID NO: 42912 - DNA, 481 bp, Arabidopsis thaliana columbia
atccccatccgtgtatttgtttaccactaacactttcatttagatgaacttggtatagaccttacttttacttcttttgtcttggcaaagatgcatcaaaatcaagttaacctttaatgctattcaagagtgaacttaaatgcacagcttattgtaaatgacttgtatgctgtactcttggaatgaaactgaacttaatcgtgcattatttgtagtctgtacttctcagtttgtggcaatgttcactggaagctgtgagtcagggggtgccaaacgctcatgcaatggctatatcacccagtcaactagaagattgagagccatgcttaaaaatcttgtaagatatgttgcctccgtattgttgagcgttttgccttacttagtatacgtaaattgtttgtgtattgcattccttgagagttgagacgacaagctagatctcatgcattatcatcgtctttcctcatgttatgcaaccttg

SEQ ID NO: 42913 - DNA, 400 bp, Arabidopsis thaliana columbia
tctcaaatccaactttgaagtattgaaacatgggtcaaatgactggctcaagggctgagaaggactggcatccatatcatcgttgttttgaagccgcataatcggtaatgatcctaccaaccgctccatctcatctgtgaagatatcctttcttctctctatgtgtatcggctctgacaaggccattgtgttctccaagcctttttcaggactagttttagtttcatcataactctctgtcccatcaccttttacagtgtcagaagaacttgaccctacagaactattacctccaggtttacattcatcaagatcgctaaaggaagattgttcttcttctatctctggttgcaggatgctttctccatttgctgactgggacttctcaagatgtcctgcc

SEQ ID NO: 42914 - DNA, 498 bp, Arabidopsis thaliana columbia
gtaacggccgccagtgatccccccacatctatcgcgtgacatcgccgcctttgtaagacagcgacccgcctttctctgtctggaactccccaccagacatacatattgctatgacccgtttccctgacatgtcctgaaacaagcagaaccatcaaatctcttgattttggtttcaagctcaatgcaggcaaagtggttcctaatgctttctcacaaatcgtaataaaactaaatttgtacgtaagagtacctaaacacaacaaatctaagctctcagttccagtgaaagctacataacaagcatatggatagacatagaagatatcacaaatcacaatcactaagaaacttttgtttcaccaatcgaatcgatggtaaaactatatcatctcaataatgaatgcacagtcagagctacaaagcttgaaactttcagatctaactcaaccaacaagcaatgagttcctgaaacttgaatctactactcacggaaaccac

SEQ ID NO: 42915 - DNA, 524 bp, Arabidopsis thaliana columbia
gctgttgttcccctcccaagggcaggttcttacgcgttactcacccgtacattggatgattctacgaaagtcaagaacgaagctgatataactatatttcttaatggtgataacttatcaaagccgtgactaaattcaatttgtaatcaaactaatacaaaattgtaccttgtcattgaaactttcctgaaagcttttacagagcattaaggaacccaaacaactttgaaaaactgaatgattctgagaaagtcaagaaagatgtgacacaactctattaattgtgtgaattaatgtcaagttatgactaaattaaatatttagacttagggctttttttattaaaaatgatcatgttgcattttagagttttcttcttttagtttcagagaccaaaatttaatgagtacgacatgatttttttttcttcctttttcttgtattcattttcttcgccatttcgcagttatgtattattatataatttaaaatttatgatatgaatctataaaatgtgcaatatg

SEQ ID NO: 42916 - DNA, 507 bp, Arabidopsis thaliana columbia
tatcttatcaagagatcattccaaaattccaacctcgaaatgctaaattgtaatataattgaccaaaattaaagaagtttcgttgcgatgactcgtcatagatgtgtcaaccatatctgatctcactcacacacttgctatctgccactaccgatgctattttcctttttaacaaaacttttacttaaccaaaacaatagcaaacaaatgtcatcaaattcaaccagttcttgtcataccatctctaatacatgaattctttatggtgaaggtgaattgtggatttaaactagtatcataatttttgtgttttacgccaagaatttgattgccgtttggacatattcacgtattctttggcacaataacaaaacgtggcattggtggatctaccaagtggcacaagagtctgacttaagcagcaaagtggtctttgaatacattaaagttgtttctacgaaaagtagggctaatgaatctagaggaaaagtttttttttattacaaa

SEQ ID NO: 42917 - DNA, 485 bp, Arabidopsis thaliana columbia
cttgtatatacattttatatattgatgttacaagaaccagccctaagatggagaatttagtggctccaaccacgcatacaaataaaaatggtctaacaattttggattattaacgaacaaaattctgatttcaggtttaaaacctccacctaattggtcttatatagactcttatgtaataaacaacaccaaaataaactattttttcttccaaaccttaaacaaaaaaacattgacccggtccaaaactaggatctgtctagtgaatcttagacggttagacccatcacaagactctaatattataaagtagtatataaatttatttataaaactctatatatttagtgtaaccatccataaataccccaaaaccataactcagcatacccttcttcactatctcctcactcctctagcaaaccacaacaataacatagaagataacaaagataaccccatttcccaagggaatggcgattata

SEQ ID NO: 42918 - DNA, 531 bp, Arabidopsis thaliana columbia
gtgtgtgttgatgagcgggaaatagaggttcgtttgcttccgaacctaagcttcgagcaaagcttctcaagaacacaactggctaacgttaggctcggagtatgtatctttgtgttgacttagcttgactagactttggtctggatacgaacctgagatatgtaaggatatttttcaatgccgaagcagtggagagcttcggaattcgagcctaaatgggacttcgtaaataagtggttttagtagggccaggcataccttgatcaccaagccagaaaataaccttattttaatctttagtttttaccccttttgttgtttacgtgattagacacagtacttatttcaggaaatgaccgtgactgttgtctgttgatataaatagtaagaataaaaatgacaattttgcgaaactttataaacagtaggagagctttcacctgctcaggtaaatttatctaatcgcctccaatctccattatagatacaaataaatcacttggttgtcaagcaaaaaaaagatacatatgc

SEQ ID NO: 42919 - DNA, 494 bp, Arabidopsis thaliana columbia
catctttttaacataaatgggaaaagtatttatccttagttagcgtggatattaagaaaaaaaaagctaaaagaaaatttagaatttcactgttgtctttttttgactaattaaaggatattcccaattttaaatccaaaatattatcagaaaaaactaaaactattcattcacataccaaagtgtttattccacactttattggaaggaacaattacatctcctgtataatttgactgaaataatgtgtttaaaattactaattctttattattgggagaattttcttggttgcctaattaattacgttttaaaactataaaaggtagggacaaaattggaaatcaaaattattaagctgagtttttcaatggtaattaaaaaagagagttgtattataataaaaccgggaggtgagggcatgtcacatgtggtgtagcttgcacgtgtggtacgcgagtcgagaggactaaatgaccggctataaccagtga

SEQ ID NO: 42920 - DNA, 525 bp, Arabidopsis thaliana columbia
gtcaagatcataagaagttaacaatgttatttgtacatccagttttccaaattatttgtcataatcttatagacaaatatagccgtgatttttggttaaatatagtcttacttatttattattgtataaaatgatgtatcacttgaaaaagaatccaatggaaaaaaggatcaaatgggtaaaataattgaaaaagttacagagatttcatctaaagaaaagctaccatttttataaatttttgaacaaatttagccattcttattaactatatatatatatattatccccgttttaatgtgaagattattaactatattttagggggaaaatgctgtaattaccaatcaaattaagaaaatcaatgaatagaaagatgatcaaattagcaaaagtacagaaaattccaccacatattcagaagaaaagcttgaattcatgaaaagaaaagctaccatttttgttataaatttatgaacaaatatagccattcttattaattatattttaggggaaaatattgta

SEQ ID NO: 42921 - DNA, 604 bp, Arabidopsis thaliana columbia
ggaaaaaatattcaacagatttaaaactgataaaatctttataagatttgttccctttgtttaagggaaaatttccttatttttctcgaaccttatatgtgcctaaaaccctagtcgataagcgagagtcgtgtttccttgaagaatgaattcgtgtgatattgttccgatggaagcagagctaagtccaggagccatcgaagagtggctttcgacggtaaagcatggaaagatgacggagaacggaaaacgacgatcggatttgtccatcaaggtgaagagacatctctcggctcttggttgggtaatctcttactataacaaaaggaacaagaaagagcagcgttataagtctcccaagggaaagtggttctactctttagctaaggcttgtatgagttgtgtcgaccaagactctcaacagcaactacaaattgttcccaaatatgacttgtcttgccttccaagcaatattgcctcagagtctagttctgatgtttcgaatcaaaaacagaagaaaagtaagaaaaggggtagggtcgaggatttggatgtcaaaagcacagctccggaaaaagataatcatccgtctgctgatttgatc

SEQ ID NO: 42922 - DNA, 550 bp, Arabidopsis thaliana columbia
agaacattattttctcagaaggtaaaatcatctgagttcttgaacctttttgagcaatgaacccaatgaaaagatgaggactcatgttttgtgtcgactaaaacttgagcaggttctcgttctttcaagattatcgatcttggagctgcagctgatttgagagtgggaattaactacattccaaaagagtttctccttgatccaaggtctttttcttttcaaaatttgtatctttctctggcaaggatcataaatgtgaactttctgttgttgtaaacttcacgtttctccgttaataagtatctttcttttcgggttgttgctttcaggtatgcagcacctgagcaatacatcatgagcacccaaactccatctgcaccttcagcacctgttgcagctgcactttcccctgtcctgtggcaggtgcaaacttaattgtttgactatgcgaccttagttgatataaagctatcctagtttcataaacttaagtgttggaatttgatacttattgttttgtccaacagatgaatttgcccagataggtcga

SEQ ID NO: 42923 - DNA, 518 bp, Arabidopsis thaliana columbia
cattatgcatatcaatatgccaattatttgctcaaaacaaagcaacaacacatgaatcttgagttcttgactataaaaactaaaaaatatagataagttttggcatcatcccatcgttacacagacgaatctactggatgaagctcaaatctattagtaacgataatcgtcttttagtctgaactctgaagacaacagaaatatataaatgaatactcccaaaacatttttctgacaagattagcacaaattggtctcaagttggtctaaataaaataaaaattagagccaaaactcagatctgtactcttcagttatcttgtgtgtttcttgtctgcatatgaataaatctatagagaggcatctaaaggacatccgtacacaaattaaatttgtaaaaccttataattgccaacataacgtgcagctaaattgatcaatgacaaaaaaataaaaataaatgagaagatgtttttgatatcgtgtggactgttgtagtgtgtacctaatcagggcag

SEQ ID NO: 42924 - DNA, 437 bp, Arabidopsis thaliana columbia
tataatgtaacttaaagccaaactcatcacagcaacatatcgtgggtcttgtgtttcactcataagaaattgtgtgaacaaattaacaaagtgacaatctaaagcacaagaccaacacctaggaacttattcaactctatggctgtaaatatttgtgagcacactgagatagaaggctcattaccccaagacggaaagcagtgccattgcgtcgacaatcataagcaagttccttagtagcttcaagggcttctcgcatagtagctcctgaggttatcacagcacagactatagcaccagcagaagatcctgctaaaggagtagtttcctgaatcaacacacaacaaaatcatgttccttcctcaatcataactgttactacggcacagaaatccatgtagaaatgaagaacctttatgtaccccttttcaataagc

SEQ ID NO: 42925 - DNA, 604 bp, Arabidopsis thaliana columbia
gggtcttacttcatcggggcaaagcttatatgttaaataaaacagacgagacaaaaagagtttccatgtacataggaatatgaaaacaataatagaatgaccttcctagttctatatatcacctcaacttcttactcttggtccacattttcgatgataaaaacctgcatctccaacaagtcaccacgcaataaactgtgaggtatcaacatgaaattctcttgaggggtttcaatactcactttacaaaccctcttcacctccggagattcataagtcacagtgtgtccatccacattgtaggagagttgatatgagaactctcctacttctggagcagatggtgcaatgaagcttacagtcacatacacaccacacggttccctaaaacactgcactgcaagcaatagtttcttctcatgtacccttttaattagtatcttatcgctgatgagcatggaggtcgtaaagaaattggcacatctaaagcgcttaatattccagaaaatattcgtggagtgagtcagtttatagtgagcgtagagatcattgtatgagccagtgtaatcgcagaccgatgaagggcatgagcattgagagaaga

SEQ ID NO: 42926 - DNA, 532 bp, Arabidopsis thaliana columbia
ggtctctcgttttagactcatactcttgttattttgctaatgcttacatgattgaggatgatggttcttgctttcttggtttcctatactgttgcatgcccctcttctagctaaccccggacaatagaaatcctcgattagatgatgaaaaccattcaacatctatgtagcaactgatgacaacagcgtttgattgtttcacaattttcaagtagttatatagaactagacaaacgcatatgattgtcccagaaattagtccacaagcaaaagcacacacagagtcattaatacattgaagagcataaataccacacaaagaactaggaaataaaccatcaaagtttacacttgggtttgattcttgtaagtaaataaacaaaggtcactcatctttcctttagttggcttccttggatcatccctggacctgcagcaaaaaaggtgttcataagcagaacttgcaacatatttggtttattagccgattataagaaatgttgttatttcaccttcgttaattgcaggcttg

SEQ ID NO: 42927 - DNA, 599 bp, Arabidopsis thaliana columbia
taacggccgccagtgtgctctaaagataccaggtctaattccagtccaacctgggtctgtctcggtagaaacaataaggagcgcattcccaagctctccagatagttcttcccatctacgctgggtatcgagctctgagccttgctgcttacttccatatttcataatcacagagagggcctcgtcagatggatatcatgcaatcaggtgtctaaggactgctatatacttcgcatatatgcaaatactcactcttgcaggcccaaacaggttccattcaccctcgccatactctcccatgtcggcctataaagttacagctgcctcactctcaaccgcatccgccatctcccccaaagtctcaaacttccagtcaaagacattctcctccacattccccataatagcaccaggcctcacaatccagacactcttaatcccaaccttcttcgccggttgatggtcatggaactggctctgcgccgtttgcagcacttgatccttctcaactccaaacttcttctttacagccgacagcatgtactcgaagttcctgagatctggcttataagatccgatatcctgcgccgtgagaacag

SEQ ID NO: 42928 - DNA, 503 bp, Arabidopsis thaliana columbia
tgacaatttcttacgtcataatattgtaattactttacatacaaaattattgtaacgtttttatttagtcacgataacgctactatttggtcatagtattgtgactgtattaaaagtaactgatttttgtcactaatcatgacaaatttcttacaaaataaatagtcacaaatataaatatagatttgtgaccaaatcttgtaactaaaatattaataacgtaaaagaaaacttattgtgaacaaatcatggcaaataagaaagtttctatattctaaagtagtggtttatgtacaaataaccatctatagatcatctacttaacatttttgaagtacaaaataaggaatttttcggattgttttttttttgggttttacccagttttttacctgtttttttcggcccatttgttgaatctctttactatttggccacatcctataattttaaatgttaatcaaatcttaccaaaatttacaaatcgctttaaatactaatta

SEQ ID NO: 42929 - DNA, 591 bp, Arabidopsis thaliana columbia
gggatcgtgagtaacggccgccagtgtgctctaaagctttagagaaatgcgctgaacttcgacacccatgatgaatgtattgatagaagtagttctggggggagagatggaatggctgcagaaagaagagctggaggggtttgtaaaagctagctattgtgggggaggggtaattgtatttcacgtgacttctagaagccaatcagaagctccatctgagacttcgataaggagtttaggagtgtgtgctccggagtgctagtactgaaggtttatgcctagcgggtgtgtctcgcctaggggaaggtttttgcgaagtctcagtgatatcaggtattgttttgttggtggcacgaggcagcatgggtaagcgtgtatggtagtacagttggcacttagcctcaaataaaataagttctcttcacaattgattagacgtatacataccctgaatttctatattatacctttatcgagtccttccgctgcgacaaagcgttctagttcttcgcagaccccatatcctcaacagcatcctcccgatccagctctcaacctccaactttctcactctcgcctcgatatccaaga

SEQ ID NO: 42930 - DNA, 530 bp, Arabidopsis thaliana columbia
taaatttctatataacttcctggtttactcaagttaagaactaaaggacacacaagtacaacttcaatctccaaactcatttaggtcataataatcagagtctccgataatgatgtttacggacgttgatcacatcaccagcactttacgcatgcctcaatatacagaccaaaacaaatcattccttaaagctaagcacattacagaaatgctcataacaaaataaataatttacattctcatttcattcataagatatttaataattacattgcgacttgcatcttacatcataatatataaaaaaaacaataaccaacaatatcaatattagtgaatccatcataatgaaaaatcctaagcaactcctatacactgaggaatctccctcgaatcatcgattatggaacagagattatacgaaattaggaaataataaatatacaaaaaaaaaacttgcagagaaatctcctcttttcctaagaagagatcattaaaaaacctcccatgccgataataatctttaatta

SEQ ID NO: 42931 - DNA, 560 bp, Arabidopsis thaliana columbia
acaatagtttcaatgtaattcgaagaccaatcacgtaatttaccaagcgagcatcaaatttcgcatcctaagtaatttaacagcatatagaacccataatttcctcaaaaccgtgaattagcaattagtttagcgcagagatcacacagaatcgaagcaaatgtgggagcacaacaaaatccatccagtagcaaaatcgtaaacccaagtgttgacagaagattaaaaaaggagatgagacgagacgaagtacctcgccggaatcagagcaaggtatgggacggtagcgggaatgaactgaaccacgaggtgtcccaccacaagtaccagggcaagtcctttgcagagcttagtgaaattggtgaacatactcgttccctgaaacaatgtaagacgaagatgattcgtaagatcagagacgacggtttccaaattcaaaactaatgaaacgtaaaagatctcaggccaatttcgtagatctgctataatatccgtaccggagaactcatgtctccagacttgagcaagagtgtacaacaaatctgagatcctgacgatag

SEQ ID NO: 42932 - DNA, 482 bp, Arabidopsis thaliana columbia
agcagaaaattcatctccaaaaaaaaagaaagaaaaattcatacttccaaaggaaaggggaagaaaaacaaaaacaaaaaaatctcaagtcaacaaacaacaacgaaggtccgaagaactttgaatgttgttatcatcatcatcataatcagaatcatcaacatcatcgttgtattcttttctgggtattttctcttgttgaccttctaattatgccatctccgattatcgatttttgtagagcaatcgtattttatcgaagcccttgtttctggttttagtctcttgtctgaaatcaatctcaaaaaggttctgttttttcggggaaatgtgcagcttttgattgtttcattttccgattgtttcagaagaactggaatcgccgtaaagttcgaatttttttttgttagattgtacaaaagggtgttgtgatttaggaagaagaagagaagaagataaaaggttttttttttggctgttgt

SEQ ID NO: 42933 - DNA, 326 bp, Arabidopsis thaliana columbia
ttaagttccaaacttcagactttttgtacttcatcttactcattttccattgtctttgcctcatgctggaacactgattttagttacagggttccagaatctcggactttaactcggaagtagtgttcttcctctgttatctgaaattctttcctctgttctatgcggcaacctggtaatggtgaatttagttgctctctgtgacataaagtatgggtttgtgcccttaaattcaactgatttgtttctgatacggcatattcaccaggtaggcctagcacttcatccatagctttgttctgtggcaatcatctaccttgtactgt

SEQ ID NO: 42934 - DNA, 522 bp, Arabidopsis thaliana columbia
gaggatcccatacgtagaaaatgggatttaaaattggaagggaaagaagattgtaaggggtggaatagggagttggaattttgaatcggggattaatttgtatggtatttacaactaatttaataagaactgaataatgtcatttgtgcgtgtggcagcactactgagtactgacaaacgaaactgaagcgagcgcgcgggcaagcaagcccatgggtgtcactcttttggtttttgctcgaaattttttcattttctgttttaaatatctctttagcaatgcaatgagcatgtctctttaggaatataatgggaattataaatgtaaattaggtttaataatgaataaaagatagtatgacgacaaaaataatagaaaaaggatagtataagcgacgagattagcataataaaaagactgctttctataatgcgaaaaaaaaaaaaatcagaatctcgtgaccatgtgggacctgcatgctactggaacatgattcgggctttgggtttaagggttaagat

SEQ ID NO: 42935 - DNA, 538 bp, Arabidopsis thaliana columbia
tccgtcattcacgacacctatactctctctactttttcctttttagtttcaccatttttagtctaggattttgccagttatacttataaccgttaattgtatgatacgtagtataaacgaatgttactataaatagatgaaatgaaatctctgaataatattgtttccacgtgaatcgtaagctaaacgtttattctaaatagtgatgacatgacgttatatattaatagtatcattgacttaaaaaaaagttacaatgcgtgggtcatatacgcaccaaatcaaaggttttgtttagacacaattttcattcaaacgagtttttctatgaacgcattgttgacaatttctagctaaccttattctacaattcttttgtttcttacaacgtctccatcgaccatcggattacgtctctatatggatttttttttcttcttctttttaaacaagtgtcaatagggctgcctgtttttgtccgtgatagggaaaaaacgcggaaaactttacgagttgaaattgggctactatgttgcag

SEQ ID NO: 42936 - DNA, 510 bp, Arabidopsis thaliana columbia
catggtgtacttcccatacttatccatatcccattgctctaactttttgttgctaaaagctaacttaaggagtgatgaagattataactcataatcaatctaaaagatagactcttaaccatttctaatcaccacaatgttcaaagatcatatttggagctagtggttatttagccatgtgcatggtcttattttgatagattacctttttggattgtttgaacaaaaacataaatacatgtagctaatttcgatatattaattacttttctagttggaaccattcggagaacagcaagtaccaataacgtgaatgcatttccatttaatatcacacaaaagagaagttccatgtatcatgaatttagcaaattccatttataaatatttggcttaactaaaattatatacatggtttcttctacatctagtatcacgaatagatagataaaccatgatacctatgtatatgtatttatattaaatttcactatccccacattttttgtt

SEQ ID NO: 42937 - DNA, 616 bp, Arabidopsis thaliana columbia
aaagaaagaaaatgacagttaatgtgaatgacagaatgagtaagtaaaccccattaaaaagggccgatgatagaaaaacaccgtggaattaaacgagagcactaatctcatttaattagttacaggtaaaaagagagtcaactaactaattaatggttagatctctctctacttccccttgatttgttacagtttactctcttcttaaccatttttgaaatttgaaaagaaattttttgattggacattttttcttttaaaaaaagaaataataagattgttgatgtagccatagaaaccgggaggcacaaaaaacggcaaccaaagaaaggaaaggaaagaaagaaaacaaaaggagtccaagaaaccagaagattgtctcccgacgccattatccttcaccctcggagcttttcttgaagcagggattcttctaatcattaatccctacttctttctttcttttttgtttgtctcctttgagatctatctagtactagtagtaaaccccctcccctccattgaatttgaattgaattgaatctctgggaatcaaatctttgatgtagcatctggacggacatccttctacgcctgggaaattcagatgatggat

SEQ ID NO: 42938 - DNA, 517 bp, Arabidopsis thaliana columbia
ctttaatactttcccatgcagttttttctaacgtaaaattgaggacaaatattttctcaaaagatctgattcagtagatgcttgatggatttggcttctctggtatcattagttttgtgtcaattttgagaatgctatgtctaattcaattttgagaatgctatgactaattcaatttgagaaagtgcatgtagttcaattttaaactatctttctctctgggggtaacagattctgatgcgtcgttaggttcataagctgcactgtgtaaacacagctcgtgcagttgttatagtgcaggtgccatgtgcattttgacaagttatatccgtgtcacgcggcataacacactttagcacgacatgaaactacaacactctgaaaaacaagacgtttacaaatcgcgaataacaactacagtatgtgaagattctaagttacaccacttgaaactaacaagacttcttttgttcttttctcaaaacctagctacggaatacaacttttcttgaaaaga

SEQ ID NO: 42939 - DNA, 610 bp, Arabidopsis thaliana columbia
  unsure (1)..(610): unsure at all n locations
nnnnnnnnnnnnnnnnnnnnnnctaaagcctagctaaggcggattatatgtctttatcgcaagtctacgtcataatctatgcctctaggcctgtatatacggatatatggtcaaatctatacaatgcccgtcacagctcatcgacaaccccaaggacgtctatcaactcatcaatcccagactccggactctccttctcacactcctcccggttgccctgcccaaaccggcaccagcaagcctttgcgccgatattcttcgcaaagaggatatccgtgatcgtatccccaaccataagcacctctccctcgtcataccccacagtcccatacacacttttcagcctagggagcaacacctccgtgaacccctccggatgcggctttctcttcccactcgcaaacatcggctcaccgataatcagctcttcattgatgatcccgccaagaccatggctctccagcgcgcttttcacagcagcaacggccttattactgatgattgcaagcggaatccctttttcccgcagcgagacacggacctctttagcgccgggatacggcttcgttagtgggtggccgtggacagaatatatttggcggtatgtgcg

SEQ ID NO: 42940 - DNA, 572 bp, Arabidopsis thaliana columbia
ttttttaaacaataaatgtaaaaatgtattcatcaaaaagtctttgttatattaattaaatgcatcttttgttgtaaattgtaggaacacttcttctaatcccacaaattaaaaattatgtgtgtgctaaattaaactcaaagactattttcaaactttgttgaatccaactcattaatcgaagagaacatgattctgacgatacagtcgatttgttggacgagaatataattgtttgagattttggaattctcaatgtcttctaccattatggtctagttagatagtgtgtatcttagcttagagaatacaaaattattcaatataagtatttccataatgctcaaaaatactcaatgaaattgttgcataaaatttgttttcaaatgttatatcttttatattttgatagtttcagttttaattttaatatatgtgtttatatatttgaaataattcaatttaataaaagtatttgtaagatataacatgtatgaagattaaaatgaaatatgacaaatatttttaggatgtgaatagtgcactatcttaaaaaataagagtttgttgga

SEQ ID NO: 42941 - DNA, 569 bp, Arabidopsis thaliana columbia
ggagatgaattataactgaaaatagtttggttatcttcggtttgtgtcaatgtatataaccggaatatatttcagttcgatttcatggtaatttggattttgtggttttcgtttttttggtgcatttcagttagtggttgcttaattttgctaaatcttggtttaactacgatgaaacttgggtatatatataaatactgtaatttgaagggtcggtttattgttggagtaccagacctgaaccagaagcaatgacaaacacaaatgatgccttaggaaaatttgttgatgctaatagtgtgtctcgtaacattgccaagtgtgctctgtttattgtaaaaattttgaggttattgagcaacaataaggcaaagacgaagactaaaactcctaaaagaatcgtatctctcttctcaagttaagatggtgattggtgaaaacaaaagacagaatttagtggatctagtagtccatgcctccgcattccaccatgcctgctcctgctgctcctgactcgctttcgtctttcggaagatcaccactacagcttccgttgtcgtaacaaagat

SEQ ID NO: 42942 - DNA, 501 bp, Arabidopsis thaliana columbia
gaaagtgatcaaaaccaaccatgggaaacatgtagattcattcgcctttcgataacaaaaaccattcaaagactgaactcagctcctttgtatcagatcgaaagatagttaactataacacaatgttgactatacaacaatgcattaagatatctagaggcggctagaagctaactttagcaattaaccaaaacacttcaaatgcagaaaagccttaatcatctagtgaagcattcagagacctctttctgagtaaattcaacccaaaacctacctgattttaccgaaaaaaacataagaaactagagaattagatgagaagaaacatacttaattcgatcgaacttgagacccatcctcttaccaccgtcctggcctgaacacatagaccaagagatcgtgtattttaatcgaaaactctacgaacaacaccaattggaatacattttgttttgtcaatcacctggcaaaggattgaagtaacctaagacctcaagatgc

SEQ ID NO: 42943 - DNA, 598 bp, Arabidopsis thaliana columbia
  unsure (1)..(598): unsure at all n locations
nnnnnnnnnnnnnnnnnnnnnnctaaagaatacacatcaagggggtgacttacgagttcgtcgtttagcatgatcttgcagtagctggtgggcagctctccaccttgctcctcagtgttctctccgtaaggctttgccggctcatactctctcccttggcggtttccgttacttcctttgacattgacaagctggaggttgacaatctgatgcacgatgacactgagaataccgcttggccacaaaggatcaggcggagtatgcgtgacggcttcctcttcctccgtggtgatgacacccttgtcgtcctcaaattgcttgtcggctttcagattctccggcaaatccttgaccttgccgtcggtcctcagctcattcctcagtttcggcttgcaaagaatccgacttcccagtgcagctcgcagggcatttcacttccctcgttcataccctgaagttttgatacatgctggtacatccggcatggatgctggatcatttcgcgaataggcagctccaccttgccaacaatatcatccgctgtgtgacgatcagagtcccagagctcaacgctaaggttctcgttcgccttgatgag

SEQ ID NO: 42944 - DNA, 554 bp, Arabidopsis thaliana columbia
caatattttgagttatataagtttgagaatgtctaaacctactaaattacaatttttagttgtaatctactttttcatgaataaaagttagccactcatgagaaagagaatacaactaaaaaacaaaatctgtatgagatttgttttattatttggaaaaaaggtttttgatttttgaaacattttttttttgtcgacattcttaaacccaaacagggctgaagttacaatggtgaaagaggaatccaacagcacaaaacatatctaaaggcccaacaacataaattataaagtaaatcagttggcctaaaatgaacatgtgtaaggccacatgttttgctcaagttggaggtggaagatgcgaagaaactcgccaccgaccagtcttcaccgccatcaccgccatagctgaccgccgatcaaattctgttttctgacatggatgttccctatcagctattttctctaaatcaccaccataatttcttttgcagaaatctcccgatgtgtagacactagatcataaaccacaaaattgaagcgcagaaaagatg

SEQ ID NO: 42945 - DNA, 392 bp, Arabidopsis thaliana columbia
ccagtgtgctctaaagtctcttttctatgttttgcttttccattgggggtcaaaaatgggattcttttatgggatgatttcttaatatctccctggtttgcatatggtcgggtttctgcatttcgttttcttctgtcaggcttcggagctacttcgttagctattacttctgcaagcgctgagactgattggtatttcttgatacattttctatgctgtgatcatgtattatcggtgctcctttggccttgtcgtaggcggggttaatacttaattggctggcagtgacggactactggggaaaggggtgtagggagggaccctatgttccgtcggaggtatgcggggcctgaggctggtataagtcgaagcgaggtcttgagaggcttgtt

SEQ ID NO: 42946 - DNA, 577 bp, Arabidopsis thaliana columbia
  unsure (1)..(577): unsure at all n locations
nnnnnnnnnnnnnnnnnnnnnctaaagctttagagcaactcacatttatccttgacgacgtggttcgatcatattttagcctcgcagcctctgatcaaacctctgcttccctttcggtctccttggcactggccaaaggcttacggctgcgtctgagggcctggcttgatagccttccatctcgcttgcagccccatgagcggcggacggtggaacttttagacggtaatgacgaccccgggcccagtgggaacttctccctgcacctggcgtacatgactacacaactagctatatatagggcgctgatccgccccgtgtcactaatagcgctgcagggccacacatggcacaatgctccaacttcgctcgacatcgacctggatgctgctgaagcagtcgttgaaggagccctatcaaacaccaagacgctcctcgcctctcttatgaagctcacgactgccgagtgggattcgttctggcccggatgtaagggacccttcaaaaatactctcatcgatgcggtaagattgcaacagcgtttactgacatggtcatagggtcacggcataatttt

SEQ ID NO: 42947 - DNA, 544 bp, Arabidopsis thaliana columbia
cgcgccgcccacaaagcacttggacccaatagggacccgtttcacgcgcgcacacacgtgggaatgatatcagcgtcacacagccgacgcaaccatttctctatagtgactgtctgtcacgttacgacatttcacgacgccacctgtccccatttttggtaacatgtgtccaggtgacgctatctgcgtggcttcttcacattggttcaaactttattaccaaaaatactccttctattattctcattcttcttcatgcgaaccccttacctttttcaggaattcaatttttgttagtgcaaaattttatgaagctctcgtagtcttagaaacttaggattgataaatgttactaatcattatttatagttaaaagaaaattagattgaaaactgatctaatacaaaaaccatcttattgaatttgtttatgcgtgttgtactcgagtaataaatttactcaaggagaaaaatatctctccaattaatgagatccaggtgaatgatgttactcttgaaactaatattgaagcggtgcgtaatgg

SEQ ID NO: 42948 - DNA, 422 bp, Arabidopsis thaliana columbia
cgccagtgtgctctaaaggataatgtcgccgacgaaagggtgcaggcggtggtacggcattgcttggaacatttgtcgtctattagaacgacaggcatacaacagttcctcctattcccagtcttcgttgttggcatggcgtgtataagacaggaagatagaaatgtgattgaggagttcttaatgaaggtggaggtgttctgtcgagggaatgtggacgcctgtagtcgactcattcagaagacttgggacagctatgacgctggggtcgaacgaagctgggactggctgtacctggttgagacggatggatctaatgtggcaatagttaaaagaccatagctatctcctcgagtcgttgagttcatgagtcaagtatatctttcacaagctaaacgagaacggttggaagaccgagattc

SEQ ID NO: 42949 - DNA, 562 bp, Arabidopsis thaliana columbia
aaggattgtcagttattgctgcataaattccaaaggctcgaggagcaaacccaccgctgccatagcattgtgctggacatggcccctaaaccaaacggtcaactggctgaaacgagtattcaggatgtctcgatggtgagatcaatgtaccggtcatgtccgcatcgttcttgtccttaggcgggtcaacgtagggaatagctataacatcgttatgttagcgaccaaggattctgagcaagagcgcgataatcctcaagaaattaaggcagtagcataccgaggtcaagccttcgcatatcttttttggacgtcattttgactgtggacttccgaagctgatacgttggctcgcgaagagatccccaggtaagaggcgatgctggcattcgcgatggttggccgccacggcaaagcggcaagctcggggccgattccgtctggctctggggccgacttatcttggggtatcagaaagctctttagctggcgctgctcgctcacgagatcagtgcgttcgcgtacgggccatactgataaccaatttctgcatgtaattatc

SEQ ID NO: 42950 - DNA, 595 bp, Arabidopsis thaliana columbia
taacggccgccagtgtgctctaaagttgaagccctatagttgtacgaaaatgtcacccaggtaatgtctacgaaaaaaaaagaggctccgtgaggctataatgcgaaaggctagtcgacataaagatcgagcaatgataagagtcacctcggcactgcatcgggtgtttctcctcgtcaataagactatttacggcttttctacttgctgttgggagtctagaacgcgagttcacaagactggcttgcctcatagtttttgcttattttaattgtgagttgtctctgaaaatagcgttaattctactgtttgaagcccgttagtcggaagtctagtagaatcgtagtttacaacatccactcctaccttttgtcattagggcaaaccaaatgactaggagcggggcggtactgcttcatgaatcgcttagtagcccctggaacctttatgtgaggctataccctaaaggagcctaatccttcttataatctgatttgggatgcatttgtaaggcgacaatgtgcccacatacggatttctcccagggcggacactcccatgcatagaccaactcaagtcacaagcttgaatatat

SEQ ID NO: 42951 - DNA, 488 bp, Arabidopsis thaliana columbia
gccagtgtgctctaaagtacagtagcatgttgtgtccaacgcaataacagccttccgacgccatttgatgtctttagaatgcgtaaatggcactctctgcaaggacgagcatggttattgcaacgctacgtcttgtgtaatgacggacgcatcctagggctgcgtctaggcaacacaatatcccttcaacgctgacttcagtattgattttgactgcattcggcacaaagttgactcagcgtgtctccagcagtggcaatccatggacagagacgcctaggcgaataaattgggctaggcagctgggtcggcagccggtgagcgcgatggagaaaaggtggatcgcagtccgggtgatgagcgaggcccactcaacggggattttggcccagggcaagattttgacagttgtgaagacagtgctcgacatcgttgacgagtctgaaaggtcaggagaagatcatcgactccccctttcgttgcatcat

SEQ ID NO: 42952 - DNA, 622 bp, Arabidopsis thaliana columbia
taatgattgcatacttcttcctggccaggttagtgcactctctaatgcagagtctaaaaagagatttgagtttttggaagcagtcagcgggactatggatgctcatctccgtttcttcaaacaggcaagctttttcttgaaaacaattttcagagcaagaccacaaataactctggatccaatccgcttggttttacaaggaaacctaataacacaatgggttctattcctgttttctgataagaaccactttattcgctttctcacgagttcttccttctttcagggatatgaactactacatcaaatggagccttttattaatcaggtctgatactcttagccgcatgtttttcatttgcagatatttttctgtagcaaatctttcttatccaaggaatagtacaaggtatatccgtgtttaattgaaattttacggcaggtgttggcttatgcacaccagtctagagaatgtgcaaactatgagatggcatcacttaatgaaaggatgcaggaataccaaaggcaagttgatcgtgaaactagaaactcctgtgtttctcaacaggggatggcatgagacatactcaagaactcccagaaagcatcgaggccgtgatgc

SEQ ID NO: 42953 - DNA, 395 bp, Arabidopsis thaliana columbia
cgccagtgtgctctaaagaggagtaactgcgcttgcggtggttgcgagcgcgcaggctgcagcgaggatgcgaccgtatgtctacctttgttgtcagttcaagttccacattgctcaaccgggatcagtagagagaacgaacggggatcattttgtatgtagatgagcgattagacgcaacgcttccgtaacaattattaacgtggatttggtaagagactgtatagggctttcccccggaagaccctgaatttcaatacggaaggagttgacggcggtgctggatgaccggaaatgaacgagcgtggtatatcaacagattgtgaacaaacgagtcgtcagaaagacaaagacgttgaagaggcaatgaggagaagattgagagagaatcgcca

SEQ ID NO: 42954 - DNA, 543 bp, Arabidopsis thaliana columbia
tggatttgtgggttgcggcacggcggagattggcgacgacggtgaagcggtggcggtggagattgatgataatcatggtgagcggtaacggctctaacgctttttttcaaggaaatgactgaaatgccaacagtttctttgactgttgagtttttttttttttgggttatttaattatgttttaaaaaaatttaatgttaatttcttctcttaattaattagttttggctaatggcgtttctgaatcttctgatactaaactggcatgttattttaaataatatagttttttgccgttacatataccatgaactggggtcgcaaaggtgtgacttattatcttatgagataaatatctgtagaaaagtataatgctgaatatagaaataaatcttaaaaggttttaactcatttatacgatacagatacgaatacaaacttttagtatttccaagaaccaagcatataattatttcatgatattttttgatggaagtatgttgacaaatagccatcaattttgtcaaacaaaaataagacatg

SEQ ID NO: 42955 - DNA, 651 bp, Arabidopsis thaliana columbia
ctcaatgttctaataaactactatcttctaaaccttatcattactatcatcatcattatcatttttaacataaaaatacacaagaagaacaagtaaaggataacttacagtagtaagtgaccaattaacaataagctgtgacattaacggaaccttacgagtatccacttgccaagccactgcagctcctgcactctgcactcctttgtagaatccactatatctactcaaagtctgcgaatcatcagccaatgctcctatcaaccaataaaccatactctgatacattgcatctaacaatccatagctcatatataacacgaatggtcccgcaaactctatcccggaatctttaaaatcaagtttcttttccggtagtttgtccaacgagtaaccgtgctgattcgctaacccgcccgcccatataatggttccgattaccgcgactagtgatattccggtgaatcctctagctcgccggcttttgaagctgaagtccatcacgtaaccaatggcgatggatccagcatttgagctcccagtagaagacattgttgaatcctctggttcttaagttaaagaggagtcattcacattgttgaattgatagctgtagaagaaattgctagcccaagccgcggggacgatgag

SEQ ID NO: 42956 - DNA, 506 bp, Arabidopsis thaliana columbia
gttagactactgggtttggagtattgagtaattctgttgggctagctataaatagagtatgggcaatagttataagagctcggatatactcagagttatactagtaatagttttgggcttggattagaatctaggctagcgttagagggctagggtttagggaatcaaggcctcataacttatcttgattgtctaattagcaaataagaatacaaaaatcatatgttttattgtctgatagaaaagctattagtattacccatcggcgactactatgcatcatcctttttagaaaaacttgtaggtgccgtccaaaaatcaaatgaaaagaaaaattgtaggcgatagtactgtttatcgcgtgtaaggcaaggcactgttcccaagttatctttaatttctaaatagaagcaagatgatttttttaaactaaggtagagattgatacagtatatacaatataatttcacactagtgacatattataaacactttaattgtcattt

SEQ ID NO: 42957 - DNA, 585 bp, Arabidopsis thaliana columbia
ccgactaaaaacaaaaaaaatgttttattcaattttttttttattcttccaactttccaagaactgaagttgaatgaaactcagaactgattttgtgagacaaagatgatctttataatattgtaggtgattaattgaatgaaactaatttcgagagatttaagttttgaagatatgttaatggagttgggtaaaatgagacaaagacgatgactataaatccccatcaaattcttcaatcttcatcagtcgaaaatgttattaattcacaaaattttgctatagtgatcatttatataacctttgtaagattcctaaattgttcaaacatagacattaaaatagacaatagtacttctgattggatacatgtcataatcatggaatgacataaagtaaagttaaagtacggtatgaaacaattctagagatcaaaagtttcataatgaaataagctatcatggaatgacataaagtaaagttaaagtacggtatgaaacaattctagagatcaaaagtttcataatgaaataagctactatatccatagttatttgcataatacatttttgatttgtgttttta

SEQ ID NO: 42958 - DNA, 447 bp, Arabidopsis thaliana columbia
tagatcggtgtctccactactactagtggtggttggtgatggtgtgaagagagaggccattgtcttcttctgtttcgtgtggcttgaatcgttatcttctttcttgaccataagcatttaaaaaaaaaacattatcctaaaatgtgaggtcataattagtgatttggagattatattatacacgaaattataaatctgttatgagatgggttacattagcttggatgtgaaccaatatcaattaaagaaaagcaaaatggaggaactatctcaattcacaagagtgagaatgataatctacataataataacatctctttaaatatctattgactttagaaatgttataatggttgccatttgcctttcaacacaatttggttacatgaatgtttatactcctactctcttttgatctcttttattctccatggagtaggaaatttc

SEQ ID NO: 42959 - DNA, 263 bp, Arabidopsis thaliana columbia
agcttgtccagagcaagagcttgagcgaactcagcatgaaacaaacattcaatctcgatcttggcgtttagaggcaaagctgcaacttgatacgtcgatcgtgctggagaaggagctgggaagtctgcaacagagacaaatgtttcatgcccttaacgactccactaataattatgcatctcaaacaaagtaggaacacaaacaatcttgttaaagaacgcacatttggcatatatctcggtcagtgtcttgaaggtaggcaa

SEQ ID NO: 42960 - DNA, 443 bp, Arabidopsis thaliana columbia
gtgggaatttcttttgaactgctgctgaatcctagagagtgaggccaaacttggcatgtgatacattttcggaaagcccaaagagagccccccgatgaaagtagcaggacaatggaacatatcaattgattttttgtcgactccaaatgttgacatttcgtgaagcgggcttgtgcgagagtagtactaggatgggtgaccgcccgggatgtcctcgtgttgcatccctcttttgttttaatttgtattgtttggttaaaactttaggactctataacttttataccgtgaggtcaaacttggcaggtgacaccttttcgaatagcccaaatagagcccctccgacgaaagaagcaggacaaaggaactttgtcattgacttcttgtcgccggaaatttggacctgtaagtactttctcgggtatttttgtgatttgggcgat

SEQ ID NO: 42961 - DNA, 540 bp, Arabidopsis thaliana columbia
aacctaacaagtcctttttatatcctttttttcttagtctttcacatgatttacactagaatgattccaatatccttaagaataagactaattcttcacttaagatttaagaacatcttttagtgataactgataactacaggttttggcgaccaattttcatttgttttatagtccttgatagtggtgacgatatgtcctggatttaagacttactatgaactggaaaattaattgctcatcaagaaaagatatttaacctaaaaatctcaaaaattatcctaaaaatctttgtcctcataactataattaagttactaattaactaatggttagacattttttttttttaactatatagtaatagtgtaataataattgttgaaagtggtttttacttttactgcggtgggatgcaaaagtaagttgaagttgagattctaaagctcctaaattggtcaaaccgtcaaaccagagtttcagattcagacaatcaaaaacaaaacaaaaaaaatggctgggagattctgtcaaagagac

SEQ ID NO: 42962 - DNA, 573 bp, Arabidopsis thaliana columbia
gatcaaaagcattccaatttgggtgcaatgcttcagtcgataaatatcatcatgaaccaaaaaaatccaataaaaatcattttgtttgaatgttaaggatttttttgaaaaaaacttacaatgatcaagcgtatgtagctctattggtagttgttttcttccgaaaaaagcttatcttccataaactatggttcaaaactttcttgagaaggaattcgtccgatgaaaagatgtatcggcccgaaattcctcaattatccaaaaacgaagttacaaagagaaagatgtagaagaaagacgaaagctgatatttgtttttattaccaaatgaggagaaatatgagttgaaatgaaggtgaacaaagaataaatatatataaattgtttgtcttttgatagagccaaagatatatatggctcaagttaaaaaacataagacttatgatacaaacaacaatgtcccatgacttgtcagagtcggttcgtttaaactcccaactagcaccagtggttgagggacacaaatataaacccgtcacgctccggtcggtattgtcgcaatgagtgtgcgag

SEQ ID NO: 42963 - DNA, 472 bp, Arabidopsis thaliana columbia
catccatcacaaaagaatgatcatagatgaagagggatacacaaaccctgatgctggcttttcagtggcagctttaagaacttggcatatatcttcaacatgaactctcgacgtgaatttacgggacgctcttctcttttgaccttcagacaaacgctcctgctttaacaaggtatcaattgcactgcagcaagaaacgttccttttgagaatcagttttaaagcctgtttaagcactacatacacaatcagaagctgtaaacaaccttcgaccaggtccataaatacccccaagtcgaagtatttgagtcgaaaccccaagatcacgacccaagcttaaccatccttgttctgcagctaatctcactttggctgactgagttttaggatttgggagatgactgcaatatgaaggaacgaccttatctatcatgaacaaaagagatgaaacttggaagaaagaaacttactt

SEQ ID NO: 42964 - DNA, 420 bp, Arabidopsis thaliana columbia
agaagagctcttgggtattgttttatagacgaagaagaagaaacagacgaggacgactaggtcacgagaaagctaaggcggtgaagcaatatctactaatacaatgagacgtgtattgaacgttgtgtacacgcaaagttgtttttagctaattgccttattcttaggttgaggaaaagtatttgtgctttaagttgataaacacgactcgtgtgtgccggctgcaaccactttgacgccgtttattactgactctgtcgacaaccacagtttctaacggtcgtcataagatccagccgttgagatctaacgatcgttacgatgtatatttaactagcagtatcgtcgtatattttaaatatacggtggagctgaaaattggcaatgattgaaccgtgggctcacatgcattgaagcgta

SEQ ID NO: 42965 - DNA, 331 bp, Arabidopsis thaliana columbia
atcccccgttttcaggtgatgaaagaatattctatctatccatttcacttaactatgtttctcttcttttactgatagaagtgtttcattaggtaagtaagctaggatttacatagcgcaccaacctcaagaacgctcagtacaagaagattttacttccatttcaaaagatttcactaaaacaaaacaaagctatattcattttctctaatagaacattgtaatatatctcgtttctgttattgaaatcattggttggatgatgtctccgacgataactttcatcggagtcggagactctagcggataacctttgttcttcttgaggctt

SEQ ID NO: 42966 - DNA, 412 bp, Arabidopsis thaliana columbia
cataccctccatgtttgctgttcgtaaaagtctcaattctcttctcacctgaccaatcaaaacaaaaatgatttgcttaaaaattgatttgaattcaatttgtttatttgcttaaaattgaattcaatcgatacaagttcgactcaaaagttgtctatttttaacaatggatcagaagaacaatgtagatagatataccttgagaaggtattgaaaataagagcatctccgatgctggttcttattcttgtaaaccattctctcgaacaccgcttgctcgagttcaagctgacttagctgactcttcagcttctcttctagagctttaacttgtgtatcatccatggagttttcttcaagcaatttcaatggaactctgattcttttagagggtaggcgtttagagacctgc

SEQ ID NO: 42967 - DNA, 474 bp, Arabidopsis thaliana columbia
caaacgagtttcctttttgaaaaccatcatcagtttgatttccatgaaatgctaaagatcctactttacttgaacgtgtcctctgaaaagaaccaacagtccagaacttcaagtgcttattcccggaagtaacaatgaattttccattagatgaaaatgtcacagaagttatctcagagcaattagaactcgctttgaccttcgccaccaagatgcttttgcgccagtcccaaagatatatgtatcctccaacactcaccaaatattcccctaaaggccaaagtaagcaaatccacaataacaagtaatgtggtaacaattatcaattagagcaacaaaaaggaaagaaaactaaccatttggtgaaaaggaaagacactgagatccataaagatggcctttcagctccgagacaagtcccaaagtgtcacaatcccaaatcaagactgcagagagattcggagactgagaaag

SEQ ID NO: 42968 - DNA, 3809 bp, Arabidopsis thaliana columbia
gatacatgcataatatttgaaaataatgtccgaacatataattttggccccgtaatataacaaagatcacgaaaaggctcgaaaaagtacattaaaataaaaatttggagtaggaaaaaacaacaatagaagaattccattttccttcctcattcatcggatatctctctttgggctttccgaaaaggtatcacatgtcaagtttggcctcacggactaaaagttctagagtcatacatttttgacaaaacaaaagagaaaaaccgaaaaaagagggatgcaacatgaggactttccaggaggtcacccatcctagtactactctcgcccaagcacgcttaactacggagttgtgatgggatctggtgcattagggctggtatgatcgcatccgttactacatgcaatgcaatcgtatctattcttttttgaagactttatgatcgatttcccgtgggtcccaccagctacgtatgaataccctatcttgtttaaaagagctttgatacatgcaaaatatttgaaaacaatgtccgaacagataattttggccccgtaatatagcaaagatcccaaaaaggctcaaaaaagtacatttaggtcaaaatttggagtagaaaacaaaaccaatagaaaaattccattttccttcctcattcatcggagagctctctttgggatttctgaaaaggtatcacatgtcaagtttggcctcacggtcttaaattcataaagtcatacatttttaacaaaaaaaaaagagaaaaaccgaaaaaaaagagggatgcaacacgaggactttccaggaggtcacccatcctagtacgactctcgcccaagcacgcttaactacggagttctgatgggatctggtgcattagtgctggtatgatcgcatccgttactacatgcaatgcaattgtatctattcttttttgaagattttatgatccatttgtcgtgggtcccaccagctatgtaggaataccctatcttgtttataagagctttgatacatgcaaaatatttgaaaataatgtccgaacatataattttggccccgtaatataacaaagatcacgaaaaggctcgaaaaagtacattaaaatcaaaatttggagtaggaaaaaacaacaatagaagaattccattttccttcctcattcatcggagatctctcttttccttcctcattccattagggctggtatgatcgcatccgttactacatgcaatgcaatcgtatctattcttttttgaagactttatgatcgatttcccgtgggtcccaccagctacgtaggaataccctatcttgtttaaaagagctttgatacatgcaaaatatttgaaaacaatgtccgaacatataattttcgccccgtaatatagcaaagatcccaaaaaggctcgaaaaagtacatttaggtcaaaatttggagtaggaaaaaaaaccaatagaagaattccattttccttcctcattcatcggagagctctctttggcctttccgaaaaggtatcatatgtcaaatttggcctcacggtcttaaagttatagagtcatacatttttaacaaaaaaaaaagagggatgacacacgaggactttcttggatgtcaaccatcctagtactactctcgcccaagcacgcttaactgcggtatgatcgcatccgtaactacatgcaatgcaatcgtatctattattttttgaagactttatgatcgatttaccgtggtcccaccagctatgtaggaatactctatcttgtttataagagcttcgatacatgcaaaatatacgaaaacaatgtccgaacatataattttcgccccgtaatatagcaaagatcacgaaatgcacgaaaaagtacattaagatcagaatttggagtagaaaaaaaacaatagaagaattccattttccttcctcattcatcggagagctctctttgggctttccgaaaaggtatcacatgccaagtttagcctcacggtctaaaagttctagagtcatacatttttaacaaaaaaaaagagaaaaaccggaaaagaaaagagggatgcaacacgaggactttcctggaggtcacccatcctagtactactctcgtccaagcacgcttaactgcggagttttgatgggatctggtgcattagtgctggtatgatcgcatccgttactacatgcaatgcaatcgtatctattctttttgacgactttatgatccatttgccgtgggtcccaccatctatgtaggaataccctatcttgtttatgagagctttgatacatgcaaaagattcgaaaacaatgtccgaacatataattttcgccccgtaatatagcaaagatcacgaaatgcacgaaaatgtacattaagatcagaatttggagtagaaaaaaaacaatagaagaattccattttccttcctcattcatcggagagctctctttgggctttccgaaaaggtatcacataccaagtttggcctcacggtctaaaagttctagagtcatacatttttaacaaaaaaaaaagagaaaaaacaaaaaaaaagagggatgcaacacgaggactttcctggaggtcacccatcctagtactactctcgtccaagcacgcttaactgcacagttttgatgggatctggtgcattagtgcttgtatgatcgcatccgttactacatgaaatgcaatcgtatctattcttttttgacgactttatgatccctttgccgtgggtcccaccagctatgtaggaataccctatcttatttataagagctttggtacatgaaaaatattcgaaaacaatgtgcgaacatataattttcaccccgtaatatagcagagatcacgaaatgcacgaaaaagtacattaagatcaaaatttggagtagaaaaaaaaacaatagaagaactccattttccttcatcattcatcggagagctctctttgggctttccgaaaaggtatcacatgccaagtttggcctcacggtataaaagttctagagtcatacattttaaacaaaaaaaaagaaaaaacacgaaaaagagggattcagcacgaggactttcctggaggtcacacatcctagtactactctcgcccaagcacgcttaactgcagagttctgatgggatccggtgcattagtgctggtatgatcgcattagttactacatgcaatgcaatcgtatcaattctttttgaagactttatgatccatttgccgtgggtcccaccatctatgtaggaataccctatcttgtttgtaagagctttcatacatgcaaaatattcgaaaacaatgtccgaacatataattttcgccccgtaatatagcaaagatcacgaaatgcacgaaaatgtacattaagatcagaatttggagtagaaaaaaaacaatagaagaattttattttccttcctcatttatcggagatctctctttgggctttccgaaaaggtatcacataccaagtttggcctcacggtctaaaagttctagagtcatacatttttaacaaaaaaaaaagaaaaaccgaaaaagagggattcaacacgaggactttcctggaggtcacccatcctagtactactctcgcccaagcaagcttaactgcagagttctaatgggatccggtgcattagtgctggtatgatcgcatcagttactacatgcaatgcaatcatatctattcttttttgaagactttatcatccatttgccgtgggtcccaccatcgatgtaggaattccttatcttgtttagaagagctttgatacaagcaaaata

SEQ ID NO: 42969 - DNA, 612 bp, Arabidopsis thaliana columbia
gtgtttgttagaatttttcgcttgctctataatcttgtagtccattcgttttataaataaactcagtttaaataaattgattagtctctatggtcattaattaatttcgtaaaatcaacaataaaaaaatcactagttcaaaaacataaccactacggttcacttaatatagaaatgaattgattactgtttaactttctattgaagtctattagtgtgtagaggaatagataagttagttattttgttgcaaatttttctcatcttaatgctcattttaaatttcatgcttctcgtgtttgattaggtctaatcattttcaaagagaaattctatcattcattgctaaagagccaaagtcatatatgtttaactttcatttttacttgaatactttaaacgaccgtacaaattggagagtcctttgataactagtataatttagttaatatgcacataagtaagagttgctcggcatctatatacaacagttacatagttaattaattaactaatttacacataaaacaacatcgatgactcaagcaaacacagaaatgtgaagatgatagtgatgggccggatcacacttgtagattcaccatatatata

SEQ ID NO: 42970 - DNA, 481 bp, Arabidopsis thaliana columbia
gattgtggaaggagctgatcattgttataccaattatcaaagtcaattggttttaacggttatggagttcataaagagtcattgtgaagaaaaaaacgacaagacttgtaattgaccctccaatattgcattggacatttatttatgtttggttgaccaaataaatttataaaaggtaaataaaaatataatacttatataatcatatgataataataagactgtacatagtataccgtgagagctctttgtaaaacatttgagagccgaagtagacatttaacagattcagataacacaaacataagaggaagataataacatttgaagaagcataagtaggtagagttcttataaccaagttcaaggttttatctaatagccttaacggagaatcattgccggtaaggatcaaactggtgttgggacattggatatcggcggctgcagtgctacagcaaagtgcagtcctctgcgttga

SEQ ID NO: 42971 - DNA, 424 bp, Arabidopsis thaliana columbia
caaataggtgaaaactaaatgaagtgttactaaatcatctctcatcaactattccacaccaaaattgtctttttccaacccttatatgcgagctccgtaatgtatacgtataatatgagagcatctttgttaagcgaataaatatggctagttttgcaattgacccaaatagaaatcctctctggatttgtctctccaaacgttaccacaatattacttttttggaataacctcaaacgcctttcctttctaaactcttcaaacgcaactcacattatttaaacgcttcaaacgcaactcactttcatcgcttagagagaaagaagaacaaacaaaacaatcattggaagaagcaagagaaaaaaagaagattgaaatggagaagaagctaccgagaagattggaaggcaaagtcgcgaccgtg

SEQ ID NO: 42972 - DNA, 538 bp, Arabidopsis thaliana columbia
attaatttactcagaggtataatttatgaatcatactactttacctcattatgtcaaaggatttgctcaatcatagtactttactttttctttacttatttattttgtcgactatttaggactttcatctactatgaatgttcggattgtttatctcggacacatgagaccatttgccgaatctgttctgttagggtaagcacccttggaatttggcagcacattttattatctctttgtgatatatcccgtacgaccataatgtgggttttcaggagtattagtcgaggacctactgtggatgctcagcggatacatgactcgccaatccattcagacgtagagtccaaagtgaggaagctgctcgctgaacttgggagtatccagaaaatacttggaattcaggtgggcatcactttctgaattgtttggcttgcagtcagctttcgtttcattggacatctggtttaacatggccatgttcgtttaggtgtgtgcatataaagatgggaaagtcataactgacactgctgctgga

SEQ ID NO: 42973 - DNA, 510 bp, Arabidopsis thaliana columbia
acgtaatcgattttaataaatatgaaaatgcaaataattgagatactaaaaagaatatacaattagttacgagtgtaattctgtagcgtcctgaatctccttgagacgttacacttacacctatgttttgttagaaagatactaatgttgtattttcagttttgtgatatttgtttagtgattgattagcttgactaccgatctttgatcatatggcgatatttgttacttatatgatatagtaattttgttcacacttttttttgctagatacaaaggttaattagattctgtgatacgagatttaaaagcataattctcctgaatctaaagaccatggcctataaattaactggaaaattaaccataaactcaaaaacaacctaaaacttatttaagatgggaatcataagttttacacccaacaatctctctaatcaaatcgatacggagacgacggacggacggactggtgggaccttacaagttgtaaacctagttgtgtttgtg

SEQ ID NO: 42974 - DNA, 548 bp, Arabidopsis thaliana columbia
tagtatttgattttttaatttttaaagagatgaattaatttactctttaaattttatttctaatagcatacttatgtaattacttacaaaaaaataaggttacgtttaaaatgtacttcccaaataatatagtaggatgaattttgtgttgtataccaaaccaataataattaaattttacgtacctagaggtctagcaagacaattcaaacagaatcggccatatgctagttcacaaacttgagaccgaaaagtttgaagcgaaccaatacgattggtctctggagccacggcttggaaagttatgcagtaagtggatgcagcacaaccagtggaccggatgtattcctctacgctacagagtttcaagtctttaccctaaacattgaaattggtcaaagaaagaaatcgacttactaattaaaaaaaacaaatgtttgttatttaattacctggaaaacattttttttattttattttatattaaattaaacttagaaaagaaggccaatgttgttcaacaagtgctaacgttagtttaaagaata

SEQ ID NO: 42975 - DNA, 603 bp, Arabidopsis thaliana columbia
  unsure (1)..(603): unsure at all n locations
nnnnnnnnnnnnnnnnnnnnnctaaagacgatgtaaaggttcttttggcatacaagagggttagtccgatttgtctagtgaagctacccattagaaaacattgcttaaatttcattctccaggtgtaaatcataatgccaaaacgctgcttacaccgtaccgattccccccaatacaaccgccgtttttttcccgcatttcaattgacatctcgccatacctgacaatttgcagatttggctcatctgtggagatcgctgttgttccgagagggactttatcattttcgatatatagcctctgatccggaaatctagaaatattgataacgccgaatccctccttcctggtcctcaaggtgaaaacggcattgaacgtttcggatccgattgatagggacacagtacctttttcgtacctgggctgtcaaaagtctatgattcttactgtcagtgaccgctaagtctatcttgagcacacatactatagtatttaggtcaagcccggcaccattcgtcgagagcgatagtcaccccncagacagcatacgattgggccggtatctcgaaacgacagcggtgatctttcggtatggaggtttag

SEQ ID NO: 42976 - DNA, 563 bp, Arabidopsis thaliana columbia
taaaggatattattctctgtgctattttcttcttcttttctcattgaagcaaatatttcaaaattgaattgttgtattcgacattgaaccgatggacggtcccgcccatttgatggtgataacaagttttatttttcaacaataaaaacatgttattagatttaaaatgtggttgttttgcgacaataggtcatcaaatgtacgtacccttatgttattaaacgttcaataaactatgaattgtctgtgtgacgtataacataatgttttaatataagattacgtaaacatatattgttatgctgaaaaattcttaatattattattgggtgattgctttagccctatgctcgctcatgagtgagtaaatggcctttgagtttgagttgcggatttgatattcaaactataatatataaaatgagaaaaaaaaaacattatattatacgaaatgatggtgagaaattgacgtcctagataaaaacatcattgctttaatcatgccaagcaccactccttataagaagaatctgtcatggatataaccaaacaaaatagtataa

SEQ ID NO: 42977 - DNA, 462 bp, Arabidopsis thaliana columbia
ctaaaccacaatgaaaaccaaaggataaaatttaccttgtcagttagagtgttcatagcaggctgacctagagactgtgactgcccaaaacgagaaacttttcctcgacaaggttcatcagtgacatcaatattacccatggggtgatactgaaatttgcgaggtattgacggcctaacaccaacatgaccagattgtgtttctttcccaccaggtaacgtagacaaatcacgggtatttaccatttcatttgatccagcattattactcgaatatgactcaagaatctgactgccgtctctagaattcagatgagggatagccttctccaaagagttattatccaaatgcctagaatcgtttcctgcaccagcaatgccaaatccatagcttgtcctttgcattgaaggattttgttccttcagagcaactaaatttggatttgacgcagccttccagata

SEQ ID NO: 42978 - DNA, 214 bp, Arabidopsis thaliana columbia
atctatattgatttgtcgttatttgtatgcttgtgaggctatgtggcttacacaaaataagttacaattaatcgacttttggcaaaataatttttttttttttttaatatacagcagatacaaactactttcaagagtaactattaattttaaaacaaaaaaataatcaaatcaacaatatgagaaattcaaatgtcttctcaactttcctaga

SEQ ID NO: 42979 - DNA, 373 bp, Arabidopsis thaliana columbia
tttgagacacaaaattaattaatttataagagaaaaaaactataatagaagctgatgcaaaaagaaaaagacaacttcatctccatattgttgaactcagagtgtgaatagacccaatcggctgaatcggccgacctcggtaggaacgcagcgcagtgcttcagagtggagttctacaactccatgtagaattgggcaaccacactgcctcatgcgagtttagaatgtattccgactaatgctatggaatagtcaggctgcctggcaaacttcccatgcaaatgcgtctgtgcgtacagggagaatcgaacttaggtctgagagatacacccttcataaaagcttccgatgctagcaaccacagaggcttggg

SEQ ID NO: 42980 - DNA, 632 bp, Arabidopsis thaliana columbia
cattgcgatattatattcctaagaccatccccattggtcataaaaataaaagaatttaaagaatcgatatgagatatgtgtcttcctagagacatttaagaccttgtaacgtttgtttaaagactcttttctccgtatgtcttctttttaatagttagtttgtatttgatattaaaatatttaatattttggttttgaaacattcaaaaaaatagttcagcaatgagtatgctctaagaaaaatattgttaacactatttcatccggcaaattttgtgtatctttccttgacataggtttcctccagcagaatatgccattgcaagacagatcaagacaaatagacaatagaggaacgtcttaaaatctgaatacaaaacaaaaactgatgttgtatgacttgatgaagatagggtagaacaaatgatccttccaagaatcaactaaaatgcaactccatggaaactctcttatcttatcttgcgaaaatggtggcttctgctgactgcagaatctccctctctgccccgtgctgcgtggaccacgggacttgattaggcatatatagctgctagctaggctccatattcttagttacgttcattcctgtttgtatgggatttgattttggg

SEQ ID NO: 42981 - DNA, 464 bp, Arabidopsis thaliana columbia
atatcatcttgcgtgcgtggagtagagctgatggttcaaattgattgtttcttttgttagtttaatatcgccaaaataaaagcatttaaaaggcccaaaagaaacagagtaactctgcatccttgcgaatatatatctgatttgaactgtggcttaaacttaaacatagtactatgttctcgaccatgaaaaaacatatgactctgttttggaaacagagcactctttaagtaacaaaactggtacttacaattttctcttcggctttgcttcttctacaaatcaacctttgattataattgatcttctgaaacatcttaaactcaccctgaacttaaactgaactcaattccatggtaccaattaatgataatttacaggaaacacttgtgaagaaaacctagtattataatttactaaacctgcatttttcataagcttcacttgttcatccaaagtaggca

SEQ ID NO: 42982 - DNA, 463 bp, Arabidopsis thaliana columbia
cgtacaaaactatcataaaactgtacaagcataaatagtgaaagatctccaacatacatccaaaattccaaattataagtaatcaaacaaacacaaagcaacatcacaaccatgattatgaccatcaaccacacacttttccactgaatgcatttcactctcagagcgcatatacgtcgcacatcaagcagtgccagatcctgaaagcatacgatcagagagacacgcagataattaacgcgattctagttcagttataggttttctgaactccaaagctcgcattaattaattaacaattagtctcttctaggacgtacgataactctaagtctctaacagtaatcatcatacacagagcgaatgtccacgcattatcaatgagactcaatcacactcgtaatcacggtcttcaattatcggtcggcctaaacccccataatttggatatcgaagctcgcga

SEQ ID NO: 42983 - DNA, 501 bp, Arabidopsis thaliana columbia
cccctgtgtttgttccattgccagctttatttcttcttttcttttatgacatttgttaatctaagttggtaataagatcatgaagaagaagcattggttttatccaatttaggagtcattgatcagttgttatcattacgtttgataaatagacaacttctcattcattataaacatgtatttttcatcagaaagggactaagaagacaccaagatgcaaagttggtgggcaacagagccagagttggagtagtacgagtcctagcgaacccaaatgtataacattaacctttttttgcagttatagattttgctatcttagtagtgttttcgttcaggacaccaagtcatactcatgtcatgtttgatcttcttgttggttgatatgatatgaccattggtttaaacttactgacatgctgagtgttcttgtaggtatctcctcctcctcctccaggaaaagcaaagggtgaaaaagaggtaatcatggtagacctcttg

SEQ ID NO: 42984 - DNA, 604 bp, Arabidopsis thaliana columbia
  unsure (1)..(604): unsure at all n locations
tagactctagagganngaaaagaaaagtttctactctaactttgtccttaagacaagaacaggatcactctgttctgtcttcttgtcctctgtattttatctttagacttttgttattttatttatatatgagttttagtttgttaaaaacatcaacatctctgaaacagttcaagtaataatattattacaatatagtttgaaataatataaatttatggttgaaacttgatgcaagatacagacaagtttaagatgaagataacaataataattcagcataaatcaaaaagataaaaaaaaaaggaagcaagaaaaacagagtaaaacgaataggttttgacaataattgccagatatttgtattttgtcgttgttcatattatatctgtaaaaactgttcttgaaacacatccatggctgtagcgggaagtccaagaagcacattgatgcttctcctctgttctccatgagacaaaaacagagttacttctttctcaggcaaagctactggaccggataaaatcggtcgccccaaccgaaatctgtcgtgtggaacccaatcttgaccatgtagtgatcagaagagtcgaggaaagagaag

SEQ ID NO: 42985 - DNA, 421 bp, Arabidopsis thaliana columbia
aggatccccgtgttaagtgatcatcagtacaacaaatgtcacatctaataaacaagtaacaaagtactacacggttcatttacaaatgagcttgtttgcaatcttcaaggaaaaagtagtatgcagcaaatttcttccaagcaggaacattttgtttgttttcgcgatttgcagtagcgaacagaattgaccatgcacgtttgtattttgtaagattgacgttgagatcacagcccaccgggactggtgagattaaagcatgttagagtatgttagagttttgtaaggtaagtacgaccggataatacacatattgaattgctatttgtcattaataaatgtcgacacgacagtcgaaataacatcatttgtagtagacatgtatgttgtcgtttggtacaatattttcttaccagattag

SEQ ID NO: 42986 - DNA, 585 bp, Arabidopsis thaliana columbia
tgtgatatatgatctccatgcaaaatcttactcttactagaaaaagcgtatttacaactaaaaatcacttattgtggaattttgaaaactttgagaatataacgcagcaaaaataggatcaatcttatataataaaacaaagatatacatgtgttgtagctgctcatatcgtacgatctggacgcttgatttgtttttcgatcggacggttagtatagcaccgtccggggaccataaaaaaaaaacaaattggcaataatgtttttttttttacattgtttgatgcttggttggttttggaccttttggttctccatcttcaaaatctcatcaatccgattagagaaattagggcaacgtaattttggcgaaaatcctctctctgttacgaatagattgtttttgattactaaaggtactaacttttctcgattccgcttgcttgttttagctttcatctctgtttctagggatttatcgttgttcctctgtttcgttttagctaacatttacgaatctcttcgttattgtttgtttatgatgtgttggtctgattgttatcgatttttgggggtaaaatttgta

SEQ ID NO: 42987 - DNA, 667 bp, Arabidopsis thaliana columbia
  unsure (1)..(667): unsure at all n locations
caatttagcaaacaaacaaaaaaattccaaaaatagtcgcatgtagttgtgtgtcaatgataaattgtcttagacaatcagttattattcattaaacaaaacaactggaaccacaatattagacaaaccagatcagacaacttttcaaacattgaagacttacaaactcaatctttgccggaaaagaaaacaaatcgttaaactcgatcggaaatacaaactcaaacaaacacgcaaattcaagccatttgacaaataaaataaaaaagtcgcaacctgttatcttggattaaaatgcggcgagcaataaaacaaaggaactcacaacagtagatacataggtaaatgggttagagagaagggttcgagtggctgctgatttgtccttcttcttcttgctcttgcttttgcttttcctcacgaagactcgaagatggtcgtggtgatgaccggatgacccttccttgttctcttcatgttcaacgtagtcccgacccaaaggagtgatcgtatggcgtccgcatgaaattatgagggattgagaaagtaacaagagggagatgatcnaaaccaaccaagaagagaagaagttctcactttttcttattctttaacaaaattgaatagaaatatatttacttgtgtctttgacttatgagtgtgctgt

SEQ ID NO: 42988 - DNA, 486 bp, Arabidopsis thaliana columbia
gttaaaaggaaaagaaaaaggttgactatctattaacaaattatatagtttacatttgttgattttaacttttaagtaggagtaaattatatatttcaactacaaaagatacattgaaattgtaagacaatagtgtcttcttctttttgggtcaagaacaatggtatcttttaaaaagccaaaaatagtacaaaacaacacttgttagttaagacccaaaacatttttaacacaccaaaatttttccttagttaccactcatatcaacatttaacatttttacaaaacaagcactatactaaaattacagattttgttttctttttaacaacttttcatttatttacagatgaatttgtaaccttttttataaacaatattttcgagaaaccttctcgagttcacacttccttcttctcggttagatacctcgccggcaaataaagtattccgatctaaacacctcccgacaaagcaggtaaacag

SEQ ID NO: 42989 - DNA, 560 bp, Arabidopsis thaliana columbia
tacccctgaagttattagaaacttgctttggtgcttaaaagtttcttctacattttagagttatgcatttacattattgtccttctttgttttttttaattgttttcgtcttcgagaaaagtgttaggtacatgaaagtctgtgttcttagttgaacaagtcaatttctattttcattttaaatttcggaaacgtgaatcatgtttatcagaagaatatcaagattataaaactatactagtcacaaacatatttaaattttaacaacaaatgaagaattttgagaattttaattatattttctttgagatattaaatttataaatttatgttcaaagtttttatgttttcatgttaacgtcgggaatcaaaagtcgtcctagaaataaattatataattaccataaacaattttgaatttaattataaaaaaagagaatgaggaatctagaaatttattgtttaccttaaatttttggatattcccatgtttagtctatgttcgtagcaactcaaaacaaaatcagatttctgttttcgataggatttaaataagaatt

SEQ ID NO: 42990 - DNA, 648 bp, Arabidopsis thaliana columbia
tgtataataaatcaagcccgacattccacacaatcaagtgaagtcatggcttagggcatcaaggtaaaaaacatattttagaattcattttttaggctttttatgttttaaaagaaatattatgttttctttacaaatttatttttgttgagctttcttttcaccatactttatgggattcaaaattttaaattaattaaaaatttcttcaatcttctttggcttcacaaagcgtgtaaataatagtatagctcattacctctcaacctctaattgtattcatggagatttttattcttaatcaggtcgtcaaccaccttggttacaaaaactactttgtaaaatctcaattggttaatataattcagtttgcagaaaaaaaaattaattaaaattttaattaaatatattattaatgaatttagtttagtacaatttttcgttttaaaaagttaaaccttaaattgtttgtaaaatggaaaatattgtaaggtacattgcttagttgaatacaaaataataataaaaactttgcttgattaatcaggtaaatgtgttgactttctttgtttgatccctcataacaacccaaaatactgggatgggcttttaatcgagcgatgaagatacagcacttttttgttctgt

SEQ ID NO: 42991 - DNA, 520 bp, Arabidopsis thaliana columbia
agattttagaattggccaaaggggaaatgagtttatacatggttgcttatacactctgtactttccccggcatctcctttgctttcacggtcttcatatcctgcgttcgattcaaaagatatgtgttaactacaagatttacttgaggaacataagcaaatcaatgactaaagagagtagtaactctaaaaccaatcaatgacatttttgactaccaaataccaatgaacaatttttacaactgatattgagtgaatatcaagcttcaaatatgttgtatcaatttcattggttgtatattgttatgttcattagcctagaagcaaagagcaaaaaaacacttaaactagctttacttctaagcttacgcaaaatgtacatgaaacaaaaagctgatgaatcaatcggactaaaggaatcgattatcgatagaaactagtacaaagaacgatacaggacccgcaagaacaagaaactaaacatatagagactcaaaggaaacatatagagactcaaaaaa

SEQ ID NO: 42992 - DNA, 212 bp, Arabidopsis thaliana columbia
  unsure (1)..(212): unsure at all n locations
nnnnnnnnnnnnnnnnnnnnnnctaaaggaggctggaccagatcgaagagctacatgaacacgttctggaagcggaattctgatatgatcaacatcgagtcacgagactctgtagcccgcgcatccagtcaggtgtaccaagatcgggacctccgtagacacgtaagagtgtgcacgcaacggcagtggcatcagaatcatgaggaccaggc

SEQ ID NO: 42993 - DNA, 582 bp, Arabidopsis thaliana columbia
ggttccagaacgaagaagacgtcgaacaaggttaacattgtgaagaagaagccggagatttacgagatctcagaatcatcgagcagtgactctgtggaagaagcaataagaggcgatgaggcgaagaaaagtaacggcgtcgtgagcaagaggggtaacggaaagagtgtaggaattccgacgaagacgagtaaaaatcgagaagaggacgatggaggcgcggaagatgctaagatcaagtttccgatgaatcggattcggcggatcatgagaagcgataattctgctcctcagattatgcaggatgctgtatttcttgtcaacaaagccacggtatagtactaattagacatataaatttagcttgaggaacttaatttcacatggtttttgatgaatttgggagtatcaattgctagtcagtgttaattgggcgttataatctcgcaaattgctacagtaatgagattgtttctgttaattaagccgggaattaacgttattgcttcatctccatgtgtgtttgatgaaaccgtagttactgtgcttgattgtcataggtttagcttttacatcctgaac

SEQ ID NO: 42994 - DNA, 555 bp, Arabidopsis thaliana columbia
ggtatttattagttgtgagaatgactattttattctactctttttcttttggaaaaatctaacgtggacatccgataatcgacttggctcagatcgattttgagtaaattgttttaaggggtttagaattcatatagaaccaaaaaacatgcggttcggatcggtagttattttacggtttgactatgttcggttatctctcagttcggaccgacatataaccaaattttattgggttcggtttgaattaaatatttgtacataaactatgtggaaaaaagaactaaataatttgttcaatctaatgaattagtttgcaaaaaatatttactctagacacatataagtatgtacattcatatattttagttattttgagcctaatcataactaaattttctggtttataaatatagttttgaatatttggattatctcaaacataaatataattaacattttctgatttttatgacattgactaatattttctgatattaagatattgatcccttaaattgtttttacattctttaaagtcattatcttgtttgg

SEQ ID NO: 42995 - DNA, 585 bp, Arabidopsis thaliana columbia
tgtctcattgttcacataagttgataccaggaaaaggaacggaacaaccgattccgaagtgtataataatataccacaagataaaaatcataaaacaaagtttgatggacaaaagtagatatctaatgttgggtgtctcctttttaattatgggcttggcaatttggtttcgtttccattgatgtagtcatgtagatgcattattttgatcctatattttctaaaccagcaagtaacgtttttgttcgacatcaaaagcaatagtaatcgtgagtggaattgtccaaatatctatcttcacaattttcttttggtagtttagtgtttaagatatatatcttcacacttgttagtggctattgttagtggctattgtattttacaactataaagttgtcaacatcaaagaagaaacaatgttacatacaaaatgggtaacatcaatgaaatttcaggggtgaacaagatcccttctccgtcggtagtggtgtgattttgtcctttcgatgtgtttgcggatccacatgttggaagtagagatcattactgtttctcttggttgtggacgtcggctggtgtacggat

SEQ ID NO: 42996 - DNA, 580 bp, Arabidopsis thaliana columbia
tgtagatatgatcgtaacgatccagttttcgcaatgcgaggatcaatatatatgtgcatgccgcttcccgtagattagttagtacttagtatagaattacactaattctattatgatttttgttgtataaaagggattggaagtgaaggggaaatgtggcacagaggagtgtatgctaaaaggttcgttgtttgctcatgtggattacactagtcccggtgacagaccgccaaagagttggggaagaccaccccatgcgccccaaatctaaaataattgaaattttcaatttgcttatgatgatcttatactgtgatatgttacttattataaaccgacttcattaataaaaatcacaattttattttattttggaccaaaaactatttacatataacaagttaacaacaataaacaacgtacatcatgatttcttggattatctgttaagtttgcgattgaaacctttagtggtacgtagtcaaatgctagaaactcatttctaataaataatgttagaatcagattagaaggtactattatctaagtaattaatgatgtgtcaaaataaagtagtgtt

SEQ ID NO: 42997 - DNA, 519 bp, Arabidopsis thaliana columbia
gagtttgccacactgtctgaatatataaaaaaaagtcagatctaaagagggtccaaaagactgtcacaagctcacacaccttctgtcctcccactcacatgccgatccctctctctttttctttgccattattatgaaatctcctcattcttttagtatttctaattatagcaaaagtgcaaaactatatgatgacactttccattaaaatcacttatttttcataatatatcacttattcacatatattctttcttgcttaaataaatttaaagaaaaacaagaatgcaaatccataacataatcataacataagtaaagattaatcaaacttctaacaaacaaagataatataaggttaatttatacacaatcaagaatcaacaaagcatgagagcaccaaattttttattttactatccaaacttgaaagcaccaaagttcaaaatttcaaaatacatagagactataaagataagaataaaacagtattgatgaagattctctacaacattttgt

SEQ ID NO: 42998 - DNA, 450 bp, Arabidopsis thaliana columbia
tatgccctagagcgggaaattctgtacttggtagagagagagatactgtaaactgtcaagtgttaaactgttgtacttgttggttttgtcggacgttgactgtggttctcaacttctcataataacaaaagtcaaagtataccaaaatttggatttcggttcttgttcgaatttgatgtatatatagactcgttttggattttctcacactctttttgtataaatcttttctcgtagagtcatagccacaccaaaaccaagattaagtaatttgatacaatacagcatatgaaaatgtaacttagcttttaagatagataacatattactgcctaggagcatttttgacaatttttgaggtgatggaaaaagttggctcgagagctttttgaatattccaggcggttcggcctaagctgcccgttgtttccagtattattccggtggttt

SEQ ID NO: 42999 - DNA, 373 bp, Arabidopsis thaliana columbia
ataacacttcttatttttcgattaatcaagcttgggttaaaaatagcaaacacatatagcgcatcaaataacacatatatcgggtaaagtcaattttataaatccttacaaaactgtctcattccctgatgaaatttacattcatatagataatgatagttataacacaatatgagcgttcgttatcacctgttaagtctatcatctatatatgaacgcataagaacattacgtagatcacaacatttacaattttgcatgtgtgcagctgtttgtatggggacgattcacgtagttgtgaattttgacgataggagtcgcattggggaccgaaacacagtatgccctaaatggctaaatggacacctacatc

SEQ ID NO: 43000 - DNA, 599 bp, Arabidopsis thaliana columbia
ggcaatcacattatatatgtatcacatacgtctagatatatacaatagaaatagtttgtttatttgaagtggtcaacttgtatgacttaattcacattaaaaagtaaacaaaacaaaaaggaaattaagagcttgtgagtcactgtatgtttagcacttcttcctcgcgacgtcgtgttacttgtgcaattctacgtgtgcctgacttcaactctacacgtgttttgacaatggataattttgtccgtacgtaaaatatcgtccaccaactttattgtaattatgaatttatgaaaagtagaataatggagaatgaaagtcattagattctcgagattaagattaatctaaatgccgttctggatatatgcactgtgatttttaagaaaatctgttatttttcaacctttaaaacaatcagttggtaatttagcatgagaataaaaggataaagagttatcatcctcacattcaactcaaatcacagaataaggaagtgcttttcgaaagaaaagatttggatgcccgaaagctggacaaccaatatggaaaacgatttcgtattattagcatgacttctataattatagttatggcag

SEQ ID NO: 43001 - DNA, 293 bp, Arabidopsis thaliana columbia
ttgattggaacatgagtcacatgacgtcgattataattcaatttatatgatacactcatataccaagctatggtaattctgtggttatataattaaacaaatttcatgacacactcgtattaacccaggttaattatgataatataataggtaattaattactgacgaaaaaacatatatgtgggtacaccatcattgattaatctgtcaaatgtacattgcggtgtaaagaataaaaggctaatattgttttcggctatgatttctagtagacacaaattgacatacattac

SEQ ID NO: 43002 - DNA, 629 bp, Arabidopsis thaliana columbia
tctgtgtgactgacgataatacttttgggtttaaatttctgtacaaataaaatatttgtaagaagaaaaaaacgtttttttaaacaagactcgaaaagggtcagacccagaagtctcatcttttaccttttttcttggtcagctttgaaaggcttcatcttttttttattccgttttttttttcttcattcaaattttgacgatttgggtttaaaaatcactgcttgtgtatgtatgtatactggttgttgacgaattagattttgctcaaaagggttcttgcacaaagtagctggaactaaattttgaggtttgtttcttacaaactaaatcatcatatcatcctattactctttgtggtgatcattgggatctaaagacgggttttgtcttcttacagagatctcttttgcatagtttgaatcatcattgctctttccggtgagaattgtgatctaaaggttcaatctttctcgctggaggaccgtcggggtgattgtccattgttggtctggagtgctgctcaatataatcagggcccttaaaatggggtcctgtttatctgcagagagcaggagcctagaccgggctctccttgctctcctgcttttagtgtgaggaagaggaag

SEQ ID NO: 43003 - DNA, 500 bp, Arabidopsis thaliana columbia
catttcatttttttggtggattacaatactagtaaatgagttcttccgctttgtcagtttgcaacatacattatttgaaacaaatttactctttgtttctaattcgacagaacagctgctcataagacagtggtttgatgaaaattgatcaaaacaacaacgctccgatcaatttgatcacattcacttaagaaaagaataacatcagaagaagcaaagaacaaactaaatgagtaaatctcaactcgatagcaaaaagctcacaaatctacaaaaatctatatgccaaacaaaatccataactagtttaaacgatttaacattatcatcaccaaacgatacgctgattgttgacctagaaacatggaatatataattaatcactagagactccatcagaacttgatatttcgaaaatttggatcggagaaaatttctctctgatctccggcgaaaagcagctccgagtcgcggcgcttccgatttcttgttgtgccttc

SEQ ID NO: 43004 - DNA, 477 bp, Arabidopsis thaliana columbia
gtccccttgtcaacaaaaatctcccattcaacaaaatttcttcagcttctctccttcaaaaggttagctttcatggtgatctctgtagtcactttctcctttttattttcttgtcaaaacgattcaatttcatttgtttctaaattgaacaattgcttcttccttagctctgctctcatctggttttaagcttttggtcctaggggttaggaatctgagcttatatgtgccttttttgattgtttgtttttgaaaggatatgacttgtttgatttggttttggcgcaaaaagcgattattccctgtaacccaacatcgatttgtctacctgtccctttgtttgccttgtgttgattcaaaagtactaaactttatcctgatgattgtgtaaaatcttgacttggagcctaggttttaaagctttgaaatcccttagtttaccttgattctggtaaaaaccgtgctttagggtatgac

SEQ ID NO: 43005 - DNA, 537 bp, Arabidopsis thaliana columbia
  unsure (1)..(537): unsure at all n locations
catcagattgctccaagtcttctgttaaatcttccattgttttcttgagattagccttactcatctgtgcagcttctcctgttgaaatccctaccattgttatctttggtaagaatggacttcgcagcatttctctttctctagattccatatccctgaaaccgaaaatttgtgcattttaagatttttacactctttcaacaaccttttgttttcaattggtacctttgatctgatgaacccttgtgatgtgtgtgttcttttcttgatacagagtgactgatccaatctccaaaaggaaaccagagatgttgctgtctcttttcagcttcacttggactatcatcttctactctaagtagtgatgcggaagtatctgcttctactgaatcaccaagacatcttgttgctgaccctgacgctctttggatagaaaatgcactcctaagagaagcgagagagaaaatattagctatctaatgaggcatttaataagtgctttaatgttggtctgtgtcnacacatcaatatgatttt

SEQ ID NO: 43006 - DNA, 470 bp, Arabidopsis thaliana columbia
taaattaattaaaatgagcaaaaaaaagaaaagatatatctatatatattttttataatttgttatttgttaggttgataattaatgagagagtgtactgtgaagactaaatattaaattatgtattttatttatctacatggcaacgaaatgaaaattctcatatgtctgctcctccattcttactctactctcttttcccagatgttgcagaatttgactctgagagttaataggggatcacttatgtaactgttgcgatgattttgtgcctcgtggaatcatcacactacaacgtattcacctgaaattcagacaaaacagtttgaggaaactgggaagtgataagataagagagtgatagagagagagatgacggtaaactggcgtcgttacatgaggaggccatactgttatagtgggcgtatagttcgatgagtcgagcaatgagctacttgattgggctttgg

SEQ ID NO: 43007 - DNA, 424 bp, Arabidopsis thaliana columbia
gctctgtgtgaaggatgcttctaagaactggagagtagttggagcagatggaggaagcaagctactcttaaaagagccatcggcaatgtagttttgtcagattacatttcatctgagaaatggaaggacgtcacagatgatgacgatcatcttgatgatgtaacaaagtaagttaaatacacgaactgaaacaaaaaaaaagaagctagaacctttatgtaccagatggtaatatctcactcatattcactgtaattgcagggactggctaaaccctggacttttcaactgaagatgggtatgcgacatagctaaactagacttttgctttcatcatcttctgtcgaaaaacaaaaaagttctcggagaccattgtttaaaatttcccttgaatcttgttaaagtattatccagctatgcaaca

SEQ ID NO: 43008 - DNA, 578 bp, Arabidopsis thaliana columbia
  unsure (1)..(578): unsure at all n locations
nnnnnnnnnnnnnnnnnnnctaaaggctgattttgatacagtaaaattgcatgttcttagattagatatagcattaggaaacaaaacaaaaataaaactaccaagatcctttctttgacctgtagaaaaataaactttttatagcatattataaatcacaagggacaatattgatcatattacataacgaaagaacttcaattgtaaaaatttagagacaaagccatttctatcatcaagtacaaagatttgcaagatttgataagaaaatggactaattgtggtgctagttgtgaaaatgtttataaataacattacttacacgcgtttccgttattataacatgcaaccatatataggcatacaaacaacataagtgctttgtttcatgttgttttccaagacttttaaaagaaattataatacaaagaactataagttaagaggaggagatttttggctgtagaatcgagcaataaccttatcttcaagaactgctaaggtttccgaagagttgatcacataggtgtcttgtattgagaaccgaaccacctttggagatgcaatatccatgagag

SEQ ID NO: 43009 - DNA, 1222 bp, Arabidopsis thaliana columbia
tcaacataaccatgaggcaaggtattatgaggtatggattttctcacggtcttttagtctctctgttgcctagtgtgtttttgtgatgcatgccaaactaattatattttaactcacactaagcatcaaaaccattcttggaaccaagttcgtgctgaagtcccgaatccgaactcactagattctgttcttcaaccttctaaaagtcaatcctaagttttttcagcatacttttgattccactatgtcacaaaacaacaataagtattagtattaggataagatattcttccgattatgataaaagacatgggatttgtttagtttccattgaacttatcttttcttattctttagtttgagctttctctatataagcatgaattaccatcgaaacatgttcaataagaaaaagcagagcaattcattactttaggaattagcaagaaataagtttcattacgttgaatttatggacatgtgacttcttgaatgtgattgatatacttttgtgcttgcaaatatgagaactctattttgtagcgtaaaatcttaaagcgtatcactagagacccatacaaaatactttcttaacgagacaactcttcgtatttgtttgtttttaggttgattatcgctgccatctttgtcatggtatgcggctacgaggcgacggttctttcgcttaagaggatgattctgccgagccatgaactcgacctcactcagcttatggcatttgattctgctcggcatggaaggttgttacagtctcctgtacacggatctttcaactttccggttgaaagagacatagtttagttgatttgttaactttaccatgtccctattttgttagctttgtcatgtccatgtttcatgtcaatatattcctttatacttgattatgatttgcttatattttccttctaaactatgaaattctgacaatgcttcattttcactcgaatagtcgaataggctattgacatccattatcttccgaaagaatatatgtagtattgtctgggtaattatttctataaatattaatttataggataaattataaattaataaataaatttttccaatattattaatttatagagtttctattgtatgtaattgttcatatattatctcacgagatatttagagttgaattccagactagtttgagatgatcaggaactaatccacgatatcttatgatgtttat

SEQ ID NO: 43010 - DNA, 533 bp, Arabidopsis thaliana columbia
tgttgtcaaccttgggctcacatggtgttaaacgtatgcatattacatattcttgtgcatcaattatgttggcacgaggattgctttttgtgaaatgatgtggattattcactggatatgaggccagacaaaaggagcatatgttgcctgcttctaaaattttaatagagagatgtggtattctttacgcactcctttgttccgattcatgataatggcttctgtaggtttttaacaaggcaagaagttcaacctatctttttatatacaattaaataagaagtatcgtcggaatatttttggcggaaaaaatcaatatttcattatgttaaccgaaaacattttcaaataaagataaaatggtcattaataatttaaaaatgtataaataaaaatgaactaaatgaaagggtagaattaaaaaggtaaccttggaagggtaatcttaacaatctctctaattcttattatattttgttttcattattatacaaaatctcgtaagaatttgatagttaacacatgaaattact

SEQ ID NO: 43011 - DNA, 475 bp, Arabidopsis thaliana columbia
gatgtggatatgtcatgtttttcagcaaatagtgtgggggaatggattgtggaacttatctatcaaaacaatatcaagaagcttatcatgggagcaactgctgattcacactactccgagtacgtatatcttcagtatcattctctgtctccagaacaacgctgttaaacaattcttctgttctgcaataatctatgtgatgcaaatatgactctgtaaataagtaaatgtccactctagttatatatctttgatgatgcaggggcatggttcatatcacacctacaaaagctgactacgtgattcaacatgcgccccattgctgtaacatatggcttgtatgtaatggaaatctcatccaaacgaggtgagattgaggattatacttctgcatgttttgaattattgtagagtttatagaaaattttctttgttgattagggagggacggttcgaacatgcaggttcagcgtac

SEQ ID NO: 43012 - DNA, 624 bp, Arabidopsis thaliana columbia
tagtaacgtccgccagtgtgctctaaagtcagcaacaggatgtgcaggaagaaccccaagagagcgaatcccaagaagaagagatcacggaagaacaaacccgggaagacgaattcatggacgaagtacaagaagaagtcggtgaaccactcatcacattctcacctgttacgggtactttccgaacagtgccttcaccaattcgatcgccgcacaagcaacttcaaaactccaaccttcatgaattacgaacttcacctataaaaatccaaaccataccggaagcccactcctcttccgccagccctggccagaagtatgaatccctttcacatgaagttctgtctgaatcaatttctcaaagcgaacgttttttcagagatttgactccagaagctcacccttctccagtggcctctcaagcgcagtctagacagaatacgagaatgtgcatcaaaatcacgtcgatcatgtgaatgaaatccacaatgtcaagcgaattcccctgcgcagtggcgatgaagcctcgagtttgtccgttattgctccgggcactcccattagtcgggaacaagcattggcccagatcagagctcgacgaggtcgaactagcgaaatgaagag

SEQ ID NO: 43013 - DNA, 463 bp, Arabidopsis thaliana columbia
ctttttctcccttttcccccacctatctaacctagtttttttttatttttaggtttttttttggtaaaaagtaaaatttcataccatttttgaaaattttgacaaaaattacaaaagaaaacaaaaaaaaatgagaaacctaaagctacataaaccaccaaaattactacataagcataaaacagaaaaacacacactagcaaacacggtaaaagacttttactaaaagtcatgaataaacaccgattctaaacagtaaagatcgaacatttataggtagaaaatttgattgtcaagcttcattcatcaacttttcatcttcacatgcttccacgtaaacctcaacaagcttctctagtagccaatttgattaagaaccattgtgttattcccaagaaccgcattataaccaaataagataaattttctggttttgctattcgtaaacttctccaccatttct

SEQ ID NO: 43014 - DNA, 472 bp, Arabidopsis thaliana columbia
ccgaaacaaaagatctcagctccatacgatttgaacccacggaatcaattcttgtttaaacttctcaaaaaaaaaaaatgaaacaagaagtgatatttttcttgttagccataaccttggcatcgattctccgaccatcggaagcagctccgccggaagtttattgtttgacatacaggataagcagagtaccaggatgttacgatgcgctgagattagctgcgggaagagattatagatggctatcagtagactgttgcagagcagtatacgcaacacttcctgatacttgcttcttgacacttaagcctgacttggcgttaccaattaatgtcttcagagtcatttgtagtaatagggtccctgcagctgcataaccaattttatgaattttctctatctttcaatgatacgataaaaaaagatacttaaataaaactgttttaatgttcttacgtcattcaaactattg

SEQ ID NO: 43015 - DNA, 575 bp, Arabidopsis thaliana columbia
agaaaaagatataccaatgaaggattatcataattgtatggtaaacgaaccctagctagagttgaagcttatgtattaccgagcgagaatttagtatctcacatcttcatgaacttttatcaatgcatagccaaatgcaatgagctaacaaacatatgatggagcaagcgtcacaattcaaagcaaaaatttaatcattttttcgagctattttttttgttcctataaataagccatttgactttcttctcaaactaatctacttaaatattttatttgaaatctaaaatttgtatgatagtataagattttagctgagtttattttccttacttctccttatgagaagtttaatcgccaccctcaccatagatcaacttcatgtggcatcctaaaaagagcaagcatatattagaaaaattaagctaaaaaagcaatttaaaactttgaaaatctacggttggattaagcacgcactagtgtggaattgcagcattagggtgcattagggtgatgctttgataacatcttcaaagtagcagtgtgcgtcactagatcgcgtggcagtatagtga

SEQ ID NO: 43016 - DNA, 490 bp, Arabidopsis thaliana columbia
ttttctcaaacaattattggcatttttgcttatgaaaggtttttgtgtagccaaattgagattttgatggttttgacacaatcaatgtatgatatcaaatcattaaaaccactttattatctctcttatgtgtttcttacagccacttttatcattctctcttttatcaaaagataaaatgttctcaaaccctaaaccctatgcattttaagagttacaagacaaaatcttaagagtaattacacagaagactgagccaaaattttgacaaaagttttttatttaacaaaatttttacaaaaatgagattcattagaccatgtacatgggtgatatttctagagtatcacaagtccaaaaattattttaacaaaataattagaatgaggttgattagtattagtccaatgatatttgtgataccagtatcatctgacgtggctttttctaattggtcacatttaccaaaataaaaaaataatatatataa

SEQ ID NO: 43017 - DNA, 346 bp, Arabidopsis thaliana columbia
tccccaatatgtgtaatccaaacatctttagaatagtcactgattctaacaacaacgacaacaaaaatcttgaactcaacaataaataagttgaactaggcattggtagaaagagtagttgaatgcattacattttttttcgttcacggtaaaaggttgttagacgcaatagctctgtttaatttactaaaccctatcgataaatattacatgaacacttattctaattagtatccacaaagaggaaaatcaaaactgtctgtatacaaataatcactaatgagattttataataagagagtacaatatcatgacatcacttgcttctgacgaacttccttcgagt

SEQ ID NO: 43018 - DNA, 613 bp, Arabidopsis thaliana columbia
agtaacgaccgccagtgtgctctaaaggctcagtttggagcgatttgcactgacactgggggccactcctcattgatccgcgagacaaggaggcgaccaggcgattccacatgggtcccgacgagattgaaagccagcgggtggtcacgctcttgattgggaactggcgcagatcagtcgacagttgcgaatctgggagcggcgtgggcttgaagagctggaagggcgagcgcaggcaaggacacgggcacgcgcaacgagcggcgaaacgagaaagcagtagagagatgccagaaagagtgtatataaattattaggtccaggggatgtggaaatccatgatcatggttgaaggttcggaataatgcgtcacagttggagcttgagcctgtgcacagaccaatctagaccggtcgggccatgcgccgggcgggggaaggatcgccactaacgctttgcttaagcagggaacgggcgctccgtacattggcagcaagctagatagtctatcgagaataagacgatggaacaggttttgtagcaggtgtgggcactgaggggtctccggcctccattcaaggtggctagtacaggtttgagacggctatgagca

SEQ ID NO: 43019 - DNA, 587 bp, Arabidopsis thaliana columbia
tgcccaaaaccctaagaaaaattcgagtttcctaaaacgtatataggggaaaattgaaagaagggtaatgaattagagacaaaaaaaactcaccatcggagctgtcttcttcttcgtctctatcctccaaatcgaaattgggtctcttcttttacctcaaaaaccaacacagctctcttctctaaaaggggaaatgcttcaaaaacccaaacgtagcttttcttagacgcgcttcatatacagtctgtcccgtttttacatattcgccccgataaagtttgtccttttactattataactataaacttataattcgtccaatttacacccatatctccacccaaaacaagatttatcatattcagtccactatactgtaatatgaaacaacaatggaaactcttttccataaattgcaatctgttcctcacatttctctagattacaaaatttccccttcacctacattctcgttcttcaacgttagctttcccattaagaagaagagaatctcctgcaacaaatcaaacaagctgagaatggattcgtctcagggaatttcaggtactacacaacagaagatagtg

SEQ ID NO: 43020 - DNA, 580 bp, Arabidopsis thaliana columbia
gctttaaaataaaattctttagtcttccttatagatgggttttcagtttatgttttaaaatctagagagactataatgtttgttacaaatgggtacatcaacatctaaggtttcatgaaatttatgtaacatttttgtatatatctataactaggttggtaatataattctgttgtacgtgaatatgatgccttcaattttagggccaacacattcatgacttacctctcttctaaaatatatatttattagaagaggtaacataatatttttaaaaggacttcaaaggaataaagcatatataattggtggaatttgtgcgtatcagaatatggtcctgggaataaaaagatgaaacaaaaccttactaagagaattggagtggaaaatatccaaacttttgtatttggtgcaaattattggaaagatgtttctacttttatagtcccttcatagaacattaattctttcctcctttttccgtatgccttgtcagccttgacatgatacttcaatattttaagaatatctgaacagaggccattagagcataatactataatgactgcagctggatttt

SEQ ID NO: 43021 - DNA, 561 bp, Arabidopsis thaliana columbia
cttggaggaagatgatgatgatagggacaaaaggataacggagattacaacaggagctatgataatgaagagggctagagtgagattaggtcttgtgatctgtgggaacaagacacttccgtatttgattatagctgcacctgccactgaaccaactccgatcttcaacaagtagtttaagtcctcctgtacattttgttgaagggcacacaagaaaagagggcttatttgtatttgaaattatttgagtccaaaattaagtaaaaatattatgactttttgggatcaaatttaaaatataggggcaattttataattttgaatgctttgagcccctccagcaaataaaaaacaaaacgctaatccacagaactgacctgaattccttgaccgttatctgcttgttccgaccggtcatcggaagccataacgcgaaatgaccgttttgtcctgaacagtttgacgggtttcgaaaactggtcacgaatttgacactactcatagtcatcttcttcgtcggttctaagctccggtgaacagagctcgaacgagaaagcgtgg

SEQ ID NO: 43022 - DNA, 582 bp, Arabidopsis thaliana columbia
ctcaacctatgcaaagaaatatagaattatagaattggttaacggcacaataccaatgtactataccggtttaatgcgcaacatattttagattgaactttttgacattttagatataaaaaatataatatcaactatttaacttgcggaatatttaaaaattcaatgtgataaacttttttttttcatttggaatccaagctctttgagaccacttgaattgaacatcttagaaagtttataaaaattaagtacacataactttacttacaaaaatttctgataattctttatcaaaagatttttttttataaatatttgcaaaattaaaattatggctaatttgctagaaaagcaaaacttttagccgaaattatatatatagttttgtttaaaggcccaaaaatcgttattttgtccaaaattgtccaattacatcaatcttgcatttttttctttcaaaattagataaatctaaaaatcaattatttataaaacttaaatatttttgcgtaatatgggggttcgtatagtgaggggtaaagttgtcattaaacttgaataagagatgtgagcagtgtt

SEQ ID NO: 43023 - DNA, 435 bp, Arabidopsis thaliana columbia
tcattttaggcccatttgaaaattgaagttttgtgggtctcaaattaagtcaatacagtcagatgttgtgtgtccgagagcaagttaataatcatggacatgttaaagaatggaatcctctttttcttgtttattcgcatgtctgtttcttacagcattggtttgtctaaagactaaaattaacacgttatatgtttacaaaataaaaaaaaaggtaacatgctatgtagttttgtaattataattatgattatgatattgtaaaacaaatttggaaaatataaataagatggaaagagagaaaactaaaatagaataagactgaagaatacaaaaatgtaaaacaaaaatcagaaacttttccatatatataacactcagactgtgaaaatcagccaaaaacagataaaaagagagaattgggtacaaaataat

SEQ ID NO: 43024 - DNA, 589 bp, Arabidopsis thaliana columbia
  unsure (1)..(589): unsure at all n locations
accgggagatnnnnnnnnnnnnnnnnnnnnnnnnnnnnnnnnnnctaaagtatgtcgcatggaaattccataatagaccaagtacacactcagctgagtgcgaggaccgtcaaacatggtttatcatctcgtgcttgaaggcagggggagaccagagtggtggttacgatcaacaatgtgagcgatgtagctcttgaccgccttgggcgccattggccggcgctactcgcttattcaataagtccacgttaccgccatccaaggtgtcctgtccagaccccagactgtcaatagagacgcttccaggctacgtctcttttttcttctgctcaattgtccttgtgcagtggatgaggtggtcgcctttgtgattcctctgtctttagtgcgcggagttgcttctacttctacatggtgcggcttcggcaacccttcttcaagatgcaatcctccccaaacatgctcaccaaggtacgcctacatcccattccaatttgcttgattccccactgctagactctaactagtatctcctgaatagtttgagtcgaaatctcccgcgcaaagggaatttgcttcacccaaagcg

SEQ ID NO: 43025 - DNA, 598 bp, Arabidopsis thaliana columbia
  unsure (1)..(598): unsure at all n locations
nnnnnnnnnnnnnnnnnnnnnctaaagtaattgcacgatgagtacaacactgccggtcggttgttggtatggtatatcgggatggatttgtgatattaggtgtggatagtgattgagatggtcatgtcagtcaacagcttggtgttaggttgggaaccgatgtatctagcatcaatacatggccatggccacaactttctcttcgtaactcatcagtggtgttagtagacagtgatagggcagtcctagcccacgcattacagatatctcgaggtaatcttccaagaggaagcgcctgcttgcataggctcgtctgtggggctacaaccactaaaacccatctagggtacttagccctacattgactcgtgttaaagactccgaggttccccgcaaagacccgcctccacatttaaccccggattcgaccttgtgcttggccactggccggatgctgcacagttaactgtgaggggttcaatatatgacagactgtcccacaaagcgccccgcaagtggcgttcccaggtctacaagagagtatatatcacgtacctctcggttaccattcattcccctgctagaatggaaatcttgt

SEQ ID NO: 43026 - DNA, 390 bp, Arabidopsis thaliana columbia
cgaagtatactatacatgttaacgtaaataagtatattggcgtgtctgcactctgcaaaaaacatatattatcttctgtttttttttttttctttttgcaattacaaaaggtgtttacaaccttcttcatgaaactattttatattgaaactatatagtatcatgaaaaaggtcatcagacaattaatttataaaacattttgaaaatgaagaggtaacaactagcaagaggttccagtacttaccaagttttaaaactttaattatttgtcatttgaataatgatttgtcaaaagtggggtgctatgtgtcaaattcttgtgagacacaacttttcttcatagaatatattgtagaactaatatatattgagtaacactatcctgaaga

SEQ ID NO: 43027 - DNA, 373 bp, Arabidopsis thaliana columbia
  unsure (1)..(373): unsure at all n locations
nctaaagcttgccatgaagagctcatttgagcggacgtggagcttgttctgtgaagtgcaaccttctctctcttccagtacgtcttggcttgatgctcctgaggcaatgcagaagttgttcttgaccgaggtacttgataatttgcaggatagcgaacttttggtccgtcttgaagctttggaatctgtgtgctacgttgttaccggagtgtggggaattactgctggaaagagcacgccggactatcctcatgattccccaatcgctgccgaaaatgccaaatccaaatccttgcagattgaatggatagtgactaacgcaagactgattcacgaatgttccggagctgcgtcgctctatgggtgcttgctg

SEQ ID NO: 43028 - DNA, 548 bp, Arabidopsis thaliana columbia
ttcttcacatgagactctcatcttcaatccttcttctaccattaaagtaacagatgaatgatccagagatgattacagaaccaaaaaaataagatcttttacagatgaagaagctctgttttgtgtaaaactataaacaaaattcatagacttttgactcaatttgcaagtagaagaagaaggaattagaaagaattagcaacaagaatagcttgtcgacaccgagctctagcttgttcaatcctctgactcaaagtttcatctttaacagaagctttaaccatagctaaatccatctccatcaatttcaaaaccctaaaaagctctgtaaccattctctcttcaactttaccttcatctctcaaaacctcagcttcttctctagctctctctgcaacaatctcaccagctttagctaaaagctcctttgatccaaactctctcgccattaaagcttcgaacttttctaagaaatccattattacataacctttaggtttctccaagtttatctcttttgttcttttccaacgatttcgaagtttggt

SEQ ID NO: 43029 - DNA, 140 bp, Arabidopsis thaliana columbia
ataaattacatctaatatatttttatttccaaatccatagaaatgtcataaagttactttataataaaattgagtaattttacatttcttataatggtgaaatttgtgttgcattttcctttcattgattgttacttttc

SEQ ID NO: 43030 - DNA, 476 bp, Arabidopsis thaliana columbia
cagatgtttcttcctctgagaaacctatcctgagaagaagcagtattgtgagtgacatgagcactgatttggcatcagaaaagaagttggagagtttcccggaggatccgtcttcgacttcttcgtctcttcctcataccatagctcaacctaatttcaatgaaagcgttaaaaaggacgatgaagtcaaatatgagctgaagagtgactccgaaaaagttggtgatgaagaagcttctcgagacagagttgagagttccaaaactgtcactgaaacgaggttggtgtcaggagttgaagcaacgtcttatgttcagtccagatcagtcattgatccgaatgtgtcttctgcttcacaaaaccagactgagagacatgtcgataggctacagaatgtcatgagtgatgctaaatccagacagagagaggagggttatgaacacaaagccaacaatgtatcacaatcatcagccatg

SEQ ID NO: 43031 - DNA, 939 bp, Arabidopsis thaliana
tcaacagcatccccagcagtgggtgcagaagctgcaggacaagcccaacaagcagccaccacctctgctatggccatagatgacgagccacaacctccgcaggcctttgaatacgcttctccatgattttgtaatttgatcagttgccattttgttttctgttaattaaacagagaaacagttctccttttttgaacttggagactagtacttattgcattggttccgacttgttcttgtgttagtagtttctttaaatctatatattactaagagcagaaatggtaaacaactatcatttttccctaagtaaagattaatgctatataccaaaaaaaaagaaaaaaagtaaaggttaatgcttgtatgatttttctaggggaaattagataaaaatcattgcaaaaatttaaccacattgttcagtcggggaaaaataaaaatctcaggttgtcgattttgggtcaaaatagtttgtttatgctagtaggccttttttaatttatgtgggtcaattatattacgctccttgtagcccaatgggcagaataaaagtgagcccatgagtgaggcgcgtggtaggcgaactgtcaaatgaaaatatcttacccactcgcatactaagcgcgtataagactgggaaaactgccgtttttcgctaaaattaataaactgggcgcgtgtgggcgtttttttactaataaaaacgtaactggccttctatctgattaaccttgtccggccttctttagtgagcccatttttgttttagttttatgtttatagaccttataaaatataaagcccatatacagttgttccaaccgcagcaacaactgtatccaattaaggttagactaatacacattttcttattcaacacgctaatttaatcagatagactttgattagatactttgatcagagagtatcttacta

SEQ ID NO: 43032 - DNA, 533 bp, Arabidopsis thaliana columbia
tctagtaacgaccgccagtccgccagtgtgctctaaagcttgctctgggatggatctgcccaaggacagacgttgtttgatgtacaggattgttacgccgagggaggatggaattttgggtagatctcacctttggatgtgtcacttccggcggggagcggacaatcgagcaacttccaaatgcgggggtcgcagctcggccttaatggaattgctagcacgtgattgaattgattattaatcggaactcggctcattaacgtaaaccacatccacaagcgacccgcgcacacaagcgagacgcgcacctcgctcaacctttcatactgaagttattcaaactgccatcacgactgcaaaaaatgcctgattatgtcaaaatttggctgaaaagaggagaggattatacttgcaaactaatcttaaaagaaaaaaaattccctagtatttgttgagcagcagcagcagttttgatacccggagttaacctctaaggctaacttcaaggatgcagtattgcaaagacaacatgc

SEQ ID NO: 43033 - DNA, 612 bp, Arabidopsis thaliana columbia
  unsure (1)..(612): unsure at all n locations
caacgccaacatccttaagcgtcaaggcacgaggtttatgagcaaactggtctttcctgattgggtcagagatcacatcctgcttgtcaaactcttgaacgtgagctattttcctaaaccaagacctgttagcgaaccggtccgcttcgtttagaactctatctggatcttcgatctcgggaacggtctctctcatcttcttgttgacacgtacgccagggttttcatgtagatgaagatacgcagtgtagacaccaaatgttactgacaatgaaatcaatcctatggagacgtaaactggtgtgaagtcaccttttgttgctgccgctgtggtggcggttctctggccaccatactctgttgccgccgtagaatacgctttggatcttggtacggttgtcgccttcgtgtaagttcttaacctctgcactacgtttttcaagtgacccttcaaacacaaaatgataaaagtcaaatcgtgaagaccaaatgaatcatagagaaacgacgacgtcttaggttacttacggttgatcgaacggccattggttgttcttggcgagtgattagtnaaatctagctgaaaagaagagtaagatttgtactttttgt

SEQ ID NO: 43034 - DNA, 525 bp, Arabidopsis thaliana columbia
  unsure (1)..(525): unsure at all n locations
ctaaaaaatatcaatattatcttttcaaaaattacacaaactaaagtaatagaaaaaaatagtaaaaaaaaaaaaatcttgaaacatagactatgtggtaattagatttaatcacaatgcttttaataagagaatttgttacaacaagaatgcaaatacataaccaaaagaaagcccaaaactctgctccctctcacgtggcacttccaaattcatatgtttactaacgtgtaccatcatcaccaatactcattctctaaatcaacataatctcagcatcatcaacataatcaacacgtagatatgtgcttgattaaatgtctgatacatatgtgaaaaatgagagtcacaaaggataagaccattatggaaagctcatgtcaaaacgatccnacggctcagattcgctgacaatataatccctttagtactaaagccgcacgtaaattaacgcactggaatcccaagaaggtcggtggcttcggtggcctgggcttctttgccaagaaatgagatcaaattgtg

SEQ ID NO: 43035 - DNA, 466 bp, Arabidopsis thaliana columbia
taaaatttgactcaatttatatctttctttaaaataaaagtattattattaaaaaattacaagatattgttttatgtcaagaaacatagttatatggtaggataataaattttttataaagaattttttttttatttcaagagacatagtacaattatatatttttctggattggtctaaaaacatagaaaataaatgagatgtgttatgaattataataaccatttattagcttgattttgttttttaatttttgatccggaattgaattactcggacctttctataattatcttcattcctacaacaaagctaaacaaaactaacatttaataaatcagtttaagaaattgtcaatcgtatatatggttataacaaatcaatatttgacaatcaagttgtttcctactataatgctaacgattttgattattacttttttagttgtttagttctatataattat

SEQ ID NO: 43036 - DNA, 595 bp, Arabidopsis thaliana columbia
tatggttttcttgaattagatttgttttatattaacattattatttcttaaatttctttgcatcattttatttattaattaataacaaatactcgaaaaagttatctaactgatgaattggaaactaattctctcctatccaaattggaaaccaaaattctccttcagtttgaagaacatgatctgattataatcggttctacatgtcaatagcttccgctaatggtccaagttgaatatacttttgggtcaatcgatgtgtaagtgattttgattctttgttgatgtttgtaaatatagtttcattttaaatatgaatcgtaaccccatggatatatttaaaccgattgaccattccgattctaaaactaatttatttccagtatttttaatacagaaaagaaacttataattttaattgtagtaggttgttctttatagaacaaagatgattgttttgcaaaacaatttgtctaatctttagatgattgtacatagatgaatatattcaagctttgggaattcatccctgaagtactgttatcacaaagagaagataagaaggccagtcaacgacagaaggacagtgatatga

SEQ ID NO: 43037 - DNA, 520 bp, Arabidopsis thaliana columbia
  unsure (1)..(520): unsure at all n locations
nnnnnnnnnnnnnnnnnnnnncagtgtgctctaaagatggaacccgatacggctcgtcagggctccaggtcgaggtcgagggcgaggttgtcgcaagttccgacacattgtcccggctctcggtcaatatcactcgcgtggttccccctgctatcgaccgtcctatcgcaaaatctatccagctgggccttgacacggaataccctgtcggaaatgtatctgttcctggagttgacgcgtctgacatccatttcgtcattgatgggcgcgtatggttttaccccgaaattcaaaattggtgggacacgccaattggtagtggcgaggagatctggtacgagatcaatttcggagaagccgtaaaggtgacgagggcagagatcgcattcgcggttgttgaggaggcgaatgtcgatatccccaacagctatcgttttgagtgcctagacggggatgagtgggtaggtccgatatcgatggggagtatgtagaggctgttgggaatgggataacagaagtc

SEQ ID NO: 43038 - DNA, 125 bp, Arabidopsis thaliana columbia
actgctggggggaccttcctcctccagactgtttggactctccaaagcccacaggctggaacagctgagtcaacctagcagtagaaatggtgcctgcccctccccagagggctccggcccatctc

SEQ ID NO: 43039 - DNA, 886 bp, Arabidopsis thaliana columbia
ctttgccttcattagcttcgtcattttttcttcaaattgaccaaacaattgtcgttttctgttgatttatttgctgcttaggggattccatcttccagaaaccatttcgtaagttgtcctcgagtgacaaatatgccgatactctgttttcaatttcgttcttttatgtgaacttctatacccaacgatctgttgcatcgaaacaaaccattcctcgagtctctgatttgatttcactctataggttttgctgagctgaaatgagttctccccgttccgacctgtctccaatcctgcctccaggtttgtacatttacaactgttaccaattatataggtcattgctgctcgtctaaagtagatgacttagttgtgttgcggtgtggcgtttactgtgatctttgttaggttcattgctgcttatttgcgtttgttcagtcactgctacatgtctaaagtagctgacttagttgtgttttggtgacatatggtgaccgagtagttcgtttgactcatgcttatagtctatgtgatatatgttgggtttacagagttgtggaactttatttgtgtacctctttgcttatggccttgtgatctttgttagggtttatctctttgcttatgttccttgtgatctttgttagggtttatctctttgcttatgttccttgtgatctttgttagggtttatctctttgcttatgttccctgtgatctttgttagggtttagctctctgcttatgtttcctgtgatctttgttagggtttagctctctgcttatgtccctgtgatctttgttagggtttagtggcatattatttagtcctttcaataatccctcaacattttactgttattgccctggcatggtgattacacac

SEQ ID NO: 43040 - DNA, 538 bp, Arabidopsis thaliana columbia
attggagggcaagtctggtgccagcagccgcggtaattccagctccaatagcgtatattatctaacatactactattcttttttcttcctatatatttatgtataggcatatcagtggtcgatttattttccacatatgaacaactatcatcagaaatacctgattattttccatatacaatttgagaaattttatactactacataccaaatatgttaaacacaaacatgtgactaaaaatagagtttgaataaaatttggcaaagtatctttagacgtgaaaaggatggtgaagaagaagagggatcccatgggaatatgggacctcttttgataaaatctttagctttttcttttgtctcaattttaaaaaatacttcatccatcacaaaatgaactctaaacaaataaaaagacattgggaaattatatagcaaatgggaataaaataaaacacccatcctattcattaatcttgtacacttatcttattcccaatgcatttcgaaatctgccaaacccattttttttttctct

SEQ ID NO: 43041 - DNA, 521 bp, Arabidopsis thaliana columbia
aatcgctacatttttttgtagatcttacgaatctataatattcttagaaaaatacttgtaccagtaaaatactggtgtagtggccactaagaagttcttggttcatgtatttttgttgctttttttaaagaaaaatcgaaatatatactttttcattattaaccgacgactatttgattactataaagaacagtcggtgcaagtgagagttctttcaacaatctaaacttatggacgaacaaatatctatatgggaaattgagaattgaccctaagtgtatagtcgttgaaaggttttttttttcttcttctttaatatctaaaagtcaaatcaaaaatgaaagtggaatgattgagaattcatcgtgacaagattaaacaatgcttattgatgtaagattagtatacgatcttaatgggcccaatcttgttagagttttgggttacaaattttgctacttgccgcctcggtgtctcatattaatgggctttgtaaggcccacgctcgcttatcattttgt

SEQ ID NO: 43042 - DNA, 551 bp, Arabidopsis thaliana columbia
tatgggaagtagagtccttgaaatccaataaagtgttttcttccatgtataaaatagggtatatatgtacagtttatagcgattacagaatgtaggtaaagaggaaatcattatagaaaacccaacaacttcatcaaatccatctataaattataatttcagaaatttaaacattaattttgtttcattagcaaaattatacacatttgtttagacaacgttgcaaaggtttctccaatctgatagaacttcttaaaacttgatgaaactgtggttaaaaaaatactaatactcaaatgcttatataccacaccggttagtccaacctctcgtcaaacattaagcatctaaacaaatattataaactattgaaatgaaagcatatgcatgtcttcagaaaatatagaaaatataaggtgtcatgcacatgtaattaaaaggtagtgaaagataggatcgttttaaatacaggtacgatccaaaatactacaattttggcttggtttgagcttcgttaccactttatcggcatttaaagtgtctacacttgt

SEQ ID NO: 43043 - DNA, 462 bp, Arabidopsis thaliana columbia
atttggaccggtagactttattgagtcttggctgataacgaaaaatacagctacttgggccatcaatatatttatatactgccaaaagggggatacaattgttccaatgagttttcgttaacaaaggaaaaaaattgacatttcaggtaactctcacattcttaagtccaatccaaaattctcatgtcaactatatgcttcagaaacattttgatatagtacatgcatttcatggcgtttattaaatcatgtgttgggtgatcaataatataaagttctaagtaatgcaaaatacttgcatcactatatgaatttagaggatatatgactaggtctgaactaccttttacctaaaataatcaaatgaatatttactgttcgtctccttcatcatgagtcactagattcatgagtcaataatcaatggctttgtcttgagtcaagttaatcgtttaacaggtt

SEQ ID NO: 43044 - DNA, 5841 bp, Arabidopsis thaliana
gccagtgttctgtaaccctgatctcagcttgctagaactctggaaaataggtttcgatgcttctgtaggatcatcactacctgacccaggtaaagagttagctcttttaagccagttcaatcgtccataagtagacaccttcacactcggaaccagcttctctaaacgcgattgtatatctggcaatgttttgtaatcaaccggctcctctcttccattttctaatagcaaatgggaggcacgatgtttttttgagcttggttccatctttaatccatcatcaatatgagggaagaatcgtcttttctgatccgtgaaggccttgagagctaacctacagtcattatacacaacgcgagaaaatggagaatgcatgagattcagtagaattggttagctgatgaaactccaagttggtaccaccaagcttcactaacagccctaatatgcagactcgaacctaaaccctaagtatgctttaaaatgattagcaacgaatctgatacctggttctatcaacagcagaagcaccagcttggccagcaagctgtcttttccaagcataagcaacgactgcaccatctggacaaaccaaaggcatgtgaagaccccaagagttacttcttgacctaagtgattcagttaacactccagattcttccaatttcttccctgaaccaagcaataaacattgatcgatccttaaaagccctaatctagagaatcaatcaatactaatgaaaatgattcagttttggttcagcacctattaagcgaagatcctgaagatgttgacgcatggaggcgtcttctctgagaaagagctgaagaggcatgtctgtgtgacgaggttgcgaagcacgaacatagcttcaaggatacggtcagcgccgaggcggatatcggcgataaccctagccgcttgattgagtcgttccatggcctgagccacctgtttcggcggcgcgtccgattcagactgattgttcgccgcctcggccggattctggagaagttgggactggtgtagcgtctgcataagctgtgattcaagcacactctttcgatttcaatgaaattgatcttcttgacgacgacggaaggagaggaatgtttctggactcggagaatttcacgttcaaatctcaatctactgtaacgccagacgcaattttgtagcgtttgcgtttcaaaggcgtttttgttgatatgcttgcttctgctccttcacgtcttattttgtttaatttattccactctgttaaattgagttttactccattaagcaatgctttatggctcatgttggactgaaaatgtattttgtaatctcaatgtttgtgggacttttagtttttagcccatatgtacagtttgttcactttaatatttttttttttttagtttgtacatgtaaaaaaatgggaaatttgcaaatatagccaacaaaaaaattataattgcaaaactaacacttcaaccaatatgtattgaactttatgcaatattgacaaacttaacccgtgcgtgacacacgcgcttattcttcttcttctgagttttcaatcgataacttctatgtattactctgtaaaaattcaaatagaggtgaacattcagagaagttacagtaagaaaatctgaaaattctgggctttaaaaagcgacacccgggaaagtttcgaagagcagactgcgtgtgcaatccgagtgacgattctagagtttacgaagattgaatttgtgggtttcgatttggggactgtggaggcttcgatttctggcaatcggactgcataaatcttctgcaattggaggaggagcctatctaagcatccgagtttcgtacaacacttatgttggctcttttctcaatcgagggtttttgattccgttgagagtacttgagtgagttttgttgtacgggagtagaggtgtttatatctccgtcgtctccactgtaacactcgaatttctgtggcaattggtgtcggcgaagggattcagccaaattaaggtatgaaatgccattttttggcttttgggaaaatctttttaatttgtgttgaagagcttgaatagcataaactcggatttgagtagctttaggtagggaatctgcttggttaatacgatattcatttgtagttgttatgaaggtttaggatttaactctacttcaatgtaatccatttgtgtttgttgatagtaacggaagctactcaaattggttgtatgtgttaatgacatttttagttttatttgcagtattgaatagcataaactcggatttgagtagctttagttagtgaatctttgctggttaatccgatattccactaattggtgttatgaaggtttaatatttaactcaacttctatgtaatccatttgttgttgttgatagtaacggaaagctgaggctatattggttgagtctgttaataacatatatttacatctaagatttatatattttgtatttgtgtaagtagcagcatcaaaaaagtgatacgtggacatttgtatttcagtgtatctgttccatgggggatgtagagttgccaaagcgtttgtttcggctaggttctgaacctgagggccgaaagaggataaacaattactttactcttaggtggattgagatcatcaaggctgctctagatcaaaaccatttgaagcagctggagggttcgcagtttggatttctgttgcaaatggggacgcatcagttttctgtaatgttcttacattacattctatctaggcagttggtgacagataagaagtatgaaatgtggtgggtgtttgcagggaagccaattcgatttgccattgatgattttgcacttgttaccgggcttaactgcagcaaatctggattcaacaaaaaggatgcaaggacaagagggaaaatgaaagcggttcagaatcctacgaggttctacaaggcattatttgggaaagagagaaagcctacttcacaatggattgttgggaagctatctatggggaagaaatacaaagacccgttgactcggtttcgcctatcgttgctgctactagttgatgggattctttgcccgacatgttcgcgaactatcatcgatcctgaccatgtagagatggtaaaagatgtagaatcctttcttaaatatccttggggtagaacttcgtttctcgcgactattcgaagcgccaagcaaagaacagccaaggagcttgcacaagataccacagctatacaagggtttcctcatgccttagttcttgtgacagtggcatgttgtccagctattatatacacggcagactcggtgtttaacattctagacccaaccattccagtcgagaagctggttcagtatgtattggggctgagtttgaacatcaatgtgcatgatgcacgaactatcgaccaaagtggcatggtaattctattgttgtaaagcttgttctttgtatttggtgtagaaagattgtgtacttgacttatctattctattgactcttaacttttaggaccgggtaacctcactgctgaatgaagagctcctggcgaaagagatcgacttatctttctcagatgaggaggatgatgaagaagtttcgcatctgctatcattgataatggaggaacacccattcgagcataacagttggagtggtggtgttgatgctaatgatgttgaacatccatctgaagatgagttcatggctgatgactgtgtgaatcaggctaagggggatggtgacgatgagatggatgttgatggttctggtgttgctgcagaagagagggaagagtgtgcagccggagaaggtgtagacggattggatggtgaggcgaataaggatggaccggtgacagataaagatggtgtcagttttgcggatggagaagggttgcagcaggaagtcccaagagctggcgagatggaaaacaatgatagtggctctgctggacatggtcttagagaggcagtcatcaaagaggtagctgatgagtttgagaaacgtgttctcaagattcaacaatcaaacaacgatgaattgaagtcatactttgaggctgaactggttaagcagaagaaagaattggttgcaatacttactgaatcggttagggaagctgtgagtgggctaaatagacaggctggaattgttggagaatgcagcaaatgtgttgctgatgcccactctaaacaggttaagcacctcaatttgcttgttgagacttcaagtattgcactagtaggtgctatttgatgtatatggacagcttcacattaaacaacaattttctgttgatgcatcaggaccaaataagagctgaccagccaggaaataagcatggagtttcccaacaggttgaacctaatattgggttaagtgaaggaagtgacaacttgccggctgcgtgcggcataaacgttggagtgtctgttccagaacgcagcaaccctaacactagaatggaggtgagaatacagtgaagattatgacgcatttgtgtgtattcggtaagaatgacatatatttttgatgcctcttaggtaagagaagaagattctattcagaaaggaggaaagaaaaaatcttgttctcaaatggatgcacaatctaataggccactgaagcgagcgaaagatatggagcatgtggcgagcacaaaggtagttatatttatttctggttttgagttacaatatacatactttatgttgcagcaaacccacttactttcgctattggttattggcagcttgaaaacaaagaggccgtgcatgaacccaaaacagtaagagttcccatttatgtaaatgtaacgttatatgttgttcgtccgctgaactatgtacatgtttatatgccttgcagtatgtttcaccaactgagaaattggatgatgaagtagacattgtggagccgaatttttcgttgggactaacgcaagaaatcaacgataacagaagcaggttgcctccaagagggaagaagaagacattccccagcaaagtttctgtgttgcggtccagcaaccggataagggacaggccaattcaaagcaacagtatagagaatatgactagcataccggtccagccgcatcaaacagctagcagaggggctggtaaaagtcatgttagtagttctgcaaaagtggagaagcagactccaaatcaatcacctgcttttattgggccttttaaaccgttctctgtgcctagtccatcatctgtgaaaaggtttctcaaacaaatggaacggggagtgtaagtagtcacactaagtatagaatagtaaccgctcttctttgtggtatcaactaatgcaacctttatatgttaacatgcagctcatatgttctggctgatggcgttgtactggagaatacagaatttttgaacatttttgagggccagacactactagatgaatcagtaagttactatagaatacttcattcatctacttttgcagcaactgtgggagtactgatagacaatgtaactcatgtatagaatttgtgctaacaaacattttcctgccacagggacctgatctgttagtgaggttcatacagctgcgattagataaaaataagccgctgcgttttgatttcctaccttcaagtttcttgtcagagctaagacgccagtacaacaagtttgtaggagctgcagataagagtgctttttacttcagcactcttgcaagagtccccttcatggtgcgtccgaaatggtttgccgagattgacgtcatctactgccccatgcaggtcgagaggcagcattgggttgggcttgtcatagatttgaagaagtggggagtcac

SEQ ID NO: 43045 - DNA, 449 bp, Arabidopsis thaliana columbia
atgaaggtcgagtacttaccggtggaatttggaaacatataatacattcgtacagcctctacactctcttctctgctatcatcaccaatttgtaacaaacctgagcacttaaaacgtagagtatcatcattaagaaacctcaaaggacccttactagtcatctcaataacctgaagcccattgaccctacagctcattccgacataggactaaaagtctaaaagtcacactcttctaagattactctcaaaattaaatcagaacaagtaccctctacaccaagtgttgcaactctatgtttactgatttttttttcacaaattccaaacgcatttccaattacatccaaccaattatcaaaatatgaaaattattcatgctgcaaacaaaatgtcaaagcctcaagacaagttttaaagtaatgaatcaaccggtcccatgaatatcga

SEQ ID NO: 43046 - DNA, 568 bp, Arabidopsis thaliana columbia
  unsure (1)..(568): unsure at all n locations
tatgattttttttagaaaaatcgatgaaatcttatgttttttctttctttctgaaaaatgataaaatctcatagtttttgaaatatgattggcttacaactgaattgtgtatcacttaatcaatctttctattttttgttttaaagaaattacgataatcattcataatttcatatgatcaaaattatggctttcttcaaacgtcaagtactttttctgagttgcaagcttgttatcatacgtgatttcgcacgcactctgaatcattacgtttctttttaacagagatattttcaagcatgattttttttcttttcacacttttatattctatttattaggtaaattcataagaataaatgaaagattttggtggaaaaataatcacattgagtgaacttaactaatatacaaaataaatataaaaaattgattaaaaagaactctgggcttatataaatcagactttggcccaatgaaatcggattaggccaaacaagctataaatgtcttgtcgtataaaaaccggttttganagagagaaacagagattgctacgaaagttatg

SEQ ID NO: 43047 - DNA, 516 bp, Arabidopsis thaliana columbia
tgtgttgcagttatttttaaagagtgaattctaaaaaaaaaataaaaaacaatgttagaactgatctttcctttggtagacacatcccagtagttgaaatatgttaatagtgttgaagttcaagaggtgctaatagccaacttaaactaaacagctgtgaccttcattagcagagatgcaacataaaatgacaaacaggataaatgtgctattgaaggcagatcagtatacaaccccaatcttatgcaacgttgaaattattattgttatcatcctatgagaaggaaaccagaatcaatgtgacaaaggtaagaaacgtaaagtgaattaccttgaagaatcatgttggaagtggtccacggtaagcacgttcctctcctgagctgaagaagaccacaatcgcagctaagatagcccaaagaatgaaactcaaaagcacaatgcggaatttcacagtaacaactctatcgacccagttaatttctgcagaattgtcaactgaacagatcagttttt

SEQ ID NO: 43048 - DNA, 572 bp, Arabidopsis thaliana columbia
tgaacagagaaacacaaaaaaagtgtgtatgtgttcaagggcggaccgactttacaaatattagttacgttatacagcccacaaaacaattttgtctttttctcttaagtgtttcggttttatatataacacaagtttcgcaagctattacaacagtggaaaactccatttctagaactcgacaacctaattagtattacaatattggattatctaacgacgattgataatcctcttttcatatacttaaaagttaacatcttcgtcgtaatctttaagttctttttcacatttagaactacaatcttggctgctttcattagaactggtatccattactcgaaaaaaacagatcaaaataataagaaactaatagaagaggaaaaccaacataaaattttaaaaaaaaaacagaatactaaaagcagtaccggcccaaatgtatgggctgcataaaccaagccagataattgatgtccaataaagaaaaaaaattgtttgaaaagaatgcatatagtgggtttgaccaatgacttgttaatagagagaatctttttgccttacatgaatga

SEQ ID NO: 43049 - DNA, 245 bp, Arabidopsis thaliana columbia
taaaaataaaattatctgtgggtgtgtaatcttccagaagttccctaaaagccacatgaactttaggttgagcatttctacgatcagcttttgctaacgccccataccaccaaaccattaagaacttttcagcattggattcaaggactttgaatgcgggtgattttttatctgaagagttatcagtattttcttcattagaatgattgttcatgatcaacctctctattggtaatattatcgaa

SEQ ID NO: 43050 - DNA, 591 bp, Arabidopsis thaliana columbia
ctcttgacgatttatatgtttgataactggactttattatttatggtcaattcgatggtagcaaataattttctctcttttgttggaaaattgaacaatctacttaggcaaggaagattaagtagttttcatgtccctcaatggattccatgaggaagattataggccatatgagttgaagaagaactggcaaggagatccatgtgttgttgctatagattattcttggggaagttcttaagtgagaatcctccgaaaaatcgtttacgtgtaagaattttcctaaactcatctctgttatgtgtgctttcagtctttgtacatgtctaagacaacattggtgatttatttgtttgatgctatgaacactgaagaagtgtacagaattgtgagctcaaatcgacgcaaccaatctttgtttcagcaatttgtcaaacaacatgctaaaaggaaatgtactcaattgcttcacctatttaccgagtgttactgatttttgtaagtcatgccagcttgaccatacatttcagttatactcatatggttatagcaagtgatatataccatatggcttatacatatatatgtgtg

SEQ ID NO: 43051 - DNA, 446 bp, Arabidopsis thaliana columbia
aatacccaaatctgctaaaaaaagaaaacagaatatccaatacaggaagtgaagctacctggaacaatttgatatccatgagcgtaataaggagctccagaatcgtaaacgccaggtgggcagaaggttgaggaaacccagtgaccggagcagaattctgcggcgaagggtaattggaaacaccttgaaaggtaccgtattgatgatgctggtaaccttcttccgaagcaaatcctttgcttttatcttcttctccgtgacccatctctttctccgtgatctgatcgctctttctgattcaatcgagattgaagcgttgaatcaatttgaagaagaagtctctataaaaaaattttttggttaaaaccattttaattatttgctgtcagaccccagataacgcgtatttccgaaaattggcccggagttattattatatgctttta

SEQ ID NO: 43052 - DNA, 385 bp, Arabidopsis thaliana columbia
agtctttacatttggtatagtttgacgaaagcctttattagtagagtggttctacctctcggctatcatccagtcactttgtctctggattcgacgtatcctttgtagagttcttgtcgcgtcccttgcagagctaaaataagggtcacaagtggaccagacaacaacaaaatgatcttatagttccaataaaaccttgtaagtatatgtcaattttataaaagaaatatcaccgtcactagggacgtaccatacaaattttactaagccccaccacacaaatttcacaaccccttagcttttctatgaaattttaatcaaagtagtacaattgccaaatctttgttccaaatcacttgtgtttgtgaaaatataatcaatgttt

SEQ ID NO: 43053 - DNA, 429 bp, Arabidopsis thaliana columbia
  unsure (1)..(429): unsure at all n locations
acacataagacatggccaaattcaaaaccataatcaaaactagtttgtaaggataaagaataaagtttcgaacaatttccacatcttttcacagggctcaaatgcacgagatgcttgtagtggacatagaaatgattcgctcagatcanaaggatcagatctaacnaagtaantcacagaagatgctggacatgctgncgcatgaanctcngtagctggccgttaatgtttctgaaaccagaaaacgaactgagctttaacttgcacttgctgaatgaaacttgaattcaacactcttagagtgcagaagctgccanagttttgtccatgtgctntgtcgtaattatctaggcacttctntagangagctgacttgtnctntgccttgtccttatgtnaggttgttgtagttgtggtngtggtcttggg

SEQ ID NO: 43054 - DNA, 586 bp, Arabidopsis thaliana columbia
atcaggccacctgaaagggaccccaagtccgtacagtctgaagtggataggtgcagattttgttgacaagttggcgttctttattacgtgttctcttcgaaccgtcatgatttcgtagccacctcttttcccctacctatatacaacacaacaaattttttttaccccatataaatttaactatttttttgattaattgtttaattggaagaaacaatttttttcgaaaaatatcgttaattttggtttcggataaacgggttaaacaatcagctttgacatttttttttttgtaaatatagcttagacatcttcctatcgtgaaatccataaaatatatacaaaaaaatatatatcatgaaattgttaaattcgtttagaagattaaagcatgtttcattgtcctaagcatacgacaaatgtatgtccagtgtcattgttttttgttagtttctaggctaattcttttgtgtgttttttttctaacaaaaacttgtaatcttataaactttttattaagagaaaagtaaacaggataaatgtaatgacatggctccaatgaggttgaggtggacaatagcccaat

SEQ ID NO: 43055 - DNA, 554 bp, Arabidopsis thaliana columbia
tacattcatgtatgtacattatgaactattatgatggctgagattcaaagtccatcgtagtgacccccaaaagatatttgagctcttacgacaggaacacctttcataccaaagattgcttcattgagctttgttgcatgattcacaacttctttcatcctctgcatccaccaacaatgaaacaaaattttatcaacaaattcaaattgtagagattggtgaagtattgatgatcaacaaatgttagtatattactacaaacatgtttaaacagttatcaagtatgttattgtaatgcttttaattaggattttgatatgtctttaatgggtttgttacatggctatatgctatatttagtaaacgaagaaaatttcttcttatcgctttgacgttagcacaagaaacaatcataaaacaaaacgtacgtacaaaggtaaaacaagaatagttctcttcaattctaaagattgttcacttaaacacgtaaacttgaccttatcatttggtgagattaaatatcaaaacttatttctatagtttgaacaaaagtg

SEQ ID NO: 43056 - DNA, 552 bp, Arabidopsis thaliana columbia
tgtaactgttttgttgtttcacagaaacattgcagtctctcacaattacgaacactttagcaaaaatgtttgctgtaaaaatagttagataaatacataattttctctaaaatttagaatatgtatcaagtactaaactcccacagtcccacctataaaattaaagaactagtaggaaggagtgggactatcgaatacaatcaggctgcttttacttcacttactcatatttgatgtagatacttaattctaaccatattttagtagatttgagaaacacacataccaatttaaatcaatttcctgtaacacttttatttatctacattttaagtatctatctattagacattcttcttcttttgtttgtcaatattagacattcgttgtaaacctaaataatgtttcgctttacagagaactttagattaaacgtctacgtacatagaatcaaaccaccaaactaaaaaaccaataataaacgttgtccattgacgtagcaaactatagtttattattctgatcattctctcacttccatataacgagagt

SEQ ID NO: 43057 - DNA, 542 bp, Arabidopsis thaliana columbia
gtcctaagaattggaaacgaaaaaaagaagagagataacaagttactctccagttttaaagtatggaaataaaaacacaacaatgcttcagaacaaacctatcttcttcaccagtctgttggtcaatctcatcaaacttctgtgttagaacttccgcagcaatgggtgagagcatgtggagtattaatgcttctaaagttcttgggaaataacgctgaaataagttacatgataggaccaaataaattcaaaggattttcactcaaaaatcttatgtaaaactaaaacgaaaatctccattttgaccaatagttttaggtaacttaactccagctaaggtaataccatgtgaggataaacacagtaaagtaatgccttttagagttaacttactgccattgcaaggagaacatcccgaagtctagaggcttcaagattccaaagcaaatgggcaacgcgatcatcttctaaacaagacattgcattcaccaggaacttgcttttttcgccgcctctgaacaactgggtgaagtgtgttggag

SEQ ID NO: 43058 - DNA, 459 bp, Arabidopsis thaliana columbia
  unsure (1)..(459): unsure at all n locations
gtaattcaacctagtacgatatactcattttctatttctcttataaattaattacttggtaatttagttttgtaatcgatactcaaaaatcgatatccaacaaaggacaatctctttgcggtcaatagtcttctcaaattacttcatacaattatcatactgtttggtaaaatttgtgaatcgtgctcnatagaatgtacgtggaaagtggaacaacagttaatgcttattttgaccacaagattgagaaaattttgaaaagagtatattgaccagttgctgacgttgcatgtcattctttaatgttgttgttgactgcaacaaagaatacaatacaacatactaagtagaaatatagaaataaattaattgatctttgtttctgtattccccagagagctagcttttcagatctataatcagaatctgacggctgataccctcgtgacaacaccccaa

SEQ ID NO: 43059 - DNA, 485 bp, Arabidopsis thaliana columbia
tgtcccttaaatttacactcttaaatacaaaaagcataaactatgaaatcttaatatatatctaaaaatacagtaaaatttcgaaaatattaacaacatggatgatggaactttggttgtcatcattacagaaaataattccttactaatctattttttatttacttaaattaaccttcattcaaaaaaacgaaaaaacgcctcattgatcgcatgacctctcacctctttccttattagtctcacattcccaaatcaagaatcatttgatttcgttccttttaccggtgcttctttcctattcggacgaagctccggaaaatggacgggttcgggtcgcatccaagaacactcgccgttgatcaatggatggatatagttaatggtaaaggttacggcgttggtggacaacccaagtctactcaactcgacccgactcaccaaagtttcaaccgtctattccgcctccaccagggtctacatcg

SEQ ID NO: 43060 - DNA, 656 bp, Arabidopsis thaliana columbia
catatattgatgtatcgtaggatgatgtaatttaattgaattgcaagaaatggtcggtctagtgcaatttttaataactgtatccaccacaatccgttccttttattttggttttgtacatcacatatatagacaaaaagcatatataagggacaacaatttacaaaacctgcacagagggtattaattatacatatgttgtgttttgtataatgaaggtatctttgttgagactttgtagttaatctttggggatccagcaaccatgcaagccataaggaaggccatagggaaacttggctcttgctatttcttcaaaggagctcccatcaagcaagattgcaaagcttcctccattttcttcacttactatcgatatcaccactccttcacaaaaccaaaactattaaactcacgtcgaagaaagaccaataagatctaaagaatttttaactaaccatcatcctcatgggttgcaccgggtcgaggcacgaagaatggttcagatggtatcatccatgctcgtgccagttcttcactttcgtctccacaatatcaacctgtctcatacaattatcaaaaggttcattcaaaacgattgaatattggaaaccgatagtttggggtatgtagttacttggagagagcatggggaa

SEQ ID NO: 43061 - DNA, 490 bp, Arabidopsis thaliana columbia
cgaaaacaaaatataaattagttttaaaatccgagggaaacaaaagaaaggagaaaatagctttctctctctattctctgtacatttccagcgctaaaaatggaagaggcccaagtgagagaaagatggtgaaaggcgaggagatataggggagagagaatcccattcccatattcagagcacaaacaaaaaagcttcaatttttggggacaaagtttttatcttttcgttgtttggaatttgggggaggaagaaggaaaggtgtaaggatagggtcgtgcgtgtcaacgagaggtgctgctggacgtgaagcctcctcctccgcatcggcgaggaggcttccgtcgcagcaccacctcagcggtacgcttagctcttctggctacggcggagaaccgtcggatcaatctgatatcggcggtgcgaagatgaaagggcttttcaagtctaagccacgcactcctgctgaccttgttcgacaaacccgcga

SEQ ID NO: 43062 - DNA, 532 bp, Arabidopsis thaliana columbia
tacccagataggttgccaagaataaagcatcaaacatcaaggaaactaaacacacaaactaactagtaatttcaactacactacgacaccaattcatatcaattgctttcctaaacaaataaaattgccgcaaggagaaaccatctcctctttctctaataaatcagtgttaatagtttctcttgcctaaacatcagattttgtctgtaggagaagtatgtagtccccaaagccggaaagacattaatactttctgcaaaacattcctgtctttatccattgcctgagtcccaaataaaccaatccctgaacactccatttaagtactcaaagccggcaagacattgaaatttgagtctgcctgcaaatgaatatttgtcttgtccactgcaactgtaccaatcccagaatggttgtgaagaagtcaacttcctaaggaactacaatgggaaagcccagattgtacgtagggatgggaattgaggacaaacatggttcttcgaataaagcgtttctgattggtagagttagc

SEQ ID NO: 43063 - DNA, 442 bp, Arabidopsis thaliana columbia
tgaatagtaaagtgactactttcctaattaagtttgaaaaagtgactattttgtcaacacacccttattataatttggtacgtttttcttattcttctctggtgcatatcattgtagttgaatgtaaattattttattggcaaaatttagactggtgttcctagcaaaacaaacatgaacgcatgtaacaaatatatgaaatactacatttcacttaacattcacgaaacagattattttacaaacaagacacaaagagatcctaataaataccaaagaaagaaaataaacacacggaagggttttatcagagtaggaatcagaaacctatatacacgattctatctcacccatcaaagaacaaaacgaaaacactaaaaatacataaaatacaaattcacagaaccatcatgatgattcaagcacgttccccacgaatgcg

SEQ ID NO: 43064 - DNA, 724 bp, Arabidopsis thaliana columbia
tcaaacagtgaaaagtatcaaacagtgaaaaagtgactattttgcaaattatgaatagtaaagtgactacttttccaatgaagtttaaaaaagtgactagtttgcaaattaacccttataataaacgtaccaaatacaaacatagtactccttaatatataccatcagatctggagaaggaagaataatattattcgacttttgtaaacttttacaaatttgagtatcaatcaacttcatgattagaatccaagttgacactaaagagttaattagctaacctctttatttaatcatgcaagcagtaccaaatcgctttctatcttatgtcgttctttgtcgttgtatataataaataaagaccatgtttcatttaattaattcatgaaataaaatttaatcaaaaacataagttaatattttttgttattttaaatcatgaattaatttttgtaatttttcgtaggcttacttccttgattggtctccttcatgcattagtcttgcattttcttaatacagcaaattatcaatgatcaaccgatcgacatagaaaaagagtagttaattaatttattatcatcaagttgagaagacgtgtccttaccacagtcacatacgactggtgtcgctaacgtgttacaattacacacaacaatgtcgatgttcgcttttagtctgtgagtcgttctaactttacccaaacaccttcgcttggtatgac

SEQ ID NO: 43065 - DNA, 588 bp, Arabidopsis thaliana columbia
agacatcgatacaatgagtaaacataaacaaataagcgtgtgaagaacaaagaacgagattaaaaatcgaaggaggagaaaaagtcaaaaatcacctgaggaaaaggaagaagaagactcgaggatgaggaagggtctatggcttgcggcggcgtcctggaaatggccgccggatttagcgtcacacattgcatatctcctccacgagtttttgtttcggagatgatacgatcgtgagatttccttttatcggcggcgtcttgtgttacaaggcccacccaaagtttttttattgtttttttttttttttttgcgtgaacactttttcacaaattaatttataaattatgtaaatatttgcaaatttttgttccaaatgtatttaaatcaatagacattttattactattttgtctattagcgagtgaagctatgaggtttaaaagcattcctaaaatggttttttttttttgatcaatcctaaaatggttttaactttgggtttggaaagttactagtagaagcaataaattgggatatgaagctgtccccctaaattttcttggaaataaaaagttttaacaaata

SEQ ID NO: 43066 - DNA, 473 bp, Arabidopsis thaliana columbia
ttaattgtcatatctcatgctttggttctgaatccccaacttcaaacctctccttctgcttatgtcttcttgtttgcttgagggcaagcaaagactaagtttgggggagttgatatgtctataatttgcatgatttaggcattcattcttcaccactttgtcagcgcgtcacccaggatcccagatcctaatctgactagttatgccttttgtgttcaaaacttcgggctaaggccagaatagtatactcgggctagggccggtttgaaaaaaatcccctttctttctgccgacgtaattcagagaacgaaatcatgtcgccgtatctaagatgcgtcgtcgcgcagtacatccattattcagagtcagactgtatcacaattcatctactttttctctctttttttccatggttagaataattcagtactgtattttttttaaatgtattgactggtgtaacctggaaaaaa

SEQ ID NO: 43067 - DNA, 548 bp, Arabidopsis thaliana columbia
ctgcctctgctatactttaataacttaagacaaaaccgagtaacaacgagctttttacgttgctcctatagctaataataacacctagctgcaaaacttatgggcacgcgatattaagaggagtgggagtagttgttgcgatatgatcaacgaaagcatacttgtcaatggtggttccaatgagaccaagatcgatctccacatctgagaaatcatagtctggaagttcgcttggaccgtcacattcaagaccaatgatgtccagatcatctatgccacagtaatcatccaacatttggttgttgttctcttctgttaagagaaaatcaagctcacaagcatttgggatgaatgagtcatcaatgaagcaacccatttcaggaatctgtagatctgcaaagtcgaaatcaaaactcgctttcttcgattcaccagcttgttgatcaagagtcgaatcaactagcttcttgtcaagatcaatgcttgaccctgaggctgagatcatagaaccagactcatttgacaaaacagaggaagcagcagaagtg

SEQ ID NO: 43068 - DNA, 793 bp, Arabidopsis thaliana
gaggataaaccctagaacccaactttctaatcgaagtggatattataacttcaaattccttcttatccaattttttgtgttatacagatctgaaagtaaaccgttttagaaagaagaactaagtacaacaggccatggtgaatcctctgttcttggaacagagagaacagagagaatgggtcaggtttccgaaatcaaataaccacagaagcaaaaagaatcatgctttcgtcaacccattaacactatgagctataccccccaaaaacaaaaccaagaaaagtgatgagattatgttagtgaacagcgtaccgtcttcgaccggtgaagttttgccggcggagtctgcggcggccacaatggagagaccaagtagaagtattaaaatggaattcgatctccaactattgttgctgtaaagcatcatctctctctttctctgtgaacagaggaaagtgtttctgcagtgttcttttcgggcagtgagggaaagctgggaagtgtagtgtccttttaaacaaaatcctcccagctgttctttttgttccactatttacattcggaataatactttatcgaactaaataaaaaccattgagattttgtaggatatgttaaaaaataggtagagaagtgtatccattttgggaccctcttcatcacaaaccgcgtggtggtcgtagtcattggtctctacggcagtggtttactaggttctctcttactcatttatctaatatggaccaataaccacttttcttttctttctttttatttgtaagaaatagccaac

SEQ ID NO: 43069 - DNA, 529 bp, Arabidopsis thaliana columbia
cttgttctggttcagtctcgtgatgcagcaatgaaatgttttgggaaatttatccatatgttgagattttgagtagtttaattgttgaaaaaaggattgatgttgtagatatcaggaatgtattctgctttgattggtgaaaaacttgcaaaattctgttgtgcattattggcctttgcacggtgagatgtgggttcaatagaacgaagtggctagggttttgattctggctttgataccatgtaaagagatttggagaagaatattgtgtctttttaatacacatgattctagatttgctagtacacacacataaggaaagacggaataaacacagaatatttcttttaccctaacactttaggtaggacttggaagagtgattatttttagtttgtatgaatggagtttctttgttaacttagtaggactttgttgaatgaaaaaaaatcattctcttttttacttaccagatcttcatcagtcgaaataagaaatacaatggcttttgtttgttgactgtggatat

SEQ ID NO: 43070 - DNA, 224 bp, Arabidopsis thaliana columbia
ctaacaaaatgacacttatacagacgatccttgttcagcaacatgtcggttcccatatagggtattcaaaaacccataccttgatttactatccgtaatattaattatatttgatcgtaatatttagattataattataaaaatgattatgtcagttcgttttgggcctcaatgttctgagcaacttgtctgttcgcagcttgtttgttgtgtttgtcaggctt

SEQ ID NO: 43071 - DNA, 550 bp, Arabidopsis thaliana columbia
atgtcaaccttctggtccacaagatgggtggttgtaaagaagggacagactcatgtaccagcaaggcttgcagaggcttcgaggttgatattatgcatttctccattggaaatgctattccaggacggctttacggtggtaatccaatagacaacggggaaggaaatggaggtgacaggtgatttgtagtaaaatgtcgtttgttctgtctctctcctactttgttcttgtcttgtaccaatatagtgaatctagtttagctccttatctgaacctctgtttattttgttttattgaatgtctctgtgtgtttttcatatgaacagatttggtcatctggttgacatttatgcatggaatccacattgtcggtaccttgatggtcttggaccctcaggtaccttcttatatcagagggctatatcataactcaaaaagcttttaatgactgaaaaattcctatgacgatgttaaagaataccaatttcaactaagaacagaaattacctttttatctgctttggttcatggaagcttagtaattgactat

SEQ ID NO: 43072 - DNA, 542 bp, Arabidopsis thaliana columbia
caaacatacaagagatggataagacaaacaaaaagcttaaaggataggtccctagaatctcggaaacagaggctgactagcaacatatcacaagcgagactaggatgtgtcaaagacacttccacgaaagattcgggaatttcataaatagccattatcaatagattttgtggcgttagaaaggggttcttagcctcatgacgcgccggtgcgagccccgcagcgactaagagatttgagcggtttctctccataaaggagaagggcggacggaggtgctctccacgatggaagatcttggacgccgaggaccctttaggtcaagtaggagtgcagttcgagatttgaatccggaggttttccgagagtaatcgatcatggttcgagaaaattggaacacactatgttcaacaaagtaaacaaaaatcatagaaaaacattaaataataattttttattataaattttacaaagaaattacgagtcctatctaagtttactgatagtgcacgacaaacaaacttttgacacctagcaagatt

SEQ ID NO: 43073 - DNA, 6484 bp, Arabidopsis thaliana columbia
gagaaacactttataaattatactttattttaaaacgttgcacaatcgtcgcaatttagtcacaatacagttacaaaaacgttacaacgtgcgactgtgttctgctgtcgtcgcaaaaaagttgcacaaagcgactgttttgtgacattttggaataggtcacaagacaaacttttgaaatccacatagttcgatccattctatagataaacattactgaaaaacaaccattttagtacataaagaactttaggtatacaaatgattggtttcaaacttatttgagaacttgtttgaaaagatcaatcatgaaaatgaattcacatgaaccttatcatgtagattaggtttttttgaatgtttggtttgtaatattcagatttgaagtgtttggtgatgtttttatatataatatcgaccaaattaaagtgtcaacgtataagaaaacatataaacataccaaaacttaaaaatttcgaaattcaaaactcgagcgttggtaataagtagctaattggttgcaaagtgcgactgtgttctgtggtcgtcgcaaaaacgttgcacctagcgactgttttgtgacatttttgaaatattttacaaataaaaatgctcgttagtccctattcggtcgcacaatatttactcgagaaacacttaataaatttaacaaaattttaaaacgttgcacaatcgtcgcaatttagtcacaaaacagttacacaaacgttgcaacgtgcaactgtgttctgctgtcgtcgcaaaaaagttgcacaaagcgactgttttgtgacattttggaataggtcacaagacaaacttttgaaatccacatagttcgatccattctatagataaacattattgaaaaacaaccattttagtacataaagaactttaggtatacaaatgattggtttcaaacttatttgagaacttgtttgaaaagatcaatcatgaaaatgaattcacatgaaccttatcatgtagattaggtttttttgactgttttgtttgtaatattcagatttgaagtgtttggttatgtttttatatataatatcgaccaaattaaagtgtcaacgtataagaaaacttataaacataccagaacttaaaaatttcgaaattcaaaactcgagcgttggtaataagtagctaattggttgcaaagtgcgactgtgttctgttgtcgtggcaaaaacgttgcacctagcgactgttttgtgacatttttgaaacattttacaaataaaaatgctcgttagtccctattcggtcgcacaatatttactcgagaaacacttaataaatttaacaaaattttaaaacgttgcacaatcgtcgtaatttagtcacaaaacaattacacaaacgttgcaacgtgcgactgtgttctgctgtcgtcgcaaaaaaattgcacaaagcgactgttttgtgacattttagaataggtcacaagacaaacttttgaaatccacatagttcgatcaattctatagataaacattactgaaaaacaaccattttaatacataaaaaactttaggtatataaatgattggtttcaaacttatttgagaacttgtttgaaaagatcaatcatgaaaatgaattcacatgaaccttatcatgtagattaggtttctttgaatgttttgtttgtaatattcagatttgaagtgtttggttatgtttttatatataatatcgaccaaattaaagtgtcaacgtatcaggaaaccttataaacataccggaacttaaaaatttcgaaattcaaaactcgagcgtttgtaataagtagctaattggttgcaaagtgagactgtgttctgttgtcgtcgtaaaaacgttgcacctagcgactgttttgtgacatttttgaaacattttacaaataaaaattctcgttagtccctattcggttgcacaatatttactcgagaaacacttaataaatttaacaaaattttaaaacgttgcacaatcgtcgcaatttagtcacaaaacagttacacaaacgttgcaacgtgcgactgtgttctgctgtcgtcgcaaaaaagttgcacaaagcgactgttttgttatattttggaataggtcacaagacaaacttttgaaaaccacatagtttgatccattctatagataaacattactgaaaaacaaccattttagtacataaagaactttaggtatacaaatgatttgtttcaaacttatttgagaacttgtttgaaaagatcaatcatgaaaataaattcacatgcaccttattatgtagattaggtttttttgaatgtttggtttgtaatattcagatttgaagtgtttggttatgtttttatatataatatcgaccaaattaaagtgtcaacgtataagaaaacatataaatataccagaacttaaaaatttcgaaattcaaaactcgagcgttggtaataagtagctaattggttgaaaagtgcgactgtgttctgttgtcgtcgcaaaaacgttgcacctagcgactgttttgtgacatttttgaaacagtttacaaataaagatgctcgttagtccctattcggtcgcacaatatatactcgagaaacacttaataaatttaacaaaattttaaaacgttgcacaatcgtcgcaatttagtcacaaaacagttacacaaactttgcaacgtgcgactgtgttctgctgtcgtcgcaaaaaagttgcacaaagcgactgttttgtgacattttggaataggtcacaagacaaacttttgaaatccacatagtttgatccattctatacataaacattactgaaaaacaaccattttagtacataaagaactttaggtatagaaatgattggtttcaaacttatttgagaacttgtttgaaaagatcaatcatgaaaatgaattcacatgaaccttatcatgtagattagtttttttagaatgttttgtttgtaatattcagatttgaagtgtttggttatgtttttatatataatatcgaccaaattaaagtgtcaacgtataagaaaacttataaacataccaaaacttaaaaatttcgaaattcaaaactcgagcgttggtaataagtagctaattggttgcaaagtgcgactgtgttctgttgtcgtcgcaaaaacgttgcacctagggactgttttgtgacatttttgaaacattttacaaataaaaatgctcgttaatccctattcggtcgcacaatatttacccgagaaacacttaataaatttaacaaaattttaaaacgttgcacaatcgtcgcaatttagtcacaaaacagttacaaaaacgttgcaacgtgcgactgtgttctgctgtcatcgcaaaaaagttgcacaaagcgactgtttcgtgacattttggaataggtcacaagacaaacttttgaaatccacatagtttgatccattctatagataaacattactaaaaaacaaccattttagtacataaaaaactgtagatatacaaatgatttgtttcaaacttatttgagaacttgtttgaaaagatcaatcatgaaaatgaattcacatgaaccttataaatttaacaaaattttaaaatgttgcactatcgtcgcaatttagtcacaaaacagttacacaaacgttgcaacgtgcgactgtgttctgctgtcgtcgcaaaaaagttgaacaaagcgactgttttgtgacattttggaataggtcacaagacaaacttttaaaatccacatagtttgatccattctatagataaacattactgaaaaacaaccattttattacataaagaactgtagatatacaaatgattggtttcaaacttatttgagaacttgtttgaaaagatcaatcatgaaaatggattcacatcaaccttatcatgtagattaggtttttttcagtgtttggtttgtaatatttagatttgaagtgtttggttatgtttttatatataatatcgaccaaattaaagtgtcaacgtataaggaaacatataaacgtaccagaacttaaaaattttgaaattcaaaactcgagcgttggtaataagtagctaattggttgcaaagtgcgactgtattctgttgtcgtcgcaaaacgttgcacctagcgactgttttgtgacatttttgaaacattttacaaataaaaatgctcgttagtccctattcggtcgcacaatatttactagagaaacacttaataaatttcacaaaattttaaaacgttgcacaatcgtcgcaatttagtcacaaaacagttacacaaacgttacaacgtgcgactgtgttctgctgtcgtcgcaaaaaaattgcacaaagcgactgttttgtgacattttggaataggtcacaagacaaacttttgaaatccacatagtttgatccattctatagataaacattactgaaaaacaaccattttattacataaagaactgtaggtatacaaatgattggtttcaaacttatttgagaacttgtttgaaaagatcaatcatgaaaatgaattcacatgaaccttatcatgtagattaggtttttttgaatgtttggtttgtaatattcagatttgaagtgtttggttatgtttttatatataatatcgaccaaattaaagtgtcaacgtataagaaaacatataaacgtaccagaacttaaaaatttcgaaattcaaaactcgagcgttggtaataagtagctaattggttgcaaagtgcgactttgttttgttgtcgtcgcaaaaacgttgcacctagcgactgttttgtgacatttttgaaacattttacaaataaaaatgctcgttagtccctattcggtcgcacaatatttactcgagaaacacttaataaatttaacaaaattttaaaacgttgcacaatcgtcgcaatttagtcacaaaacagttacacaaacgttgcaacgtgcgacggtgttctgctgtcgtcgcaaaaaagttgcacaaagcgactgctttgtgacattttcgaataggtcacaagacaaacttttgaaatccacatagtttgatccattctatagataaacattactgaaaaacaaacattttagtacataaagaactttaggtatacaaatgattggtttcaaacttatttgagaacttgtttgaaaagatcaatcatgaaaatgaattcacatgaaccttatcatgtagattaggtttttttgaatgtttggtttgtaatattcagatttgaagtgtttggttatgtttttatatataatatcgaccaaattaaagtgtccacgtataagaaaacatataaacgtaccagaacttaaaaatttcgaaattcaaaactcgagcgttggtaataagtagctaattggttgcaaagtgcgactgtgttctgttgtcgtcgcaaaaacgttgcacctagcgactgttttgtgacatttttgaaacattttacaaataaaaatgctcgttagtccctattcggtcgcacaatatttactcgagaaacacttaataaatttaacaaaattttaaaacgttgcacaatcgtcgcaatttagtcacaaaacagttacaaaaacgttacaacgtgcgactgtgttctgctgtcgtcgcaaaaaaattgcacaaagcgactgttttgtgacattttggaataggtcacaagacaaacttttgaaatccacatagtttgatccattctatagataaacattactgaaaaacaaccattttagtacataaagaactttaggtatacaaatgattggtttcaaacttatttgagaacttgtttgaaaagatctatcatgaaaatgaattcacatgaaccttatcatgtagattaggtttttttgaatgtttggtttgtaatattcagatttgaagtgtttggttatgtttttatatataataccgaccaaattaaagtgtccacgtataagaaaacatataaacataccagaacttaaaaatttcgaaattcaaaactcgagcgttggtaataagtagctaattggttgcaaagtgcgactgtattctgttgtcgtcgcaaaaacgttgcacctagcgactgttttgtgacatttttgaaacattttacaaataaaaatgctcgttagtccctattcggtcgcacaatatttactcgagaaacactaaataaatttaacaaaattttaaaacgttgcacaatcgtcgcaatttagtctcaaaacagttacaaaaacgttacaacgtgcgactgtgttctgctgtcgtcgcaaaaaaattgcacaaagcgactgctttgtgacattttggaataggtcacaagacaaacttttgaaatccacatagtttgatccattctatagataaacattactgaaaaacaaccattttagtacataaagaactttaggtatacaaatgattggtttcaaacttatttgagaacttgtttgaaaagatctatcatgaaaatgaattcacatgaacc

SEQ ID NO: 43074 - DNA, 526 bp, Arabidopsis thaliana columbia
aagatcccacgaatattgaaacaaaaggaaagaacaggaaagcaagctttcgagaaaaaagagggacagagatccacgtgcgtctcacgctttccctctaaacactctccctcttcaataccacattctataatacattatatttgtaacgttcgtataaaatattcacaaacaaaaataatgatcatattttacattgaaaaatcccaaattttaccgaatttgttaagctaattcttaaatatttaaaattaaaacgaacaaagtaagcttacttttgttatggtatggactttttttttttttttgacattcattatgtcaacaaactacgaaatctttttaccaaaaaaaaaaaacaacgaaaaacagataacaaaaagatgagacacacaatctgtcaaagcttgtcagaaaatggcaaaacactaaccgaataatgaatgttttcaaaagtgaaacaacaaaacctgagaaacagagaagattgaaaatgagagacacgaagacgacgactaagagatat

SEQ ID NO: 43075 - DNA, 613 bp, Arabidopsis thaliana columbia
agtaacggccgccagtgtgctctaaagaaagcctcgcgatttttggcagagagtcctgcgatgccttctaacttttctgggtgttgcaaaatttcgtcaatggtattttcgccataggtatctacgattttctgagctgtcttgagaccaatccccttgaaatggctacttgaaaagtacttgaccaatcccttactagttggttttgcgcgatcataacgactgatttgcagttgttctccatacttggagtgctggacaatttgcccccaaaaagtatagtcttcgccctcaattacatcagccatggttcctgtgacaatgatttcaaaatcatcaaaatcctctgcgtccgtatcgtcgatttctaggaggaggatgcgataaaaattgctgggattttcaaaaataatccgttcaatggttcctgaaaaataaacttccataaaattcctttgcatgaataggtgagagttgaggtgtttctgttctggtaagtttagatagttaccaatcattttctcacgatagaagaagaggctgagattggtgattctcggcctcttaggtttcttaaaatgtccgatacgggtgattggccagaagcggaatt

SEQ ID NO: 43076 - DNA, 6789 bp, Arabidopsis thaliana columbia
cgaaaaggtatggcatgccaagtttggcctcacggtctaaaggttataaagtcatacatttttaacaaaacaaaaaaagagaaaaaccgaaaaaaaaaagagggatgcaacacgaggacattccttgaggtcacccatcctagtactactctctcacaagcacccttaactgcggagttctgatgggatccgttgcattagtgctggtatgatcgcatctgttactacatgcaatgcaatcgtatctattcttttttgaagattttatgatccatttgccgtgggtcccaccagctatgtaggaataccctatttttttataagagctttgatacttgcaaaatattggaaaccaatgtccgaacatataattttcaccccgtaatatagcaaagatcacgaaaaggcccggaaaagtacatttaggtcaaaatttggagtaaaaacaaaacccaatagaagtattccattttccttcctctttcatcggagagctctctttgggatttccgaaatggtatcacatgtcaagtttggcctcacggtcttaaaggtatagagtcatacatctttaacaatacaaaatagagaaaaaccgaaaaaaagagggatgcaacatgaggactttccgggaggtcacccatcctcatactactctcgcccaagcacgcttaactgcggagttctgatgggatccggtgcattagtgctagtatgatagcatccgttactacatgcattgcaatcgtatctattcttttttgaatactttatgatctatttgtcgtgggtcccaccagctatgtaggaataccctatcttgtttataagagctttgatacatgcaaaatattcaaaaacaatgtccaaacatataatttttcgccccgtaatatagcaaagataacgaaaaggctcgaaaaaatactttaaaatcaaaatttggagaaggaaaaaaaccaatagaagaattccattttccttcctcattcatcggagagctctctttgggctttccgaaaaggtatcacatgtcaagtttggcctcacggtcttaaagttatagagtcatacatttttaacaaaacaaaaagagggatgacacacgaggactttcctagaggtcacccatgctagtcctactctcgcccaaccacgcttaactgcagagttctaatgggatctggtgcattagtgctggtatgatcgcatccgtaactacatgcaatgcaatcgtatctattcttttttgaagactttatgatcgatttgtcgtgggtccaaccagctatgtaggaataccttatcttatttataagagcttcgatacatgcaaaatatacgaaaacaatgtccgaacatataattgtcgccccgtcatatagcaaagattacgaaaaggcccaaaaaagtatattacggtcaaaatttggagtagaaaaaaaaaacgatagaagaattccattttccttcctaactcatcggagagcactctttgggctttccgaaaaggtatcacatgccaagtttggcctcacggtctaaaagttctagagtcatacatttttgacaaaaaaaaagagaaaaaaaaaaaaagacggatgcaacacgaggactttccaggaggtcacccaagcacgcttaattacggagttctgatgggatctggtacattagtgttggtatggtcacatccgttactacatgcaatgcaattgtatctattcttttttgaagactttatgatccatttgccgtgggtcccaccagctatgtaggaataccctatcttgtttataagagctttgataaatgcaaaagattcgaaaataatgtccgaacatataattttggccccgtaatatatcaaagatcacaaaaaggctcggaaaattacattaaaatcaaaatttggagtaggaaaaaaatccaatagaagaattccattttccttccttattcatcggagatctctctttgggctttccgaaaaggtatcacatgtcaagtttggcctcacggtcttatagttatagagttatacatttttaacaaaaaaaaaaagagaaaaactaaaaaaaagagggatgacacacgaggaatttcatggaggtcacccatgctagtactactctcgcccaagcacgcttaactgcggagttctgatgggatctggtgcattagtgctggtatgatcgcattcgttactacatgcaatgcaatcgtatctatttttttttaagactttatgatccatttgtcgtgggtcccactatctatgtaggaataccctatgttgtttatcagagctttgatacatgcaaaatattcgaaaacaatgtccgaacatataattttcgccccgtaatatagcaaagatcatgaaaaggctcgaaaaagtacattaaaatcaaaatttggagtaggcaaaaaaaccaatagaagaattccattttccttcctcattcatcgtagatctctctttgggctttccgaaaaggtatcacatgccaagtttggcatcacggtctaaaagttctagagtcatacatttataaccaaaaaaaaagagaaaaaccaaaaaaaagagggatgcaacacgaggactttcctggaggtcgccatcctagtactactctcgtccaagcacgcttaactgcggagttttgatgggatctggtgcattagtgcaggtatgatcgcatccgttactacatgcaatataatcgtatctattcttttttgacgactttatgatcgatttgccgtgggtcccaacagctatgtaggaataccctatcttgtttataagagctttgatacatgcaaaatattcaaaaacaatgtccgaacatatgatgtttgccctgtaatatagcaaagatcacaaaaaggcccgaaaagtacattaaggttaaaatttggagtagaaaaaagaaacaatagaagaattccattttccttcctcattcatcggagagctccctttgggctttccgaaaaagtatcacatgccaagtttggcatcacggtctaaaagttctagagtcatacattttaataaaaaaaagagaaaaaccaaaaaaagagggattcaacacgaggactttcctggaggtcacccatcctagtactactctcgcccaaccacgcttaactacggagttctgatgggatcttgtgcattagtgctggtatgatcgcatctattactacatgcaatgcaatcgtatctattcttttttgaagactttatgatccatttgccgtgggtcccaccatctatgtaggaataccctatcttgtttatgagagctttggtacatgcaaaatatttgaaaacaatgtccgaacatatgattttcgccccgtaatattgcaaagatcacgaaatgcacgaaaaagtacattaagatcacaatttggagtagaaaaaaaaaaaaatagaagaattccattttccttcctcattcatcggagagctccctttgggctttccgaaaaagtatcacatgccaagtttggcatcacggtctaaaagttctagggtcatacattttaataaaaaaaagagaaaaaccgaaaaaagagggattcaacacgaggactttcctggaggtcacccatcctagtactactctcgcccaacaacgcttaactgcggagttctgatgggatcttgtgcattactgctggtatgatcgcatctattactacatgcaatgcaatcgtatctattcttttttgaagactttatgatccatttgccgtgggtcccaccagctatgtaggaataccctatcgtctttataagagctttgatacatgcaaaatattggaaaacaattttcgaacatataattttccccctgtaatatagcaaagatcacgaagaggccaaaaaaagtacatttagttcaaaatttggagtagaaaaaaaaacaattgaaaatttccaattttcttcctcattcatcggagagctctctttgggctttccgaaaaggtatcacatgccaagtttggcctcttggtctaaaagttatagagtcatacatttttaacaaaacaaaataaaggggaacctggtaaaagagggaatctactgagtgactttccgggaggtcacccatcctagtactactctctcacaagcacccttaactgtggagttctgatgggatccgttgcattagtgctggtatgatcgcatctgttactacatgcaatgcaatcgtatctattcttttttgaagattttatgatccatttgccgtgggtcccaccagctatgtaggaataccctatcgtctttataagagctttgatacatgcaaaatattggaaaacaattttcgaacatataattttccccccgtaatatagcaaagatcacgaaaaggccaaaaaaagtacatttagttcaaaatttggagtagaaaaaaaaacaatagaaaatttccaatttccttcctcattcatcggagagctctctttgggctttccgaaaaggtatcacatgccaagtttggcctcttggtctaaaagttatagagtcatacatttttcacaaaacaaaatagagaaaaaccgaaaaaagagggatgccacacgaggactttccgggaggtcacccatcctagtactactctcgcacaaggacccttaactgcggagttctgatgggatccggtgcattagtgctggtatgatcgcatctgttactacatgcaatgtaatcgtatctattcttttttaaagactttatgatccatttgtcgtgggtcccaccagctatgtaggaataccctatcttctttataagagctttgatacatgcaaaatattggaaaacaatgtccgaacatataattttcccctcgtaatatagttaagatcacgaaaaagtccaaaaaagtacatttaggtcaaaatttggagttgaaaaaaaacaaaaagaagaattccattttccttcctcattcatcggagagctctctttgggctttccgaaaaggtatcacatgccatgtttagcctcacggtctaaaagttatagagtcatacatttttaacaaaacaaaatagagaaaaaccaaaaaaaacgagggatgcaacacgaggactttccgggaagtcacccatcctagtactactctcgcccaagcacccttaactgcggagttctgatgggatccggtgcattagtgctggtatgatcgcatgtgttactacatgcaatgtaatcgtatctattccttttaaagactttatgatccatttgccgtgggtcccaccagctatgtaggaataccctatcttctttataagagctttgatacatgcaaaatattggaaaacaatgtccgaacatataattttccccccgtaatatagcaaagatcacgaaaaggctcaaaaaagtacatttagttcaaaatgtggagtagaaaaaaaaacaatagaaaatttcaaatttccttcctcattcatcggagcgctctctttgggctttccgaaaaggtatcacatgctaagtttggcctcacggtctaaaagttatagagtcatacatttttaacaaaacaaaatagagaaaaacggaaaaagagggatgcaacacgtggactttccgggaggtcacccatcctagtactactctcgcacaaggacccttaactgcggagtttagatgggatccggtgcattagtgctggtatgatcgcatctttactacatgcaatgtaatcgtatctattcttttttaaagactttatgatccatttgccgtgggtcccaccagctatgtaggaataccctatcttctttataagagctttgatacatgcaaaatattggaaaacaatgtccgaacatataattttccccctgtaatatagcaaagatcacgaaaaagctcagaaaagtacatttaggtcaaaatttggagttgaaaaaaaacaaaaagaagaattccattttccttcttcattcatcggatagctctctttgggctttcggaaaaggtatcgcatgccatgtttaacctcacggtctaaaagttatagagtcatacatttttaacaaaacaaaatagagaaaaaccgaaaaaaacgagggatgcaacacgaggactttccgggaagtcacccatcctagtactactctcgcccaagcacccttaactgcagagttatgatgggatccggtgcattagtggtggtatgatcccatctgttactacattcaatgcaatcgtatctattcttttttgaagattttatgatccatttgccgtgggtcccaccagctatgtaggaataccctatctttttataagagctttgatacatgcaaaatattggaaaccaatgtccgaacatataattttcaccccgtaatatagcaaagatcacgaaaaggcccggaaaagtacatttaggtcaaaatttggagtaaaaaaaaaaccaatagaagtattccattttccttcctcattcaccggagagctctctttgcgctttccgaaaaggtttcacatgccaagtttggcctcacggtctaaaagttatagagtcatacatttttaacaaaacaaaatagagaaaaaccgaaaaaagagggatgcaacacgaggactttccgggaggtcagccatcctagtactactctctcacaagcacccttaactgcggagttctgatgagatctggtgtattagtgctggtatgatcgcatctgttactacatgcaatgtaatcgtatctattcttttttaaagactttatg

SEQ ID NO: 43077 - DNA, 1432 bp, Arabidopsis thaliana columbia
atctcaaacaactctgtggcactgaacccaacatctcttgtgaaaaattcccaatctttccttctagagtgccaagttcgctccttagttcctgcacctgatgcaagacagtaaactgcatctcggcacgttcatccttcccagtcaatcccatcccttcggtttccacgtcttcgtcccgcactccgtagacagtctcttgatccatcaaaaaacccttatgaccaacaacccgatgcatgattctcgcatttccatccatagcccccggctcatgccctgaatggacagcgtatagcttaaaaacagctgtcccttcttcctgatatacaaaagttttggtcttttcactgtagttagcaatgggaacaatagctctaatcctaaaaccacaaccgcatctctttgactgataaggctccctcttcaaaatcctagacttcttaattgatacaggctctccagctctgtgacaagcataatccttcacctctgccataaacggcttatacctaatatacttctgccttatacagagcacaaccttgtgcttagcagccagttgctgcaccctatcgggaacttccttggcaggcacatcaagagactccgtatactcaaatcgacggcgtttgttcctcgaagcagaaccagagtcggcattgcaaacaggacacgccgctacacaaaccctaataaagctctcgggaattccatagagcttagcaccaacagtccaaacttgcttaatcctatcaatagtctctttctggcctaagtgtttcaaatcaccatcagcgtgaaacccatgactatatcttgccactggttaatgtgagagacgaattgctgagaattattcttgaagcagagaaattcgttaccggtggctgggtcgaggcgagaggtgagcttatcctggatccgtttccaggcggtgaggtaagccgtttcctcgttacgatccttccaaacggcgcgccatgacttgaggacagacctcggtgtagcgatacggatctccgccggagtagcgagacggccctcgcggagacagcgacacatgagagagtgagaagctgcgttgaatgtgtagaactgagatgagatatgaggatcggggctgatgaaaagcccatctcttcctgcactcgaaaccctagaatttgacgaatcagcaatttgggggtttccggtaagggaatcgtcttgctcgtctgaggagagaccgggagaatctccggaaggagaagagcggaagagtatgaattccgggagagaaaacgcgggatcgacttcggaattgtggtcgtggtggtggtggagaatggagggtggtgattgaacgagtatgtcagccgtcggatcaagatcatgatggtggacagccttcttcggttttgtgagtatcatcaggaagatgaagaagaag

SEQ ID NO: 43078 - DNA, 639 bp, Arabidopsis thaliana columbia
tccaatttgtacttgttagatgtttctagaacttgacctcaaagctgcattacactacacagtctacactatgcacattctaaacgatcaagtattagggaatatagctttcataaatcaatctaacggccataaactcacatttattataccatcattttaaacacataggttgcataacaacaacgtaaacgttacctgaaaaaaaaaaaaaagagaggcaggatcttgataaaccaaagaaatcaaataaataatctttctataacgtgacaatggagtgaaaacaaacaattaagacattcaagtcgttactaaattattcaaaattctaaccaagaatttgcaaacacacatattatacgaaaaaggcgggttctcatgtagtaatagtaataacaataattagtactagtaattagttaatggtcaattaatgaccaactaattatattgttgtaagttgtaacggcagacgaagtacgtataccaacaagtccgaggcgtcacaggctttaactaacccaaaaatgtttatcatgttccttgatttcgacgtaataattatctttatataacaggcttttgtctttaattctctctatagatgtgttgtgatttgtgactctagagagaaga

SEQ ID NO: 43079 - DNA, 506 bp, Arabidopsis thaliana columbia
caaatatattgtaaatgtgtataatgcaaagacaatgatcgaatgttccgataattttttttttcttaatgataatgcatatgtaaagatctatgttaaagacaagtaatgtctcaaacaattatgttgtaatgtcatattgcaaaataaagaaaaattgatctacaatatttttttccatcttattaaaagtgtaaaaggtcgtataatttgtaaaattttgcttcttatgttactcgtatcgtaatcatcagttaaccgtaactatattaaatcgtaattgttttaaccgtatatatatatagcagttaaggttacgattaaattttttttataattataaccgttggtttaataaaccgtcactatggtcatgcggcatgagtcatgcggcatgagtcatgcatatgtatttttctttttttggtcatgcctaagtttgcttcctctcaaactcattttaaatttagattcttatgagaatggctttttgagcagcactaatt

SEQ ID NO: 43080 - DNA, 564 bp, Arabidopsis thaliana columbia
cttttactccaaaatcattaacaatggactcaggaagtgcagtggacatcatttcgacgctttcagacttcctgctcgtcctgatcatttcgaacctttccttcaaggaggctttgagcaccagtcgcctttccacccgctggagacacatatgtcgcgaaacgagaaacatctctttcagagaggacgagatcgtgacattcgctgatgattccgttgctcgctattaccaaagggctgcattagttgcctatatggttggttgggttaacaattttaccggtggagttgttgaaagcttcgagcttcgtctctctaattcgtatgcttttgaagaaggggtcaccacactgatcgaattcgctgtctccaagaatgtcaagcatctttttcttgacctctcagaacctcgttgggttaccaataacgacgctgcacaattagaaccgggtttgatcaaattaccggagagtttttacaagattaccagtctcgtgacgttgaagttattcggttgccggtttgaacatcgaggctcgcgaaactgggtatggtgaaaacatg

SEQ ID NO: 43081 - DNA, 535 bp, Arabidopsis thaliana columbia
aagtaagaaaggccaatccacctattgtcgtgggtgtccaaatacaggatcgaagcattgatttaggctccgcacggggttatatatccgcttgaccggcaggccgaagccttgtagtgcagaaggtataaacctcgagttgggctgatagcgcacccataagactacttatcgtacactgacagaccctctttacagaacggaactactcccaagtaaacaaaatctgctgagctggttttgagttgctgttacctgcagggtccttagagtaatagatacttctgcgggcgttacaactagttgtaaagccggtacgaatagtacacgctgatcagcaccggctgcttggaatttcggtataggttacgcagacgtagggaaagctgcgtcatcgcccgatcattggctgagtctcctcaagtctaccaatgataatgcacacaatagtgggtataagcttggcgcctcgctcaacgagccagtgcacccgacggatgtcctggcgccacgcatgagtgcctgagcgctgcac

SEQ ID NO: 43082 - DNA, 262 bp, Arabidopsis thaliana columbia
tctagaggctgcctcactatatgacacatttgttaaactggtaattaattcgagcaccacacagaaaaaatgatgttatggggtaaaagtaaattacatatactggcagtgggcacaaaaaaggagattatatcttttcattacaatagagtaaagcacgaaacataactttctttggacagaattataccccaaaacgtagaaggtgataaaaactatgatataacaaacacaacttattgaagaaagattactattaaac

SEQ ID NO: 43083 - DNA, 497 bp, Arabidopsis thaliana columbia
agaaaacagactagagtgaaggcagtcttccctgggagcagataatgtgcagatcattgccaatatcctgattcttcctgcatcatattgcatcaatggaaacacgcggccctgaagaggccaaagctcgaatccgaagacaggcggcaaacgggagtgatgcatacaatagctgttaccggaagactttcagagtgagcatgacggctctttcaattattctcgtcacctcggttgttttagagtcttcaacgtttgtgatagccgagtcgcagaaaagtactcattgtatgggctatatactcttcagtctatgactgacagtctgaagaaagaaagaacaccaaaatgctagctctcgctaagattctccacggttctaaactatctgatttccatattctccattgcctgggtttccttctgctgagcgacctgactgtctcgagatcgtgagctcttccaaacgtcaaatccgcgaatcactcccagaccat

SEQ ID NO: 43084 - DNA, 564 bp, Arabidopsis thaliana columbia
tgaaacttttgaatattaatttcgttttttttaaaaatgaattatgtggtgtttatgattgatattggaaagagtggaagtaattatattaaattaaagactaaaaagacaaaagtcttggaacttgaaggtaccaaaacatttcagtagatgcaagaatgttttattcaagaaagatatgaacttttgttcttgtaattgacataagttcttttttctgtgtgtgtttttcgaggaccttattatgtgtttagaaggttctctgtttcctagtgattagtattttgttcgagaaaattttgaattttgttcttgtatctaattatggatttactcaagggaagttcttagaaggctctttgtttcctagttgttgtttttttctttataagtttcttaacgctttttcgaaaagaagaaaagagatgataaaaaacgtgcaatgtaatgggaaaatgttacatcaacttccattaataggtcctccgtggtatgtgattggacgttaacatcctaaaaataaaaatatataaaaaagtggttgaaaagagagtagtcaagtgt

SEQ ID NO: 43085 - DNA, 879 bp, Arabidopsis thaliana columbia
cattttcggtatcatgagattgtaatgaggatcatgaaaattcatggtttctaatactttctttcagtttccgtgtcatgtattttatcttgtgctgattttttccccttactattccaggtatttttctgaacttctaagaagctaactagctgattctggacccgtgggccattggtttgcatttttcacagggtatttttgatattggaggcaccatgtggtttggagtcattttcgcttcaacttggcgatcagaatcaaattttattcagacttttaacgacttgtcgtgtcccttgtgtgcattgcataatctagtgtatctgcactttagtaccttgcatttaagttggcattactgacatctactattacccttatccattgtgtaatagcctcattcttttccgtagatggaattctgtgcttgatatagcagtcacatgtctcttaatgcatgtagttagagagaataattaacatttgattgaccagtataaacatatcttaggctgtcgttagtaccgagcagctatgtatcttctgatcttgtaggatattagtgagcttgtgactgtttgaatgaaaatgtttgtttgaattaattttgggcatgaatgttcttgtaaatgtttacatttaccaaactcgtctccatgatttagcattcgggtacatttttcttggatttgaaagtgttcacattactctctaggcttttaggaataccatctgttcatagtttatatatatgcagtcacttttatccgccaaaacgtctaactgttgtagtgtatatgccgatgaatgttttaattctatcatatgttgcagcaatcggagttagcaatgacaggtgatgttactccatcagca

SEQ ID NO: 43086 - DNA, 554 bp, Arabidopsis thaliana columbia
ctctagaggctttgtcatacaagatatcaagttgttaacatttttcctctataaatacgaaaatttgattccaaaagttttcttctactcttgattattaatatacttaaacgtgaaaacatatggttgattttgttccttttctcagtagttgtgatgataatgttcttctttacatgcaaataaagaatcaacttttctttgcacatagttttgttcatttctgatgttccatgacttcaagactctatattaatcgtgctcaatgattgtgccaattcattagtagtgtataatttgagactttgtgaactcaatcacgaaacacacaaaaagaaaatgaaggtttattcaaaaaaaaaaaaaaaatgaaggtttgaaatggaaaatgaaacaatcgtaccaaaaccaaattgcaaaaagttttaaacaagaaaagaagaacaagtagtttcaatgatccggttgaattagaaagtagaacaaccgaacccacactaaattgcaaaacgttttgattaagataagaagaacacgtatggaacattaattgt

SEQ ID NO: 43087 - DNA, 548 bp, Arabidopsis thaliana columbia
catctgcattctgattatgcttatgaagaaactgatgtttatatctttaggaagaaggtgaagaagaatgaagctgaatcagtgtcatgaagctagttttggttctgtaatgttgttgttacattgatatgtaatttgtttcttgttatagaattcgaattatctcaactatttatattttcttagatattggctactaaaagatgacaaaggctgaaatcaaatttttgtaacgatttttttaagaagtatacaagttttgttgtgtgtttttgaaatatatacaaagtaagttctcttgcccaaagaaatatgtgaagtaaccaacattgtgtttctatattagactgataaatttgttcacaaatgtatttgtagaactctcaattgggtgattgtatttgcgagttttattccacatcgttgtggagcggctgcggttgaagaaccaaagttcggattagaaacagctcgaacaagccaatcccaaatcaaaccgcatacatacgtgatatggtatttctatagtgaaggaagtgtcagggtat

SEQ ID NO: 43088 - DNA, 321 bp, Arabidopsis thaliana columbia
  unsure (1)..(321): unsure at all n locations
gactcgcggccgtgacatctttaaatttaaaaaaaaaaaataaaataaactgttaccgtttcaaaacccaaaaaaaataaaataaaaaatgagcacacaacacatgggaaaaatattctgattcatgaattacaataataataaaactctgtatgaagaaaatctttggtgttttactttttcgattagttttaactatctaaatattggttgtatgtgtatatgtttattgataactatgtaattatccttcctgattcaagttaatcccgtccgatgttagacacccgacncacaagtctgtttgtcccgatttccttt

SEQ ID NO: 43089 - DNA, 207 bp, Arabidopsis thaliana columbia
  unsure (1)..(207): unsure at all n locations
ataacaaaatcaccaatcacattaatcagaacaattaaacccctaaaaaaataaagaacccttagaaaataaaacacctgaataaaaccacaaaaaaaactcaaacaaacactgcacaaataacctatancaatgatctaaagaacttattatcatccggaaccaacaaaaaatcaataaacatttgtagaaactanggatcaaaaa

SEQ ID NO: 43090 - DNA, 430 bp, Arabidopsis thaliana
ctgaaatagacatctatttacattgactccaaacatcttttgacataattaaaataatatacgccaagtaatattcacatcaaaagtgaggaagaaatttcatgtagcaatcctatcaaaacaagtgcagataagaaagacttcaacgtatatgtcaagtacctcagtgacatagagagctgtaacagaaggacctatgcccatcccaattccgaccaaaaaccttcccaggagcatgcccataagactctcagttgatgcactgcaaacaacacacttgtaagcacacagatttcatgattacataaatggactctggctaaaagagaaacaggatgaattaacctaactagtgagtacaccttgggataagtgaaaatcaccatggcaatgacttgagaccaaatatgttcaaatgaggccaaatatg

SEQ ID NO: 43091 - DNA, 590 bp, Arabidopsis thaliana columbia
caaaacttattgaattattgatgtttaaatatcatcaattgttttcaatctataaatttgagaatagagtagtagtaatcttttaattctttagtgtaactttttttttctgttgtcaattttctatatatttggctttttctttgtttctattagtttataagaaaactaaaattagtgtattttatttattaatttataatgtgtatatatatctatttacaaataccaattgacgtccaaaattactatttaatattctgaatagaatttttactaaacacataacattctttctgaccaaaaaaaataataattcttctttgaaactttgaatctttttttttaataataaaatattaataagaaatgaacaaagcacgaaaattatagacacaaatacaacaagtacagaagcttataaatatgagaaattcctaaaaatagcactaaaacaagggaatagaatattatagtatctagtgttagtgtgttcatgtcctagtctttaactcaatagaagtattgaaagattaaatattcaatgattgtttctttgtttctatttgtttgaagactcattgattggt

SEQ ID NO: 43092 - DNA, 445 bp, Arabidopsis thaliana columbia
tgttaatttgagagcaagttgttgttaccaattctttggatacttatattgtttaattaacaccagaatgttaaagatattatgttgtttaaaatgcactttgacgaaacgatatttttggatctaattttttcacttaagtagacatgattatcccttctttatatctattgcacattaatctaattatcatttattaatttattcattttctaaactaaatcatcatttagatgtttgaacacagttcaaccaataatcaaacaatctacatagtagatatagttatgaccaatactagaaagttagttagtttttattgaatgttaagaacatcatctattcataaaccgagtattacaagtgtttagttttgtaatgtacaaaaaacttccaccacgtacaacaaattagtgtaacatagattattgctgatgaatattat

SEQ ID NO: 43093 - DNA, 529 bp, Arabidopsis thaliana columbia
atcattgtattaaccgtatataatatagatatgttgcattttaagaaatttacatgagaaatacaataaagttcgtatttcgtagcaatatcgacatcaataaattagagtttattggctgacaaattcaaaaattacaaaaaaaaactacagtaaaatttgaaagaagtagaaagaaaaaaaaacatttaccattatcctcaactctaagaatggtctagaacaagcaaagagagccgtccgatcaacacagtccacatgagagcaatgccgttggattgtacatgatacgtggcgattaatagagaagtacacgtaattataaaaagggtttggtgatgatgtggcaacttagaccgtcatacttgacgattgacgcatgtgacaagttggcaaacaaatgggccttggaactttagaaagcccatatctaaaacgagttgatgatcgtttgctgcacaaggtgtatataggttttccttgtgattgaagcaacatatgaaacttaaacaacctactctcaaaaatt

SEQ ID NO: 43094 - DNA, 251 bp, Arabidopsis thaliana columbia
gtaccgagctcgaataactcgactaacagtgagtgaattaacaaggctgcatttctctgtttgaagtaaaaaatcaatgtagcatttttctgacaataaagtaataatgtgagttttatattggtgcttcttatttttcgtaagctagaattactggttcccaaaagtagaatgttcttaaaatggagtataaatgcttcttttttaaaaaagttcatcgcgagtgtaaaggcattataagtgaacgaatt

SEQ ID NO: 43095 - DNA, 552 bp, Arabidopsis thaliana columbia
gacgaaagagtgaatggcactcttagactgcagtcgctgtgtgaccgggattcttgagacggcgagactgcatgtgtggccatagctgcaagtgatcacaagaaggaaaaatctaggaatgctagtgatcagttttgagcgttagaatatatacatacatacacacatcctttggttttgatcaaaaccaaccaatggttcaaagtgaagcaaagtaatatgtggctattatgtaggtaagatacatatggggataagattctgtgagccagtgatcacaagtttctcaagagactcatttttttaatccttcttttcatgtcatatagttttcatcaggatattatatagtcttcataacgtctggtttcgcatataactgtgatatatccttcaacaccgcgatttcgagaaaaaaagaagaaggaagaaagcagtcatttgaagatagtagacgaaaagttgtacaacattacacagaaaggaaaacaattattgggatcatagtaagtaatctcccatgattcaatttcaaatcctaaaaacagatga

SEQ ID NO: 43096 - DNA, 347 bp, Arabidopsis thaliana columbia
gtccgctctaagataaaataaaaagtcgttgcatagctagtcgttattatttcgtatttagaattgatatgtttagccacgtgaaggagaggaactaaaaacaaatataatattaacataaatatgttcattatattagagaatttctcttcaatatcaaaaatgtaactggactacaatttggaacttacaagttagtcgacgagataaatctgaaacgatagataaagctcaccggcaagcaaacatggcacgtgggaagctaaacttgttatcaaagttattcttcaacattttgcactgaagaattttcttaataaaatcagtgaaaaaaaggcaaaagggta

SEQ ID NO: 43097 - DNA, 565 bp, Arabidopsis thaliana columbia
tcttgtttcttgagtaaaccttgcttgaggacgcctgaaaataaaactcaaccaagaaacatgaaaccacatacaaatctgagactcatctattcactatttccatcctctaaatccaataaagacagtgaaggttttcaataaccaagtatcaaaatcttcacagatgaatccaataaagacagtgaaggttttcaaataaccaagttaccaaaaggactatcattggaagttaatcatcaatacctaatctgtgtcaacatatgaatcaatcactggaaaacagatatagcataagagttctcacagaacaaacatatcatacaaatttgtgactaagacgtctctatttcaatcctctaaagctaagagacagaataggtgttcaataactacgtatcaagaccatcacaagctatcattgaactccatcatcaataaccaatctttgttgtcacaaatgaatcaatcactgcacaagcagatataacaaaacaatcaccaaattgaagaaacatgaaccacactcaaaatctttactctctaaacctaagagacagtgata

SEQ ID NO: 43098 - DNA, 358 bp, Arabidopsis thaliana columbia
tttcatgtattcctgcaaatgacatagctttagacatcaataacacagccattactttgcacaaacagtatttcatccgcactccattctatatatctgttatattgtcactagactattcaacttagcatcgcattgtttagataaatactttagagctccctgagaatggtttcaccggaaaaccgtttcctcgagtgatcccagtgacatcaatgtactgtcccggaacaatatggcggacactgagtgtagtaccaacaggaagatgagcgtcttcagtctacaggatattccctcaactttctctttaacgggtcacttttgtgctctgaaatgcctcattacagcttgtgac

SEQ ID NO: 43099 - DNA, 452 bp, Arabidopsis thaliana columbia
tttcctccttgtaaattgagcaaagagtttaattcatctaataaatcgtttggcatcacaactacagctataaaaatcacatgaccttacactcgaaagattaaaaaaagaagaagctaaaatcttagaatcttgataatcgtcactcatcagtatatcaaaatgagcgacaacgaccgtaacaataaccagaaacaagacacgtcatcatatcttggaacagccatggcggtcataggtgtcgtcggagctattgccggtttattctccggaatgagttcgggcctccacaagaagaccatgaaggcaccaggaaaggatgggcgaattttcagggaagttttcgaaagcaacccgaaaggttattttcgaaatctgcgtaacaaatgaatatttgagtatgtgggattaatattaccacaggtttcttttttatgattgagtaattaaga

SEQ ID NO: 43100 - DNA, 543 bp, Arabidopsis thaliana columbia
atgatgtttaacttttcttttgctttgccacattaacaccattttcttctatttcaagtttcgatctaaacctcgtgtaattcattaatttgtctccctaggtgttcgacgtgtccattttctactgcttgttgtctttcgtaattagttagagctgtctaatccacctccattagaagatacaaaatctaaatggaagtataaacccttttttgttcttctctgctttccactatatagactacctttttcagtactaaaggttttaatgttttatttattatgcattacttaagtttaataagtctcatcaatttaaacgaggacagaatcatctaaatttctcttctatatattacttttaagaagtctttggtgcaaaaatgtttgtgaagacgcgatttaccacacagaacttaagtttacgctaaagctatatagcctatatataggggaaactattaatacaagtctgctcgctggctggcaggctgggtatataaaacatctctaactatagacacaagcatctacgagaagttg

SEQ ID NO: 43101 - DNA, 5302 bp, Arabidopsis thaliana
attgccttgatgcgtatgcgataacactccccttttgcatcagtacgcatcctagtcccactattgatgcgtccgtataaaccgtatatggctcaccttcctccggtaagaccaatactggtgcattagtcaacatggcctttaactccaggaagcttttctcgcattcatccgaccagttgaatgcggtgtcttttccggtcagtcgagacaagggttgggccatgctcgcaaaacttcttacgaaccttcggtaataccccgctagtccgagaaaacttctaatctcggtggcattccttggtcgtggccactcctttatcgaccgtattttctccggatcaaccgatactccttggtccgagataacatgaccaagaaaaccaacgcttctttgccaaaatgagcatttacttaactttgcaaatagctcatgttcccttagccgttccagcaccgcccttagatgttcttggtgagcttcccaagatttcgagtaaacaagtatatcgtcaatgaagatgataacaaactcgtctaagaaatcccggaacaccccattcatcattttcatgaaggctgctggtgcattggtcaatccgaatggcatgaccacaaactcaaagtggccgtaccttgtccggaaagccgttttcctcacgtccgttggctctatgggaatttggtgatatcctgaggccaagtcgatttttgaaaaccactgtgcacctccaagttgatccatcaactcatctatccggggtaaaggatatttgtttttcaccgtaactttattcaatccccgataatcgatgcatagcctaaagctaccatctttctttttcacaaacagaaccggcgcaccccatggtgagctactcggcctgatgaatcctttatccaacaactcctccaactgtttctttagctccgccatttccgccggtgccatccggtacggagctttagatatgggggttgtcccgggctcgagttctatcgtgaacgggtctgaccggtccggtggtacaccactaacggccgcaaacacgtccgagaactcgttgacgatcggaatgtctttcaactccgcactcgcccccacttccttggttgtgatcgtggctaaatatgcctcacatcctttcccgagcatcctttcagcctggattgccgagattaccaagcttcccgaggttgttcttattccttggaattttaacataccttcgtccctctcgaattgtatccgtcctcggtgacaatctatgtgggccttgtacttccccaaccagtccatccctaagataacatcatgtttctttagtggaacaatgattaggtccgcgggcatattgacaccgttcactacaaccgagatgccccgaacaagtccggtcggatacattgcctgtccgccggccgctcgtaccattccataatcggtgtttggttctttcctgaacccacctatttcaaccaattctggactaacaaaacaatgtgtagccccagaatcaaatagagtgtgcgttactacgtcacctactctcaaggtccctacacattcccttagaatgctgagtacctcccctttcccatatgcatgatgcaatgcaaatgcagttattgaaataatgaatagagagttgtgagaacgtaccagtgatcgccctgaagtttccggcatcgttagcttcctccgacaactcataaactcgcggtgccacggcttgccgctttgggggaggcggcagtccatttcccccgcggttgtccctttgtccggcctgcttctccgcagtcaacttagggcactctcgctttagatgtccggtctgcccgcaatagaaacaagtccttgtctcttcaccgagaaccttggactgccctggttccattctcgggcaactttggatcgcatggtccttgcttccacaccggccacatgcacctatggccttccagcaagttccgctgtggctcttaccacaggtcacgcattccccggtcttagcatcggacttagtgttatccaccttgtcaaatttccttttcttatccgcgggtttggtggattgattgttccggatcggtgctttctcccggttcaagtacctctcctcctcgatcccttcctcaatcattgctgccctttcaaccaattcggaaaccgagttgaatgtccggaccaaacaatggttgcggatctctatccttagtccacggataaatcggcgcacttgagcttgttcctcctcaagttcacgtcccacataacgccttaggcggttaaattcctcatcatattcacgcaccgtgcggttcccttaaactaggtcgaggtacgcacattcaagcctatcccaagcctccggtggaaagtacttcttgttaaactcgtcttcgaaatccgcaaaggaccggacctcgtcccctcagcgtttctcgacggttaaccaccaattatgggcgtctcattcaaggaaatggaccgcaatgtccctttggtaatcctcagggcagcgggtagacttgaagttcctcttgagtctactcctccactcatcggccacaatcgggtccgtactgcccatgaagtgtctcgtgcccagccttgagacatgttcgagaagactcagatagtctccccttttccgcccataattcggttgtggattcacttccacaacttccgagtcatcgtccttttggttatccccttttaggaccaccggatcagctacaacggccttggtcaatgtggctagttgcgccatcattcccttcatcaaatcccactgttcttgggccgttggagtattgttccggttatccgtgatgtcccttgcaccactactctccggtgcttcctcattcatggacttcttcccggcctcaggtccggccgagtctgtcccatcgaacactgtcccgactctggttttctcgttgatcatcgtttcctcctcaaccaaagtctcctcgacaatgcccttgtccttcttactctttcccgttttgctgctcttacccatctgcgaaacctctaaagttaatccacataactcctagtaaaatcgcaaaagagtaaagaacaactaccgcgagattctcaagccgacgagtggtgataccccttaacccaaacacctagtcctagaaccaagcatgctctgataccaacttgaaagggcccgatccggactgcctaaagtccgggcgagttctctcgacccaagccactaagtgactcggccctaaccgtttatgaggttctttcctagtctaatccgtttcatatgattccgagattcaatatatgagacgaatagagtaaacaaacaatcggacactttattaattaagcaaaggattcgatacaacctatgagtttgcatataagctattacaagtcatataatcgatccctagactatccgaactatcaccacccatcatcccggccttgagtctctcgcgcctaagccaagtccttcccacgatcaccattcgttcctgaaagtcatagagccataagtaatcttatttacttaatcatatgtatgcaagtccatgcaatgctctatatgccatacactactcggatccgtggagagaattcagagaggggaagatcgcgcatcagtccggccgattctcggcaggtcagttaagacccgccggtcctccgccgagccgcgtccccgcctcagccgatccctacccggaccgagtcttgtgtaggatgcacatgacccggatactactcagccctttagtcggtcctttcaaggatccgactactaactcacatcctagaacccttagactcaaagtctaggatcccttaccttccttctcgaggttaggtcgatccgaccctccttctttattgccggccacagcccggctaccgaatcctaagactatttattctcccaagagggagagagttttaatggtgagttttcttgtgttttcggtgtgttgtggtgagtggaatggtcctgggcgcccttccttatatagggggcgaatggatgcttcccgaatcaacacatccgttccttgcacctttccgaagagttgcacctttccgaagagttgcgcccttccgaagagttgcacctttccgaagagttgtatctcttcgcccataaccgcccagttcgtctgtcactcgtccagctacctcgagctcgtccgtcactcgtccagctacctcgagctcaaccgtcactcgtccagctgcctcgagctcaaccgtcactcgtccagctgcctcgagctcaaccgtcactcgtccagctgcccgagctggactgtcactcgacctgagtaactgtcactccttccagctgagcttgagctttgggcgagctgacccaagtgatttctttacgatcctagcttagcctgcatgatttcccctttgtccgagcttatggccagctccttctcacttgtccgagactccaccttcctctctcggtccaagtcctagccaacgatcctattgaggatcgcgggcattacaagtctcccccccttgaattggattcgtcctcgaatccgcatcaagttgatctttacccatctccttgaaccactccggaaaattggccttcatcttattctcggtttcccaagtatattcctcacggcctccacaattccacaagacttttaacaaatcccttgattttccccgagtccctttcgtcattcggtccatgatccgtactggccatgcttccaccgtcatattctcctttaacccgggaggtatatcttccacgctttcttcttgatcacttaaacacttccgtaattgtgacacatggaagacgttgtgaaacgcatttaattttggaggaaggtcaagtttgtatgccaccgcccctactcgttcgatcaccttgtacgggccaacataccttgggcttaactttttccttgaggtgaatcgccctgcccctttgtaggtcatcgcctttaagtacaccaaatctcgtacttggaattccaattcctttcgacgtttgttggcgtacttttctgtcgatcttgggcttcctttaacttgatttttaagaacttcattctctccgtggtttcatccacgatcgtaggtccaaacaaccgacgttcgcccacgggcgtccaacacaacggtgttctacaagctcgtccatacaacgcctcatagggagacataccaatactagcttgaaaactattattgtatgcaaattctactaaccttagatatttctccagtttcctcccaatccaagac

SEQ ID NO: 43102 - DNA, 397 bp, Arabidopsis thaliana columbia
ggagtagatggtaatgttgttgacaactcatggcctataattaggtactttcttgaatttcctttgaatagaattcttaatacattcattgacataacctctctttttttccttagatgggctgggggaaaagatgataaatactttgccacacttatcaaaaacactgtatctgtttatgagactaagactttcagactgctacgcaagaaggcgcggctgtgaattttgatgatgttgtgggcatgtcttggtctcctactgaaccaatcctttcactgttgaaaggggatgtcaagaaccagcctaaaaaggttgtttttctgcaaataccgggctatgtggagctgatgcacaaggatattctcagcgttacgactgtaagatgtactggcag

SEQ ID NO: 43103 - DNA, 584 bp, Arabidopsis thaliana columbia
agagaatcgaagctaataaagtcaaatctgaaacttacgtagagaggtagcgagagagagagaattagggaagaaggtggcggagagtgcgagagggggttggtggaggagtcttgagaggtggaagcaaaatatataaaaggagagagcagtgtggcttttggaaggccgtgacgccaacttgtgtcacctgagacgtcttaattatttgattatttttcctaccagattatttgtttccattattctgctgtttttgattttatatatgattcatttaattacaaataaaatgttttcgtaacttttttttttcttgagttaatttttcattggattttctcgtttcgcgaaaatgaaatcggatataaatatagttttggtaacatatagtgattatcaatgaaaaaaagaagtaaataattgtaattggtaatgataaaaaaattgaaaataatttttttagtgatgctcattgtcattgtttttatgattgataaaataatatagggtttattattgcggtaaagtttaaacttttttacttttacatgttttctgattttatatcataatagaatata

SEQ ID NO: 43104 - DNA, 629 bp, Arabidopsis thaliana columbia
tagtaacgtccgccagtgtgctctaaagtgtgcagttgcttggcttgaagagctgctgatgagagctttcggatgatgttgcgggcggcgggcttttcgagcctgtcccgaaatggactagcgcctggacgctccaacttcgcccgactcagaccgagagaaacgtcaattcttctctttcgttgtcatacctcatccttacctcgacgtcgcgtttccaaactcgttcgtttcgtcttatacattcacaatgggtggtcacttggatcctaagaacggagtgtgagtcttcctctgttccggtgtccgcgcgttaggatgccgtggatattccggcggttacttcctggattgcctcgtcttgccgagatactgcacttattgctgtttcaataatctcattgcttcgtgcttacattctgcattctttatatatccagatgctaactgcattgtaatatagttttatgggcagctggggtgacatgggtatgtctctcaatcctcaaccccaatcctcgacccctgtaaaacgaatgcgactaccccagaatataccagccagtggtccaatgcagcgtcttgacaatcgcccgttcttgagtcgacatagatattacgcaatggac

SEQ ID NO: 43105 - DNA, 473 bp, Arabidopsis thaliana columbia
ggtaaaaataccaaaattttaggagttcttgagctttgtttttaatggcaatatttgattgcagcatcttaaagttctataatttgccagagatctgatttgattcgcttagtaatttctgtttcttgagttagagttagtgtctctttgtttgttatctgtagaatttgaaccaaactctaaaaggtttgtctttattttatttgtattatggatgattccaagtaagagctgctgtctttttttgtttgcagatcctgttatggaatctccacattctgaggcatcaatcgtgaatggtagtatccatttgaatggcagtggtgaaacaaaacaaagaatatagtcatgtcgtctgattcagacagtttcatcggtgtgcttgaggtttttgttcaccaagctagggacatccacaacatctgtatctatcataagcaagatgtgtatgctaagctttgtctcacaaatga

SEQ ID NO: 43106 - DNA, 584 bp, Arabidopsis thaliana columbia
tgaaatattaccaatactactatctatatatggatactgacagactaactcttttaactcctgttttaccaaaatgtgtatacatattatagaattgtctaaaaacaggtcagctaggctgtttagatgggctgctgggcattcagagtgatggatataagttgtggccacatgccatcatatcacttgtccattctttatcttatttcgctatcaacatttacatttactactctgtgccattacttcaattatttgatgtctgtattagtttcactttcacggtacgtaatcacatttgtatccatagcccaaaaaaaaaacacatttatatccatatagtttagttgccctccttgtagttttagacccaaaagtcatcaaccggccaaaatcctcaatagtggccttaccaaacagagcatatatgagtatcattaattattgggactatctagggttttgattgttttcaaatacaaaattacatgccttcttagcatattatttcacattattaaacataatttcttgtaccctaaggaaggaccggacatccataatgaattgactgactttgtgtg

SEQ ID NO: 43107 - DNA, 541 bp, Arabidopsis thaliana columbia
taaatagctagatatagagtcgtcgaggatataccaaggaattctcctaattttatgtgctcgtgttttcacaaaaaaactgttatattctcaatcactaaaattacagaaagtcaactatgttcatgtttacagaaaaaaaaaaaaatcatctagtctctttgtctgatcaattcagacaaatccgaaaatcctttttttttataaaagcaaaacaatattttagaatactccaaacgagcttgccattccgtatttccagacatgaacttcttgccgtttcattgttgttactacaatcacttttagacaccttcaatcctatgatcctataaccaaatttcaagagatttaacttgataagataagtacataagtagtctatatttgatgccagcaaaataaattactaattctataggactaatagtagatataatttacctgtttcatggaagaactgtaaagacttgaacatcgttcatgtcagggttttggactgagtactgaaacgtccagccatagcaagctcctgcgtgag

SEQ ID NO: 43108 - DNA, 327 bp, Arabidopsis thaliana columbia
attcacttcgccagtatcaatggatatgctcagattcttgagatttaagaacttctgcccggcttgtagttcagatagtgacatacgcaggaatgatagtccgacgtcggtcgaggagatgtctgcttgtataaggtctagatgccggaatctgcagtacagttagagcgatactatgcgcactcaacgcagagttagacatctccatccagcgactgagacgtcttggcaggacaatggcagtgttgtgaatagagaactgcataaggtcaataactggagacgtcctatgcctcaaccttgtgcggtatcaacatcccgctagaa

SEQ ID NO: 43109 - DNA, 527 bp, Arabidopsis thaliana columbia
cttgcgaaacttaagataaccttgtaaaatacttcttacccaaattaaaaaagaaaaaaaaaaagacaacaagaggattaaattgtattagtatcaccatcataccattacacataaataaaatttagtagagtataaacgaatcacgtgtataggaaaatacaaaatacaatgttgaagttaaaatgaatatagaagtagattaattgagcaataaccaccggttttagatcattgattgatatgtaagtaaaatgcaaagtagtagccgacttggcaaagaaaaagaaaaaagaagagagagagaggtaaaactaaaataaaattactaaaagcagaaggaaagttccaggtcacgagggagtagtcgctgtcggattgaaagaaacagaccaaacaaagatctttgaaatcttaaaaaagattcggtgcccaaagattttgacctttgaagacacatttgattatttgtgttttctgcacttccaaacgcataacatcacacttgacccatttttaagattttg

SEQ ID NO: 43110 - DNA, 530 bp, Arabidopsis thaliana columbia
tttggaagagtttattaagttttgttttctaaacttaataattagttttagaaaaatattgattacaaaaagaactagttttcatatagattttttttaaaaaaaaatacaaaattagtataatattattaatttattgataaattaatatttttataaatctagtagccttattcgagcccatcattattgatgtatagtagtgttactgtggttgatttgaactttcacttttgagccgaaagatagtttctttagacctactcgctaggtctttcacatgttaatgggccgagttcagtggagtgaaacccaacaccaatagtcaaccatgctctgcgttattagccgcccattttctggacggtggatctaaacaataataaccaaaggatatttctttcctgttacgttcaacagaatttcaattgtgactgaaatcatatatcattccatatacaaatcaaatgccaattacttccatgtcactctttttttcgttctaggttactgttggaaatttattatat

SEQ ID NO: 43111 - DNA, 255 bp, Arabidopsis thaliana columbia
aagaagatgatcaagtggtcgtaaaaagaggagcagctggatttgcattaatcgcagcctcatgatattgtgtatcagccgcatctttttccttataacttggataacatttctaagttgatcagttttgaacaacaaccagtgatcccagacgattataaagatattgtgactgacttcatgaaccaggatggagatgtagaatccaccgacactgaaggaatgatggaacactacactaactgatctcagcca

SEQ ID NO: 43112 - DNA, 657 bp, Arabidopsis thaliana columbia
  unsure (1)..(657): unsure at all n locations
tttgattggacaggttttggttgaaccaggaacgccacacggtgctaatattatatctcagatgcggtcccatatactgtggatggagaagagggtacttttcatttgcttacacattttcatgctcaaataatgatctgtttctgttttcagacgttatttattcctcttctgcttattttcaaagtattcattttgtcttagaaactgcgtaaactggaaaagaaaatgaagaaagatggaaaggaggtgctcgatctcaaatctggtgcgcatattgttgctccagtaagtatcaatatccttcctgaaaaactctcatccagttgtcaaacactaggtcatgaacttgatgtacagattttatgaatatgattacgtgaatgtattgtaacacaaagaaggggcttgtaaatgcagtgccctcatgatggaaagtgtccgctggaaaacactggaaagtactgtcattttgttcagcggttgcagagaacttcgtctcagcgttcctacaaggttccttacttttgcttggagttgtcttcacaaatatatatacattttagtctgctctatgtttgctgatgattcaaacccanaactttacttttgtagcgtcaaagggtgtccctacgtgggtttgaggatgagaagttt

SEQ ID NO: 43113 - DNA, 464 bp, Arabidopsis thaliana columbia
tgctaaaatctgtaatggcaaacccacatataaataatatttgccgcctctagtttaaacaagcatgtaaaaacgtgttatcggaaaaaataacataataattgtaaaataaatatgcaaaacttatgtcattgaaagaaaaaaaacatgataaatgtacttggtgaatggtgatattgtttttaatttttacaaataagatggtagaaaattaggttatacataatcccgcacgtgtgagtaaagccttatatattccatgcgtacacgcaagttatacatatgttttcacatatacgctctgcctcttccaaagtcacatccatctttcaatggctttctcttcagctcacctcaaccaccaccaacctttgatcaagcacggtggagccacggcggcgcctcctccgaccccgtcatgctcacatctcaacaccaccagcaaatcggagacagcagttgac

SEQ ID NO: 43114 - DNA, 673 bp, Arabidopsis thaliana columbia
cccaatgatcccacaatacgttaaggtagtgactttttctaccttaataatacaatagttatttaacaaatcataatattcgaagctaaattattgctaatcttcggactatcaattatatccctctaaaaacaactagtgtgttcctaaagtgctcatccaaccaattaacaactcgatgaaaattatgttaatcaaacacgtgtattagcttaagctgaacaacataagtatctctttaacagaaaaacataaatatcttctaagtagttacagatatttgatcatttctcaataatcaactaattaagagtggtaaccgtactactatcatatgtatataagtgtgctaaagggtctagccctcttaccagaaacagggtcttaccgtttttaatatgtagtgaatttcaaataatattgaattatggccatacgtgatacgtgtagtgttaaaaacaaatccaactaaaatgttatcggaagctaaatttttgtttgggataaaatgtaattttattttaccaaaatggaacatagttaattacaaaagtttataagggtaatgagttttaaaaaggtaaaattaaaatgctaattagttagttgaaagttgaactaataaataaaacaactatgagataagctaggaatgtgcaaaccattgagccaa

SEQ ID NO: 43115 - DNA, 512 bp, Arabidopsis thaliana columbia
tgactttgaaaagaagttgcacatttgttggtttgctggctgctgctgtttgagaagaagaaaactaaaaaggtatgtaagatgaagttctttttttctttattcaatttggttaggttaaaaattgggctaatggacttacgatggtatgacaaaaattaggcaggtcaaattgttaagatattgtgtcattaaattatactcggctagattcatatatacaaacccaataacattaaggaaaattataaaatttggacaggtcagctaatcacccatcaatacatgtggatctggcgttgatcattgatgatgctcacaaattaaaatcttaaccaaactcttaactaataaattttcataatctattcataaaatgttatgaagagtctttgttaataacctcctattgaggatggtcttggagtttgatgttggcagagggcgaaacaattatagatggcgagatattggctatggaagggcatgtcagatactgaatccagccttaa

SEQ ID NO: 43116 - DNA, 361 bp, Arabidopsis thaliana columbia
  unsure (1)..(361): unsure at all n locations
ttaatcttcctttcacttaccatttaaaaaaaacacacgaaactatgtaaaaaatataaaaaaataagtgtacctcatatatatactgcatgtacagcctttatacgtctatatgcagttatatatttcatataaatatactatacaaatagaacatgcactcgaacttttggttatttacaccaccatatntatatatatctccccctgtctnctgtctttccgccctctcgtctgggcccctcacgcgggactctanacccccgcggtcgccttttctttttccctcgtttccccacccagcccgctggttcgccaccgcccattgctgtcctggttctccgcacactctcgtgtttcg

SEQ ID NO: 43117 - DNA, 511 bp, Arabidopsis thaliana columbia
cacagagatgtccattgaataacctccattgtcactacctgttttagaagcatcctgaaacgggtgatatcaaacaaagaaaaaaagactgagaacccatttgagtacaaaagaatcagttattgaaataacaaaatttatcagaaaataaaatatacttgacatcagggatttctgataaattcttgtcttccagagttgcattgagcaagcttgattgcattgggtcatgaggtgccaagaccaagaaccagcagatcttcctcaggacctaatgttttgaagatcaaagaaagttattacactaaccctatagaatgtatactaactatacatccaatcaacggcatgagcttaccggaatccactgctccggagtctcttttactgaagggatatcatatatcgccttgtagctacggcagatttcaatgtactcattgttatgagaatagtacctacatagttgaaattttttatggttaataatagaaaagatgagaatgcacag

SEQ ID NO: 43118 - DNA, 387 bp, Arabidopsis thaliana columbia
ccataatgccttgagcaaagtcagagtttccaactgcaagaaaagtcgaggaaatataagtaaaaccaaaagagagacttaagaaacaatattattaataaaaaaaaattgatcgatgcgattgatgctaaattgataatgcatgcaagtataaagtgcatcttctgggacaacacttaaaagatttccagacagaaaggtgtaagcaaatcttagactctgatacacacaagttctctttttcatctctagtaggtagaacaaagccaacatgtatcaaataattaccatatcaagaattggtgaagtgatgtgacccaccgcgatttattttcttttaaaccctagattattgataatcactaggttagttgatgcgttattgtt

SEQ ID NO: 43119 - DNA, 569 bp, Arabidopsis thaliana columbia
cactgattttaaagtatgagaatagatggtaatattgttcacttacaaaattgtaatatttccctcatagtaatagaattagttcttttgcgcattcacgttattctaaatccaccattgataactgtgaattgacaagttttaatgtccaaaacaatatcagtatcaatacccaagtatcatttctcaacatatatttatttcgttttagattaggttgtcgtgtagatctttttcatgagtactaagaaaatattctaaagaattttgttttattcctaattaatatattgtttttttgatgtcatcaataaataaatttaaagaatagaaataaaattaaaaaatctttcaaatatttgcattgaaaacaaaaaagaaaaactaatttaaaataaagattaacttttaaaactacaactaattcaaacgaaggaaatatgtgagaaatttcaattttttaaaatggtgtctaaactaaagttgttaaaattgaaaaaatatataacactcatgaaagtatgccaacatatgtaatggagtttgtgttctggccaacctatgattgg

SEQ ID NO: 43120 - DNA, 526 bp, Arabidopsis thaliana columbia
cccttctcagaggaggatttacctgaaggtttaaggaaggagaagatttgtgtatgggatattacagaattgatctccgttatgaattttatatatatagttgcctaccaatgaaaaattaatactcaacttttgttttgctcgcaagagtccaacatattacctctcgttaaaaagtcaaaaactatttagaatgtataatagatctatagatatctatcgctgtttcagtatgaaagtcgacgacgcatgacttttctcatttcaatttattttgcggcgacgtctcttctacactctcgcaccaaatgaagggccaatctctatatacaaaacaaaaaaaaacgaagaagataagtctctatacaaagatcaatttgatgtataaaataaagtatacggacttatatataattggtctttgccgctgatacaaatctttttgtttctttttagctattgtatacatcctttagagtaattcgatagacttctgaatgcaaagaataccataagcttatacttc

SEQ ID NO: 43121 - DNA, 605 bp, Arabidopsis thaliana columbia
tcataaccttttgtgttagttttgtttttttaacactctgagctactgttttctggtgtctgatgagattcgtcatccttaaagcaaataggttataacctctgtgccaaatttgtgtcggaagatgacaagattgattttgcctctccatgacaattttgcttcatggaaatcttctcttccatggagtagatctatggagaggcacatcattgtgcaattggtaaattcgtctgatcgtttttttatatgtgtttctgcttttattatcgggagaacattattacagcaagattttgtgtctgaaacaagagaaacgattgtccattgatacttatagcagtaacaagcgaaagagtctgtaaatgatacagagcattctttgatatgattatccatagaggactcttattgatgaagagtctgtaaattctccttttccttatttataaaagtccgtccttattacaaagccgtagaatgaatttgcaatgttgaaatatggatgaaatttcgaaacttgattcctggcgataatttgtgctttaactgaagattaggtaatttcagcattaagatagtctgagattcatggcgacgatgat

SEQ ID NO: 43122 - DNA, 657 bp, Arabidopsis thaliana columbia
gatacaacccctgatgacctcacaatacaaatgttcagaatgaatgcaaaatttcataattaactcaactcgcccgctttggatataatcataactagctttcctattaaacccttcccctctccaccccccttggctctacatttactctcccatcattccatattttctccattacattctacaataaccgaaaaaaacaaacttttcgacatgtgcaagtaagtaaatctcttaccccaatgaatttaaagtaagccagcaagcatagctcctggatcatcagctaaagccgctgggcttggcggttgagctacaggtggtgctggacctgctgctggaactaaagctcgagatcccattgggacagtaattagttgttccttgataaattctttcaacctgtggataaaagaggtcaacaaatgcaaatgaagacaatctgtgatcgaggttgggtatgtgattaagaggcagatatatcatactcaaatgtaagggtaggatctcccgagcctactgtcaatcgtagttgggttctgtccgctggatctgtctcaattcttgcctgaaaatcgcaaaccaaggaaaatgtcacacgtcattactatcagtcttaagcaattttagaaattggagtggcaagtgcaaaaccag

SEQ ID NO: 43123 - DNA, 530 bp, Arabidopsis thaliana columbia
cattttttatatgattatctccacaatactttattattagttacattcatatttcttacatcatactaattcagaaagaatcaactccacaaaaactagaaatgtgaggtagggtttggagtgtgtctaaacttcaagtggtacaaaaaaaagtcgcatcattttatggattcattgacaaagaaatatcatagaactactattcacgtgaaggtcacgtggatcattctcttcaactcgacgactattccataataccaaagaataaagtttttcccttgcaaacaaaacaacgtgtacaacctcaaaaattatgttccaaaataaaatacgaaaaaaactcaataattcagctaaattcgaaccgtagcatagcatgtgatactgatactacgacagtcacgtcacattttcatatatgtagaaactatatacctagttgaaaagtttgtacagtagattaggtttctaataaatttgaactcattttggattttattattttagtaaatttaaatttattatttgga

SEQ ID NO: 43124 - DNA, 555 bp, Arabidopsis thaliana columbia
  unsure (1)..(555): unsure at all n locations
nnnnnnnnnnnnnnnnnnnnnnctaaagggaataaatgcaaagagagctggttataggcggatcaccgaaatcacgcccagagcaatccagtggacatgcccgcgaccagctggcactaatattataagctctcggtgctaagggcattattcttaattctgtcatttcaaagtatgcattgctgttgatattaagcttcttatctaagtggggcgacatattacacggacctggataaatatagaaagataaaaagaggttatagagtaagtactataggtcacttgacatctagcatgatgtttgactcgccccgctgacgttcccctctagttatgagagggcacactaatgattgagataacgtggcctagagcagatggttggaagaactggctagttatataagaaccccataataggaaatcctttacatcccaaggcataagctctggcgactctgaataccgccaagtcgttagacctttcaaatatatccaggataatgcctttaccaacctttggtctccgcatgagtggcgtctcgagtgctt

SEQ ID NO: 43125 - DNA, 459 bp, Arabidopsis thaliana columbia
catgccaacttctctgtcatcatcatcatcatcagcatcccaatcccaaccaatttgatcattttcaatgcctggaacaccagtttattagttttagtggaaacaaatcctgacatatatgcttcttgaataggtgcatcagtgacagtacctacttgaccgaatgactctgccatccctgttcgcggccgcttggaaccctgtaaagaatgttatgttacttattggttagcttcgtgaattattataaaataaggaaaactacattatatgatgttgattaagcatgttagtgctacaatcgacaattcaatttcctcatcagtaccatgcaaactccatcccttccatagataaaagtcgtaccatttttaggcgatcatcattacaagtaagaccagattgcctacacgtcaaagaatctgcatcagcgtcaagatcaccagttcttgacgtcat

SEQ ID NO: 43126 - DNA, 599 bp, Arabidopsis thaliana columbia
agtaacgcgccggtctcagtgtgctctaaagaagccagcagatgtatgagggccggccattcaaagaaatgaaggtatacaacgtttggagacttgccgcctttcttttgagacaggcgcttgttgataaaccaaagaactggatgtgagttgcacctttacttacgcctttttaatgggcgtggtcaattaacgtcaataggacacattacatgctgagcaaatgtctctggaagatgttcagctgcgatgactccgttcggggatcttcgaaacgcatcagccttgatagtgtcctggactccctcctcgacaccattgacgccctgccacagcggaaagactcgcgatctgagcccatttttgagcctcactataagcttgtctctatcatacacaaactcgtcataaaagaagttctaacggtaaggaccattcaccattgttacaatcgttgtaatcatatggcttacttctccatagcccgcagaggcaagtaagactttggttgcgacaccctgggctagaaaggtgccagcttgcgaggatcgaaattcctggaaaaaatacatcctcgatgtgctcaagaacctgaagaa

SEQ ID NO: 43127 - DNA, 620 bp, Arabidopsis thaliana columbia
ggtaatccggtttggttttgatcggttgatttggtatttggtttattgattacacgaggaaatgttatagaatttaaaacgaaatacatttggttcaattcgatttgggtagtagacagtttggtttggtttgggttttggattttaggattttggtaagtttggtttttgaataatctcggttttttttttttcagtttgttcaattaatttcagtaattttgattgttctcatgacaactttctgatgctttaatcaaaatgagataattgtgactggcaagagtctgacaatgcggttgagcaaactagattctaacggacgaagaacgaaaaaaaaggagatgtgtgtataatttgcataacatacactagttacaatttgcataagtaatttatcaacatttaaatatccgtagaagattacattttcttcaccaaaattgtttttgaaacggtgaaccgtataaccatctccatttactagatattgaaggagtgaaaatgtacttatataaatttatacctggttgaaaccgtatacacaactccatctcctaggtcacgaagacacgaaactgagttttgtatagtgtgtgtttacattggtgtgactgtga

SEQ ID NO: 43128 - DNA, 506 bp, Arabidopsis thaliana columbia
ctatcacctaattaataaaatcattgtcttaaagcatacaacaacttcagtcaacgcatatttttgaagaagcaagtccaagtctgatcaaagatttgagttctcaaatgtctcagcttcaccttcaccttcagcttcaccgtcactatctctccctcccacattcttcttctcttcgttccagattaccgtcattacatcgccgcagtgtagcttcttcgccaaccaactctcccctctatctcaactcaactaactccaccgtctttcgtcctctcaccttcgtcagatctcgttccagcgaatccggtgagattttttaacctcgaattcgatttttccatcatgtttcctttacacttgtaaaagtccaagaaaattttccagacgtcacaccacaatttgaattggataaagcacaagacaaacagaaaccactaaaccaagcaaatggaatattcttgatcatacttatcaatcttgccatatttatagctcacacttct

SEQ ID NO: 43129 - DNA, 544 bp, Arabidopsis thaliana columbia
agtaacggccggccgccagtgtgctctaaagaacagagcatctaccacagaacgcacagcaacaaacagatcaacggcctccgcaaagccggatggaggtagcagttcagcatgaaattaacattgaaatggcagacgcgattagccaggtccaggcgacaaccaatcaagcaaccgagcgctcaataatggctcagccgaacagcgcaatgtcgtctcactacagcatcccgattgacccgaccctcgagaagatgcagttctataactctctccatcctggtcagttccaaaccaacaccagatgcagatcaggctttcaaacaaccacctatgagagggctcaagccctgggaaacactagaagacaacgcctggatcaagggggtcgggagaaaagaggccaaaccaagatgttcggttgcggagagcaagagagaagcgccgctacgaatgaatatgaagccacaaacgagcgcactgttcaagccattcaacctgatcccaaccccgtcgctggatatgggtacaagtcttacagcga

SEQ ID NO: 43130 - DNA, 337 bp, Arabidopsis thaliana columbia
tgaaactgtgtttaatggacacgtgtcttggatacgataggggtataatagagactttaggaaagtagaggttggcgtttgggtgattggtcaaagcgaattcttaagaatctagtaatactgacacaggtcactcaaacagctatttatttggctaatgttcagccggaatatcagaattagagagataagtgtttcttcttcttgctctgtcgccactaacgaggtcactgccaagtaacatctgatcgagagagagagagcgatggcgagagatatgaatgtagtggagattttggatgatgaggaggaggatgagaagtagtgtgaggattgg

SEQ ID NO: 43131 - DNA, 354 bp, Arabidopsis thaliana columbia
  unsure (1)..(354): unsure at all n locations
nnnnnnnnnnnnnnnnnnnnnnctaaagttaaaaatgaaaagcaatcgacataggctcctgacccgcaaactgacttctcagaccgatacccagcgaaacatcatgtatacccagtagaatcaatcccagccatgcgccaaacatagaagagatgaatacaaagaacccaagcgctcgaaccgcaacaacttcgcgcggcaggcccagtcgagcgaaggtcgcaccatcaggaggtagtatcgcaccgagttcggcccccgccattgcacaccatcatccgcggtttacaaaaggatatccaagcagcaacagcacgccaaacgcgacagtaagtcggcacatatcccactcac

SEQ ID NO: 43132 - DNA, 583 bp, Arabidopsis thaliana columbia
  unsure (1)..(583): unsure at all n locations
nnnnnnnnnnnnnnnnnnnnnnctaaagggaatccttaccttgaaaatggtatactaacgagtgtaacgctcaaatcctaggaatcccacagcctacatcagtagatatatggcagtaaaacggcaaccatcttgaagccaatcaataaactcttggctctcttgacaaatgtgagtttctccattggattttcggcatacatcttgataaaatcaaagactgacctgagagctgcaacatcgatccgaagaaacaagcccgtctcgagcatacttcgaccagcggatattttcagttgaaatatcgaatatgagaaggttgctaaagcaagaaagcagatatgaaaaaaagttatactaagaaccggtgtggtgatgcagtaacatgtagaagtatatggcgagctagccgtaccatgggctgtggctcatgtctccagggtgaaaacgaatatacgactggtgattagggacaagaatcataagtaaattaacattatctagagattacaacagatagtatttattcttcgcaaggacagtgctagcatctggcgccatggtagacggcagtccagcttct

SEQ ID NO: 43133 - DNA, 744 bp, Arabidopsis thaliana columbia
tataacaccataatttgtttttgttctcgttctcatactgagtagtttgttagagaagctacctaaacgaagtccttgaattaaaacatctatcatcaagaaaatagtctcttttttttttttacagaaataagaaagtgagattgttttttatgtgtttgaactattactgtaataggggagatatgtctggcaaagggacaaccacttgaggaaatggtagagtgtaaggaggtcctatggccggaagaatgtaaatacgacgcatgtgcctttgcatgtgcactcaagagacatggcaagggtggttgcctcgaaggccccgattatcgctccgcttgcatctgccagtatgcttgcaaacgctcttaatacttgtatttcactagtgaaaagccatgaagtcatatttatatttattataagaataaccgtttaataaaaacattgttttatcgtgtgctagacattttatcattctccgtttatgtttccacaacatgatttaggaacccgaaacgttttgacataacataacagaaaacgtcaggatttatcccggtttagagtaatctggagaaattggaatcgaaacgtgacacctgattccgagttcttacctcttttttctttctttgaacgcaagttagtatgtttaaggtttggagatacattgttggggacgtctgatcctaaaccagattgggagactacaaacacacgcgatttcatctcttatctctt

SEQ ID NO: 43134 - DNA, 469 bp, Arabidopsis thaliana columbia
cgttagaaaatagtggagtaatttttattttgaaatagaaaaggtgaggaaggagtaggatagtggaaatttgggatctgatttgagaaattgaatgggctgagagaatacgaacaaagaggcattaaatgctcttgtccctctttgtccctaatttcaatgctaccctcgctcctcctctagttcttaattattcagaaattctaattgctttattacagttgttctttaacaattaagtttggtgtttagtccttgaattataattgcgttatttcagtattttgtttaacaattacagtttaggtttagtccttgaatacataagaaacggtagctccttcagcatatagtactatatgccaaagaaaagttcgtccagtgcttagttaatgacttatggggttggacatttgaaataaacccttacttgttttgaaagattacataatgtcatttaaagtttata

SEQ ID NO: 43135 - DNA, 513 bp, Arabidopsis thaliana columbia
tgacgtctaaaagaaagtattccacatttcacctactttgcgcttttatcagtcaattcatcatctgcgtctgcttcatcgcttgaactccctttatcaaagaaatcatcatcactaaggtccagaagaccatcatcttcactccccgtctctgtttgtccacaacaatagccataatcatcctttattagctacgacctacgatacttaatagttccagggaaaaaagggaaacaaataagcatctatatatagcacatgtgtttaccttctaactccttcccactagcagcagcaacaataatattggctttgatctgctgccgcattttacctctcttctcaattacttctgaatcctcagctccagtaaaaagtgatacatatttctcatttttcgggaagaactacaatagttatatataggaccaacagacattctcaacttagctcattctaaatcatataactaacaagcagagaaggataacaagaagtgaatttaccgaacat

SEQ ID NO: 43136 - DNA, 492 bp, Arabidopsis thaliana columbia
  unsure (1)..(492): unsure at all n locations
nnnnnnnnnnnnnnnnnnnnnnctaaaggggaggctgcctccggatccagcccggtgaactcttatgctctgcaggtatgtgaccctacatgaaagatgtcgtccggtttctaaggcagacgcagaccttgacggtcttcttagcctgtattcttaaaaagaagtacaccaaccctagctccgacatcattactgttctggcaggtctcgacaaagttgaccaggtcatatccaatttcgttgccgtcttggacagcatcatccgcagcggtacgaacagtgagcatttgtcgttcctttgcaacattgactataagctaatactcccgcagatgatattcgattcatggccattaggacagctattgctatgacgagtggagcctataagacgtagctagtatcgtactttacacatcgggatctattcccttcaattatgaaagttggtagtcatttacaccgatgacatcttccaacagtgtgcaaatg

SEQ ID NO: 43137 - DNA, 454 bp, Arabidopsis thaliana columbia
tattaactatgtaaaagaaaatataagatcgaatacgaacaatgatctcgcagactatacgaggttggcgaagaggtcgaaggaggacgtaaacaattttgatgaagaaaatgatgagtattgcttcgatcaaaaaggttgaaaatgtgtagttcatgccattttcgcctttgaacattccgaacggctgcttatcgtgaacctgtcggcaaacctccggaagtctggctgagaaaacacgactgctgaccaatccggcggtggttggattctctggccagaacccaaaacgggtaggcagggcactccagccatcacttgggaaagacctaaccatgcatgcagattattctctcagatatttgacataaaacaaacgacaatgatcatccacagagagacagagagaaggcgatagatccatgattgatgtgtgttttttccaacagatgtg

SEQ ID NO: 43138 - DNA, 1011 bp, Arabidopsis thaliana columbia
atccctgttttctccaacagattctactgatatatatagcaagtgaaactagtaaaaaaaaaaaatattatatatattatccactgtagaattccagaaaccgcagaatattagaggatactgcgttttgataagcgttccttgcattatttacctttgaaatccgtattctttttatattattatttttctggaaaaatgtactgtgtacttttcttgctgattggtacccaatgcggttttcgaagtaactttatttgaattccgcttttatgtcgtccccattcactacctaagtacatgtgtataaatcatataactgtctttatttaattattaattgttgtcataaatataagtaaaacctaaatcattttgaaagtttttttgttgataaattcgttttgaatgttgtagtttgcaaattgtcattttcgtacacatgcatgtagtaagggaaagttgcaaaaccaagctaatagcaataatcggtaatctgacttaagtttgtcatataaaccaacatcataaacattgttgttgtaaataagagaggaaattaggatgatgacaagtatacaacatgtggatggtataagcagaaaatgtatagagaaatatgacttctcacatgtctatagaagacttagcacctcacattcgtccctcgtctatgaatatagtaaaagataacacggagataaatataacacaagaaacattacttaagaatttgtaaacaatcatgacaatgccatatatagttagtgatgttgttgatctgcgctttgttggtgtaagaaagcgcaatactcagatcaggcgccatggaagaggtggaccaatatgaaaccggataaataatgttagtaacttcccaagttaagaatccaccgtggatccaaaaaaatgagcaaacctcaatgcaaaagatgatcaagagaaaaaaagatcaccttaggtcatatgggtttgatgagtaacagatacaatgcttagtagagaagagga

SEQ ID NO: 43139 - DNA, 543 bp, Arabidopsis thaliana columbia
  unsure (1)..(543): unsure at all n locations
ctacattgaaattgaatcgtacaaaaacgttcggataaaatatgcaaacaagtaaaaaagacatatatagagtagagataatgttcctcggaatgtcctagtggactcgaaagtcaaggagtcaataaaagaggcggctttgcactctcgtttagtcgcgtctgcggatttttagtatccgttccgtacactcgtcaataaaatcgattatagaatgtttttcctactactgttttgccatcttgaaagtttagaattatagtgatagtaatttaagaaaatgaggttctgtaatttgtaatattgggctgattgattccttttttttctttcataaaccttttgatgggctaacaaaaatcatcctacgaagcccatttagctgatcctttcactttcacaaatctcatgatctttatccaacgcccaacggcgtacaacaaaaccccattgtccgagagttaatagaaagctgacgtctgatgtacaataatccaacggcttaaaataatacaatcgaacggccanaaaggaaagctgtat

SEQ ID NO: 43140 - DNA, 302 bp, Arabidopsis thaliana columbia
aaataaccatttttatttattaattatccatttaaagaacagatatttattgatgattttctaatttatgtttttttctttggagcagtttcgcctccagctggcttccctgatcatcctcacagaggtcaatatcaccattacatacataaatgaaataaaaaccattttcaattatctaatgtctctctaacattttgtggaaattatgatgaacagggtttgaaactgttacatacgtactagaggtaattaaaatacatttttttaattatgaatcttctaaaaatttttataaaatt

SEQ ID NO: 43141 - DNA, 621 bp, Arabidopsis thaliana columbia
caggtatgaatgtgatatataatgtgaagtttggtgacaactaattttccgcctttttggtgtgtactagattatctgatgatgtttttatggcgaacgagagtatgtccgctgtcgtcgatggatgatattatgtatgactatgattcctatcgatcagtacacaacattgtattacaggtcgttactagacatgaatgtctggaaagatttttgattctacaagagaccaagaacattcatcggtttttgcctgcaactgaatcaatattgttgtgtgtttgctttttgtttcgtagcttacaatggaaaacaaaagtgacagtttaaaagatgtaaacttgtataccaatttgatccagcatatctgtaagaaagttaatccattgatgttgtgtgtttcatgagcatctttgtttctgtattgcaacttctgtaaatgtagtcaaacttagtagcttatgttcaaaaacatattaaaaaaaccttaatttataagattgattctttattaaaaagaatttaagaaattgcgaacccaataataagagagattgattatatataacagcttaaccgattgtagaagggcaaaggattttatttatctgaatgaaattg

SEQ ID NO: 43142 - DNA, 1143 bp, Arabidopsis thaliana columbia
tatgatccacacaaatgattcacaagaatggtgcaagacttctggctactatgcagatcctcagtcgtggcaagagagttacgagtatagacctggtttgactccgaccgagccaagcaattctatggagttccctcctgctggtttgcctgatatctttgctttactaggaaaagctgctcgtgtagttcttgatgccattggtttctatttgaacttgagaagctgtccatttactgagaatctggataatgtcactttgagaaattgtgaggtatcgtcttccgtgataactgtatgctgttaagctaggccatccatttcatggagcacagcagcatagcttaacagaagacgagcagcttatcctgtattcagaccatgatcaccaacttgacaagagtctgatctcatttgtgaaatcagataaggcggggttgcacatcagggacatgcatgggcaatggattttagttgatgtggatcttggtcctcaagaggctgttgtgtacccggggctagctctttaccaggctacagcggggtatgtgagtcccgcagtgcacagaaccgatttgaacagtctgcaaggaagtatagaagggaggttctccttggccttcaaactcatgccaaaatcaatgaccaatctgagttgctcggagatgagagcagcaggtcatggtgttgaagctcagtttcagctccccgtttctgttgatgacttcatgcagagatctcactcaaatgatgaactttttaacagacagactttgcaaagcttcatcgtccctcaatcccaggatggtatagaagtttacttttatcagtcttaacgcctaatttccatctttgttctttcatagcatttagaaaggattcagattgaagaatatcggagttcatagttcaagtggtgttaacttactcagaagttttgattaacagtagatccttcctttggtgcaggatcaatgaaacagctgaaaaaacggaggaagagtgattctagatgcaaaccactaccaccttcaaaacggctgaggttagaagcacagagagttccaaggaacgagttcaggagattgcagataaaaaaggaatcaaactaagattctgcaatctcaaggagtgcgagaatac

SEQ ID NO: 43143 - DNA, 522 bp, Arabidopsis thaliana columbia
tgacgaaaaaaatcgttcggattccctttgaattccctcgggaaagatgtgatcacaaaccagctacttctgattttaccatcatcgatatagatttcccaaaataagttccacttttgaattgtttttgaatgaggccagtgatgtaataaaaatatttgctactcttgatgaagaactttgttctttcagttgatgattggtttaccaccaagatctctgaggccttagttttctactgtttatctaccaactcatatttgatactcattattaaattagttcatccataaactctccaggatatattagttcaacctaaattaatcttagatgagcctaaacattttaaacaatagcaaataaactctgtttcagtaactctagccaaaccagtcagacttcgagcacggcagaggcgagctaacccaaaaaaaacatgattagttccaaaattcttaacataaccggaagtaaatagaccaccaggtccaaaaaaagagcatactcgctggtacatat

SEQ ID NO: 43144 - DNA, 438 bp, Arabidopsis thaliana columbia
tcaagttaatattaaatgtaaatgaactaatgtttgaatgtaatgtatcagatgaagggagttcacatagagaaagtgagatacatgaagatgagtggaacatcggcgacaaaggtggctatgaaactcgagtgttcaggggagagttttccatgttccaaccttttcatgagagacattgacttatctccggccgatgatattgagtctgtctcctctctctgctctttggctcacagctccgcacaatgcatcattcgacctttatcctgtttctaactattttagtactttgtaaagttttggggtgtaaattgaattactatgtaaatgcaggggtcatattggaataaacaacaatgttttagttagaaggcctgtataacaatgcaggcccaaacaacaagatatgagcccaatagtcactgaaattgtctt

SEQ ID NO: 43145 - DNA, 445 bp, Arabidopsis thaliana columbia
tggtaatactgattctaggtaaactaactggattcattaggtaatactgattttaggaaaaattagaagggcaggaaatcgcggttaagagtctctcacaagcttctggtcaaggacttgaagaactactgattcattggtaatactgaatttaggaaaaatttcaagggcaggaaatcgcaattaagaggctctcacaagctggtcaaggacttgaaaaacttgtgaataaagttgtcatgaattatgaaccctatgtttgcaacaaagaattctagttaggttagatggatgtttcaatgggtactagagctagcgtcctgagaccataaaaataaaagcttcatgaatctgaacaaatcaaatcatacctacttattaagccacacgtatactaaatgcaaggtgctggatgttttaggctcctataattagattataatgt

SEQ ID NO: 43146 - DNA, 580 bp, Arabidopsis thaliana columbia
cctgtatacaaaaattcaattcaccatgatttcgaattgagaaaaaacagtaagattttaaggtttggagagactggtttacctggcctgaagcaaatgggggaggaggaaggttttgaggaaggagaagagagtgaaggagaagcccagattgcagaagaagatgttccaagaagagacgccatttttgtgtgagcttagagtttactcagcttctgattggcttttttcaccttagaatttttttgtttccattggcttatgtttgtttctgtggtcaggataaggagatagatttcctcctctatctcctccttttttttatttataaatcaaaaatgatatagaaaataaaatagccgtaccaaaaaaaaaggcgagcttctatatatatataccaaacataagaatataaaggcccaagtcaaatcattcggagcccagctaatttcaaaatctccccccttcgagttccgtcggcgattttctctccggtgtcgtcgtcttgttgccgttgaacgtttatcgttagcgcctactacatatacaactgcaaagcgattcaatcggtaagaattta

SEQ ID NO: 43147 - DNA, 541 bp, Arabidopsis thaliana columbia
tatcttataaagatcatgacacaaagctactagattttgaaaaccctaatcaaggcctccggattattaaaaaaaaaaaacgaggccagagatttgatttccaaaacaaaaaggtaaatacaaactaagaaaaccctaaagattcaatttttacttcgctgattcgacttcacagaaggaaactccacgcgtgtagcaaaatcaatccaaatcaacgaatcctggaaaagttcctgcagattcaaggaacgagaacgtccgtgtgatcgccgagctgagaatggcgccggtgatgtctccaaatctccttctccgaggaatcttcgcagctacaaaacgacaacttgtaacaaagaaacggatgatcgggcttcactccataagatccggtagctccaagctccgatttgggggatcaaaatcgagaaacctttcggggggaaattgaaaaggatctagagagtaatcataggaatcgagtagagagcggtgtcttcacgagaaagaagatagatcgatcttgaaatctagggtttggaca

SEQ ID NO: 43148 - DNA, 593 bp, Arabidopsis thaliana columbia
gtcgacatcccttcgatgatataaatataacccttatgttttcacgtacggcatgcatttcatcatagttatgtgattttcttttaatcagaaaaattgtctctatacagaacatgctaacataaattaagtagacaatttggatttatatattcaaaaagtagaataatcatggagccatatacaatttaagatggtgcaaaaatggcgagttaaaccaaaaccaaaatgtgattggtcaatacaagacatagtgatcattagatcgcatttcaagattgaacatataataaaacaaatattcagctaagaaaagctagtgattgatccagaacttaataagcatcaaacaaatttggcattggcaaccattttcgggagaaccatgaccactacagcttcccttcccaccggtccaaagatctctcctgcgatagacattagccaaatggatgacagatccagaccgtagcccacctaagacagaagaccacttccaagaaagtgactgcatgggccttgattagatacatctccacagtattgttatatgatgtttgtctgagccagccattggtctcatgatattttta

SEQ ID NO: 43149 - DNA, 527 bp, Arabidopsis thaliana columbia
ttcacaaatttttgtcctatagtttgaggtaaaaaacttttatctcgatattgtttacgctttgactctctttataagttataaataaaatggtgtactttccgttcaattcatcgggcaacccatagtctagacttgacaattatagaaccattataacttgatgttttctcacatcatgttttttgcagtgaacttcttaacccatagtccaagtttagcttggctaatgagaagatgtaatctcgtgtgaaaaacgcgatgcgtggtatcaccatgttaatatggtcatataatatagccaagataagaatgaattattggttgtatgatgaattgaacataacgctccatatgtaattgagtagataattcacaaagtttgcttttgtaatttacaaaggtacctctcgtgggtagtgggtagtgggtagtattgcttgaggtaggttctcatctcaatgttacgccttcactctctactcacatcattctaggttattgttttctatcatttgcatgttttt

SEQ ID NO: 43150 - DNA, 401 bp, Arabidopsis thaliana columbia
attgcttacattttgtaaaatgtttatacataagagttggtatatgttgtaaccgaagttttaagctgatgattagaattatacatgatgggtttataactttatatatgtgctagaaattttccataagctttatcaacactgattaattaacatatacctaattaatgtagttggattatctatgctcgcaaaccgtgatactattgctatcctcttacaaacatttgattggaaattaaaacatacgtggaataaatgagttacactatagagaaagggacgctatcgacatctgaattctaatggctacagggagttaccttgacatcgtttcgcttctaaaagttttggcttagatatgaccactttcgcaagtcaagtattttcctatcatatta

SEQ ID NO: 43151 - DNA, 455 bp, Arabidopsis thaliana columbia
tgtatcacctactaatttataatatttgaaatcacatacaaacatagtaacgtgtttttatccacttgaagatttgtagttgtgcattacaaactcacagaagaggatttcgacaacatttattatgagttaatatgatgcatagtgatggtgggtgtgaatatataaagtccgtatcaatgtaatttttttttatcgggatgggtaacatttaggggtaagatattcgcaggatagagtaacaaatcaaaatgagaaaggctttctattgatcagtactagattagaagatgaagaaaagagataatcagaatgaaaaactgaataactcaacattgttagtttgataccaaaaaaggatcaaaatgaataagaatacgatgtgaaaggtaaatagtataaaaatgattagtgattcctcaatatgaggatttatgctcatattctagcactga

SEQ ID NO: 43152 - DNA, 504 bp, Arabidopsis thaliana columbia
gatgtctatccatattgcatctatcccatatttcccaccctatacatacatattatttgaagtaatagtgatgtcttagtataaaagttttgatataaactatatgattttttcgttttttgttaatagaaataaattaaattgataggtaatgaaattgtcgacgaacctacacggctacacctacgtagtccaagatcaaccttttatcatggcttaccaacaagatactttagatttatagtggttattggaccagaagacagcattagaaaaacttttagtttttcctaaacacctctttgagaattgaaaatcatatagcaaaaagcttgtactgttatggataactgataaggaacatatttaatcaagaatcaaaacgactttccatgttgatatatagaacttcataaacatgtttaacatttcttacgccaaacgaaacgctaaatatttatttaaattgctagcctggtaggcgcgtaatagagagtgctatgt

SEQ ID NO: 43153 - DNA, 496 bp, Arabidopsis thaliana columbia
cataaactcataaacagagaataacatcatatatgcatgaatcaatagagtccctaaaaacaggagaaaacccccccaaaaaacaaaacacatatagagaatcctccacggatcagaggagaacaaaaagtcactctcagtgaattattgaagttaatgtaaacaagaactcaacttcttgcattacaataacaaaactatgagtagaatctggtaacgatatctatcaaagttggtaactttttcagtcacggggattgtcgtataaacgaaatcaaaacctaatccaactgaaggttagcaacaagaagaggagagataagtaattatgcttgaaattagcttttagcagactaaatttggtgtaattaagccaaaaatggagtaaagaaacagagcaaataaagacagaacgaataaagagagagagaaagagcttacggagagagagataggtagagtccaaattggaagaagagtctaagaaaaagcttta

SEQ ID NO: 43154 - DNA, 569 bp, Arabidopsis thaliana columbia
ggtcaatgatatgattagagagcctaattaaataagggacaggtattggaagttgaccaagtaaaaataagtatattaaaagtcaaataaaacatatattccaacatcaacatcagcatccagtgagaaacgttccttctgaaatgtttttatttgcaaaaaagaaagataaattgtcgaaagtgtttagggtttatgtttgggtgtttacagcaaacaacggtcccacgtataaacgtgactggtttgcgcgtttgaactgatgtcatgactgaccacaaatagatattcgccacgtgtattattacagataagtcatgacggccatgttgtgggtccctctgtagctgtttattattcattcaccactttgttgctgtttaatttggcgctgcccgagccgacaaccaaaagatttttctctttttctgttgtcttaatgatgtcataccaaataatcccagcattgtagatttgtactaatatttttttcttagttcgaccattttataccctaaaatatagacacaaaattgtgaatgttgttaatatgttcttttgtagtaaga

SEQ ID NO: 43155 - DNA, 467 bp, Arabidopsis thaliana columbia
taacactaataatcataaatccataatttggaacgtggaagaacatcgtttcatgtgaatccgcgtttgtcctacacgcgcttccttgtactgtacatcaaaccgatcaaagtcagaacgtaataatagttttttatatcgacattaccggttcactcacgtggacttgccatgcaagtcaaaccttatatataactctcattatcgagtactaatccatatcttaattcattacattcatttttccctctatcttttcttttatcttaaacacaaataataagaatctaagatactttgatcttttaatcaagaaaatacacacaaactcctagggtttttcgtggtggaagatttcttcgtctttatactaaaaattatgcagttcgtgaatgtttcccactattcggcctcgtagtcataagcttagccggaaaggctacggtagacgctgcgacgggattgaa

SEQ ID NO: 43156 - DNA, 605 bp, Arabidopsis thaliana columbia
gatagttcgctatcaataacttttaatggcgttaatcgtatgctatctatgtctacatttgttgtagtgattgcagtgaagagatcccagaacgtatggatttatcaatggcatgggagagatgaagggctgtgtgatatcatcggagatgcttacgcctgttttgctctttctaaagtgatacaagtcaaagatttcgtcttcaaactcttttggagtgccaagaaaatataaataagtaaacattttacactatacaaaatgtttaaagtagcaaaatggtttggagtggccaattcctccttgtaacattttgcacccacttaattttttgttgggtcacccttacatgggaggttgaatatatgctatatatattctaaatatattctgagcaaatttctgctcgcatgactcttctaagacctgattatggcccagtttgtttccttgtcgctctttccggcgacacggaccagcgactatgggcagcgaccatgttttctgtttgtttgttaacagtcgttgaaagtgcgctatgttgttcgtttattggtccaagcacagtcgctaaaaagtgtcgtatgttgtcatttgttggcgca

SEQ ID NO: 43157 - DNA, 476 bp, Arabidopsis thaliana columbia
gatccctaggatcaaattttataataatgtataacttaaagtcatctatgtatttctatgaacaaaaaatgtaaaacagaaagcaaagaaataccaagtagtacaatataccaccataataacatctaaagtaaatatgtttgtacacaaaaatttgataccaaaagtaagagagatcaaatgaagagtatcctccatggcgctaaagagacacataatgttatccaccacaacgatgatcctcttagatttaatcctgctcaatttaagacaaaactcaaaatcttcaataagtaatatctttattaaagagatactatcttgttttaacgagtcaaaccttgattcttgctgctatcaggcagagcaggtggagaagacgatgatgagtttgacaaaggaatcccaagattcaaacagtccattccaagtgcacctatcaaacacaaacaatctcaatttttgagtcttggttt

SEQ ID NO: 43158 - DNA, 582 bp, Arabidopsis thaliana columbia
ttgatcagaactatgttgatctcattaatatgtgttaactaagcactgattagcaaccttgtgtgccaatacttgatatgactacaagcagagttgttttggcacaactttaaacgtttagagtgtctgtaatggtcttgtttgaagctattgatataaagccgtataacctcgaacatttagctatgttacaatattaaatgccataattttgaaactaccggtatgcttaaaaagtttaacctttgattttctgtgttgttgagcctctttaacaacagtcttctaacatttttcttgtttccagtttgattgatacataccaagaaacttccattggaaatcaatctttggatattactagtcttggtgaagagggaaccggtgcatatgttgtcagttccgttagaaaggctaagaaagagtctagaagatctcgagccaaaaagaaattactcaattcgtacacaggtttgcacacttattgcatatatgtagttttgaatttcacagctgcagttgtccgtcgttaaaccttttagatcttctgtaacagggctgaaatgaaggtgtcctgaagat

SEQ ID NO: 43159 - DNA, 343 bp, Arabidopsis thaliana columbia
aataaagagtcccagatggacaagcgcagctcttcggcaaaggtccgcacgttcagctgcacggacttgatatcctcaatgacctgagcggggacagtgcagacgatctcgacaatcagctcctaggacagaaagaagctaacggggcaccatttgtcgaactattctgaaatacgagcgcagtgctatatcgccattctgccggatgtctacgatcacaatgcgcacgatactagggacgtcaagggataggttgtaggaggcgccacagcaagggaaggcgctattgagggagatgggcatttagaaaaaggaaggatagaagagattccaggcacgatac

SEQ ID NO: 43160 - DNA, 489 bp, Arabidopsis thaliana columbia
cttcattgtcgtctttgtcacaaagactttgtgtgccactaccactaattacgcaacctttttcactggttagtgaataccataaattcttgcggttgaacacaatatctctacaaatattaacagtcaatttagcctctgatttcacgaattagcaattgctcgagtcatatttgcatgtaaggaacaaacctcgaggttgaactcccgctttcttttttcacattttaaaatataagcgattgttttaggttttttttttttttttttttttaaaattaaaaggagagtgttcgagggcttgcaagcaatgtctaatgggttttcgcaagaaagagaggctgtaaggttgtaaccaaaacgaaggaaaggaagactgttctataatgaaacgagcaccaaaaaaaaagaaagacatgatgtgtaaatagctagagagtgataggtaccatgtaagtatcataagtggcttggttttgttagaattaa

SEQ ID NO: 43161 - DNA, 286 bp, Arabidopsis thaliana columbia
ttctcagaagatcaaggtcggtcgaggtacatgctcaatgagataagttcgcaggccggcatgctaacacgttgggcttagtgggtagacttggacacattatttgtgccggcagtcttagcagagtagcctgtcgcagtcttacaaatagacatgcctattgcggattggcctgtttggcacctctattgcgtttatccaatgttttatgttgatgaagaaactctttggcaattagatattccccctagagggaaatcctggtcatccaacattagagacaagc

SEQ ID NO: 43162 - DNA, 502 bp, Arabidopsis thaliana columbia
gtttagaagtatgaaaccgaattgagctggatattgtccaacagaataaattaaccaaaattcaataatttttaatctttaagttaaatatatagacaaaattaatatatactaaaaaatttcatatgttaaataaaactgattaattaattttattttatctcataattctttaatccaaaaccgaattaaaccaaaccgatataaaatttgattctgtatttccaaaaatacaaaacctgaaaaattcacatttttatttttattatatttctatttgtttgcctcaaataaagcctctcttgcctccaatatatctctgaatgctcgtcttaaattaaaaattcctatattctatctgtttctaaataaaaacatttgttagagttttcacatatattaagaaaatatattaaaagctgactataaatatatatatactcccaatattttctgtgatgttcagatataaattatttaaaccggtgatattctaatattt

SEQ ID NO: 43163 - DNA, 485 bp, Arabidopsis thaliana columbia
tatatcaaattatgttttcagcaaaatctatagtatttagagtcggacgtacaaatgtgtaagtacctgaagaaaggtattgataactatagacttatagtcgactccgagtatatccaaatatcataatcccaagaacgaatttttcatttcaaccacatgatatcacattcacatcttagattaaaatgttgattaatgcagaaacattatattaccagattaaaatgttgtccaccgtgagtccgtgactcaaaaaaaaagctagcagcctttaacctcagatcttgtgcggatactatagatttacaacaatttttgagaggctgcgcaataattggagccccaacggtggagcgaaagtggtcgaatcgcaggtctttcccatattcatgtcgtcaatgaagcacagacgattttgagaatgtcagacataatctctagaagtgatatatacaatgacgaatagtggtccgtcagaaaag

SEQ ID NO: 43164 - DNA, 1503 bp, Arabidopsis thaliana columbia
gaataaacaattgtaagggcttttcctcgaatatacttgtcatagctctacatatacaaagaagtgagctccataagggcctctgttactaaaattttcacataagagaccttgacatgccataaacgtgattcaacatgagtctgatcgtatcaatataagaatacaatacctgaggagaagatacgactgcatgcaagcagggaaacaacacaggtaccagcgtaggaacctctttgtcatccaattcaccagagagaagagccaaacacctcaaagctccatgaactgttgaatatggaaataaattcagcctcaggaaacctcgtaactattctcatgaaagagtacagaaatgggtagtaaaaaaagaatttgtctctagagcaaacaaaattgatcgaaaatatacctccattagtgttacttggatcgctaatcaacttcaggagaaaaggaactagctcaggccactcttctggccaatcatatgtggcaattgacgatatgtccatactaatagccgtacagatttttctatgagagtcatcaagtgagcccaacagttgtcctcgaataagagcctaataacataaccaaaataacttcctaaactatctcagctggaaatccaaaacaaacaataaaagaagacagtgaaagtaccttttcctcacttgagacaagaggatattcaaaagcctcctcgttctctcgccaatgctttttaatgaactgctttaacagtaccgcagctaagtaacagtaggttaagaacttcacaagccaaaaaaagggaaaacactcattatatcaataaacaagctccaggggataacaaatcaatgacatgaaaaggatatttgacgcaatcccaaagagaggtctttgttagcagcaactctgcacaatgcactcccaaaccctacaagaaacaaacatcttttgggtaaaatctaactacaaaaaagaatctatagaagagaagcaactagctcgaaagtaacccaaacgatttaagcaacggacctggttgaagagaagcctgattgagagaggtctcagcgaaagaacgaacgttctggttagggtcaagacttgctgataagcaaccgagcagccattgctgatcttggtccaccaccattgagagattaatcgatggaatccaattccagatgggatcaagaaattgagtgtttgaaaattgttttagcttccctcaattttcaaattcccgcttgtccctttggtataggaggatgtcggagagacagtagaaaccaaatggagtttaagtagttcacctctcctagattttgttgtcgagaaaaccctttatagacagaggttgcagaagaaagaagcaatcaaataaccaaaataaacaattaccaaaccggattttaaccgtagatttaaattggtataaatccggcttagtgtaatttcatcaatcgaacagtttatctccagaatcaaagataaacggaggagaagaga

SEQ ID NO: 43165 - DNA, 596 bp, Arabidopsis thaliana columbia
tcttcttcttcttcgtcttcttcttccaattctccaaacgccatcacgcctttggaaaaaggctgctcttttttgtttgtccttcttgactcttaaattaaattttgctcataatttccaaatttgtgctaaaaactttcgactttctagatcaatccgattcccaaatctcgttattcactcccgcccccaacgagcgattctagggtttctctctgtgtgttttgggttgctgaatcaccttgttactatcatcgatttcatctgaagttgagatttttaaaggtatgttgatgatttcgtacacgactgattccactttttttttgttgttgttattgttcagtttttgttctcctgttagaaattgagcaagtagttgaattaatcgtatatgttcaatggtgatgggtactgtgtatggatcaaaactgaagagtcttcttatagctgactagtgatgatgattttgtaatctatctcaattgagtgtggccttttgattttgatcttcttcttccgactattttccttttgatgagtcaatggaggattttgggagcttatcagctgttattcgatgtggatattggtga

SEQ ID NO: 43166 - DNA, 564 bp, Arabidopsis thaliana columbia
  unsure (1)..(564): unsure at all n locations
nnnnnnnnnnnnnnnnnnnnnnnctaaagctttagaaatagaagagcagtcgaaggtaaatgaagggagggaaaggtaggagagagcgcagacgatggggaggatgggagggtgaggtttaggttgaggttgagaaagccttaggaaggggagatccaggaaaggctgcaatcaggttgaattggagacggtgcctgaggccgcctagtcgagctttagtcccactcactaatttagcacttacgggcccggtacaagcggtctccatattgatcgtcccttagccagtcagcgacgccgagcagccgcgataaatgaaccatccaggatatcagtttgtaccgctggcttggccttgttaattattattgacattatactaatattacttgctaacagcaaagtcaacagctgaacccgacgccggcttgatggtttgccgggcataccatgcggcattattgaaaccacagtgtcccgtctgggtcagcccagcccactattgtgtgtgtgtggaactgtgggcagtctggacgtcattgacggctctgcagggagtatggt

SEQ ID NO: 43167 - DNA, 585 bp, Arabidopsis thaliana columbia
tcattaatgaaacatttttagaaaaaactattgaaaaagatttaagcttatacatgtttgaatgtctgctagagttcatgcttgttatcatggagccactttcccgtgacacacacaatcattccagatccaattttgaaacatatttaacatgtattcttgagaaaaaatatcgtatgacacattgtcgcctattaaaaagatgtcgtttttgaaaactcaaaaacaattatcttgtatggtgattgtgtgccctttgaattggtcatttttccagtttcagtagtcctaaatatgcaacgtagttgtgacttcaagtgttttagccactactcactaaactaaaacatctcgcttaggattctaatattgtgtgattgtgaaatcatatttactattatttgttactcttacacattagaaattatatgatttttgttataaaaatagtgtcacaaaacagtcacactttgtgacaatgttgcgacgacgttgcaactctcgcaattttattcatatatcaccaatagaaaattttaaatatgttaagtcttaaggttcgacaacgatttgaagtcatagatg

SEQ ID NO: 43168 - DNA, 315 bp, Arabidopsis thaliana columbia
aaagattactagattataaacttcagccaacccagtttatttctcgagggaacgaacaatacaataggcttaactgtaccaatcttattacaagaaccagacagtaagggtaaggggcgccaccggcccagataggacaagacgccgcaaccaaaaaccccagtctcgaggtaagtgcaagaaatgtctcaaacttagggatttagggatagcaagacatacacgcacacgaccgacgaggcgggacacattcccgaagattcagcatagaaaaacccttcaaatattaaagatctgcagatatgaaaggcagga

SEQ ID NO: 43169 - DNA, 338 bp, Arabidopsis thaliana columbia
agatccaattagtctgcgatgattatatagactgaagaagaaacaattagcatccatctacggtggaatttgatattgattagccacaactatcgtgtatgcaacaacaagaagaaacgtataagaagagcatgacttacctgtagacgagcgcgatgaattcgtcgagtgctcgaagttgttagctatagctatgctcagtcatatgtagcgcgttgatagaccccacagaagagatactgcatagctatagcacacggagacaacacatcaggagaggctctgacatgtcttacctctagcatcgaagcttttgttttcacataatatacgttagt

SEQ ID NO: 43170 - DNA, 527 bp, Arabidopsis thaliana columbia
ccaaaagaatcaaaaacttatgacctttttgctaaactttcaaattggttaatggttaagaggaaagcattggttacgacttaggagttttaaacaaaacagggaaagcaaaatagatagatgcaaagtaatactcaaagatccgagttattatgcataccagatagaaaagacataaaaacaaccagaaacctttgaataaaagagtcaaatgcgatcttaggcagagcagaccgagtagaagaaggctacaaggatctttgcacgcagagaagttggagacccataaaaagcaacacaatcatttcaaactcgacccgttcagcagcttagcattcaacgctagctcagcgttccgtgcagctgataagcttgaccaaagccattttgtaggtacagctttaagtagctgttgtgatgcgttttgaggctgtgctaagaaaacagtgaaatttagacatctcataaggtgagcagccaattcgaactcactgtgacccgagaggtctcccacgatgagcatcaag

SEQ ID NO: 43171 - DNA, 519 bp, Arabidopsis thaliana columbia
aaaacatcttagtaattatgttcccataatcccaatttaacattgtagttcatggtaatctaaattgaagtacgagataatttaggacgtattactggaacagtgaagtaacataactaaacgttaaaagactactaaaacacttgagcaatgggatcataattactgttatttaagaattagttgagataattgcagtttgcgctaacccgtttttcttttccggtttagatcataaattacagaagaatgtttaatgacataataacttaactcgagggaaaactaaatcccttgggagttttctccatcacgcctgactaaagcaaaaatgtctctttgtgtttaaaacttacaattcccattcggactttctcgatttttccaaatatcattaaaatacttttttagttcacaaataaatcctatattttatttgcattgcatcgtcgctttcgaatttcagttccagatatttgaattcccatggctatatgcaaattttaaccagtagatgtt

SEQ ID NO: 43172 - DNA, 433 bp, Arabidopsis thaliana columbia
agatatgagtttggccgagacaggacgatggttataggagctgagtgcttgtgtttctctctttgagagtttgagaatctctacgcggtgtttggtcacagtaacaccaagtcgccggagaaagttgtggttgaaaagggcgatgtcttcaccctggagcttcttttgggcgaatatgagtccgtactcgtagcttagggtcggatcaaggtcggttttagacagccatgagaaccaatccatcgtgtgtgtgtgtgtgtgtgtatctgatgttctgtgagtttggaggacatttgtatatatatgtgtgtttgcgcaatttatgggttatcttttggactaaatgaatttatgggtgcatacatatacatacatgaacatttttctaacctgtaaataacacttaaattgataacattttagatttgttttg

SEQ ID NO: 43173 - DNA, 595 bp, Arabidopsis thaliana columbia
ttaaagatgattgtttcattgttaaggaatcgagattagtttaattggttggaacttggaagagagtattcatcagctttcttttgctgaatcttaattcgaatgcaacatgactagcttatatttgataaatattttaaattgttaacatctagctttaattctagtccaaaatttctctatataattttcatgtgttgaaagtaggcaaagctctatttgttttatattcataaaggatatagaaaaagctttaaatttgtcaatttagaatcatatgtcttactcctcccacgcagcattttggatttggtacttttcttcacctcgaagatgttggctttccatttcctttatttgtttgttttcaatcttctttttactttagattttgatgatttagcgacatttcttaagcaacgacatacataaatgaaaagtttcatttctttataacttagtgttgtcaattgatggttgatattgatatggtacaagcaccatcttcatgttcaattattctttttaccatacatacacttgaacgtaattttttgattggttctcaatgcaaaaagaagatagttttaaaata

SEQ ID NO: 43174 - DNA, 571 bp, Arabidopsis thaliana columbia
tctctgaatccttctgttgcactcttctaaattgtgatcaatcttgtagcacacgtcacaccacttcttagactttgatttaagcctcaaattcttcaacagtcgaagaaaaacttcctcattcactgattcaaaatcatatccattaagaaagaaatactgacaaagactcgcagaagtcatcccatgcacattcatgagctcctccatcattgaatgtatatcaccatacgaatcagacatcgaagcaaacaccttcttacaaatctcgtattcggatttctcaactttcaaaacacgcaacttaccaactatttccgtaatcctatctatgtatgaatctagagattcattttcttctcttttgatttcttcgaattgcttctctaacctacgtagcttcgcttgttcattgttacctttttcgagcgaatcccaaaggtccttagccgaagaagccgagagagtcttcctgaaagcagaatctgtgagagaagaagattgcaagatctggagagctttcatgtcttttacagcgagatctctccatcttgaaagttcttcgggttga

SEQ ID NO: 43175 - DNA, 523 bp, Arabidopsis thaliana columbia
ggtcgttatatgattttatgtacaacatgaacataatctgcaaaaaagtgatctcaatgaaaaggtttccaatagattcttaaaaaaagtagaaactaacaaactatatgaacatggaaaagacatgaattaagaagagtacaaagtaaatatagaggtatggttcatagtttgcgaaaaaagcatagaagaatagttttatagtgaagtatagaagagtgataaggttttatttagatttttctaaaagtttatatagattttgtatataaaccttttgtatagatttttctaatttttctgtaaagctaaatcttgaaaagcatttgttttaaatattattggtttgttaggcattaataaaaaaaaatattagaatattttataagtcaatttatgacacaacccgacccattttttaaaaaaaatataattcaatattcccaaaaatatctaattaaaccgaccaataaaataacaattaaaccgcaagtcaaaaatactattttatgaataaataaat

SEQ ID NO: 43176 - DNA, 534 bp, Arabidopsis thaliana columbia
  unsure (1)..(534): unsure at all n locations
ggtcattaggcttaatttaggtcaataggatatgatttaatgaggtttcgttggttaattattgactattttaattttagaaacataaatacttatgataagtaacttatctattgtggacttttttataattttcaatcaaaccaaacactgaactgtaattagttgggtgtcaaaacaaatattgagtgggttcaaattactaaggccataaacttttaaagaaaaatcaaattttatggtgggtcagttgaaccccctttcttgtacataggtccgccaatgataatataccatcaactgtatcatgtgaagattgtttcccgagttgattgatccaaagaagagctgtttggactccttaacattactagtgcggccacactctcggggtacaaaagaagttttgcagttgagtggtcagaagaccaaaagatacaagacttctttcaaacatttgcatgatgcatgatcaggatatagaacagatanaattaatttaaatataatttcccgatcatgatatgaactgaa

SEQ ID NO: 43177 - DNA, 585 bp, Arabidopsis thaliana columbia
gtattaaccaatggcttgttgtaacacatcacgagcataatattccatccaaatgcatgttctatgaggtttttgttttttttgaggttgttatatttgtattcaaacagccacaacacatataatatacacatgtcctttcaatattctgttatcaatatgttttaaagttatttataagattccttatttagtggagtactagttgaaaataactaaatacttaacgaaatatatggtgattaagaaaaaagagttgttctagggttcgatgtatgtacttggtaggttatattgctggaaaaatcaataaaaaatgaaaccatccaattataagatcagctaaatttatacatggtgttttactgttttttcagatgtggataactttaaatttatgaaagatacttttctagaaatcaaaattaattaatgttttgttgttgtagatgagatttctttactatgatgtaatgaattaatgaattatatcgttactacctgctaccacccatcattagttttctcgagtatagttttgagatgtacaatagtatagatttttttatgtccgaaaaatatata

SEQ ID NO: 43178 - DNA, 855 bp, Arabidopsis thaliana columbia
attctacatgaaatcattttcagttcaattttggcttcatggtgcttaaacattgattttcctagatttactttacgttgaagaactaattatttttgtttttaatatcacgtgggtgacttctcaaagaaaatgtcaaaaatctttgtaagaaataaacaaaatttctttttttaagaaaaatatcatagactttacttttatagaatttccattgttcttaaaatcgattactttgttctttttttgggtccaaactttaaattgattacactaatagtattaaacttttttttgttggttactaaaaatcaattgaaaccgatagtggcaaaagtccatatatctttctctcatctactcgatttctgaatcgcgaacgcagcgagcgatccggaatcgagagagagagctaccaatttttccaacttgttcggttccttataaagctgtttactttcccttgcgaattctctctctctctactataaagcaatacccttttctttcttttttggtaacccccaaaccctactttgtccagcgagaaaggaagaggggtttcgtctgattccgctaaatctctagtctttatctaaagatcatggattccgatgatgatatgcacgatatggactcggtagattatgattattacagcggcggcacctatgatgacaacgatagtgatgaaactgatttcgggtttggtgaggctgacacgacgatgccgccatcatcgcctcctatcgctctaaggtggcttcgattttagtgtcttgttttgggctgcttttgcagagatggcgaatgttggaagctgttttttgtttgtctgtttggtttggttaatat

SEQ ID NO: 43179 - DNA, 558 bp, Arabidopsis thaliana columbia
aaaaaaagggacagggagttacaggtgaagtgttcctggtcaaattgaaacttggaaataataaagttcttgaaatagaaaggtttatttttaattgaaaacgatatttgagaatcacacatcttaagttgcctaacaatctacgcatcttcttcttttctctatcctattaagaaaactaaaaatagcattttctgatttaaaatatgatttgatagttgtattagatttaaacgcgaaacctcatgtatatacataataatatatttaagaaaagtcagataacagattttctttttctttatagtaggtaaaactcttgaatttcaatacaaataattgttctaaagaagaacttgatacgaaaaaattgaccaattattggtcaatatattacccagaataaattattttagtgttcttatttctcaaatgaaaactagtatatagagaggagcttcgttgctcaaacactttcctctctcttaaaaacctcaactttcttctctcttctcaaaaacccttccctcttcgtcgtcaaacaacaacaaacacaac

SEQ ID NO: 43180 - DNA, 571 bp, Arabidopsis thaliana columbia
taaattgatttttttttgaggaatattaattaaattgataaaaagtagaatagttcatcaattttaactataaactttaatatggtgtcgcaccgtggaattggtgctcattgctacttgattagactatttttctaatagaatattagtataatctgactttgacattgtgcaaatattcatgaatttagctcacattatgtatataatatagaaatatatatttgtatttgtcaacaatattttattttcttgtaagccagaagaattcaaaccaaagtccaaaactcaaaatagttcttcaaacatgtaaacaactttctgaattttgcggtctattttgttcttaaaactaaaacatttatttatatcttatatggtggtgcatatggaaaatttaaattaattagttatgtcactaattatttctgttattttgatggaccagtttacgtacgcgtgtaaataaatatgtccgataaagaaaaaaataacgagtgacttattgaaaaatagtttctttttttttttaactatggaaaaatagtttattaattagtatcatatgaat

SEQ ID NO: 43181 - DNA, 484 bp, Arabidopsis thaliana columbia
aattggttacgagacagtatagagggaacttcataaagagtaagaaaactcgtttggcttagcttagttgcttttccttttagtcattcctactgatgcttgtaagtgaaagtgagaccaagtcgccaaaaagtccatcaaacttgttgatgattagcctagtttcttagtcgttgtcataggcattttgtcaggcaagtatagttttgatgatggggccaaacttagcttggttctaggcccatattcattaggtaagttttcaactcttcaatgaacttaattagggagagagagagacgtaggaactgagaatacgagcgatagacaatactctcctgtgtgccaagattaattgtagtttggtctctagcaatgggattagccatggtggactcagattgtagttatctctcttgtcacatcatcagcctgtattagaaggccataagaagccacataaagtgtcattagaattcgatta

SEQ ID NO: 43182 - DNA, 503 bp, Arabidopsis thaliana columbia
gagagagaatacgctcttcttctcgccgtccggtggttatccggctacatgtccggcgtcttccgtttttctcaacggtgatggccggctttcgtctagcaccgactggcttcctaagtagcggtggctagcttttgcccggcatcgaccggctaacctagcggccatggcggattctgtttttgctttaatttttcaattatgtttttaatttgctaataatctcatcggatctacgattagggatgttgatctgccatatccacggtggttcttctttgtctctgtcctttgagttttactccgatccgaattagtttcttatctcttcaagataaatttcggatccttttcttttgtactctggatttacagaatgatttcaaagagatttcactcttttgttgaaggaaagaagattttcttgtgtcgcttatcatggtcccttaagctgttactttaattggagcttcgatgctttcaattcggtgcaaaacataaga

SEQ ID NO: 43183 - DNA, 645 bp, Arabidopsis thaliana columbia
  unsure (1)..(645): unsure at all n locations
cttgtcaacgtttaattatatgttttatcgcaatacataaatatataccccgtttattaattaattttgcatattcttttgttattctctatttgttttcttagggtttaaggaggaccttggtgctattcatatcgatcaatattcctcagacaaggtaagcaataaaataaaacacgtttaattttcatattttatagactatataataacatgtcatgatttaaattaaatgaattaatttatttatttgttaaaataaataaatcaaattttagtaattgttggtgggaaaaaaatgatgtaatacagattaaaaatagtattgagaatctgatggactatcctggtcccaacgaacctggacgacgttatcctggacgtccacatggaccacatgccccgcgtcctaggatgaagaagaagaacccatagtggagaacaaaatatgtaatatatattgatgatgcaacattctataatatagtggagaaaaatatatgtaatattggttcaatccatccttataatcatcaataaattcgaactagttaatagcccatgattcgataaacacagaatttattttaaatatgattttgaaacactanaatatattgatatgcacgtctagtgatatggtta

SEQ ID NO: 43184 - DNA, 460 bp, Arabidopsis thaliana columbia
ccaccattaccattgccacgcatgatcgtctccatgactccattgttgccattaccacatcgtttccacaatcatggcaaatgcaatatagtggcaaaggtgaaagagatagacagatagtaatgttccgatactaggggtggcttaaataatttttctatcgtaatgttaagatgataggtactattgcatttttggtagatgaagggtaaattatataagattaaaagtttgaggattcttttgcaattttcccatattagaaacgaaacatgttctcttctcaggcccaataacattttttgttaaatctttgattattaaagttaacccatcttggaatcaaacacgaccgttaaaatcagaaaccttggttttggatatagccagccatggtgatcttatctctcgtctcttgttccttctccgttttctcaccgccgattagtctccggcttca

SEQ ID NO: 43185 - DNA, 533 bp, Arabidopsis thaliana columbia
tattttcagattcattcttttgacatcatgaatttctcatgacggaatacaattagcatgttgataccattggaaagtacattttagtaatgaatttaacacgttacctttttgtttgatacaccaatactctttattcctggtcaaccactaataccgtttacatatatgtaagataaatttatcttatacgataaactcagcaaaatcaaacaattaatgaccaaccaaaaagaattagatacacaggttttgaagagttgcaccaacctctgcctaccacattaaacacttgtttcttttgttggtcgaccaattctgaaaaaaaagttttactcatacataaaaagcattagtagacctttttgatatgaagaagaacaacaatactcataccatggcttcctgcttccacccttctgctatggctacaagccaccgcgaggaagactccatcattcttttctcagcatcaaactctcctgatgaattctcctctgcttcctcttccttttcttcttcaacactcccaa

SEQ ID NO: 43186 - DNA, 504 bp, Arabidopsis thaliana columbia
catttcattgtctcgtctctcttcctccgtagccgccgcctcttctccaccaccttcctctccattttcctctccctccttcttcttctcttcttccttttcctctccggtctctggtggtttttcattgccttcaccgctctcctccttcttttcttcctgcgcggccgcgggggcttcaggttccgggtcaggttggggtacgattcgggcttgctttttggtccgacggtagacgtaatccacaagcttctcagcgtccattgtcccagtcactattacttttcccgtggtgtgctctgtcacagttgtttggacccctaaccaacaatattagttagtcctttaagctcaatattaattactactaaaaaaaaatagaaacttcgcaaaatctaattgtcatcaacaaatttagcttaaacatgcatgtgacgtaatgcataacgagatatatagtaacttcttctttttgacatgatatataatgaattcttaggtgac

SEQ ID NO: 43187 - DNA, 505 bp, Arabidopsis thaliana columbia
ggtgtatcgacacgtcatcgcctcttaacataccaaataactctaacctaaagacacacacacctggttgcacacaaaaaaaaaaagacacacacttcttagttcttataaaggaacaaaacttgtaaatagggatatatgtcatgaccaaaaagatattgtataaaagataatttttattcaattttttttttttttttttgatctgttgatttaggttggaatgcagaattgtggtgaattcaacaccatctctcaaatcttttagagataatatagatagatcagagaagatagaaaggaaaaaagatggtgtgacgcgttgaatgctccatggccactgcaagaaaatgtaataacacgttcagaaaatggggatgtaagtaaaaaaaattcggaaaaatgtctgcaaacttatgaatctactcatgatcaaatggaagaagaaaatctcaagaatcttgacattattatcatttgctgacaaattgcatagagaagagca

SEQ ID NO: 43188 - DNA, 574 bp, Arabidopsis thaliana columbia
ttttctttctcttttttgcagtctttactttctggagctgagtttgcctgagacaatgagcttgtaagtttaatgatgtcatgtgcaataattgcctcccccaaagagataaatcagtctctggagtgaagtagtctctttgtatctgtaaagactgaaatctgtaaacaatctgactattcattttaattcaaaaggaataatctctttagtaaactagagttttcacataatttataacaaatgtcactctaaatctatatttttttcaaataataatattgggcaaatactacacaaagtgcttatttgtttctcatcacaatttagtctttttcttttagaagaccatgtgatctgtggaccaaaaatccttttgccaaaaataaaaagattctttctattttattctgagaccaattcaaacttatcagaaaaattacagctctagtttattattgccatgaatttattcctaaatttagtaaaaaaaaatagaaaattctttgaattctcctgttttgcatatcaatggcagacgttgaaactctctctacattttattatagtatat

SEQ ID NO: 43189 - DNA, 507 bp, Arabidopsis thaliana columbia
cggattagaatatgaattaaacatctctaattgtttcaaaatcaatttaactagaaattttttcttaacaaaagtaatagaaacttttttgctttgttgtatttcacaactcgaaattgttataaccaaataaatagattcatattttcttaaaaagacctataggtttgggtcgaagttaaagattaaataaagttttctggtaacattatttcaatactgtcaaataaaaagttgtaaacaaaagtcgcgcgtcatgattctcaatatattggttcatttgatgtttataaatttttaatgtttttgtatacggaaaaataacgtattgtgacaaaaatagcgtatacgaaataaccaggttaattgtttatgggcttgttattttatcataaaaatttaaccacagataaaacagacatgggctccataaaataggcccgaaagacttaacttctttttcttcaaagtgaaaatacccatcacgcgccccagtttatttatttt

SEQ ID NO: 43190 - DNA, 229 bp, Arabidopsis thaliana columbia
cgaagcaatctcaagtaatacagacaggaaagagattctgaccgtgggagggggaggctcaaaccccctggatgtgcttcaagacttgagctatgtttgtgggcacagaagacctcctggaagaagcaggcaaggacagacgttagggtggggaaagcagtggcttagcagaggaatgagtcactgggttaacctgggtcaagccagtcttcctctggagggtccaacc

SEQ ID NO: 43191 - DNA, 397 bp, Arabidopsis thaliana columbia
ctctaacatttctctccgataacttctgcaataatatatgaaatttattttcacatttaccctacgccatatttcttttcgatcattcctaaagaattcacaagtttttctttatctttaatttttactagtgcaaatgtcaaagcggatattttggtgcgtaaaattcgtgtccaaccgcatcatatcacttatgtaaaacaacattccttagaaatgactcttttgagctctaatttatttcggatgacaaaaaaaaacacaatattcctcataaatggttcttttgagttccaattaatttcggataaagtaaaataaaatagaaaggaattacctatggtccatatggcgaaaataatatatatcatcacctgaagaaattgcaggtaaaaag

SEQ ID NO: 43192 - DNA, 829 bp, Arabidopsis thaliana columbia
ctgagtcttcaagcatccatttttttgcaaaaattttcaaatttcttttaataggacaaaaatttatttttgctttagacattatatcttgttgggccggcccaccgtatattaattattgatcgcgaatttggtctaagtatagggactagttaagttgcatttcgagaggaggatagtctatttgctcggattttagcaatcaacatatgaaaatatataatttataaaacacaattgcttgctaaatatgtaactacataagaaaaaattatgtaattactgtgtgtatgaaaagtgttttgatgcaataatatatgaggctaagaagatctgagacagtccgtgaaaggcaaaaaaaaagtgattgagggatgtaaggagaaactgttagaaggttttgaagatggtggaaatgagaagaagtgaatagggagaagacatacgaaaaaacgtagtttgtggtacacacaacgtctttgctaagaaggtttgttgagaaatgtattcacaaactagatcttttgggatggaagtgtaaataggtttatatccctgcgaaagatgagtgatgtcgattatcagtatattcaagtatcggcatacgagattttaggtgtgtcatctcttattcaagaagatgttgctgttttaatttccttcccatgtgcgcataaatatctaggggagtttattgtgtgaaactaagtttgaagaagactaaagaaaacattttggatgacaaaaacttaaaacttcttggcttacatatcactacagtttaatcaattgaagaatctataattgaggtgaagtaaatgtacaatgt

SEQ ID NO: 43193 - DNA, 1061 bp, Arabidopsis thaliana columbia
cgacatcgtatgaaaaaggtttgttaaaacgaaacgttttacagctaacgagaagatagatattagacacaatacgaagccgtttaaaactaaacgcatcgttcaggtagcgagggttaaaaaagctaaaaaagcttcattctatttttttcagtgaaaaacgaaagcgaaaatgaaatctttatccccaaaattttgaaattcaaatccgcgctaacagtctctctctctctctcgctctatctctagagtaggtcgtcggcgatgttttccgtcaaggagaatccgagggggaagacggcgaatgtgaagattgagaatcttttcgttcagatctttgagaggaagaggcgaatcgtcgagcaggttcagcaacaagtagatctctatgaccagcatttagcttccaaatgcctactcgccggagtatctcctccgtcgtggctctggtctccgtctctaccttcccaaacttccggtagttgttaaatctgatttttagtgctcaatttcttgtccgtgatggtaaatgtagatttgtttggctaattagagcaaaattgattagtagtcttagtggctattgagtaatgatgctgcgaagttgtttgatacttaaacgggaaatggattgaaagtttataaagcgtattaccataaatttgatgtcgaattactgtgagaagatggaattgaaagattagaaatggtgttagggttcataatcacactttgatgttgatttttctgtgataagttaaggagcattttgttaaggctagtattaacgtacattgcgtgtatatctgtttcagttacgattgaatagaagagtttctgtttgcgattcttattgtgatgtttgtttatatgtatacagagttaaataaggaggagattatatcagaacttctatttccttcatcaagaccttccatcgtttgtcctagcagtcgtcccttttcataccaacggcctgtcaggtttctagctgacaatgtagtaagacaagacctgacctctgtggtaaataacccgctagaagagcagttgcttgaaga

SEQ ID NO: 43194 - DNA, 573 bp, Arabidopsis thaliana columbia
ctagttagctactctagaactatcactatgttttcgtccactaactaatccgattaagaccattttatccactaactggtcttaatcttttatgaccattttaggattaatcttttgctaattttctctcactatacttaggatatttcattgcttgttaccattgacagcaaaattccagctggagatttcaattgacacgggaaaataatctgaggtttgattccatctctaccccacttttatttgactaaaatattaggatttatgaatgacgaagaaaaaaacaaattattaggtgaaaggaggcaataagaatttgaagataatcattaaatatatattttacctaaattaactcacacgacataccgtgtttagtgcggctaaaacagtgttaagatccggtgaagatgctaatacgcgattcaaagagcgcgtgaccacaaacccaagatcgaacggctcagatctcgcgggaatcatctgaagcgtgtactccacgaccatgaagaacagaagtccggcagcgaacatgcacggtatccaatggtatctcaccacgtagacgat

SEQ ID NO: 43195 - DNA, 1274 bp, Arabidopsis thaliana columbia
cctcctcttcggtgcttaaccgcctcgggatcgatatggatcggttgcatcacggcgatacggaagatcatctctcgcatagctgccatgttcgtgccattattgttgttgttactgttgtttcttttgtcaagaaaaacggaagagtaagctgtgttgggagagatagaagaagggttagtgagtaaaccggaaccgtagcggaaacctggttcgttggtcattgagtgatcggactggtaatgagtggagttaaagagaaaagggtaagtgttgttgtggtcgggagagaagaaagaggaattagggttacaaaactcaggaagcttctccatctgatgcatcatcatgttcattatgtcagaatccatagagaaagatatggagaagctgataaaatgggtatggagagaaactggtgaaaagcttacaagtgaaattttagggttttttcttttggatgattgatgattgatgatgagagaaagagacggtatgtgtgagagaaatggcaatggtactactgtgcccaatcagaactcaagcaatagtatacaacaagaagtggaaggatttatatagcaacttgtggcccatccatcttctttaacttatgctacacatatataataaaaaggaatgtcttcccattttcaactctcacatttatgggcatatatgtatatattcaatttcaaaatttgtcttcttgtctaagtgcaaattccacatgcattcggtcattcggactaacttaccaatgtaatatcatatatcaactattataggttattatataccaaggcaagtaaaatattgaggtggattttattcctcatatttgaacttgtatgatgataaaattcccaaacattaatgttaggaaaaatcatttttataaagccataatattttcgttcggttgcgaatagaagctatgaaaaagtgtgtacacgtaggagttactataagtagaattattgcgtaacataacttggatccaaaaagaaaaacaagtaaaaaaagactaaaagaagtaagaaaaatggttccattaatgagtatcgatgatgaccgtcgataattgaccaatggtttattttatcgcatttatcgaccgtccagatcatgtttgttgtaacacgtggcttacatctattggtgttcagatcactaaaggcaaagaaggcataacgcgttaccgacaaagcaaggttcatgaaccggtcgtctacaagcgacacacgagtatccattttttcaccattattatt

SEQ ID NO: 43196 - DNA, 777 bp, Arabidopsis thaliana columbia
ctatctttctttgattttgatttaatagcaccaatcaaatcggtgttcacttctttcaaagaatctatcttcaggagattattgaaccggtctttacacatctgaagcttaaaccactcggtatgcgtgtgaagcatcgctttgattattttcattaacttcggttcttcgatcccgagcctattaccgacagaaaccttaaaaaagaatggcaaaaacaaacaccagttgtgtgttccatctttcatctgagacaaaaccagaagaagagatcaaaactaaaaacattgttacctgtagcgtatttgccagatcattcaaaggcaaatctttcccaggtgcggttccgtcgggttggagtaaaactaacaaagtctccttcaatgtcttcagtaaagactggtcattggcggctaagggacctaagtgaaagcatgcgacctttagggctccattgtgatcaccagcactcaccagcttcagaaattcgacctgtacatttatatatatatatatataaacaagttcctccgttactgtgcaaaacgaagaagttacaaacaatatctcttggggggaatataccgagagctttaagttgttcttgcaccattacctgcttaaggtggaaaagtaaacccggattttgtgtgaaaacaatctggatccatggtgctgatttcggaaaatgcttctgctgccattcctctgctaaccaattccttcagtgccaacgctatctcatacttgtcctctatagggtttgtgctgactcgg

SEQ ID NO: 43197 - DNA, 588 bp, Arabidopsis thaliana columbia
cactgaactcgggtaagcctgattttttcaatatctggttatttccggttctctcaaataattgttaaaccggtcacaataatgttttgtgtagatatgcacgtaacgatccagttttcgcgatgagaggatcgatgcattcgattcaacgtgacatggtaatgcttgaaaatcaacttcctttatttgttctaaaccggttattagagttacagcttggtacacggaaccaaaccggtttggtggcacaattagcaattcggttctttgatccactaatgccaacggacgagccgttgactaaatctggccagtcaaaactcgagaactcactggcaagagataaatcctttgacccattcgctgatatgggtgaactgcattgtctagatgttttccgtcgtagtttgttacggtctagtcctaaaccggagccgaggttaacaagaaagagatggtctcgaaacacgcgtgtggcggacaagcgccggcatacaattgatacattgtgtgacggaactaaaagaggctggtataaaattcagaagaaggaaaccgaccggttttgggatatgcaatcaaaaacgg

SEQ ID NO: 43198 - DNA, 599 bp, Arabidopsis thaliana columbia
gatccccgacaatggaacttttccattgactttttctcgaggatcaatgcattcgattcaacgtgacatggtaatgctagaaaatcaactccctttgtttgttctcaaccggttattagagatacagcttggtaaacggcaccaaaccggtttagtgtcgcgattagcagttcggttctttgatccactaatgccaaccgacgagccgttgaccaaaaccgacgactcgctggaacaagataaattctttaacccaattgctgataaggacaagggtgagttgcactgtctagatgttttccgtcgaaatctacttcggccttgttcgaatccggagccaaggttatcacgaatgagatggtcatggagaactcgcgtgtgcggataagcgccaacaacaactgatacattgcgtgaccgaactaagagaagccggtattaaattcaggacgaggaaaaccgaccggttttgggatattcgattcaaaaacggttatctcgagataccaaaactactaatccatgacggtaacatttcaaactttattccaatgataaagaacatgaatcataatggataccatcttcatatacatggt

SEQ ID NO: 43199 - DNA, 112 bp, Arabidopsis thaliana columbia
ttcatttttggctgttacgtagatatgatcataacgatccagttttcgcggttcgaggatcgatgcattcgattcaacgtgacatgataatgctggaaaatcaacttccttt

SEQ ID NO: 43200 - DNA, 661 bp, Arabidopsis thaliana columbia
ctaggctgtcatagaaatggaggtttgaatctgagaaagctgtctgtaaatattaacttttgattgcaatttatagtttagcatcatgtgttggggggacttgtggatggatataaaatgtgttccaaggaagatataattttgtcttcctttctaaacagcgtcgtttaagctgctttgttatcatttacatatacgacgacgcatcattctggttttaaagatggcatattacgtttgagattaaacgccaccgttttcgaaagatagcacgggcattatacgatgtcgtattgcttcctctttcgaaaatttgttagcgcgattttgttaaacttttagcgccattttttttcacattaaaaatttgagaccccgaaacggtatcgtttgttggatgttatcctaaaattgacggatctgatatgaaaaaaaaaatccttaaaaaaaccgtttgagaactttttggatatttgtggtcttctgttttcgtctttcttctccactgtcaccttcctcgctaagcaaaagaatttagagagagcttcgtactatgcccagagaaaaaagcaaaaagcgagagcgaaaaagataagaaagatcaaaagatgaaaaagcttagacgtaaaaaagcagaaatatatgtatatagaattaacaa

SEQ ID NO: 43201 - DNA, 713 bp, Arabidopsis thaliana columbia
  unsure (1)..(713): unsure at all n locations
tagcgtgattgagctttttcgcttcgtgagccgtgatctttgcatcagcctggtaatcatgtttggctgatatctttacaatagtttctttaattcggagaaacccttttgtcaaatcagcatagcttttctttagcttcaaagaagttttcttattgactttaccgccaacactagcttgcgcacgaagaattgccttgttcatcagggtgtatctggtcttggcaattcctaaaacatctacaatgggattctcaaacttgtagaggctctcgaggtatgtcacgtagcctttgcacattgtgaacattgccttgaactcaggggttttcggggcagaccgctcttttcggtttaggatctcagtgatttcggtaaaaggtaaggtctggagttcggatactgtttttggacatgctgattttctcgtngtcacgggaggagcgtgaccggaaacggaaaggaacactgagccgagggctaaaacaaaggctaatgagaacaacagagagatccttggcaatggttgtattgcttatggcaaggcaaaaattgttaaaaaaacaatccctaaaagagaaaatacaatacgaaggaagtgcgttttgatttgagatctaggaaccctatatatactttgttcttttaactcttataagctaattataggacacataaatggttactataaaatgagaaaacagaaagaaaag

SEQ ID NO: 43202 - DNA, 645 bp, Arabidopsis thaliana columbia
tcccctatctagtttttatgggagtatttagcatatactcaatggttttctagtttcaggttcttgtttcaactactacttaaggtcattttgtatatgaaattcgatcttaagtaacaaaaagtaatgctcgttcccaaaactgttgtcaaatttacataatgtgtattcattattcaaaatatttcacctgcctccactaacctccaagttttcttcattcaccgttattaaagccagacgactcataggcattggcttctatgtgggtaaatctcaacacagtaaaaagaaaggggaaagaacaaacgtttattgatctttggagataaactcgactattacaagatgttttggaaacgtgaaagattcatataaaataaaataaataaaaatattaataaagagagaaacaagacctgaataatttctttggagccatgtacgcacaaggaaggttgtggaataacgagaagaggaagaaaaagaccagaaaagaagtggagagagagtacatgatttgtttgagatctctgaacagtaatatcttgcgttaagaggaaacaaaaacagagggagagagtgatcgttaaggtgaaagtggtaatggtgaaggacctagtcatggaaagattagtacccgtg

SEQ ID NO: 43203 - DNA, 858 bp, Arabidopsis thaliana columbia
tctcacactattgggcttgttttgtgtgggagactaatgtgccgcgctgtattcatatgatccacaaaattaaggtttatatttggttcatgaagtcttagttacatatatcagtcttcctaacttagtcttggatcctatttctagcttcttggttctagcttcttgggtttagactcgccaatactattgaggactgggaccatggtgcaacaagactcctgatattttcttaaacaaagtttccatctaattccaattcatgcaaaaaacattctgatattacacgaaatgatcatcataattatataaggatagaaaagtaaatcataacacaaaacgatagatagaaaacgaaacagagtagcaacagttacatggtgacccaataccacttaaaggtcttattatgaaccagtacgaagactctgtagtaataatacagagattcaaacaaacacaacaccaacgtcggaagatattatgtagaaaggtatgtgacttagctctttatttagtagatttttgaggctaagcaaacacacattctcattacactctctagcacagagagggtttagtttactcatcgtcttcgtcacgacgcttctggtggtgatgcttgtgacggtgcttcttcttctcctcatcctcatcagagtcattgccaccctgcaaattgtgtattggaaataattaggactacgtcaaaagtgtaacgtatgtaatgacccatacaatgacatcaggttaatgatgccgctgctatgaactatgaccataagaaaggaaagagagaccttcagatatcctcaagatggccaaattcaataaaatcatgttgacatgtaagtatgt

SEQ ID NO: 43204 - DNA, 518 bp, Arabidopsis thaliana columbia
ccagccccccaccgtttaaatccacatcatcaacctcgatacattcattagtatatatatatatatataaacagaagttaattatatgattattttaacattatgttacattcattatatatacattattaaaataacacaaaaaaaaacgttaaaaatttgtcttaacaaaaattcattacatgctattaattttcatagatagtggatacatacgctatagtgacactgacatcttaaacaaaaatcaaatgtattaatttgtcttaactgtgttaagaaaattggacattgaaatattattcggtttgagttgaaattggcatttgacggatccgtggtttgcatggtgtaccaagcaagaatcgttggttaaaagaaaagaacacacattaattatcatgtttatgcgtaattgatatgtaagttaagtagattatatgcttctcaaaactaggtatttagacaatgagattagttagtcttaattattaaattaatatcccgatcttatcata

SEQ ID NO: 43205 - DNA, 741 bp, Arabidopsis thaliana columbia
tttctctttttccttctccttctcttcctcctcctcttcctcttgtaataaagacacaaatgttcgaggctaatatacacatacaaaaaaattcgtccatgtctgcaactccttattaacccacttgaaaccagatttcttccaaaattgaccaagagaaatcaatcattttaataagaatttacaaataaagttacagtttttactcattatctctcaatagaaacaagaaaaaaactgttacatgtcgttccaagtcaatactaagttaagaagttaagaaccttcaagaaactcactccatctatggagatatagagtcgtctccatcgtactcatctatgacttcaatcaatttcctaattcacaaaaaacaacacaaaatgaaacgagaattgagcaattgaactaaaatccaagagcaaagatgtgaaattggaaaaggaaaataagaggaagatgaagactatgaatctgaagtggaattagctaactgtagttgttagaataactagaatttataaaagggatcccttattccgcctagtggagagaacaatggaagctgagaatttggttatggatataagattttgtgggtttcaaatttgaggtgagaaagatgatgtaaagttgtctgagtatcgtggataaataaagaagagaaatgagaagatgtaggttttttaatttgggatttagaaaaaaagatcaaacttacatggatttagatcaaagtgt

SEQ ID NO: 43206 - DNA, 572 bp, Arabidopsis thaliana columbia
tcgattatgaagtgaacaaatcgtcatacatattggagaataatgacctacttgaaaaattattgcatcattttgatcatcaaattgaaatagtccatctcttttttcttttcttttttcgtctaaaagaaatagtccatctcaaaactttaatatataagcttgcttgataggcttaagggtgtgtgttctttgttgcccaaacaaaaagttctagttccaaatatagcggattcattgggctccgaacaaatgagaagagatctattacatacaagtttaggttttagaaagtatctaaaatagtcataggttattgtataacatatgaaactgataattatttctgttttaacttaaaagaaacctttgaatttaaaagtagagataagtaactttgtagtagcgtattatcagctttaagttaccagaaacctttaaatttttgtaaaaaagataagtaaatttgtagtaatcattcccatttatcaaaatgtgtacagaattacaatggaaaaaaataatgcaaatcaatcccaatataaatatatatttactctaatttacaagat

SEQ ID NO: 43207 - DNA, 325 bp, Arabidopsis thaliana columbia
gggtttatgtatgacgatttgttcacttcataatcgattaatttattctatattttaaaagttcatcgtagtttgagttgttacacctatttgtcaaaaatcaagtttactgtattaaacgtttttgtaaaaaacaattcaggctaaacgcttgagtagtttagcagaggatgcagaacttgcaaaagcggttggttgcaaatgtactagttatgcgttgttaagcaatttatgactagtttagcagttagaaaaaaatacgatttgcgtaaaatttataactagctaacaagagttgtaatagcagtttaactgaaaattacca

SEQ ID NO: 43208 - DNA, 837 bp, Arabidopsis thaliana columbia
aaaaaaaatgtgaacacaaatcatagctttaatgaaatgcttgtaaaactagaagctatttcgacgccactaacacaagaattcatgtttaacacaatcttttctcgtgtaataatttccttgcctataggattcacataagaagggaatctaaaaggcacattgagatgaaacttgccgtctttgtaaatcaatttctgagaccaagtcacattaaccgaaaagattgatcctccagcaacctgtaattatgaacaacattttagcatttattcataacaaaatccaaagaaaactaactataaaaagtgagacaaagaacaaacatgtgggatcttgaaagtatagatatgagacttaaagaaacgtgaatctttgtctttatgaacgttatcaaagtcagatgtttcatcctctgtaactagtttggtctggtaagatttctcattgttcaaaacatcaatctcagcacctagaaatgagccctgttacacaatgtcttccaattatttcccaaaacaatatctgaaacaatgctattaatggaaagatagagaaaagatggaaaaagaaggttttttgtcgttttgttgtaatgaaattaccttctcacccataggaacaccgacacagcagtcaaagcgtttgctaggcctaacacagtgaactctccaccgtccggtgacggtgacaaacgccgtgtcgagccaacaatctatattcatctcaattccgagcatctgaagcggcacgagagctgaaggatcgcatcgtgcgtgaacgtacggctggtagctaggaacgtcggggttatcacagccacggatctgttattga

SEQ ID NO: 43209 - DNA, 858 bp, Arabidopsis thaliana columbia
ccccacctgtctaacaaaggtctcctcaatacggttttaaatgtcaaattcaaatgtaaccaataaccatcgtctctggtcttctgctaccaaataaactatgactttcgcatattacacaataggagaacaaataatgaaatctttttgaaactggaaccaataaccatcgtcattagagattcaacttttttggtttgttttgataatcttccaatgtcaagactcaagagcttccacacaaaaaaaaaggggcctatgaatctgtaaaccgggtttttatttaataaccggacttaatgagtcgattttaattttaaaacgagttgaatttgaaccggcgtcaaggttttaaaaggctaacctagagagagagagtgtgctttggtcgtcgtgcttctcttttcccgggttttcgctttttcatggtttcactttcagctctgcaaacaaactgaaaaatcgcaattcagatagagtctagggtttatcctcgtatggttcaattccgcgctccatatttcaatttcggctaaattcacttgttcaggtctgttttccttctcgatttcggaaattcaactttgtttgttagcaaatcgaattgtctattcttcttttggggttcgtttttcagcgttctcttttattttccgtctctgtcttgttcgtaagttgatttcgctattaaaaaatttgatttttttttggttttactgttcattttccagtcatagggtttatgttggagagaaaggctaatgcgaaactgatgattgcttgtgatttgagattgttactagaagtttctgtttgattagattttagttttcaattcttcaattttgggttttaggg

SEQ ID NO: 43210 - DNA, 746 bp, Arabidopsis thaliana columbia
gggaattactgaaaatggattctttgtcatcacacctctaatgccaatccccggtgacctggataggtgagggtaatgatcctttctccttgcttttaagtctctctagtaccctttacctatacaattgtgaaaattactctttttctgtcagctgcatcgaagtaaaactagggatataataggccattgggttacctacctttctgttttcaattattgttgtgaaattattatagctctttctcgggatataataggccattggttttctaatcctctctaaacacttgaccatacttgtcttatactattgccatattctgattggctgcgattaaaatactaaaatctcgtggttaataacttttatactgtaactaactagtgagtagttcgagattttattagacagaatggtctgcggcagtgtcacttaagccttaaatggtcttggctttgtcatagtttttggctgccggttttagctgtagctgttaactgtttgtactttctgaagtcagattgttcttttcctttgtccactagcatgcaatcgcctattctggtgaatcgtggatgggttcctcgaagttggagagagaagtcacaagaatccgcagaggctgagttcattgcaaaccagtcaacaaaagctaaatcaccgtccaatgaaccaaagtcctggtggaaattttggtctaagacgccagtgattaccaaggttggtcttgttcagaaacttt

SEQ ID NO: 43211 - DNA, 1013 bp, Arabidopsis thaliana columbia
tcacaactgtgcagaacttcacttaattcacattccaagcttcagggaacactttagacgtgcttttagcattctaaccgatgtgtacaacataccaataactgcaaaagtgcatttatgtatttgtcacatctgagctatgcatccactgatccacaattggttaaattgaaaaactagaaagatagattagaggagagagtttataaacttccacatgcaaggaacagttactaagcaaaatgccaaaatctagagcttaaggagtgaacaatcgcaaacccaagttccttactataacttcgataaaacccaaattcgagactaaatttattcccatgtgattaagcgcaaatacagaacagagatcaaagattgaaactttaaaactatttttagcgattccacacatctacgaacacacaaaaactaccaaaaacgtagtagaacttaccataaacgattgtaatgtcattggagaagaagtatgctcctcagtttcgtagaatcaaacaagatattccgccacagagctcgtttaccgtgataaagatttaaaatttagggtaagttcctattagagtgtgggcttccaaacctaaaaccaattggctataggtggagaggcccatatcttatatatcccacttaccaccctagtcaacatccgatgtgggacattgtcctaatagtgcgttcttctgaggggcaatgtcgttcgaaaagatcgaacaagggcttaaagtaagaggcttttcctcgtaatttgggattcgagatgaggaaaaagagttgttgagagagaagagaaaggttttgtgatcggtatgaagttgaagatcgagatggtggatcaaaagatattatttacgagtaagataatgctacgtggaatcttattagatgctagaggtgttagtatttaattcggctgcagcgcaaagcatgagaaatgtgtgtctttttaagtttttggattttgttgagaaatgaaagttggataacattgaatg

SEQ ID NO: 43212 - DNA, 454 bp, Arabidopsis thaliana columbia
aaattgatatcaaatatcgtactaatttcattttccgtaccactgttgaaatttgtgtcgtttataaattatttatcaaacttgaaaaatatctaagaataagaatatattggcggaattgagaaacattagatacgtacgtcgatttgtagtaagtaaaaaatgtaggggagacggttctaaaaagttgtaattgaagttaaaatgatcaatcttacttgatttatcacagcgtcggacaaatacagccaaacactacgagcaagtttaattctgtccaaagaatatatagcacgtcgaaattagtttattttaaattctaattattatttaccttcaaccactctagtaaaacacatggccttaaaaaaagacctaatagtatttattaagaacacaatacctaatagtctaaaataccattaaagaaagactcgaacatctctatatagtg

SEQ ID NO: 43213 - DNA, 549 bp, Arabidopsis thaliana columbia
atccaatgggactacatctcatgaagttaatggctgtgagacatcaaatccccagaagtttattgggccccttaatggtttcaacatgaaacctcaagccgagcagtccttccagaagggtaacctggcttcttcaaagccccataaatttattaggcccaaaccacgagccgagcaggccccactagaggataacctgctttcatccaaagttgaaaaggcgcctttaaggccacatgcgaaagtcagtatatctgtcaaccttggtgccaaaagggtctctcctgtcaatggtagactttctttccaccaagatgagaacatagctccaaaggcaaacaaagagaatagtgtatcagttttgccgactaaagttaactctggtacggagagaaagtttggtactgaaaatggtggcaatggagttaaagacaacggcagtgcaccgaggtagtagtaatcataaagtggcattgcatcctcatgagcggagtaatggctccagcaatgggggtgatcacacaaggataagttacatccatgtggaag

SEQ ID NO: 43214 - DNA, 529 bp, Arabidopsis thaliana columbia
ctttcggatccgcgataggtagaaaaagagtagcgtttaaacagttgcttttgtctttgcttgagctttttaatatcgatcgtgttttgtttcatcagcattagtgttctttatggatttacttatttctatttgatagtctttgagtgaaacttaaaacagtgtatattttgttaacactggttttcatggtccatgtgactatcatattttagtctgttcgtttgttcgccgcttgcgtgcggcagaccgcggcaaaactaccgcaaaattaaaatatttcatagatgtgggaattgttttagtcgagaaatctaaagaggggtctataaaaaaaggattagcattcataggcacaatcgttccactaaataactcgtatggtctaaatattgtagtatgtagactgtagagagtagaccatgaatttaagacaactttaattgagaaccggtggcacctaatcatattttagccacctagttacatagcccggtctggtcttaaaagtagtttgtgtaaatggaca

SEQ ID NO: 43215 - DNA, 492 bp, Arabidopsis thaliana columbia
acgtatcatgcttataactagaacttgacaaaatactcgtacccgaagaaaagaacagcaacggaggcatcaaattgaagcagaaccgacacaaatactcgaattgattttttaaaattcttatatccaaaaccccgaaactgatttgccaccggattgactatccaaaccctccagggcttaaccacttacccagtaagcttgaagatgagatacttggcatgatacagtttagcaaaatcccgagagccaaaatcatatcgaacaagtggtttacaatatgattctattttgtattttctaagagttttaacatttttacttttgactttttcatcggccctccccatctctcgccgaaagatacacaacccctctctcaattctgttacaaacaaggaaaaatatttcttcttcaatctaaagtgatcaatcaaattttgtaaagaagaatattgttttgagatatatagttcactctagttactaatg

SEQ ID NO: 43216 - DNA, 638 bp, Arabidopsis thaliana columbia
  unsure (1)..(638): unsure at all n locations
tgctgctgttataaccgaagacagcgatttacttgcatatggctgcaaagctgtaagatattgttttctcacacaaataaaaaccaagttcatgattagtgttttaagagcattgtatgatatgtttccccaacttctgtatggaaaaaggttatctttaagatggaccgctatggtaaaggagaggaactagttctagataatgtttttcaagctgttgatcaaaagccttccttccagaattttgatcaagagctattcactggttagtatcatagtattgttgaattctcccaaattacagtgatacatttgtgttgctgattgttcttggtttggccttttttcagcaatgtgcgtattggcgggctgtgattttctcccctcggttcctggtgttggtatttcaagagctcatgcattcatctccaagtaccagagtgtagaactcgtaagcatttactttgacaaacccttgtttctcccatcgctaaaagaaaagcctaagacattcaaatgttggaatgatactataggttttgtcatttctcaagacaaaaaaaggcanactagttcctgatgattatccagctctttcacggaagcagtttcagtttttcacacgcacgtgtgtaagt

SEQ ID NO: 43217 - DNA, 616 bp, Arabidopsis thaliana
taaatttgggtttagttttgccgcgagctgaatttggtgaaaatatttgggggtgacgaaaagagcccgcctttgtgttctaatttttggtaccagaatttttgaaaatccccaaatttttttgtttctcttcttcataatcgttgaattagggttttacaatttcgagtttccccaaatctgaaatttgagtttttttttttcttgacttttcacgttttgattcgcctgttgtttgggtttgaaatggcgactgaaaccctagatgagaagacaccggaagtgaattctccggcgaaggaggaaattgatgttgttccgaaggaggagaaggaggtagagaaagaaaaagtggattcgccgagaattggcgaagcggaggaggagaagaaggaagatgaagaagagggtgaagcgaaagaaggagaattgggtgagaaagataaagaagacgatgtagaaagtgaggaggaagaagaagaagaagaaggaagtggaagtaagaaatcgtcggagaaggaaacggtgactccgactagtgagagaccaacgagggagagaaagaaggttgagcgtttctcgttgtcgactcctatgcgggtccaccgagcaagtc

SEQ ID NO: 43218 - DNA, 658 bp, Arabidopsis thaliana columbia
ctagtaacggccgtcatcttcttgttgagacaaatatagagttgagaaagaattactttttttgtgttttcgtctggtaagttcgagcaagtatgtggagaaactataccctctactctgaggcgagaatgatatagatccgaaatggttaccacttctggattagttgagcacatttggtttgaaagaatcacgctttgttgaaatgtacgagagacacatgccatcccttcagattaaagtgttctcagcgcaagagagactcgattacttgttgttaaggaaattaggtagcaagtaatgatgaataccattagtttatagagagatccaatttctcaaaggtttgtgttcttgtgtttgatggttttcaacacccttaaaaagtaaaccggtaaaattcatcgtgggagtcaaaattggtagagtttaacatgcttattattaatttgcacacccatttcagcatttgacagttgtatgagtgtaatcacacacaaaaaaattgtttagcaaattgttatacacaaaacagagattaggtaataagaaaattagcaaattgttacagaaaatatattctcctaagttgtctagcctctagtatcccgataccatacaatccacaaaacagaggatggaataaagtgagagagga

SEQ ID NO: 43219 - DNA, 554 bp, Arabidopsis thaliana columbia
  unsure (1)..(554): unsure at all n locations
ctcaggctcattattcgcataccccttaccataaagtaccttattctaaggatccttcacctgcaagaacaggagtttctggagcccatactccggtgcagagtaaaccctcctctccctctcctcgtccagcgggttctgctggtaaaatactaagttcaaaggggaaggaaatagcctcatacccatctaggagtcgtcgtcctgctctggaacgcatcgctcagaacacctctccggaggttcagccgcgagtaggggnatcagttctaactccaatcgcttacaggaggtcgccattcagtatctcgaggataccaaccactttggtggtaccactaatgatccaggtgagtcaagtaaggtggtgagatctacctctcatttacctctggaagctaggctgtcctttcccactacttctcaaaactctcagctgcaagaaactagaatccacacttccctaagattgggcctcaagtggagactgttacggttactatcctactgctaagcaggacaataaaccacaagaaagaggaagactgcagcag

SEQ ID NO: 43220 - DNA, 399 bp, Arabidopsis thaliana columbia
aagagtaactgcccacatcgtcgagtatcaacttacacatgcaagatttgtatctacttgcacaaatcatcttgttagtatcaacttctcacaatacatagagattgacaataagatatccagattgtgttgtatccagattacacaagatatcctttcttcatcttttactacaatctcgagaaaaatattatcacaaaagtaagagtttaagcaccaatattattttaagtgacaaatccaaactatgtagaacatgttaaacttttcatgtaagggtttagtcctttcaaacagaactaatcacaacatttatctttgttaaaaaaaatgtaagaggtactaattttcttctcatatcggaagagttactaacttttttttggggacgacaaccaa

SEQ ID NO: 43221 - DNA, 631 bp, Arabidopsis thaliana
gcactattaacatactgactcaccttcacgaagtacctcatgtctgatggaagtagaagaatatccgggattgatgaaatctgtagcgccttaggagcgagtgaggaatcataagggaggctctcgggcggtggatacagcggatagaagctgtttcataagaatccaatttctgagtatttggtagctgagaatctagttggatctagtagacgcaaaagttaccttcgctgacggaggagatggctagcgagtctggacatgcgatcagtggggactccacttggattttttgacatctcctccccactcagctgttttagtacatccaccgtgcagcaacttaccttcacctgagaatacccagttaacattttatgttgcaaggacttgagagaatatggcttctcagaagagaactgtcacagtgattttctaacctggtttgcctcaaaggtccccgggtttgacagactagtcatctgtaatgtatgatgagacagagacatgaaaaaagtaaatatatatccacctgtgcacagagagagttgagtgaaggaagggagacttgttaatgagaagaacaaatacctgatgttcgagatcaggtatgtgaatgtcgaaaggaggc

SEQ ID NO: 43222 - DNA, 888 bp, Arabidopsis thaliana columbia
ttgaaagagcataggttatcattttcacatggtgtagttggtttccttattacctagttgaattcaaaatcatgccgaaccgggagcatactacactaaccggtaaacacaaagcattttggagaatcattgtctaaataatgttccaattgagaacaaggcatgagattgattattgcacaccaaatcaagcctaagaagaataatggttcatgtggggtgataacatcgatttttgtcaatttttactatatttttatttggatttccatggataaatgaagagatgttggatactttaaggctgagttcaagtatatatgcttcaagaaattttaataagtttccaatcaaaaaggagtaacagagacttaagatgaaaactctacgacttgtacacggcctctttgagcttcttttcacatcctcctgcatagcaacatcgatgcatgcaagcttccaagctctctgtcgtccaccttcgagcttatagaagtcctcccttgaagatctactcttgttcatcattgttttatcttatgttctctctactctttcttatactgcttttggggagacgagttatcttttgtgacatctagagaagtttcttttgaaccctctttaatatttgatttgtttatgatgatatactttattgtaatgattttatttctttgcatcatgagcgagtagtttacttagggttttatggggtgatcaaaagcgattcatggttaaaatcttattaggttgttagatccgatttattcataatttgattcttttgggacattgtttacttaaggttttgaatggttacggcgatcgaggtgtgatagccacaatttcaccaattctaggtatgatttaggtataggttttaga

SEQ ID NO: 43223 - DNA, 534 bp, Arabidopsis thaliana columbia
agatattttgaatgttatgtggagccccatccgggctgcatcccactcgtcccaccggtcactaagctacgtcaaaaagcccataagttaggcccatcacttacctaattaacgaaaagacgattctacaccttaacctaattgaagcctataaatacaaagcttaggagaaacccgatggcgtcacgatttagagagcctctttcacagccaccatcgaccagactctaagctccattgaagatccacctcttcgatcataagcctccaagtcgacgtcccttgaagatctctctcctattcttaattgctttctctattctcttcttctactatttcttatacaacttttgaggagaaaacttatcttttgtgacatctagagaggtttcttttgaaccccctttgtttatatctttgtttatgtctttcagatgcttttctacttcatctctatgtcatttctttgcatcatgaggtgtttatggggtgattcaaaggggattcatggtttgattcacactagttgtgaga

SEQ ID NO: 43224 - DNA, 510 bp, Arabidopsis thaliana columbia
tacattgctgtgtaaatttctcgacaaccattgctgtgtagtctttgagtaagctcgatacaagtgtaatgtaaagtgatttctatcatcatctaagaaacagacaattttgtaactgaaaaccttaattaccaaccacattctaacactcacatgacataattattgttaaagtaaatgtcaattacaaccaaatttttttatgttttcttaagttcacgtatatctccattttttacattttgttggcttgataaatacacatgcatcgtttggtgttgatggatgaccaatattttctcttattatcacaaaaaattaattgatttttttatggattttagaaattttcatttggtaaaggactggtttgcattacagagagctccatgaatcaaagactcacacgacaccacgacaccaactaacaccacttccacatttgtcttactccaaacaaatctcaagccgaagtagaaaagaagagagatggtgaaggaaacagagcta

SEQ ID NO: 43225 - DNA, 898 bp, Arabidopsis thaliana columbia
ccacctacttctgctgtgttatgtgagagagagagagtggatgggtcatgagtgctggagaagtcacgggctgggtctggttcaacttaagtcttatatattttaaaaatcaatctaaccaataacgattttccacgtcagcaacagctggtatgatcttgctccactggtccaatttaataattggcgattaggtaaataggtgctacttcgattagttagaatggatccgagctacgactctctgtaaagtgtaaacgaactactctactttttgtatttaatgtataacttattgactactactaatctacttgttgtgtataacaaaaataagacgacaaccatatatacaagtatgatttaatatgctcaattttatttcattttggatccaaatttgtgtggtaccccattgcaatttgttacaccaaatgtacgtgctttgagaatcctagtagagattgattttgaagcatcatccgcaacgcacatatggagttttgtcattgtcaacacatcttctcaccttacaatggagagcatccagtcagtaaggaaaccatggctctcttcgctactgcttaacatatgactcttcttcaaaggtaaatcgcagcttatcaaaacatctacttctctatcatcaactcgatcatacgctccaaaattatcgccatcgtagtcatagttccaacagtttttttggcaggatggtttcttagcttaatgagcataagagacctatcacctatgtaagatggacataatttgcttcggctactacacacaagttaggcccaattacgtttttgggtcaactagtcaaatagcccaaacaacatgatcaaaaaagttgggtcaatggtacaatgttacgttgaatttcgatatatat

SEQ ID NO: 43226 - DNA, 587 bp, Arabidopsis thaliana columbia
ttttgcttatactaatatttatccttaactcgacgacaaaaaaaagtttctgtataattctgagctaacaacaagaaataaaagcaagatccaaatatagtggagaaatctatcttaatataatggttcgtaggacacaactccacttccattaagattccgtatcctcttagaaaatgtgctaataagatcaaaccaaaagtgtcaatattcataatcaatttggtttggtatctaccgaatttgttctagcaactccgtatattcagaattaatttataggaaaattagcatataataattagtcacatgtgatgagaaaaaaaaaaaaattactacactcttttcaaattttatattattctattaaattaccgaagctatcacaaagtgaaaaaaaaaaacctacaacaacttagcatttcgatccatcgaaaaaaaccccaacttaggattcaaatacacacaaactataaaagttttattttgatttttaccatctcacataatatcgcagcttgatgtgttctcgcgctaaaggcatgagagtattgatcatcccataaggtggaggatatggatacggg

SEQ ID NO: 43227 - DNA, 1578 bp, Arabidopsis thaliana
cactctctatctcaagactcgtaaaaaacaatgcgacgagcatcaaaacaagtagaacactctacgcgtccctccaatgcgcgtaaaccccacgtgagactgatatccaaagacaagtgagttaaacgctctgtttaagcgcgtgcgttcagacacaaagtggataatcatggggaaactgtctaaccctaaagataaaaaagagaaagatttctaattttttttaatagctaaccaaaagagatggagaatgctaaaatacgctagatatgaaatagtagcttaacctacgccgtattttagtcgttcctctcttttaaacctacgttcctcgtcaccgtaagtcgtctcgctctctctcttcttcgtcgcttcatctttctctctctctttgtaacttcgaaaccgaatcaaattccatggctaactcttccgctgtccgccgcagaccaccgcaacaaacacctctccgtcaatccaccgcaccagatcttcaaaggtattttaatcgcttcttttttcttcttcctcttctctcccgatgatttaggattgtgttttgagtctctctcattacagagactcgaacacaatcctaatttttcagtgtgattgtagctcatctctttcccggtgcttaatcggagattgaattagcgttaacagaatttatattataagtctctaattagggtttttggtgtctttagatcgttttcgagaacattaccagttttcagctcttggggttttgattttggtactgaatttgttatttttaatatttggtattgttaaagcattgatttttaatggttccatgagctatgtgtgttatcaatttgtttgttgtttagtgttgttgtagatccattagatgtgtattgtttaaatctttgatgtgagacgtattggtacttcattgtatcccttgtagagacctaaagctgattctgttactgtgtatttgctaaaggattagagtgacattttggccttgtgtgtgcagatatccaaggttctgacaatgcgattcctctttcaccacagtggcttctctccaaaccagggggagaacaagactgggatgggaactggggtatgtttctattgtttgtgtatgcgtgcagtttgtttttgatttcttaacatgtgagctggtttaatgttttacaggatcctaatcagtatggaaaccattcggatgttgtgagaacaacagggaatggggaggagacactggataatctgaagaaaaaagatgttttccggccatccttgcttgatgcagaaagtggtcgtcgtgatcgttggcgtgatgaggaaagggacaccttgtcctcagtccgaaatgaccgctggcggaatggcgacaaagactctggtgataataagaaggttgaccggtgggataatgtggctcctaaatttggggaacaacgacgtggtccgaatgaccggtggactgattcaggaaacaaggatgctgcgccagagcagaggcgtgagagcaagtggaactctcgctggggtcctgatgacaaggaagctgagattctgcgtaataagtgggatgac

SEQ ID NO: 43228 - DNA, 1029 bp, Arabidopsis thaliana columbia
gtttgcgatttttttaatgtttttttatttatgtgttatatagatttggaaagaaattaagtttaagtgggggaatcaaagggccaacattgaacagccagactaaaaaaacattaaacagattaatgggcttaatgcgtaatgcgtctctttttttgtttaaggcccataatagttttattaaaaaggccgaaatgtaaggcaacactagcactacactaacaaggtcagtcagaatgtgctcactggccactgctcataaatcaagaaatcaaaatattgcatgcaatttttttcttaaaaccaaaaacgtagtatagtgaaaatattctaaaaataatatgtatgtcagctcatttttactttttctaaaagaaattagtattattctataaacaaaaagaagaaaaaagttgggggaaagagaggggagaagctcgagaagagtgtgggagaaggcaaccccaaacactgactagacacagaccgttgggcccgactcttcatgcatgcactcttctgacaacattttcaatttctccatatctctctctattgttttttcatttcttagtttcattaatatcatagtttatgaataatactacaagtactatgtaaaatatgccttaaataaagatatcgtacaattcaaaatgcttttgttggaatgcaatttaaactccaaaattcagaatttaatgaggaagtgtggtcaggtcgctgttacttttaagtgtcagtcttcactcactcactcaacatcgtttcaaatttcagagcaaaagtctctaaacccaaagcctctccacttaattgcctattcttcaaaaggcgagtttcctttaccaagcttgcaaagttatctaaactccaaacgatatctaaaacgcgtgtactcatttctcttattctttcttcttaagccatgactaaagatgaagactttaagctcctaaagatccaggtagttttaagacttcaccacttttttttttaccttttgaatagcgctcattgtgttaatgg

SEQ ID NO: 43229 - DNA, 476 bp, Arabidopsis thaliana columbia
catacgaaaatggcaaaagattaaagtacaagatctcatttccatattaatgtattgatatacagatacactaagcagttgaattttacctacccgattgtaataaacatgtaacaaaaacatttttaattggaatttattaaatctaacgaacggctgatttattaaaatttagttttaaatatggttgaccaaaactttaattttgttacatcagatccaagattcaaatctcgaacactaattgcagtttgtaaatctaaaatttgtggatttctaaaacaccatctcaggtagttcatgttcatgtgatagatacttgtattaatctatgtgtttgacactttgactacaaaactgataactctatataaaatattcaacaatagatagttataatcttacctgtggtgtgcttctgagtaactttgatggttaaccaataaaaaaaagtacgacaagtgtgggacaaggag

SEQ ID NO: 43230 - DNA, 564 bp, Arabidopsis thaliana columbia
cctctagtaacggccgctctaaagtaattgaggtctttctcttccattgtatgaaactgagggattcgggcggatatccgagctagataatgtttgacggcatcctcggatgaccaacccacatactgacggcagttagtgtcgattgaagcgaatgcaaatccacaggatacactaacatccggcgatgaaatcttaaccctgcggacgttttcctcaatgatccggtagtcatcgcaccatgactcaatgaacaacgtctaatatactggtaagcattgtgtcttagatctgagatactcgacggacctcgatatcatgtttcgcaaattcatttgctagggaccgccgtccagctgctgatgggttcacagcatcgtaaatagcaatctggccgttctcctcattcaggaactgatatatatcctcacgacatcgtttcacgattttctgcctgagcagaacagaagaggcagatgctagatgcgtgattagttagagaagtaaatggaacaaagaatatgacagttgcatgttgtacgtggaatcaagtatgaagagaag

SEQ ID NO: 43231 - DNA, 841 bp, Arabidopsis thaliana
tattatccacagcgataacgataatattccatcgataaaaatcacaaaagtagctgccaaaaaaatgaaaaatcacgaaaactataatatatacacattttatataaaaagaaaaaaatatgcactaaattctaagcgttgtgcatttatcactcctggcactgtcgatgcctacaatcacgagactcataacaacaaccaccttcaaaatctcgggttctcgggtccggttcaattccggtttttgacccgaacctgtttccgtcttcttctcaacggttatgcttctgaagtgatatcaccactctctctcgtctgaacctgaattttcaacccgacccgactccaacttcgttttcggatccgaaaggatctccaccggtcatggattactctacggctacgacgacggcggggaacggttacagttcgccgcgtgactcttctttcccttcgagcttcactaagttcaactccgctttaacggcaggtcttctaaatccaatgtctcctcctccgcctccggcgatgcacgacaagacacgatcaagtccgacgctgttcgaaatgatggctagtgaagctgataccatagggaaagttccagttcagatccataacggtgtgcttccatctccgtcgtcgtcttcatcgtcttcttctgcggcggctacggctgcgaggacgacgaatgtgaatcatcttgttatttcagctcaggataagcaagcgcttgcgatgcaacggatttcggatcttctggtgattcggagccccgggaatcagttcaatgacccgaattcgagtgatgtgaagctgactctgagctctaaagatggga

SEQ ID NO: 43232 - DNA, 1071 bp, Arabidopsis thaliana columbia
gtgctagtaattttaataaataacatgtaccaaataaaaatgacacgatatctgaaagaaaaacattgaaatagtttaaaatttgtgaaaactacaatgtttttgaaaaatatagcttgtcaaaaagaataaaataaaataattattaggttgtttagacgcaagtaacaagagtacgtactttggatgaggaataaacagctatcagagattgaatatacgcaatttacttaaaaagaaataaacagctatcagagattgcatatacgcaatgtaacaattagcactaaaggagttgagttgtcgggaaagcaactaagcagatgaataagacgatgatataggtgaaagtgaaacggtagttccagttggtaacagaaggacaggtaagcaatccaaaggattttgataaatattatagccccacgttactacatctgtatagctcatgtgcgttgatttgcaggaagtagtgatatttgttaaaaatacaaaattaataaaatgatcccctcttaacgcaagtcataatgcgttggggtctaagacataatcttccaactcaaatcaaatcgttacaatgaatgggaaacaccccaggaagaagaaaaaaagatgtcatcacaacatctttgccttctcccttattgtgctaagagagactctgttcatatgtgcatgttctcaaggaagtcggacaacctataaagacgaataaccatccagaggtaagctcaaatcaattgaaacaagagactagtggtacaagttgaaggcaccaataccttatatcctttgctatcacagtctgcccatcttctgcatccagatgccgcaaaaccacttcctccaaacgaccatcatgatacgcatgctgcaatcacacccacaaccccccgttttgagttttagaggtgcatccatatcaacaccaacaaatatacatttcaagaggaaaatagtcaaattatgcttcactcaaaagacaaaaaacgactacgaactcccaacaccataatatagccatataacctaagactctcactttagttaactaacttcgatatgggt

SEQ ID NO: 43233 - DNA, 470 bp, Arabidopsis thaliana columbia
ttgatatgtgctaacaattccaatttgggctaagtcttcacaaagctgcactgtgtcgtgagtcgaaattcgacgtctatctcttcctttttttggcattacttgcgaattttatatcgtggttttgattgatagctatttaattttccgggtaaaagggtttatcgttttcattactatgtgaagttttcagtgatagctgttttcatcaaaataaacgactctttatctactcgacatgcattttagcactcttcgggaaaagaaacaaaaataaatttgtattaaccactctttaaattcatcctctggatctgttgtactcgtatagagaaaaaatggcgtatcctgagagatctctcattgttgatcctagaagtggtttctgcaaatcaaactctacattctatagcaagcgccaaccattaagtctcccgccaaatctttcgcgtgacgtaccacattcatct

SEQ ID NO: 43234 - DNA, 1256 bp, Arabidopsis thaliana columbia
cctacatctttggtctaatcatggtcaatataatgaagcggaaattaatttgttcccgttttggttacggttatggtttgatttcttggtgttgtttaggcaaatcttaagaagattcaagcttcatggttttttgtagctttttttttttttgttgggggtttattagataacatatagagagatctagatattagggtcattttaattttttttttttttttttgggggttaattctctgtgagttgatttgaattagagataaaagtctgagattccttactagaacaatatatatattccacattaaaatattatttgttttcacaaattttgtaattatttttaaaaaaattcaatataccgtagttctttaatccaaattattttaaaatgtttttatatcccttagaaagttagaaagagctcagctgttggatgtgatttaaagagatgatgacacgtgtgaaggtttagcaagctaataagctcctcccgagatctactgttgataaagctgcctcgtgttgatataacgagccatgcgattaaaagagaaaggtacttcagagtacctcagatgtgggaatcatgcatatcaacaacaagctcatcatcatcatcatcaagtgcagtcgatcctactcgtactctggcctatgtgttaccacagccaatgtttagaccatagagctgagagtaacgactgcaaccaactttcatttttacaagatatatcagtttgtcgagttattgtagttaatacgttcatatttattggtgatgtcaggtgatttggttagattgattgattaatttatttgcaagataaagagttttagaaagcaaaaataagtgaagtctaactcctattaaaccaaaatgtttttagaaaattagagaaacgcatcacatatggggactatgcatgtcatcagttatccgagatgttgttgaaattccaaacattttgatcaacaagtaattattgagttctgattaattcattatttatactattaattttgaaaaaaaaaaactaaacttaaaaaaaggaacttatgtgttcaacaatttcttaaataaactgacaaacaacttcttcctttaacctttatacaagataaaacgatattacagtccaatgtatcttattattttgtttttttttttgctcaacatcaactatcattaaccaatcaagttttacatcttatcatactccacaaaggatttaacctaatttggcattata

SEQ ID NO: 43235 - DNA, 440 bp, Arabidopsis thaliana columbia
gatatgtacattgttaatgcagaaaccgcttctaggatcaacaatgagatctctctcaggatacgccatatttcttaatatgaagctcttctctaagtacaacttctctaaacgattagtctgtaatatgaatatgaaaaattaaaataccatactatctacaacatgtgtcggattattaaatgatgtagataatatgatagttgatgtggccgacacaaatcaattagaattgtgatgagaagcacgaagtgatgatacgtaacataaagaacttttcattgtaagtatattttatcactcatatggtgaagtcacgtggttctcgttcctgagtacctccgggagattcgatttgaccgtcgccgccgtgcctaaccccctatgttttgttttgttggcttctatgttcagtttgatgacgtgagattttttatttg

SEQ ID NO: 43236 - DNA, 708 bp, Arabidopsis thaliana columbia
taattatttgtttgtaaaagctaaataaaagaagaaaatcgtcttcaaaaacatgatatatcacatagatcaaaatatcctcttgtcattcatttaattgtactttttcaaatataaaatgaaaatcgtccaaaaaagaaaatcgtccacataatagacttcttcaattaaaaaaaaatactttttgttttcgacattcgcgtcatcaaaaagaaatcccaagaattaaatgcaaaatccagctacagtataaatattttaggcttatatatcggacccttgagaggaatcataggagaagaagcagagagagagagtccaaacttggaatctggacaataaagaaagaaaaaccattttaaaaatctttttatactaaaactccacagatctcccattctgagatgcagagtgataataacaacaattgagaccaaagcaaaatccgaaactgtcaccgttttcctttgtcttcttctctgccaaaatctttcaatctttatcttcttcctttttcttgtttttctaaaactttctccatcttgaaaaccaaaacaacccaagattaataatatacaccaatgggtactggttggcgacgagcattttgcaccaccggcccctagaaacagcgatgccgcggcgccggatctcgacaagcaacgcaccggctataatcttccccaagtcctagcccaagaagctgcg

SEQ ID NO: 43237 - DNA, 381 bp, Arabidopsis thaliana columbia
ttgcctattacttttttcatgggaggttttgaactggacctgtttcaaccattttcatttttccatcatgtgtaaagaatataccacaagagtaagtacaatgtaaacatagtcaatgggaacctcctggttcactactacatgtaatgtgttccatcttcattttactgctgataaatggaatgctttttaacagaaattatgtccctccgaaaagaggggcaacatttgtatccaaatgggttgtctaaatatctggtaacagatgttaagaagatgaccagagtccaccaatagctctcttatggaacactatgtattttagaaagatgacgggcatagaagaatattttttctaaatctaagattttgagagatgcg

SEQ ID NO: 43238 - DNA, 686 bp, Arabidopsis thaliana columbia
ctagttattttcctaaggcaaaaatcttgtgtgcgtgtttacagttagctttgtgttatggaagaagattcaattacttcatttaacagatggaagaatatatcgaaaattcttccctcccgcggcgtccatttttcctgtcgcagcttgaagatatctcagagtattcttctcgttggctttgagcctttgacgatgaccctccccttcgtgctgtgctatttttctttcgtgaagacctgtccagaaatttgaccgcaataaaaagttttgcgcaaatttaaattaattaatttagtgtgtatattgttattaattcaccactgtatcatattaatgttttctacaaagtttttaaattcgatccggacagtaaaccggattaccttctcggtcactgggtcatcgggtcatgacagtccaaaattcatgagtgaacctcagttgagaagaagcgctcgtagaagattagactcacaagatgccgatgagcggatagagaaactccaaatcaacagcgatacaatttccccaccaaaatccccaaaagagttggcagaaactaagaagaagagagtgatgatagagaaacagcaaggactctgctctaaaatgagatctaaaaggaagacgaagagaacgaatctgctgcgatttcagaaatcatgctttagagcacactggcg

SEQ ID NO: 43239 - DNA, 651 bp, Arabidopsis thaliana columbia
gcaacaatttaggtaattagcaaaagctttggttaagatgttttggatttacaattttacatatagctctttttttttggttcaaaacaattttacatatatataggaacatgtagttgcaacatttttaactaggtagaatcgttttttttttttctatttataaaatatcatgctcattgaaagaaaatgttaaccttaaatagtaaatacgtatacttttaaaaatatataatttaattttctaacttccctcagctcataatgttacatttgaatattctgtaaatatagatgattgttataacactatatataaaattaaattattcatagtttacacctaaaccaatttttttttttgcaacataatcaaagttatatggtaatattaatcaactttattttattcattgatgttttaaattctttgatcaaagaaaatgttttgaattatttgttatttaactataaattttataacaaactaattgaaaaaaagttattagctttgaagtaatcggatctagaaaccgcggaaagaagggaaggaaggaggaagaaacagagcatgtaaaagcttctcactttctccgtaacaatggcgactttttggccatcctcttcatcttcaaaccacccttcaatatt

SEQ ID NO: 43240 - DNA, 544 bp, Arabidopsis thaliana columbia
cagcggtatgattcccttacttattttctactatcttccaattgtagctcaccgccagggacagaacaccaaagaagacaatttcagttcaatggagagggctgtaagtgttgcttgtaatcctgttgctattgcatggcttcaaacaaatcaatatgacatgaagaggtgccatggctctgatattgtaactactgtttgcaggcagaaagagaacgaatggtcttggatatacaagtcaagttgcaggtattttttcttctttgtgtatttaagagattccaattgcaagtttctggaatgatcaacttctccttcggaatgattttgtctattgagaattttgtgaaggaaagaacccctacagtacccaaattgaaaaacagtgaagatcaagtctaatgccactattttattggtttgttgtggtttccagggattatggctccgtcttctgaaactgggttcagatgaagatcctctttcttcattcgaatacggcacaatattgggtatgtccattttaatgggaatggtaataaat

SEQ ID NO: 43241 - DNA, 564 bp, Arabidopsis thaliana columbia
taaacataataataacttataaatacaatagtttttttttaattagaaaacaaacatttaaaattttctatttttattttacaacatttttggcaatcgaattcgacttcgtgatagagatatgcaccaacaactaaaagatgacctagttgagcatatatgacaaaagtttggtgcattatcaaatgaagagtaaaaccataatagataatatagttagttttgatttatgttatcatggttttatatgtaatttctgtgtaatttatatattttttctatttaatttatgttatcatggttttatatggaattttatgtttaattgatatattttttattatgattttatatgtaaagtaatgtttaattatgtttaattatgtttaattatggttttaaaaataataaaactatttaataatataattgtaaaaataataattgacatgtttgaaaatattgtagagattttaaatttaatataaaacgcatataataatatgttaatgttaatgagatactcataagagtattcaccaatggaagcacaattttagtata

SEQ ID NO: 43242 - DNA, 463 bp, Arabidopsis thaliana columbia
tttttgttaaggcagaatcagcctcttacaatatctactcctaatttaagcagccttatttgtggtacgaatttctatgatattgttgataatttataaatgctgacgcatgttttgtgattttgtgataaacataaggaaataaattattgcatatcgaccaacacctaaatttgagtgggtttttcaacacacttgattgcgttgttgatatttgcccaccactagtgcttgatacacgaatcgacgaaccaaaatagttaaagataaagaaaacttaaactttccaagcgttgcacaaaaaaaaaaaaaaaaaactttccaagcatacaaaaatagtttaaaaaaatatattttattctaacaaaataaaaatttacaaatagataggaaaaaaatccaaataatataaaataaaaatgataaggaagagctggcgaattctgttacggcaataaaaata

SEQ ID NO: 43243 - DNA, 537 bp, Arabidopsis thaliana columbia
tcatctccaaacgaccaagatcaacgtagcttttgaccttagtgggttgggtccatgttggtagaccatggttaaaaacttaaaattaagtaattaacaaagctgaataaacaacaatattttgaatttttttctttcctcattttttaaaatattgtttttgggggtgagaatagagtgtttttttctttaattaaatagatgaaatacaaaatcaaacatgtaaaactccataatattatgtaactttgacttgtaaataacatccaaatttgataaaacctaatttaaaatcaagtatttatcaaatttcagttcaagataaaatattgaattaacaccagatttaagccaacaattcaaaattttaacctaaaaacttacataatctttttttttcaaataaatttagattaaatatagtatgaatttaggatttttaaaaaaatattatgctattataataaaatatatctttctaatttatattcatgcatttgattccttatctgtatcaccatatacaatcaaatataa

SEQ ID NO: 43244 - DNA, 602 bp, Arabidopsis thaliana columbia
cgtgatacaatatataaaaatatatagattatatatataaacgtaaatactactattattacctgaggcattttttaatgagttaactcttaagacgaattttattttattgctaaattagttttatttgtcgaaatgtgaattaaattaattaataaaaaaagatatttacaaaagtgtttggtcaagaaaagaaacagagcaataatatcagaaccaaaaccagagaaacttatgaaacagagcacacaaagctaacgaactaggagttgcgtctcgactgaaaccatagctgaagtagtccctggaggctggagcttccgattttcgaaatagtgtagaggcgtatactgctaaattaataatgagatttaagatgtattaatattaaccttgtctttgtcaaacttaatccgagtgaaaaacgtgggttagctttgtaggcagacatgggtcatggtcgggcaaacgaaaatatgacatttttgggaaaaaacaaaagacggaaattagaaaaattgtaaagtaaactaaaagtaaattcgggcccacaagttacaattgaatctaattttttctaaaatctactgtactgtgaaaat

SEQ ID NO: 43245 - DNA, 575 bp, Arabidopsis thaliana columbia
tatgtacactacacaaagatcagagtaattatctcacataactgtctataattgtagtgcttttacctgccaagtacatggccagcccttgcagaagataatccgccactggcatcagataagcctcttggagctgctggaggctacataaaaactatgtctatcagctacagaagttagatagaagcacaaatgttcaaaatctgaatgtgtagaggaagaatgggagtatcaacaagtacttatgtacagcagaaaggggaggatgggagaatacagagagatggagacataccggggacgcccacaaacgagatggggcctcagttaagtgatgggagttatcactgtggtccatggtaaaccgccgaccaaaattatgagaatagcctgctgagggattaaacctatcaggaaatgggtcttctggtcttatgtaaggatctgtgccaactgatctggaatagttaactgatgaatgagaccacttaaaaaggaatctcagatcttctgtgcagacttgaggagttggtagctggattactaacggattgatgagaccaatagacagagga

SEQ ID NO: 43246 - DNA, 576 bp, Arabidopsis thaliana columbia
gtgagaaattttctgtgagtctggctttcacgaaacagctcaaaatacctcaagttgaaaaaatatgagtaagctaaaagagaaacccatttaagccataactaactccaaatgtaagtagagactgacatccacagcagcttagctctaataagatgaacaatgcgtataccgatagtttgttcacaactccaccaaaggttatatccttatatgctactgtgccaagacccataaaaagactaccctacctatagaagactgcaaaaccagaaaaactaagagagcagacacctttgcagctaaaggacaggctatgcagataaaaagttatagacattgagatgcaacaaaaatgtttggttagaacttgtacttgcgtgatttggttctctgttcagcttcaactgagcgcatcttcatatggcttgtggttgactcatctagagttcgtaggacgttcaattttcgccaagcacatccagcctcaatcagcaaaccatttccatcttcaccgactttgatgttcttcatatatatcacataactcacctgtctccccagaccaagtaaatt

SEQ ID NO: 43247 - DNA, 944 bp, Arabidopsis thaliana columbia
tcgaagtaaaaagggacagatgtgagacttgagtgtcttaagctggacacgtagctttaaattgcatgcaattacttaaccataacttagatgttttccttaagagttggtgttcgtgctgctgtcttatcttctcttggtgagttatttttggacgaaccttattaggttcgggatatataatacatgtcctcgtgtacgtgtttatgtatgtgtatgtgttgtgttgactaagcatgcatgtgtgccaagtagatagacaagcatatgaaccttctagagttgggaaaactgtgagattgcacggtttcacggcagattaatcggaagttaatgaaattgtaatatgtgctttatgatttgatcgtttgataattctgcaagtcaataattatttcttagttcaagcataacatgtgacaaatgattttcacttttaacctggtaaaatttcggcttctttcttcttaggcttcaaatgattttggcgggtaactgacaacaaaaatgtttgacaaaaaaaaaacaactgtttacataatgttttctgtcttctatagaatctttattaccatcaaatgaatttcaaaactgtgatctccattgaatttgatatcggagtgtgatttcttcaatcaggcgttgttagatccagaagcagcagccgcagccgcagccgctttcttattctccctcttcttcttgtttttaagagcgttcttgctcatctctctgtattaacaccagaggagtctccatcaacataagagcgacagtttttgagatttatgtatgtattacaagatagagacttaccctgttgtgcttattccaagtaactgcaatttcaaataataaaaactatcagagacataatgatatgtgatgccaaatgttcaatcgaaaacggtagtagcagtgtatatctaaggccatatggttat

SEQ ID NO: 43248 - DNA, 628 bp, Arabidopsis thaliana columbia
catgttgtggagataagaagcaaatcatatacctgaagcgaacacgcttgagttcagtaccaccaccaggtaaagacaacaacgttaaatacactcctggttcgtcttgcacaaccttttctggtttatcattctgtttcctatgcccattagcgactcttacttgttagattgttctcattttgactatcttgagaaaccatgcttcttatatgtgtttggttactagtctgagttacagtctctgatttctctttgtctgtgtgctttgagttagtgctaatactatccttttgagattgtttttctgccatttccttcaactgcgaaaaccatagtaacataatgagaaatagatataagagacaaacatgtgtagtagagtctggaaattttcaaacctgagtggttagagatcttataacctcctttgcagatctattttcctctgcttcatctgctgccattgcagtcacaacttttaactgccttttggtgttttcgagttcctcttcaagttggtgagcttcgaagcaagttgttctactacaatgttcagtggatagatggatgtgtttagtctagaagcattttgctttgatgtgatttcagctgacaatagatgatg

SEQ ID NO: 43249 - DNA, 519 bp, Arabidopsis thaliana columbia
tttttttttttaaatagcttgaaagtatttgggatatagattatagactaaccgaaaagaaggtagaaagagacaagagagtgaagaagcattgaatcaaccaaaacactaacactagaacaccttttctcttgaaacactaaaaactaaagtcacttcaccaatgtctaacaagagcatatctccaattttcccaatgctccaatctcaacattttagcgattatggcttcgatccccagatccattactttcaggttctcttcttcttcttcttccacattgttcctagggtttcgatataaagctaactctgtttttttttgtttttgtatatcttaaggttttggaagaagcaaagaaacacaagtcttcctccattgacacatttcagttcaaacttcaaaaacctatctcgaaagacgatttgatccgaaccactctccacaacaagaacaagaacaagaagcgttggttatggtgcaagaacgctttgttcttctttaagtggcggaaatgg

SEQ ID NO: 43250 - DNA, 559 bp, Arabidopsis thaliana columbia
  unsure (1)..(559): unsure at all n locations
aaacatttaataagttgcggggatagctcagttgggagagcgtcagactgaagatctgaaggtcgcgtgttcgatccacgctcaccgcattttcaaatctttttattcagtttcattcgatcagtttttgaatggtttgtgaaagtcaatctatatattcccgaaaacactcaagagtcaatcctattacgctcgtaaaataaattcaaagtctcgatcatagaaaaatatttaatgacatttagtcatacattcaatcgtttaatgacacttaataatatcccaagtctcaatactatgttcagtcacatagttcatagtaacaataaattgtgatcagtacgtataagttttcacaccaaactacttttaccacacacacacaaaaaatatacatactttactggcttgcaagtcaagatatcgaaatatcatattatcatgacccatcgtggccttacatccccgcacactcacaggcgcacactaccaattttaattcagagaagaaganaaaaaacaaaattaagttgtggtgataactaacatttgaagacgt

SEQ ID NO: 43251 - DNA, 482 bp, Arabidopsis thaliana columbia
ggatccccgaagatagaataagaataactagatacaaaaagcctcacaagcaaaagaggatccacaagtaatatttaaacccaaaaaaataagcagaaaaaggctaaagtatgcattctcctccaccattccgtgacggtgaaggcaaccttcaaccgttgagactaaaaataattttaaaagaacacaggacaaggagtctgggggagattagaccagcagcaacaacaaaggatttattcaaacattaggatttaagatcaagctatatatgattggaaaaaaaaaaaaaaaaactgaaatccaactgaaaaccttaaagaattttagttttgggacaatattcgttaactcaaataaaccacaaccataacccctagatatgtacttaaccattaatctacttaaccatgcgctcagtagttagtaaataataaacctaaggaaaaaaagagaaatgaggacaatgaagaccatagaaa

SEQ ID NO: 43252 - DNA, 473 bp, Arabidopsis thaliana columbia
tttaacttaaaattcattgcatgcaacttgacttaaactaatgtttgaggatttgagtgtatcatttgaataccatcacagttgctaacgtaggaagttttgataattgaattagctgataacaaagtaaacaagctaagagttgttttatgatataattgaataccatacgttgacaatgtctaaggttgttaagagagacttttcacaaataatttgagtatttcactaagaaaaactgattacaattggtatcaccgtatcagagttttagtttcagagaatcaacaaaaatctacaagaacaatcaacttgttgaagaataagttctttaaatcaatttcagtggctaccaaataaaatatacacgagaaggatataattacccaaaaaaaaaaaaagagagagacagagatcaatcttattattgttttgtttcgaatattcatacggattattacagagccaagtgt

SEQ ID NO: 43253 - DNA, 551 bp, Arabidopsis thaliana columbia
gagagagttgtctatggttttttgagcaggcaatttctcttcagctccagcagttctctccgcaaggagaaggatcacagtttggcatgcataatgaattagggatcgtcttcgccaaagaactcttacaaatttgttctcattgtttagcggagttcttgtgtttgcttggattgtttaggcttagagcatcctcaatggaaggtttttagatagttcttatgcatatgaaagtagaatatgaagagagagaattagaaaaaactcttagctaagaggcttgatgatttatatatgagacacatgtctcttttatattggttcaattttctaatatggttaatgtgctggctttcctcccggatgagcttagagaaaagcttatcgatgagcaagaaactagagagaagtttcagagattacacagttatgtgcatgctctttcgactgaagtcgcaatgaagcggttttatggagctctgactacaaaggaagggatttctggttcgggtgttaatccacaagtgactggggtagctatgttcctgagc

SEQ ID NO: 43254 - DNA, 544 bp, Arabidopsis thaliana columbia
tggttattctaaacactcttttctatctaatcatctttatcccctctctctctttctataattttgctaaaatggcaggttcttcttcaaactataatctcgatgacatgttcgatgataagtttgatcaatgttttgatcaagcagttgagagttatggtaattgtcaaaaagtcaagccaaggaaaaaaaaaagcatatatcaaaagaaatcgtgaaaaaggtcacatccaattagtgaacgactattttacagaaaatgcaacatatcctccccatatattccgacaccggtttagaatgaacaagccgttgttcatgcgtatagttgagagattctccaatgaagtcccatactttaaacaaagaagagatgctaccggaagacttgatttctcggcactacagaagtctacagcagcaattcgtatgctcgcatatggtattgcagctgatgcggttgatgaatactccgaattggtgaaacacgttgctggtatgtttggaacattttgcagaaggaatcataaatttttttggggat

SEQ ID NO: 43255 - DNA, 598 bp, Arabidopsis thaliana columbia
tgatgacgatagctacatagaactgtggttacgaaaaagactatgaattacacaaaaatttccttaaactatttggatttttcttcataggaggatgaggagaaaggactacgcaacaaaaaagagtaactacaaaaggacaacatctacatcaatattttctgctatataaactctaatatatataaacatcttcaatatataaatatcttcaaaatttaatccatacaacaatccacgtaatccaaagagttcaaataacatttcaagttttaaactaaatgtctatcatgtttttttatctaggtgcaactggcatatttaatacgagagtgccaacattcaatatttaacatagctcaatgagtaagataagagttagttgcaggaagaggaactcttcaaattttgggcgtcattttcacatatgtccatatagctaactagggactgaggtcagtagaaacataggtaggacatatatattttagaactaatttaagttagattatatatcacgaataaagacaaagcacaagaggggatctttagttatataataataggcagaacaattggatatggttttgacccttgt

SEQ ID NO: 43256 - DNA, 727 bp, Arabidopsis thaliana columbia
gacaaaatatgtgtttcttttaacgatgacaaaccactactgaatcacagaatcataagccttgttttaatggagaagaaagaatatcaagtccaagtgtttgccattctttagtgccgacatcaagtactttagtatgtcaccaaggaatgtacggtagtttttgtcaccacaaacttgattgttcttttcatttgaaccattgattattgtaccattcatttgcaccattcactactcctttatattgtatgaatgaatgtacaccgaataaaaagaattccgaacacactactcctttattgttctatatataatccgaacactacttcaatatttctatcaactctctttatcataataataaacactcttttttatcaaatcatttttatctcttctctctttctataattttgctaaaatggcaggttcttcttcaaactataatctcgacgacatgttcgatgataagtttgatcaatgctttgatcaagcattagagagttatggtaatcgccaacgagtcaagccaaggaaaaaaaaaacatatatcgaaagaaatcgtgaagaaggtcacatccaattagtgaatgattattttacagagaatccaacatatcctccccatatattctgacgccggtttagaatgaacagaccgttgttcatgcgtatcgttgagaaattctccaatgaagtcccatactttaaacaaagaagagat

SEQ ID NO: 43257 - DNA, 476 bp, Arabidopsis thaliana columbia
ccaaaataaagtagtaagcaaaaagatggaactaatggaagtaccacgcacgtgaagactaggcatcaggtagcccacagttacacataaagaaaacaaaagtatgtgcagttacctcatacactgtaaagaattatcagctccaacttttatcacacgaagagaagctaacgagacaagggatcaatgaaagaacacctaagagcaatccatcagctgctcatttcccctcccgtgggaacgggaagaaactgagctattttataatggtaagcgcatgtatcattttcctagcttctcagccatgttctcaacaaattactatattatcttacctaaggaatagtggtggttttgtatcactattgctaacaaactccatttaaaagaacataatatagtcgctcttaaaactgattctaactaataatctacagatacaattaaaatataaactagatcagactatcagtagt

SEQ ID NO: 43258 - DNA, 607 bp, Arabidopsis thaliana columbia
  unsure (1)..(607): unsure at all n locations
taatagtacagaacccaatattctaatgagccggccctgagagattcgatacttggaccgattacgaacaatgggaagtgcataggcgagaggcgagccgccaacttcggctccaacgatgatgacgtcagtaccatggtcttttctcatctaccgcattatccacaagtctgttattatcttgctccagatggctactagggaaaatgtccaagtcaacacgatagtttagtagcatctatcactacaattaacggcaaatccatatctataagggtttagggtttaggatttagtatttgcctgttactttagtctttatatggcttttaagagaatttacaaaagcacaaacgtgacatcatcacatacatgattatatccaaacttctgataaatcaaaaagaaaatcatagtgaataaacacatttcacaatgaatgatgtcacttcttgtttcgtgttccgtttaatgttgtttctatttttgtcaaaggtcgacgtaaaatatcgtttcgccaaaaattgttggagactaattcattttttggctgctttccatgaacaagtcaatataacctcaccacatacntgtatcaatgattgtg

SEQ ID NO: 43259 - DNA, 604 bp, Arabidopsis thaliana columbia
cgaggtttttatagggttgtggtcttagcaatggaaggaatgttgtcgtccggtgaccaacagagattagtctcttctttccttgaaatcgccgtcggacagaccgccgaaactgctcgacagttcttacaggtttgttgctcaaaactggtagatttgttttgttctaagctgtgctttttttttaaaactcaactgatagatttgtctgagtgagcttaaccttgattgagtttctgattttgggtctaaagggttatttcagcttaagaaccctatatagggtttctaaatctttcagctttgggaaaaaattctgactatgggtattcgggtttataccctagattgagattagacgcagagttttttatttatttattggtgattatcggttgatctggcttttcgtgtaacaagatctctgtgattgagagtagcctgatttggtgcatgtggtgtcacggtctccattgtgatgagattgacttggtatatttaaaattgtttgtatgatcattgttcttcttatgacttgtaacttgtaactcgttttagctgtttattatgatttatgtttagcgtagactggtgtagtttgtga

SEQ ID NO: 43260 - DNA, 567 bp, Arabidopsis thaliana columbia
atagagatgtaagaaatttaaatttgaagggatcaacacgaggactttcctggaggtcacccatcctagtactactctcgcccaacaacgcttaactgcggagttctaatgggatcttgtgcattagtgctggtatgatcgcatccactactacgcggaatggactcgtaccgaccgtcttgcccggacaattatggccaggaacatggaagagagccaactaaattgaattaatcagaagagaaacaaaaaaggtaagattcttggcgggagagcgtaacgccgggaaaagcgggattgtagtggcggctgttttgtgtaatgtatgtgtgggagtttgggtccacatcatcgtcaacaacacgtgtctgtctgaattgactcactccaacataaataacacgtcagcatatgggcccacttgggtttttaatcgtttcatggatattgagacgtagccattcgtcacatatgacgccacaaatcttattaagtaagagtatattttgacgacaaaaacttacgaaattatactaaacacaaaaaaaaagctcaatacaaaattat

SEQ ID NO: 43261 - DNA, 344 bp, Arabidopsis thaliana columbia
gcgtagtaaggtattacaacacgatattggacgaaattttgcatgacattagtaacttgacgcaaacgcagagttgataaaatttgcatgacattagtaacgattttgtccaaaaaaaaaaaaaaaaaatttttttttttcttcgatgcataatcaaatcgtgaagattgataacattgttcttagattaaaaaaaacaatgttgttaggtgtttgttatttaattaggataactactttcgttatttaattaggttggtcaacgtaaagttttattttttcggataatggtaaaatttctattgcagatgcagcagcttttactttaccagcatggatgagag

SEQ ID NO: 43262 - DNA, 515 bp, Arabidopsis thaliana columbia
ttataacacagcagaaacattgacctcttaagtagtactgtttatggacaaccatcaaatttcaaacttagctccatcctatgtttcttgacactatgaaaccagtatgagattccatgtagtgtggagaattgatgctcgcatatcattggacattcatttttaaaccagctattaaatattttcaacagaactaatcttatgataactactgtgaggtagcttaataacctgaaggtcttccgacatgccgctttgagagtacaagtttttctttcccataggatctgaatttgcagcaggaaacccgaaaccctgtaaaaactcatcattactatgcccggtatgttcaaacaattattgccaatttctgataacacaccagaacccccaaacatatacaaaaagaaaaaaaaaactaacctcataatcacggttctgcccacaggatctgctcggaagaagtggggagtcagtaccactgatggatacagcctcaaattacgatctaagtt

SEQ ID NO: 43263 - DNA, 351 bp, Arabidopsis thaliana columbia
ggattgcgacggttagagttgtttcgtttaaaaaaatgattgtgctgatttaataataataataaaaataaaaaaaatctctaacaacatgtctttgagaatgtatccaactcgagtaaaaaatcataagattctgagaatttggtgaaaaatttagttaaaaatgaagcaagaaaaattatgtcttagcttatattagtacatgcatctaagcatctagtgaattacggagttaatttatttaagataaaattggaaaggctcgtaaactcaacttcgcatgaagcgaagtcctggctcactgtgaatctaggtaccttgcagaggcaaccttgaccacatgtagtacag

SEQ ID NO: 43264 - DNA, 501 bp, Arabidopsis thaliana columbia
tctttaaatggtgaaatggtttatgtcaatccttatgcctttttgagttttatgtcatagaagataaaaggaagggtttatagattagtgatatatttttcatgtcaagggactcaatcataatgtgttcttttgagttttaggcttgcaccgatgattccccctatgagggagctatacgccaagatgcaccttcatggtgccgtgctccgtttgagcctgaaggaatcttaaggtctaatcttgtcaccctaatcactaactgagcattagcattatcttcaagtttataacactcagaaacttgtgttatgcagctccatatctgctattctttctacaatcatcggagtccattttggacatattattttacacttgaaggtcaacaaactgaataaaacataagcttcaagctcctacaaactatcaccgttttgtcctttcaatctcatcattaccatatttttgcagggacattcagcgcggctaaaacattgg

SEQ ID NO: 43265 - DNA, 309 bp, Arabidopsis thaliana columbia
ctgatatgtctgttgacactattggcagtacttgtatggagtgtatcttctgctgcggcgtatgctccagcctctgtacatcagagtaaatcagcatgatgagacagaagtcgttgcccaaacctgaaaaacaacacgtgatagaaaatctatatatatatatatatatatatatgttatcgtagtcgtttctatggatttctacgcattttattgtttatttgtttctctgtttatcatgaataatttgattcgtgtattttatttctatatacataatagaaattaatcttctaatagatagtcatt

SEQ ID NO: 43266 - DNA, 570 bp, Arabidopsis thaliana columbia
taaaagaactttttgtgtttcgagataagaatggtttgaaagacctcaatgtatttttttgtgtgacaaatatctactttacagtttaaacataatcaaaaataataaaataaaagccacattttttaaaagaaagatgattatataattaaattttttcttaaattgtcatttcgatatatacttatattgaaatgattttttaaaaaatgcttaccaaaacaaatcggttgtggaaatgatatgatgttgatatatatgtaattatatatgtagtatgtataagatacatatttatgttaaacattttttggttgttaatatataagttaaaatggtgagaaacctttaacaaaaaaaaaaaaggttgaaatggtgagacatttttatctttaactagtctagtcttgtttaatgcattggcgaggcaataaacctgccttgtaatacaaaacttttgtgaagtcatcctatcaaatgtactagcgtcgttagttgaaacaaaccaaaaaaatacataagtcgccgccagtgaatttcaaaaatatactctcacattttattatctat

SEQ ID NO: 43267 - DNA, 548 bp, Arabidopsis thaliana columbia
tgtaagcatacatggcgaagaatgtgatatgatgatttacaaactgataattgactgaaacttggaaagaaagtctgttagcggaaaaaaaaagtttgttaccggaaacaacgggcgatctcatgttcttatatatccttgttcagttatacgccgagtacgtcatgttttgatgatctcctgtcacatgcatgtctctttcttcctcaccattcatatctaaccaattaacttatgactatagactatagtctatatatgatttattcaagtgtgcgcatgcaattttaagaaacgaacttcacttatatgtatttttcttaattacaaatttagagatgaaaaagacacaatatttagactatgatattgattattgagtaaatagataaaatccatatataaatagtttaacaaagctgactatatatatttataaattactatgattaataacatcgattggattagtattaaatgcttaaccgtattcatgcacatttcagtatttctgtttctcatgactgatgatatctaatcttatgttt

SEQ ID NO: 43268 - DNA, 497 bp, Arabidopsis thaliana columbia
gatgcatcttgttgaaagcaagatccattgtccctttcaaaacatcaatatcaaccgctgaaggatcctctgtttctcctctcaattcatcgtactctgtctcaagcttttgtctaagattcatcacttgttgatcaacagagctcttcagctcagaaaactcatcttccttgataaaatccccaatcttactatgaaatctcttcctctcaagatcttgcaaatgaaccaactctgtttctttactctccaacacgtttctcagagactcttggttctcagacatctctaacaactgtctatctttctcaagaatcgctatttcagtctctaagagacggtggtgaagcctgtctttaatctctctcagatctcgaaccacttcctcgtggttactctctagtttatcagtctcttgtccgacaaaactaagacagctctctagctgtatcacagcgagctcgtagaaaatggatatggcattgagacggaggaga

SEQ ID NO: 43269 - DNA, 559 bp, Arabidopsis thaliana columbia
tgataaatcattaaacttttctttgccttcctttgcctcatttccaaagcacactcttcttcctcttcggcttcaatccaccactagacccgtctttcgcaaccattgtcgtctttttcgtctttaagccgtccttgctcttctctagcttcacaacgtctggtttcaccttccccttgaccgctgtttcttcattggtttctcaacatatggtttcaacttccttttggcagctttcttcatcggcttctcactctttgcaacctcattaaattttaataactctgaaatatagatattttttaaaaaattatctcccaatatatttcgcattcactcccaatatatttcaaatgaatgtctcttcttacaaaaaaaaattacatcacaacccaaaagattgcctattacacatttcatacaaaacaaacatgatgcctatagtcttttacaccaaattatacttcatcacgatagatcattacacaaagttctgaaatttctacttagcataaaacagaaaatttcaaaatagatcacattagagtgtaagagcata

SEQ ID NO: 43270 - DNA, 577 bp, Arabidopsis thaliana columbia
tccagcgcacgccacgctaggggatggatgtatcgtgtctcttcaccgcatgaactattggcgcaactcttctcgctgcaaaaccgaagcagtagtagtccagagagagaaggagaatcttcttcagccactggaagagaacttcttgatcttatcctcaccttcaatgatcagagcgacgatgaaaatgcaactgatgatgatgatggtaatagccatgaagacttcttctcttaagagaaaacactcatctggaagaatttgtaaatatttttcagtccctttaaaaccttttttgtattttgatttaccacatggtttttcattgttcaataaagtctcaacattatatgttcttgtaattatacatacacgttcatcatcataattcgttgcataaatcatatacttttaaggttcatagacattaaaaatggcgaatttgtagtaattcggaatttatcttcttttaagaacacagagaaaaataatagggttaatacgtcattgtagacaattttctgcggggaaaatgaagatgcaaaagccgacgacgaaagacaaatttgcttgaatc

SEQ ID NO: 43271 - DNA, 610 bp, Arabidopsis thaliana columbia
ctttttttagggaactctttgttaatcttatgctaatcgactacaattttagttgtagctaagtgtagaaataggagatgttttattttagtcgattgccgatattgataggttctgtgagtttatctccgtatatgatgaatcttccgatccttcaatttaagagaacatcgttgaaacagtagagaagaatccagtggtagttgaaaatggagaaactggttcttggaagagttaatcagctatatcagatacttgatcggcatggttacaccacgtccggtgtcaccaccgttactccaccctaacgtgtacgtgtggtagccgtttccatcacttgagagacagatctcgttctttccccaggacacatgtatagtacattcttctcgacagattggtcatcatccacaataatcatcattatataaaccgatttatgtcgaatgatttaaagttacatttactctgcatactcgtatgagttgaaacgagacagagaaacacaacacaaggctcaagttttcagatagccacacaagtcattaccgaaacagagagtgtgaacactgaacctactactctcaccaccgcatgaatgggatccctg

SEQ ID NO: 43272 - DNA, 425 bp, Arabidopsis thaliana columbia
tagtcagtgtgctctaaagactctaaagactcgcagactcgtgcatcttcccatttcttctgcatcagatctgttattttatcctcatagtacttcgacggacactacacgtcaattcaagagttgccataggctgcgttcgctatgactgattcatatcacacaccttgcttacagtcaaggagtgagcttctccaaaatacgaaatccggagaccggcgacttttctcggctttaatcttgtatgccctgattttgtgctgcagtcacggaaaggcgaacgttctccagactgcactaagtactagttcccagtcgtagcctcctaaatctcctaaacaacatcagatcacctccctttccccactagtataacatagtattgccccgccaaacggtactggatatctcaacctttagggatc

SEQ ID NO: 43273 - DNA, 325 bp, Arabidopsis thaliana columbia
tctacgtaagtgtgctctaaaggctctaaagagaaagcgcgtaatgatcgaggctaagcacaggatcggctgcttctggatcaagccgaagcacggcatccgtctgcctcccgtggttgtgtaccgcaaatcacgtctgcggtcaggcaaaccttacttgttttaggcgcactgtataaggtctgttcttgatttccaatattagctgaacagataatatagatactattgaatcataaagtcgaagaaagaaacgagggtgaagcttgaagagaagtcacgagaggaccagaggaatagcaacaggagatgacgaacaatctga

SEQ ID NO: 43274 - DNA, 1212 bp, Arabidopsis thaliana columbia
gcttggactatcttgctttaacagttctagtaacatgtgattcatagcaaagtcaaggttatgttcagctatggtcacacagaactcaacgagtttatcttgctggacatcctgagtgagcattccttttctcagaactgttagcaattgtgatgtcacactatccaagtaatcccatatacgatttggtggctgggacgaagcatagacactcaaataaaacctcaacacccggtgaagacaatcaagtgccatgtagcgatggttcttatcctgcatataaggcgcaaaattctctataatgaccaagaacaagcttgaaaaagaacaatgaagtcacaggtgctcaacatacttgaaaaaaaataagctgctgcagttacaactgcacatcagggtttgggacgtgataattggttccatgcattcttacttaatttaaattacgaatacaggcaaacttactctcagaagcttgtacagttgttccatgtgagagcttaaattatgatgaaatataagcgggtcaccgagacagagaagaagactcacaagcggatagccaacctattcatccaattatacatgttcaggactgtaatcacaaggtaggcatacaacagtgctactacactcagactgacgtacaccaagatgtttactctgtttctccatccactggattagctgcactctgatgcgtccaacagcctcataccagagtgtcagtgcaggttctgcaactgaaggaggccactggcttttgccaccatcggaaagtggcgccaagatgttagagagcatattgcaaagcgcatgataaagctcacttttacgtttgtgtatatccccgataagagggtttgcttttgctacaaaggaggcagacgcattcagcccacgctcactcttaacctgtaaataaacatactgtcacgttcactttctgaagcctgccttttctaagatatctgagacataccccaagcttcaagtaacgcatcccattaatgatgctgagagtttcacttcttgcaacgcttgtatcaatccggcgagtattgagttccatgaaaaacctctccgtgacagagctgaatctgttagtgaaaattaaataaatggataagagtggttgtggcttaaaatagatcatcactttcacaaattcttttctgccgactaaacttgtgaatggaagtccacatatct

SEQ ID NO: 43275 - DNA, 518 bp, Arabidopsis thaliana columbia
  unsure (1)..(518): unsure at all n locations
nnnnnnnnnnnnnnnnnnnnctaaagcgaccctgtccaggaactctaccttcgcgagcttcgtgcctacaagcctacgcccgtcaagcccggcgacgctgatgcccacgtccagaagtttagcgctcctgctgcccccaagtctcccgaagaagccaacctcgccaatgagctgagctcttacgagtcccaggaggtcgaggtcgagggccaagccgctgctggcgaggccgcccctagctgaggagagctggtttgaggaggacgaggatgagacccctgccgctcactaagcatctttcatactgctagaaagcacggtccggaaaggcggaaccgatagagaagggttgagactcggcgatgtctcttgttgagttctgaagacactctgtaaattaaacatatttggagcttatgaaattcccttgagttgtcaatattcatcaatcctcaggatcagagtaggacataatcctgatgccggcatgggctgggagaacgaatcgagactgtgag

SEQ ID NO: 43276 - DNA, 407 bp, Arabidopsis thaliana columbia
tatttatatactatataatacagggatagatatctatattttaaaatacaaattaatatgatatatcttcagttaatctcttaaaaaatagatttatattttttaagacataatagccccgtggtgtaccgggtatgaaattctagtagtttacaattgtaattaggtacaatccttccaaacccgtgccgccaaaaccgtcccgttaaaacaatctttagtaaacccctaatggaaatcaatattttaggggtttgtaatcatagctcaatttgtcaaacaaatttacgttttaaagagttgccggaatctagtccacaatttggagaattacgattacttgaccggctagaaaatgtattaaggtgcgttttgcgcattttaagggattgcaattgtattttggt

SEQ ID NO: 43277 - DNA, 235 bp, Arabidopsis thaliana columbia
catggatgcgaatccgagtgacgttgatattggtacaaactacaaagtatagtagtctaagtatatgtccatatatatataataaatctgttatattcaatgattaatgaaacctggaaactggaagtgcaaaaatgcattgattactttaatcgaaaagaaaaaccagaatgcatagattatagtatttataaaactgcagattttgcagagagcaggaaacagagacgtatgg

SEQ ID NO: 43278 - DNA, 441 bp, Arabidopsis thaliana columbia
cgatccccggggtaccgagctacatacctcttaaaacaaatcaattgtcagtgccacagtcaaaagcagaccactagttaaaacaattttccaccagagaaaccgttgatacacttttgcgcccaagtccttacccaacgttaaacattttttaccaaatagtggttcagaacaatatcgtgcactccaatgcatggaaagaaagtgaggtgatgacttggagagaaagtgaggtgatgacttttacaactctggtttgcccattaaacaacgatatttttcttttatatttcggagaatgttagttcacgacaatgaatgtcggcgcatgaccccatcttcatgtgcacgagttgtggtcagttaggtcaatgatgtgatgtgaccatgcttattgtgtcagaagtcatttactctggtgtgaacctgctctaaaattgg

SEQ ID NO: 43279 - DNA, 524 bp, Arabidopsis thaliana columbia
caagagtttctgagccaaatcatgtaatccctccaaactcaaaaccatagtcattattaaagtacgtatatttgattctataattttttattagttttgagactaataagcaaattctttgagatgtgttaccaaataaattgtttatctcaaaacattttctcttcaacctgatccaacaaatcctatttgcaaagtattcatacatagttacaaaacactagcgggaattgtcattgtaagttcattttacatctatgcctcttgaactagtttgaaggtttaaagtgttagtaaaactattttagtggtttatagtgctagtgaaattctttcgagatttaaactgcttacccgatgacactttgagggttaaaaatgtgattcccaaataattaatgtaagctctatattaatattctaaaggttaatgatacattaattattaatatttatatttcactgtaccaatacaaattttattttactattatatgttttttcaataaaattattttattggt

SEQ ID NO: 43280 - DNA, 296 bp, Arabidopsis thaliana columbia
ggaacaattacgataatcatcacagataacaatacgctaatacttttcactcacacagacacccacagagcagtcaaaaccaatagacaaggaaatgatagcaaaactagccataactaacagctgtctcacgaaatgagcatagctcaccacgtgccacattccgtactaggctacattcaagccgacctctagatacaagctgccgactctcaaggttatactatttacatagaaaactcctggatcgtaagacagcacgggaagaaattggtacagcatcagggatcccctga

SEQ ID NO: 43281 - DNA, 541 bp, Arabidopsis thaliana columbia
gtcgactcgatcccattgaaatatattaaaattattgtatcattttattaatagttatataaaaatttaggattaaaatatggttacaaatgtaggtaagtatggtgctaccattttttaatatatataaacaacatgttatagaataccaacaaaacatgtttacttaattattgtactttctacttgttactcattttaattatgaattgatttctcttcgtacatatgatccactaaaaactgttttttcatttcctttacgactttaatttgttgtcattttgtccaaaaaaaacattatacgaaaattcgaaatgtaacgcatagagcaggatattgaggtttcaaacctcgacttccgtttccaacttaaagaagacaaaaataataattacattttacaataagaaagaaaaaaaatacaaaaaaggttttatttgttctgacgctaaatgcaaaaactctctctccatgccgttgctttcttctctatacacaacatttctgcagactacaacaaacaaacaaacaaacaaca

SEQ ID NO: 43282 - DNA, 496 bp, Arabidopsis thaliana columbia
ccgttagattgtttatataaataagggataatcaaaagtatgaaatttgtatccaataggcaagactagagtatttaaaacatttttggaaatggcttcgttttatgtgaaagaaaagaaagaaacactgcaaacgaatttgaacttggctttcgtctataaataaagcgaagattcaagtttgggtttcgagagaagcagataaaatttcccttcgctcttgagacaaaaaacaatacaattaaactgtttcttccatctcaagaaatcgatcaaatccctgcaggtttcattcaacgccattgaagaagaccctttgatcgataacaatggccgatgagagtggatacgacgctggatcagacgctggatcagacgcttcactaccttcttcagagataagctttgtcgaggtaaaatctgttgatccgatttgcatttacgactacttttggttatggtttatcttcttgtaatcagaaatgattgtgcgtct

SEQ ID NO: 43283 - DNA, 589 bp, Arabidopsis thaliana columbia
  unsure (1)..(589): unsure at all n locations
tgtttggatatagctgtggtggtttcgtatcatgtccagtaatatgggaacagagcttattgatctggagactgtgaaagcggattcagatgcttttggagaaacgaatttgatggagttagttggatcaaatgatcctccttctcttcagcatatctcagtttcagagattgagcaagagcctatggaaatatctgtctctggtcctttgtcattccaatttgagccagaggtgtctcttttcaatcatctatgttggttgatactcagtctttgatgcctcagttgcaacttccatattctgtagagaggtcagtagctgcatgtagtaactcagtgacagggaagcggaaatcgccaccagagtctactctcagtggttctgctacttccgagaagttagatgcatctaacaagcgagtagagccagtgcaccacagaccatggctagaacaattttattcagaatgtattcagcggggtcatatgccacacctgctactctttctaccaagacagaacatctacaacgcctgctaagaaagtaaggcaaatggaacctgcttcgnaaaatctgggaacaagtgat

SEQ ID NO: 43284 - DNA, 311 bp, Arabidopsis thaliana columbia
aggtcgtccgccagtgtgctctaaaggttgctttgttttgtggttcggaatctgattctttttccgttgtaccttattttgtttggtcctttcacgtggtttatttggtgataatgcttggtgtgttcttgaattttgactcgggtctccagtcctgtaatattctgtttcctgtgtggtatggatgttctattgagtcttttagaaaacagtcatataatcttaagcttttcagtgttttctacagtcactgttctttggtattctatcgtttctcatcacatgggtcgaaccaactttattggagctaa

SEQ ID NO: 43285 - DNA, 615 bp, Arabidopsis thaliana columbia
gacgagagaggttcacgcaacaaaaaggaaacatcagattgttgttttccttttttcatgtttggacttataagaaaaaaggaaattaatcaagtttacaacggtcttatttttctaactgcaaaagagtacgtgttagaattttattatacaacggtctatttttcacgcgcctacgcgcatcatgcctgcccgtatcttctctcgaagcttcccatccaaattcagcttcttccgctgccagttccactttgatgaaaaataaaagcccaggcccaataaccccaaattcttttttaatttgatttaatattttttcttcgtaggcatagtggcccatatttaacctcacaatagaggatacaccaggatcgaagcctggcttgataagataatggcaacaacaatgaaccaccactcgcccaattgttccttcttaacgtgtaaagtttgttgtcccataagtaaaaatattcatatataactaaatattcaattttatattttgagctaaaaaaataattttattatttagcaatttattgtttttttttatcatattatatttacttattaatgtggacactaattaaattatagagcgaccgcaattgt

SEQ ID NO: 43286 - DNA, 1200 bp, Arabidopsis thaliana columbia
ggtgtattttagtaaaaatgtaaagtttggtttttgatattgcaattttggcaaagattaagcaatgtgtggaagcaagtgcagtgaagcagcattcttcagtttggaggtagagaagaagaatgttgattcatcatcttcgtcctttttcaactgcttctctgtctcctcgttctctcaccatttccactgctctctcttcttcttcgacgaagcaacaacacaagctttggtctggtctcgaaaactggagaaagagtcctgtcaacgacctccgtctctggggtcctactggtcctctccttccttcttcttctgactccatctccgccgacttctacggtctcgtctcagctgcatcttctctcgctgatctcggagcactcgttctctcaacctccgatcctctctccaaatctcatatctcccatttagctttctctcgttggcgccgtgagaatctccctgttggctcaatctctcatcttccttcttctccagctcgtcctcccaaacctctcctcgtacgtgttcctcctctcttttttctctcaatctgatttgatcaaattagctaaatttgtttgtattgttgcaggttgcgaccaaccaagtcccaaatccgaaagactcaaaccttcctctcaatgctcatatgcttcataatctagctcatgttgagcttaatgctattgatttggcttgggatactgttgctcgtttctctcctttcttcgaccttttgggtcacaacttctttgatgactttgctcatgttgctgatgatgagagtcgccatttcttgtggtgttcccagagactcgctgagcttggtttcaagtctgttatatttttaaagtttcaaacttttgattactatttgtttcaggacaaccattaaactcttaccctcttcttcttcaaggtatggagatataccggctaataatttgctcatgagggaatgcgagaaaacttccaacaatgtcgctgctcgcttggcttgtatccctcttgttcaggtactgccccacttatctgatatggatgataccacaaatgagacaccagtttgttttaatagcattattcataccaatttagttatacaggaggctagaggacttgatgctggacctaggttggtcaaacggctgacaggatttggagataacaggacttcgaaaatcgtggcgaaga

SEQ ID NO: 43287 - DNA, 508 bp, Arabidopsis thaliana columbia
agaaaagctaaggagattatatatagatactagagggatggtagtatatgtatatctcgaatgctatatttaatttaagagatataaactcaaatttaattgaaagaattaatactgatactgcaaaaaaaaaaaaaaaaaaaaaaaaatcaataagtgataagagataagacctttttagctgtagtaagtaatcctggggtggacagcatgcaggattagcaaactaatcatatcgtagtaatatttgtattatgaattgaaaatgtaaaaaaagagaataaaaccaatcatccaaattcgcaaactccaaggtggagccagaactagtgttacggtccactgccacacatacaattatttcctcgttttgggcataacacggttttgtcagggaatgtcctcttcgcagtactcttcagcgtaaccccatttgttttcttactaattaatttgtcttttaaagccccacaaaacttaagtaatcgaattccatacatcatctttt

SEQ ID NO: 43288 - DNA, 284 bp, Arabidopsis thaliana columbia
gcatgaaatatatttttgcttgcataagaatagtaatttgaaaaacatttaccgtttatttagttgtttttagaaatctatactacaagatactactagtagtagtataactaaaaataaacgaaaaaaagtggtgatgaagagtcatttcaattcatgggggaccccacagtacatggttccataatgaaagaagcaaatctctatatatataaacgcatgctcagtcccgtcttcatgtctcattcccatgcatcaatccactttacacacttctgcgctta

SEQ ID NO: 43289 - DNA, 430 bp, Arabidopsis thaliana columbia
cagagttacttgcagcttctttcttcatatacatatactcatttcgatctatgttaaagttatttgaggatttagagagccgaaaaatcactttgtgattacatagctctgaatgctcacgtgaccagaactgtttgcatgtgtgacggtctcatgtattgatatacaatagcaatgttggaaattgatttcattttggattatgaagaacatgttagttggtaatagtgatcaaagtggaaaattttaggtcattgtttatgaattctgggatacaagttaaaatgtttaattggaatattggataaaaatgaaatatatatgcatgtgattctgtttgttgcatatattgaagcttttgatacgaagtcacatgtcacggaggatgcaagtcagagtgatatactaatctatgaacttggacttgtgt

SEQ ID NO: 43290 - DNA, 543 bp, Arabidopsis thaliana columbia
attccgttcctgtaaccattggtaaaataacacacattaaagaagtggccaaaacaaaaattcaagactcgaacatatgacataataactagagtgaaatctcaccgagctatgcatctctgcaggttgaggaagtcggctgatataagggacccatcgagacttctgattcaaaagcaatcagagactaagtcaaaaccaaaacactcacatgaaatgggagacttattttaagtcaattactcaaatgttgatgccctagcttacttgacccattttcttctctcttattagaacagcagcaagcattccgatattcccaacttcattgctcaataaaactctaatatccgaggggagctcatctggagttatttgctgaaattttaagttagaacaacactaatggcataaaaagaatttccaatacttcttaagacacatgataacagaaaagctcgtttcagtagacaacaatataccgcattaaaagggactttcacatgcagtcaccagcatagataactttggaggcgaacagtg

SEQ ID NO: 43291 - DNA, 551 bp, Arabidopsis thaliana columbia
tattgaaattcagattgcaaggtgtataacctgatagtagagcaatttgcttttatgtctaatctttaaactctaatttctatttttgagatcacattgtagattcacacaaacaaagtttcataataacaacttaattacataaaccaaaaacgtcggatgtgattgtcataaccttaaattacttaggaggaaatcacttaagagtccatgacagttaaaaactcctctagcaagatatgatgtgtatttataaattttctatatagtttttgattataggacaaaactaggaagttttcactatatatgcttttaaccttaatctaattatttaatttatgaaataaaaatctaactatttgattatttatgttttgttacattttgcttggcttataatatgattttaaagcgcatgcaaaattcactaatattcagaaaatagaggtttacatattgcggaagacgatatgttaataattcacaccagtcacaaaagctttcaataatttggagatcgagtatttggctcaaatggacatgtacca

SEQ ID NO: 43292 - DNA, 494 bp, Arabidopsis thaliana columbia
cattccaatttgcaaggggctataagtaactataacaagacataattcggatccaaagtaaatttctatttaggaatcttgtcaagaaacttaccaaacttgcttcaacgccttagaaatttcttagcttatgtgtctccactttaagaaaaaaaaattcaacagtctcagcattggaaatcttaagtcttcgactagacttctaagaaaatcttgtaatgttgaaatttgaaagaaataaataatcattattaattaagtctcaaaacatatatagaagaccatgacttggtcaatgttattaccagttcctctgccgtgtttataacaaaaaacgaactcgcccatcctaagtatcatcgaccgggtcaatgggttatcattagttagatctttggtttggattttgctaaacgagtatttgtaacgtcatttagtaaatatttgttgattcttggagatatttcacctgtcgacaaagaaaattccatttt

SEQ ID NO: 43293 - DNA, 478 bp, Arabidopsis thaliana columbia
ctcatattttaaaattagtaaatttgtaaacttccaaggaaacaatataaatttaggcatgaatctacaactttgaatactaacatagactaaatacatgcattatacgttacatgatgtttagtcactctcactgttaaatatatttacaatttgttacatctataaattagagacttataagttttatctaacaacactcctacataatttacttaaccatggctttcacaagtaaacctcattttataatgttgtgtatgatctattatactcttattctttttgtgtctgcattagttctttctgatgctccagcggaagcaccaacttcgggcggcgatggcttgttacctctaagcgaaaaacatgttgtaatccgcaacaagttagaaaatagagaaatcttgaatgtacattgcagatctagtgaagacgactttgggcttaaacatattccttggaatggtgcatgggg

SEQ ID NO: 43294 - DNA, 457 bp, Arabidopsis thaliana columbia
atattggtcattggaatttgattttcatacagagaaaatatatagtctttcctcaaataccgtgtgtttgtgtgtttttgtttgaaaacttgaaaaccaaactcgttttacacatcacatttgatttaagccggggtaaacccaaatagtgaattctcacttcaacggaatcctaattcatcaccaaaccaaatccttttgcaattacactttatacgttcctacctgtattatgcagcattctagaaagggaagaacaaacctttagagtttcaaaaaaaaaaaaaaaaaaaaaccctttagagttcctccaaaaggatccttaaggcagacaagtatgaattaaggccaccaggactttgtagcttgggagaacatatggctgtgaagagtttccaaattaaaattaaggcccaaacctttgccggaattaccaggcaaaatgctcctttttttt

SEQ ID NO: 43295 - DNA, 468 bp, Arabidopsis thaliana columbia
  unsure (1)..(468): unsure at all n locations
gataaaatgaagtaagccgcaaactgaaagataatgatcatgtgtatagacagcttaagcaagcacttatggaagttgaggaatcgaaaagggaagcttacgaagaatgtgtcaggcggtttaaagctgaaaatacagccgttgaggcattcgcagtgtanaacacctgcacaaattcataatctcatacattgaaaatgtgtttttgcttagacttgtttccttttacttaaaaggcaagagagtacgaggccatgtacaacgaagaggcgaacgtaaggaaagaaggtaaagaagcattagcgaacgagaggaaaatggtggagaagactaaacaagagagggacgacgcgctaatcatcattctaaatggaaggaagctatacaatgaggaactgagacgcagagttgaagctgaagagatgttggggaaagagaaagaagaacacgagagaactaagaaggaga

SEQ ID NO: 43296 - DNA, 394 bp, Arabidopsis thaliana columbia
catgaaaattaaacatgcatttttcataagcttcccttgttcatccaaagtaggcatcatcttcattcttagttcacttgttttattgcgtattttgcacttaatgttcgtttatcgtgtatgttacctgatactaggtcggaacaatcacatagtaactaacaaaacttggtatattcaaagcctaaagattcagaatatacaattgataacaacgtgtatgtagaaccaattacataagcttttcaaatacacaaaataaaaactatataggcttatcttgtatctatattaacactacctcagcttggcttaaagaaaaaaaactcaaagatcatgaataacaccttgcataactttctgtgctgcatctcggatactcaacagattagtt

SEQ ID NO: 43297 - DNA, 794 bp, Arabidopsis thaliana columbia
  unsure (1)..(794): unsure at all n locations
cgtcttaattaaactttcaattacggattaaaaacaaagaaccaaatacgtcaatcctgtaatacaaatttccattctgccttctttttatgtccttgctacatctcttctagatttgaaatagatctttaaagagaaaaccatgtgattgtcaaagtctgaagcttgattcgtattttaagaaccatgattgaagaaaacaaaacagaaagaatatttgacagttaaaaactgttttcttcatacccaagtaaagagccttcaagtgctatcgcttctgtaaaactctgtttcctctgttttatctggtttaagaagcttgagagctaaaaagtcgagtgaaaagaggaacatacgacatgatattgtgattaagacacaagaaaacccaaaaaacaaatatgtctgtattttgaaagtcttgaaaacttcaaatttatctcctaaggacacggacaaattgttgcaagagaccagctccacaatctcctaaaccggaacaactcaaatcaaactaaaccgatcatgtcaggtatttataggagagacatgaaacgaagatctttctaagcaaaagaaaaaaatgggtgtacttgaaaacctttgggacgacgttgtggctggtcctcgacccgaagccggtggcagtggcatctccgacgaatctccacagcttaactagcttgaacaataccacaggtgaaccaaaatattaagcaatagtaagcattagcggaaaaatgaatanaggaataattttgttcactaattcttcttgaatatagttgatgata

SEQ ID NO: 43298 - DNA, 220 bp, Arabidopsis thaliana columbia
tgcgaaaactgaccactgcagcagcatcgtgtaaaactggagttatcgtccactctcctttctcctgagaaattattaaacacaagaacatgagtctcagacgcttctgacacaaaaccacaaaacactgtagaagaaactttggcaactcactgaattagggtttaagagagacagacaacgaggacaccgagcagaaccaagaccaggattcatagtc

SEQ ID NO: 43299 - DNA, 539 bp, Arabidopsis thaliana columbia
ggccttgtctaatttgctgcaatttcttcgtaaaatgagcataagaggataatgagcttataaagcatattataataattacatgattcataatttgttggaaatccattatataattgaatcatttggacaaatcgctgataagaaatatattagtaattaagagaatttcctctttctcttatctctcacatatccttgagagagagagagagttcacttgtataaacttttgtttccggttagccggatatgtatatctttcgtcttagtgcgatctcaataattctggctatgtgtcagacttttgtcaccggttttgtccggttctctcgccgtgacgagcttagatctccatcttaagcgtttgtcgacatctccgccttcttcataattctctttgtttcaccaaattgtttgaggaataacatcttcatctcttcgttttggtcacaacgtacgagcaaagatcaagctacatcaattttgggtgtagcaatgatgaagcttcccgacgatggtgctaattggagattttg

SEQ ID NO: 43300 - DNA, 186 bp, Arabidopsis thaliana columbia
tcgacgatcgaattcaaaagagtcttcttagggtgaaatcagttccagatcaatgaactcgaagataagatgaagttggtgaagaagaaaacttaggagttggttacaaaatgtgacttggaggcaaaagaattggttgagggtgtggaaaggaagccttgtatttggaggttgttgagtgtgacg

SEQ ID NO: 43301 - DNA, 531 bp, Arabidopsis thaliana columbia
gtcgagcacgatcccctgacatcaagtatcattatgcgctgacttacatctacattaggcgaatacaaaatattgtttagagtttcaagggattcaaatggacgggtcacgagcaacgcaattagagctctttgccgcttttcttcagctgaatcttcttcaccttcgattgctatatcagagcagcgaacctgtaccagagttcgagcaaggtcaccagctatatgagtcaattcatcaggtgatgctcgcacaagtttctctgcaacatatatagctttctccacctgcaacacgtaatataacacaaagattactctcttgtgctttttaataaaagaatatcagcatcatcagtttaatgtcacagacaatgctctctagttacataccccatcagcatcatcggttttcctaagagctccaacaacatccaccagatgtgtaaattgtttcctaaatccttatcatcatccataagatcatatggctccaaagaagtgcgcgttgaattatcagagctgacacttg

SEQ ID NO: 43302 - DNA, 597 bp, Arabidopsis thaliana columbia
taaataaattaagaatataaaagaaagagaaagtgggtgtaggccatgcattatcttaccaataacacgtttcacaccattcgcattgcgctctctccttccttcatatgatcatatagaacgaaaggtggaaactttcttattttgtatggatcgtatacgcaatatggttggacaaaactaatctgtttcaaacaaaatacatgaaatatcccacaagaaacaaagcaaactataaaaaaaataatgcggtaaacacggaaaatatcacatatacgaatcctttttcggatgtgttttcaatcctttgaattaaatatgtccacactcgatatgtaaaaacaacttgacccatcacaattatgatcataaaataccaacgtactgttagcctaatgataaatctcccaagcagaggtgtttagttcgagttatgttgtaagggattttttctcctaaggaaataaatttaatttgatgtgaattctaggaaatatagggcctctcgacttaaactttcaaatattaaaacaaataacaataatgatcatcatgagctattgggtttcaatgatttacagcagagtgtcgatgaga

SEQ ID NO: 43303 - DNA, 783 bp, Arabidopsis thaliana
gaaaatattggattattatggatcgtggcataaaaatctgattactgtttcataagcttccagtattcttttttgttaatggcggaacaaatcgagagaagtaaagaaatggcgagaagtaatagttgtgtgtttccaagagatctgcttcagagatttatctctaactctgttgaaggtgaagatgatgatgaagaagaagatgatgatgagatcgagttaaatcttggcttatctcttggtggaagatttggtgttgataagagtaataagcttgtgagatcttcttccgttgttgtaacgatgcctctgtttcgtgaagatcatcatcatcatcaagcggcggcgatgataacaactaaggtttcgacggagacggtggcgggagcgactcggggtacgggtttgatgagaacgacgtcgttgccggcagagtcggaggaagagtggaggaagaggaaagagatgcagactttgagaagaatggcagccaagagacggagaagcgagaagcttcgtactggcgtcggcggaggaaacagtaataatccggaagaagctgctactgccaccgcttcgagacggcgaggtagaccatcgtcaggacttccacggtggtcagcgactgctaacaaaagcgggcttttgcggcagcacagtgctggtctcgattcactacaagtttccggtgaatctctaggcggaggaagagccgccggaagttcttcgagcgtctccgagttggaaactaaaggtatagtactaatctctctaatctggggg

SEQ ID NO: 43304 - DNA, 717 bp, Arabidopsis thaliana columbia
cagtgtgcattttgtttttagtctattcaaattctcacacaacattaatatcatgatttttctcaagtgctttaaccacttttgcattcaaacatcgtcaagttagaagattagagtttgagaaaacaatttacacagctcaacgttctcaaggctttctaacatttacaaaacccaaaccttaatatacccaaaaaatcgcttccttcaactacggccggtctctaagcttctctatttggcagcataccagttttgagcacattttgcatcaacagataaatcgactgagagaatattccttccgttaaagggcttagacatacagtccacaactatgtcctttgcgatctccgctgattcaattggtccttccaagattacttcatcatgaatctgtttccaatacaagttccctttgttactcaatttccaatccaatagagaccactatgttacaaaattaaaagcttatatttttcatagattgcgtcctgttttggaggggtgttgttgtttacgtgtagaagcaatctccaaccaagcttcttcaactgttgatttatcgatattccaacattgcacacatggcaacatcagctgcacttccctgtagtgtggatcatcgatgctcagagttgggattggagaatagaatggatattagtgttatgataaagtacacaaatagaatggaaacctggactggagtgttga

SEQ ID NO: 43305 - DNA, 151 bp, Arabidopsis thaliana columbia
gcagtagtagccgcagccgtgagtggaaaggcggcggaggggtggttccgattcatacgggtggtggtaatggcagtctgggtggtggatcggcaggatcacatagatcaagcggcagatgaatctacgaggaacaatgtgtgcggtctgt

SEQ ID NO: 43306 - DNA, 514 bp, Arabidopsis thaliana columbia
tatcatcatgactttacattagctaataacataaagatgtgaatgggaatgacataaagaattcatgggaggatgatgatgagtttttaactaaggaactctaattccttactagttaatttccaacaacaacacagtgactgtattgtttaatcttcttaattggtggttgagttgcttcttcttcttcttcggactctgtgttgtttcctccggaagacattgtgtcaacaacttcagcctcttccacattctcttttaggagaaagattagtgggattgattaaagaaagtaatcatatgaattgattgatataattctctgtaatgtagactcttaaatatgttacaatatctactctctaagatattctttttataagaatcttttaaaacttcaagaagattcatttaatgatttccagtaatggtgaagaaaaatatccaactaaaaacaaaaaaaagcagaaaaatatcctatcctatcattatcctaattttagaaaaaaataaa

SEQ ID NO: 43307 - DNA, 439 bp, Arabidopsis thaliana columbia
tttcggttgatactactacatctgtgatatcaacatctaactcatggtggcaagagcgtgaagtaagtatttaatgtgtctcataacccaaatataatttagaaaagatttataggctaaagtttttattatcttattaacaggtgtgtaaaattatcaaatcatttaaacgagtaaaattatcaaatcatttaaacgaaagaagctttgggatgtgatgcaacgatgtttcatattatatgacgtccactcacagcctcaattctctgtgaaccaaagaagagaacagttggtgaatgatggtttggacaatgatgaaggtcatgtatactttgaaacatatgatggtgatatgcaagacagtcaagttcttgagacacaagaaaacgaagaggtgtattgtgttaatattggtgattaaacatgtcagtcaaatgag

SEQ ID NO: 43308 - DNA, 543 bp, Arabidopsis thaliana columbia
actcaacgaatttaaatccaaatccacttctgtaaaaaggagaatgacgataaaagacttgggaataactctaccaaatttcgttacctttaacaacgatttggtatgtcgaaactgtttcctcccaaaccctaacgattttggtccttctccttctctctctttttctcctttataaaacgaaaagtggctaacaaaatccctaatttcgagtttccttcttttaaaggcacactctagggttttcattaacccaaccgattgaaccgggcgatttaaatacaaaccctaaccgattttccggttcacggacgttacacttctggtgtgtagacttgtctagtaataggtggagattcaaggcatattggtgcagtctaagtccagtgtcgatcaccactaggtgagtgtgggtcacactagtgtttggcatcgatcctactctgtcaaacgtcaacactagcctatctgtgtggtacttgtgtcgatcgcacccaggtggtgtcggtcgaactgtcggggccgactttggtcgtgatagcg

SEQ ID NO: 43309 - DNA, 648 bp, Arabidopsis thaliana columbia
  unsure (1)..(648): unsure at all n locations
agattccggcatattctaccgagttccgatccttctgtatggcataattttttttattttcattcaaaaaagtttatatatgtatttttcttctgttttcgaagacattttacatttctacaatgtttctgtgtatcttatattactatagcaaatagaaacctggccgacatacatatgttaaggacgaaattaattaatttgagtttgtgactgacatttattaattttggtggctaaagcctctataaaaatatatgctgataatataccatcattctacatataattacgattctttctatatacgattcttcaactagtaatctaataattttgtgttattaacttattatcatcgatatgcatattgcacgacgtaaaaaaatatagtatgcattagctaatatggatctttgatcaaagatatcatcggctaatagaaaaaaaccaagaaactaaaaataacatagagtcacgctccaacatctatatatatacactcttcacaatattaatgtctataactctcttctcttaatacataatcacaaattaactttctgatattctctctgcatctttcgtctttgtacgagtagaacaagacatagctggtgagctacaccganaaactccgttgttaga

SEQ ID NO: 43310 - DNA, 524 bp, Arabidopsis thaliana columbia
  unsure (1)..(524): unsure at all n locations
gcagcatattttgttgtatgaatatatatagtggcacagtagttttaaagaacctcttttccatgttattgacttgggcggtaatgcagatgggtcaatgaacctccttgtgacttttgtggtaacaaaaccataggccaggggatgggaaacccacttacctcggagcttgcttatggagcaaatcgagttgaaatatatcggtacgtgaattactttgtactgtagtttgtatggtttattctgaaatcacggcctttattccgagagaattgtaggactgtaaaagctaaatcattcgcgttttatagagtgtattggattgagagcaagaattactcaattcctacagtgctttatttattttctcttgttaaactttagtttcacttagtatttcactataacttatacagctgtaccatgtgtccaacaactactcgattccctcggtacaacgatccgctaaaggtaactanatagcttgtacattggaaggtatatgttcttgacttcattgacag

SEQ ID NO: 43311 - DNA, 203 bp, Arabidopsis thaliana columbia
attgataggttggtgttgtttgtttcattgccaatagaaaatcattggataattctagttttagagtcaataatttcttataccaatttggttcagtcgtaaattttagttcggttttagtttagatacgattcggttaattcagtcccgttcaaatccgtaagccttgtggttgtggataatgtttcgagacagttttttgg

SEQ ID NO: 43312 - DNA, 277 bp, Arabidopsis thaliana columbia
cagtgtcgtctagagtgtctcaagtgtacaggagggtaatttaggtcattgtaagtatatcacctaatggaagctctttttatattacaaggattgtcaaataatgatcccaagaaataatcatatcagcatgttaatcactgactataatgtaaggttttgatatcttggtagcgctcatagctctctttgcacttcgcttagtatgagtgtgatcacttcagcgcggatccttctcaatggtcagatcgaggacccggcagctacccagagccac

SEQ ID NO: 43313 - DNA, 560 bp, Arabidopsis thaliana columbia
  unsure (1)..(560): unsure at all n locations
nnnnnnnnnnnnnnnnnnnnnnctaaagccaggaatggggaattgtttagcggcagaatatgtaaacaaaagcggcaataaatgttgccgggagagatggtagggcggataagatgcgtcacgatcgcatccgacaccaacccgcacgctaaatataaaaggggagcggtttcccgcgtccctttggtgcgacttgaatctgaattacttcaggtatttcagaacagcatcaagcagttgcagtgctgcaaccatgagttttgagatacgaatggcgatatccaccaggttcatacgcgtctcctgtggttcaggagcactgccagctgacgtacctttccgctgcctgttgccagctgttgtgcacgcggtatctcaaggagaaacgttgtgcttgttgacataacacagtgtgctcacgcggggttaaggcgctgacggcaccacccgtttcagccaggacttagtgcgccgggtaacgatgcggcccccgcataacacattgcgtacagtgatattatagaagtttactgtataaataaacagtaatatttggacaa

SEQ ID NO: 43314 - DNA, 422 bp, Arabidopsis thaliana columbia
cttcttgttggacacgagatttccattttcctctcaaaagcccaaaataagagaagcctgtttccgaagcggtttacaattttaatactaaaccgaattaaatcactaaaccgaagtctgactaataccaaaacctttttcttttcttttttcgtgtaaacattatcatcttttaaacataatactaagaacataccaaattgggttaaaaatttaaaactcatgtcgaatgagaataaagaaaagtttaagttgagccaaaaaaaaaaaaaacagaacatacaaaatttgaaaattgtctctaataacaaatcttctacagaaagcttctcttttctattctttatagggctagttgaatcttgtatttatgtttgagacatcaaatttatttctgtcctttacgagcaagaaagcgttct

SEQ ID NO: 43315 - DNA, 550 bp, Arabidopsis thaliana columbia
tctctcaaggaagctgcgcaatccgatgggaaaggaacaccgagatgggttcgtttggatgaagatgatcgtaatgagcttgctctcttcttgactggtccatctgaatctgctaaagcaaatcctaatggacatagaaggactgcaagtgctgctgaattcagtgcttggaacattgcggtttctgatgatggtttagtgaagaaatcttgtgatgagccagtggttcgacctccgaggaaagtacctagcttctctggattcttgaattatatggatcctgtgtccaagcattgcaatagaaagtggaagggtttagatcgtcaaggagactctgatgctgctttattacctatccaagctaaccaagtaagtttgatcgatcgatctccaaccgcaagatttttgcctcctgctttgaaaatctttgctaagaaatgctttttatttttttgtttccagcaagatatgaatggatgttcagagaggggcaagagttgtatggagtgtgaggaggactgttatgaaaagcagcttcatggttggtatg

SEQ ID NO: 43316 - DNA, 519 bp, Arabidopsis thaliana columbia
attgaataattttataaatataagagtgaatacatatataaaacaaaatattactcatgagattatcttaggaaatttgtattttttttatttcacaaaaatttaatataatgactaaattaaatattcagataacacatcggcaactatggattttatgtttttgaacctttttgttttgggtgtaaatggaaaattttataccattttcgatttattgtgttgtattataacttattaatcaaccaacgtggaaaggaaagacgttagagatgaaaatgctaaacaaaatgaatacaaccaaaataaaatgcaagcagagaaagagaggaagatggcggaaccagactcggaagagagaggagacgatcgcggagagagcgatcgactgatttgcggatggctgggatcgaaaaagaaccatgcgtaaaaatctctaattcacgatcaaatccataaataagtttgatctaaaaccggagtgatttgagattagaatgagatccaactggatgcaac

SEQ ID NO: 43317 - DNA, 522 bp, Arabidopsis thaliana columbia
tgaaattattagttacttgttcgtgattattgattcaaccaaattcttctattagggtctttttataggcaaacgtatatatattatttaatatatttacaaaaaaaaaatcctcttcgacattttattattgtcaaatgaaacaaaatatattagaaattaataaattggaataattaagaagttatgttttggtgatctatagtattatccacagtaaatatcacaaattatactagttgaacaaactatctacaaactcgttcaccatgcggataccatgaccttatgaccactcgattgggggaaaacaacacacgcatgtccaaagctaaaccttatctatcacctaccaaaattcttcacctaactatgagagattatatctaagtatcccaccaatctaatctccaaaaaaaccccaaaaaagaacaagaaagtttcttgttacaaaaatgagagctattcaaactcatgtgataaccttctgcatgttagtcatcatcgtaacatcatcaacaa

SEQ ID NO: 43318 - DNA, 593 bp, Arabidopsis thaliana columbia
agaacagtctctaacaatgcagaagggatcatcagcttttttctaatttccaaaacataaaagaacaagatgctatatgcaccaacacccagtgccattttagaaactgcccttagttaaaaaatgaaatccatattttttgcgtctactgctttaacacaattaacagatggcatctgatctagaggaaataattataagtttaacacttattcaaaatctaggagtccagtttcttggtggctaaaaaaaagccatgataaaacttacaaggcataaaaggcaagtataatcctaagccatcactttgcaaaatacttcagaaaaccacactagaatacataccagatctgctgagggccagccctggtgcgtttggaagctgtaattgctctcaagtgggagcgagctgaggctgagtttgttatcatcgtgactgaagctggctgcagcagttgttctaaataaggcatctctgcggtaccaaaatatttccagtgctgacccttcattttggcttccatatctcctacaagcaggccagcagcaccaacttccagaagattacaattgttcatgtcttggagattaca

SEQ ID NO: 43319 - DNA, 514 bp, Arabidopsis thaliana columbia
taatctgaggactataatacttccactaggacattactttaaacaatggtatcatattctcatagattcattatcatataaagaaattcaataattcaaataaaactagtaaaaatcaatataacgattttgtgaaagaaagaaaaaaggagtacattaaagggaaggaagaaacacctttgagtgtgagaaatggagatgaagatggaatatgaatgagttaatcttgggattttgtatatatactatatagtatatataaaacatttttgaatacgaacattaaattctcttttcatccaatactaaccactttttttttctgccaatactaaccactttttcttttctttttgagagactttatattcaaccaactcgtgcttcacgagggatggaagctttgattagttaggacttaggaacttgtattaatctaaatatctttttttttttaaaattgaatctaccttacaacataaaatttgtaaagagaatccaaaatccaaaaaaa

SEQ ID NO: 43320 - DNA, 496 bp, Arabidopsis thaliana columbia
ccgggcgggttgttacagttacaagagtggtaatagctaaaatacgcactaataacacaaaactagccatctaagctctataaatatggtctcatgattcactcatgctctcaacagggctgcgaaaaaataacagtttctaaatttctacagaaatatgaacggcattgaacaacatccttatcacggtctagttccacaagaagatacgaagcatcacctggatggagaaataagcaggaacccacaaaaacgaagggcacccgatatcttttctttccttccgaaaaagcttcaattgatcaagaacactccttcctgaaccttgtggaggccagaaatgcggtactacaaaaaaaccactatcaaattatcagcatcaagtgaacaaaagatttcactttataatgctttaacaaccacccagtgttgaagaaacaaagggataaaaaaaatgctcacgcttaggtaagaactgtgagatccttttagtttg

SEQ ID NO: 43321 - DNA, 560 bp, Arabidopsis thaliana columbia
acaaagaatcagcaatgagattcagcaaagattccacattaatgctagaaataacgctaacaggtaatgtcaaccccaaagcaaatccttgtcttgcgcactgttaacgaaacataaacataaacaaaaccaaagaattagtaattgctagacaaagcatgaacatttcgatatacgaagtgaaactgaagaatagatacctctcttgaagaagagactccacgaataagcctgcgtagagcatatctcagatgaggagcacagttatccaaaccatcgtttttctcagcttcaagcatcaaaccaccatcaacagattctttatcaggtaacatttcgtattgcttctgaatctcttgcaacctcaataccaacgactcagcagctgcttctctaacggaagcatcagaagaagccaaatctgtaaaatagttcagaggcaacgaggaagaagaagcggctgcggagggaagagactcgtcgtcggcttcatcggagtttgaatttacagcacaggtataggcttaggcgcgacgtcctacaccattgtttttctcaga

SEQ ID NO: 43322 - DNA, 263 bp, Arabidopsis thaliana columbia
gattgtattggaaacaagatatcgtcaagtctcgttggtttagcaatctgaattgcttcaatagtcagaatagagtcgaacctgcaacattaatcaaccaggcaataagctacagaatagtgatcataattccaaacaaaatgttgagtccattaaacgactcacaaataagaaaaagaagaataagaataggactcatgaagcggcacgtacttagtaagcgcctaccccagacttaaacgacattgtctccaatagcattc

SEQ ID NO: 43323 - DNA, 496 bp, Arabidopsis thaliana columbia
ggttaggtcttcaatagtcccacttgatattaagtaattacttcaatgcatcttgtaggtaaggaatgatgaaacctaaaactacctaatgacttatcatacaaattaccaacagagtgtagactatacagctttaagacaaaagttttgctaatgacctagaatctgaaagatgcattagggctcgtcaagacctcatctctccacaacaatcgatttgtaacaatttcccataaattactgaaccgaatcgggaccggtttgattatatgcattaacaagtttgtaaccggaacaaaaccagaccaaattgctcaaacaatttgccagagccggaactagtatttgtcgtttacgtcgtaccgacaattggtacgcgtaatcccagatttaatcggaattgtgtcttatcgctctaacaacaagattgttgttaccgtcccagtagtcaacttgtaaattcttcgaatctgaaatccgatcggtgagcagaaac

SEQ ID NO: 43324 - DNA, 506 bp, Arabidopsis thaliana columbia
caacaaaaccccaaaaaatgtttcaatacggtaaacaattatgcatcttgcaaaggttcttgggggaaggcaagcaacatacttaaaatattaagccttaacttttcctggatagccattaagaatcaaacaatttggaaaaattcctctacacctactgaagactgtttcaaatactacgactgaatctttccagccttttaacaccacgctgacaagtcggtttaataaaacgtaactctcccccaacccccgcccgccacaactaattagcactttcaaaaagtactcgtttttctggttacagggaaacctcatgcttctctagtcctgcaggatggtgaggaaggtttgagaagaaatggagcgtccgtgctggccaattactgcacagaaataacacttttcctttttgtccaggggtgggggaagaatcaagtttgaggtctcacagttgataacgctacaacgatgactaacgggcttcggaccacaggcgatgcgac

SEQ ID NO: 43325 - DNA, 484 bp, Arabidopsis thaliana columbia
atcccggtgaaattctccattttaggaaatcatttgatagtttgttgaatttgtatctgtagagggaattaataaaccacatacatgcattgtttgagataaatacaagattcaatgctagtgccaagagaatccaaagacattttagaattgaagatatatttcctttaacagaagccagaactgggtaggtgacgcaagttgacccaagtccagttgaatagagtgatgcagagatattttctacaaggagaatattttctatttcgtataagttaggatggtttctaatttcgttaacagtactcacacgtacaggttccaagattacagtcaacaatcttgcagcccttaggacagtacttgatgcattcgttaactgtgcggcaagactcattggtcgcatatatggccaaggttggtgctagaagaggcaagcagttacagtccttctttccatcaggacaagggccgcctatgcaat

SEQ ID NO: 43326 - DNA, 540 bp, Arabidopsis thaliana columbia
tgaagtaaggctttggttcatggtctaaaagcccagttaaagcattaggaaggacaaaaaacacttttaggttgtttcttgatgaacaagcaacctttttaataggttgacctttcttacgaaattcacagggttatacaaaatgttcagttggatactcatgttcatatccgttgtaatcataatacaatctttcccctttcgatatgtctctattagctacgagaagaaccctagcttctccgttgatgttgaacctcacacacttcaggttctgcttcttcctcccttctctgcaattcacaaaatgtcaacaaatacacaatgaggacaagcaatactagaatggttccaactaattcagaagcaggaccaaaacatggagctcaggtgttgtgaccagagagtcgactttaaggaaccaaatagaagagaagagaaactcacggtgagtgattgttgatgccactgatgaccgggcgatgttctgcgtctgtcagggcaaattacgagacattgcgaaggatcagaggcatgaag

SEQ ID NO: 43327 - DNA, 359 bp, Arabidopsis thaliana columbia
aacttatgatagatgagtttgcagcatttttctgttgtcattgttacttctatgtaagtttattactatgtacagaacttcaaagcacagagccttggactcatttttctacttacatcgatcgccttataactacaccactactgtcatggcctcttcatgggcaagagtaataccaaccttattaattcaagtttaatacaaatcgattaacatgcacctaaccggtaatgactcaacacgtatgttatcatgaggatgacacaatctaggattccaaaaaaaggtatgaagaaagagtcaatggtccataaacgaagatttggcaccaaaaagcggagactcctcaagttatatat

SEQ ID NO: 43328 - DNA, 598 bp, Arabidopsis thaliana columbia
agagatggatatgatgatgattccgaaccaattctcaataaactgtttataatggaacagaagcagcagtgattgatgatctaacagacattgacatcaggctaccaatgctagtcttcctgtgggagatagaagcggccttggttatgccgagttttctgttgatctgtgtttatgtaatcacccgaggatgcaaacaattaatcccatcagctaaaagacttgtttgattcaaaacagactttagcagatcatttgtttttcttatctacagaacataatatattctttttttggtgatattatgattgggaaacatccatttcatttaaccagaaagcatggcaatcttttctttgaacaaatctccataaattacagacaaagataaagccggaaacaagaaaatgttgcagataaaatctaacaaaagaaagaacaatcgaaaaactcttcttctccttgtaatttgctcacaacaaaacctcttcttcagagcctcttaaagtggcttccacttgtcttgatatcatttctgattgcccttgaatcacttaacgatcaatactgcaaagtagaagaaaggatttccttgttt

SEQ ID NO: 43329 - DNA, 552 bp, Arabidopsis thaliana columbia
  unsure (1)..(552): unsure at all n locations
aatatatgaatactctagtctcctataataatgttctcgtggtgaattaatccgtgatgtataaaaagaccaaaacaaacataagtaaagaactaaagatggctaatttgaagattggtcatgtcgacagtcgactaaacttgtttgctcagctcttattagtctcatttctaccttctttttaacgatttttttttgtatggtcgtaatagataggaagcagattatatgtattcgtacaagacgactagaatatttgtttattgaagtttatgaatgtttcttagagaaatagtgttctattgtttcttaagtcaaattagctttagattttttctaataaagaataagtagagaagaatgcgtcttcggtgactatccctaattaccatattacatatttgaataggtcgacgagtttgaagtttgtaaataatgtcaatttaaattcgacgtcagattaggaatatgaagtttcttcccacttctctctatcactttgcgaccagcagctctanattacaacttgcatttaactcgcaattttggagt

SEQ ID NO: 43330 - DNA, 512 bp, Arabidopsis thaliana columbia
caaacttggcatgtgctacccacgtctcagccagttgctctctacgtggctatgcgacattatcttttatccgatctttagagaagcctatcgatgtatcttctattatttagttttagtcggtccacgtttattggcccatcatgtagttatttggcaaatgcactgtgtgttgtttaaatataacaaaacggcaaaagaaaaaatcaattcagctatcaactgtgtgctgttttgaacatttaaaacggcataacgtactcaattaaaattaaaagacgacaagtggcgagagttgctttggtatctccatctccctcttgaaatcgacgggggatattttttaatttcttaaaaattcaaaaccgccaatttcaaaattcgttctcttcttcatcatcatcatcatcactgatacagtctgagctcccaagacggatctagaaaattacgatgcgaactcgatttctcaacatcgattacttctctactccaccttctcacgtatttga

SEQ ID NO: 43331 - DNA, 503 bp, Arabidopsis thaliana columbia
tgctgatgttgctgctcataataccacaagaagcaatgatgaaacaagaaagagagaatggaaaaataaaccgctttaagctatttttgtcttaccagcatcaacaaggtttttggtggctaggtaatcgatcctgtaaggaccggtaatatcggagatctctttctcgctagcaccaatacagcatataatcaccgatgcatttcccaatgcgggctgtattgaatctttcttctccaagtcacactccacaatttcaagcttttctacagctgggctaaagacacagacactgcctgttacttttctacaacaaaatcattgtaagtaaatcaaaacattttgttcttacgttgagttccttcatctgtgttctggagcttcatgtccttaacactctgcaaagtatcaattgcggataaacatcaccagaatgatgaaacacttatagcaaatattcagaatcagagtaagccatacttgcacaagacttcctgctctct

SEQ ID NO: 43332 - DNA, 913 bp, Arabidopsis thaliana columbia
ttaacaagctgatccctgaacttttactgtgcataatcccccccccctcccccctctaattctctgaagaacattttagatacgaattgacatggaagatcaatcgaaactttatggggaaaaaaaacattataagaggtaagccacaatattgtaaaatttactacattacatgttctcaaattttctaaactctttagccccacttcttcaatcgtttgcctcttctccggcaatacgtccacacttcttcgatgtgtcgtctctccttcgagttaaacttttttaatttctacccttagtttggtctgtccatagtctgtgtatgtgtcttatgacacttatgtgtaagattaatatagtcgcactaatcaacatttgtggaacaaaagcgtaaatcatgcatcgtgatatatcatagtctagtgcacatgcaattttttttttacacgatttataacgttacaacttacaacgctgtgttaagcaataggcctagtttgcaaactagtagactattatgcaaacaataattggaataatgcagttaaaatatgaaacaaaagttagtcagtgaaactttttagctagcattgatcttttttatacatttatacatgtatagattaataaaaatttataaccatttcaaaaaaaattgtagcattcgtaaacacttaattaaggagcacaatatccccggagcttaattaaacaggaagccccaccgcagaaactaaacccctaaaacatctgatcgatgtaatcccttcatattcacattaatgaattaaatgtatacgcctatgcattcatgtatagatgcatatatcacgatgcatgattgtatcacacacttacatctgagccaaaactagggttttataccatttgtgtgtatatgtatattgta

SEQ ID NO: 43333 - DNA, 548 bp, Arabidopsis thaliana columbia
ctaatttgaaggaattgttactcattcatttctcaatattccaattcactagtttaggaaattatacttattgcataatcttgaggctcacgcgcctactacttgtatataaacaagctcaatatctctttgtgaaatatatcaaacatacatcttctacaaattccaaaatcaatgggcaataaatagatttgtctaattaaaaaaaaacaaatactgatatgggattctaatagaaaaaaaagaaaaatatacattctatttacgcgcatttaatccaaggaaaatgttgatcttcactatatataatgtctatcaaattaattctcttgcgaaggactctttgtttgctttcaacctagactttgtctaagggagtgaatatcagtagttgcaaaaaaaaaaaaaaaatcatgattgaaatattgttcaagttgtatctaagtaactacgaaaatatgcttaaactgatttttcttttataaattattttatagaaattttaatatgtgtttgtatacttatcaacatattttcacatgttttta

SEQ ID NO: 43334 - DNA, 532 bp, Arabidopsis thaliana columbia
ttctttcctatcagacttatatcgtgaagtaacctcactttctgaagctgtagcaaaagtttcactactagtttccatctcttcggctgctgatttaaaactttcagtttcagctccagatatagaatctccagcaaggtcttcatgatcagcacaattcccagtattaaattcttcagcttgatagttattaacttcatccccctcattaatttccatcctctcggttgcagcaactagctctgcatcaaacaaataatttggagcagtaggtggtatatcagcagaaaattctctacaaacttctgtctcctcatatggagaaatatccatcggtgaatacgcctcaggagcctcattgcttccatttggaatagcactttctgcaaaagcaaactcacgtccaatatttagctgcactttcacaggctgcttacccctttccttctcgctctcgtagtagcccaacactgtccttcttcgcattgaaccccaatttctggtccaaactagataatgggtttacttcgaa

SEQ ID NO: 43335 - DNA, 559 bp, Arabidopsis thaliana columbia
  unsure (1)..(559): unsure at all n locations
ctccatttcgagctttatatatgaatatgactttgctcgcacctgaacttaattttgaatctgtcatgtacggatgagattataagcttttgtttctttagattatgattatatttggtcgatattactttcagtttatatctttgttagtactttctttcatccaaagggggctaaataagtataccaacaagaagattgatgttacgtagagaagcctttgtaagaagctattatgtttccgcaaaaaatcccttagtcagaagctaacctttactaatcaatgatgtatggtataatcaaatcccttattccttatagtatttgttatcttttcggtttggagaatcgatgattacagagtaaaaaaaagaataatgttttttcttctcgtcattagtacttttgatgtatggtataatcaaaacattaaatttatgaaaatttgtaatgtgatgttgatattgataaaacatagtaattcataacccagtgagtaaactaatcagaaactagaatgcttggacaaataacgaccanaaaagaatgcttggacaaa

SEQ ID NO: 43336 - DNA, 296 bp, Arabidopsis thaliana columbia
ggatctgtgacctccaggaaagtcctcgtgttgaatccctctttttcgtttttttttttattttcgttaaaaatgtatgactctagaacttttagaccgtgaggccaaacttggcatgtgatacctactcggaaagcccaaagagagctctccgaagaatgaggcacgtaagatggaatgcttctagagtattggtatctaccccaaagtttgatctgaatgcactagttcgtgcagttcgtgatctttgcacatattacggggcgaaaattagacgttcggacagtgaagtagaa

SEQ ID NO: 43337 - DNA, 419 bp, Arabidopsis thaliana columbia
ggatttttgttttcgaaaaaagaggacttttgatatatagagagaaaggttgccaacggaaaaaaaaatggtaggttaaattgttcccagaggagggaattactcataccaattttaaaaaaggaaattggttatatccataataaaaaatgaccggtaccaggatctgggggtgaaccccccccggggttgacctggattgcggtggcttgcgtttgtcggagttccttcgcggttcgaaaccctggtttctggtgaatgttgggtcgaccaactggttactgggggctgttggtggtttgccgcccgggtgggttaacccggaaagttttacgttggtttggtttcggttcaggctatttggactttctggtttcctgattttgggggtttccttggttgtgggtgcaggcttttgg

SEQ ID NO: 43338 - DNA, 212 bp, Arabidopsis thaliana columbia
atgaatgttgaagtaaaaggagacgactttacttgaaattggaaatctttgcagattgttgtggtgagtaggaatctaaaggctacccactttgttttctcgacgcatcaaaattgaatgtattttttggattcaattattgatttcggtaatatttaccaattgatttggattttgcattagagcttgaaaatccagaaatccaagagaag

SEQ ID NO: 43339 - DNA, 240 bp, Arabidopsis thaliana columbia
caaaaccataactcccccaaagtcagaccaaactctaaaaactcaagagaatcaagacactaaagaaaatgggatttgtacttttgaatgaagaatctctgttgttgctgttctgcgctacgaaagaagtcttcaatctcactttgtattgattttgaatcacttatcatgctcctatgagagaaccaacatatcaaaactcgatctctgtattgtactagttcaaaaagtttaatgctc

SEQ ID NO: 43340 - DNA, 535 bp, Arabidopsis thaliana columbia
tcataggccgtttgatccactgccaccaccattagatggtccaaaagtggtagagtcccttctccttcccaaaaactctccaaaaacagatcaagcatcgtactccctcttccaacctccttcacgtacgctttgttcaccatcgttattatcaccgtcttgttgtttccggcggctgccgtatacaaggccgcctctagctcatctaccggatactgtgttgttctctgttaccacttcatatatttgaattcttcctatatatatatttactctacactaatttcaatatattatgaatttacttaccagagtgttgacatagttttggtagttgaagatatatagggcgccggcaaagaagagagcaacggcgacgacgagattgccaggagaaattattgcaaagtggcatgtttttggtttacgcattattaggagctagttaggagaccacgccttttttattctctctctcgtgattttgtactaacaataacatatttatttattatataacggatgatatatgtga

SEQ ID NO: 43341 - DNA, 478 bp, Arabidopsis thaliana columbia
gatttgactacaaaagttattgataagatgcatgaaatttttgtacctgctgaattacagctttgaggggttggtggtgtggtctttctttgtggcacgagtgagatctctggacaggtgagttttaaaagattcacttcctgagatctcctaccttatatgcactaaaaaaacaactatatttaaggattcttgaatcttgttgattagaacccagatttagtagtagtagaggcaggatttcgacttccactaaccatcatgttgcttggtgaagaacaaggtatgcccatgaagcacactgttttgtacattgagcttgaggggctgtctctgatctagccttactgtaacattgcaacgttctcacaattgtgatcccaagttgctttgttgacttaaatgtgataatatagcttaacttttacttgaaccaatctcatgatcaggctttgcaatagggtttactgaactatta

SEQ ID NO: 43342 - DNA, 525 bp, Arabidopsis thaliana columbia
tgaggcggagaagtgaaggtagtttcctaatttcttggtaatattatagtatgctataaacaagttggtttatgtatgtgtatgagttagacaccacgtggtcttctctttctatattagtaaattttagaaggtgagatttaaccaaatctttttataattttctagttataggtgacgtactatttccggaaacttatcagaaaaccaaattttacactagttaacaaaacaacttaaccgtgtacaacgaccaacacttataaacatttttactgtcttaatatctttcttaaaaaaatactttattttatatatttcttttcttatcaagataaatatggacaaagacggctcggaccggaccccatttaatcccatgttttccttgtttttataggctgaaaacgagacctttctttgttttttaatgggcctacttcacactcctcccggcccattattcatcctgttacacatgacttgtctccgtttagatagaaccacataaacggtgacgttttt

SEQ ID NO: 43343 - DNA, 493 bp, Arabidopsis thaliana columbia
  unsure (1)..(493): unsure at all n locations
cttctgtggtgggcgtgaatcttttgtgtcaccagtaataatggtttgtgattgattctcacctggtgagaaatacacagttttaacttgtctacatgtaatgatgattgatgttccttgcaggttcttggtacgggtatgtcttcaaagatgtgggaaattactttggaccatgctcgatcatgtgttctagatagtagcgtccatgtgtaccaagctcctggatttcagaagaaaacagctgttgtcttcaacgtcgtagctcaagtgcttggactgctcgtggattttcagtatattcctgctgaaaagttatcagagattgaaaaggcactgatcctctctgtctacatatttgacttggtttctcttctacatactctcaggtttacataaattttctgatttcaggctcaagcggaggtgatggtaattgatgcattgagtcacctanatgaagtaatctcgtatgatgatgaggtttcatgatgag

SEQ ID NO: 43344 - DNA, 430 bp, Arabidopsis thaliana columbia
cttcgtcaacgtgaccttcattttctccggcgacgtcagctacttcttcaaccgtgtcaaaatccgttgacctactcatcctctgactcgttgacatctcgcacctgcatgactcagcatcttcaccgcaatcgtcacaacctttcacatcatcgccatcgtgtccacgttcctgatgggtcgtctcggaatctgcagatgcttcgaagaacaaaaatgttgacacttcaacgacgttgttctttgtcatgttcattatttgatgtttttttgtttcctggaaaatgataaaaaaaaaaacacaagcacaaaacgcaaataaatctctcttttacatgtatatatacatgagaagagataaggttgctaaatcagatttcttgggagctttaataaagaaattatatttaattataataaaatcaaaaaa

SEQ ID NO: 43345 - DNA, 545 bp, Arabidopsis thaliana columbia
ggtgatggaagaacggcggcagagagaagacaagttgtgaaacctaatgacgtgtcccaccaaatcacaaacaaactcaaattatgtcactttgtcgtattgggcttatatgggctataagattaataatatcagtatgtattaagcccatgatatcaatgtataagcttaattggtgtaatagcatattactagcggattttagtctcaggactagtaatatgtagatattttgacggatccggatatccggatgtaattttttttgttatccggctccggatccgggtccgtctgatccataaatttgttatccgtattcagatccgtttagtccggatatccgatttttcggagcggatcacggatccggatccggatattcgcggttagcggattttagtcccagggctagtgtctagcattgaaaagtaaaagatattagggggaaaaggattaaaattaacactctttaacgttttgagttccgggatctagatgtgaggacaggaattggaagatgttctgaagtgaagggggagtga

SEQ ID NO: 43346 - DNA, 585 bp, Arabidopsis thaliana columbia
tcgtgtttagttatgtatcttgaaaccaaatttccgatgatggtagggattctagggtttggaacatcctaggttaaagtctggattgccttctggttattgtaggtagctctagtattagtttattattgctattgatttttacttgtttataaaagtaaccggaagatctcatggcaagagaaaaagacagacccaaatcgattgtttcttggatatcactaaagcttattaaaaaggtttttttggtaatgtcataattttgagtgtggcgagacaacatttctactctaagtctgtatcattaaaactgaggaagtgacactcacttgagacaagtagattacatatctttcttaatacataagcaactaaaattactgtacatagagatgatatttatactacatacatggagtatttttatagagaaacttagattccctaatggttaactttcaccggactttgtgggactgttgtttgagtcgacgtatattagaatttgatgctttatcgatatagatatatatagatgagtaggctatgtgatggacaacgacggctaaagagtcgtgacgacga

SEQ ID NO: 43347 - DNA, 505 bp, Arabidopsis thaliana columbia
atcccctttttttttttttttttcagagaaagatttatttttaatatactgaggctcagtgttacaacataaaaggctcaagacagtctacatatgaggtccacaacagacttttacgtcacaaaaaagagataagcttaagacgtgtcagaccaataataataagctaaggacacgtgaatcttccacaacctccaccggatgagactcaagtctggtgaatcggagaaccatcgccgggaaagcaccgagcaatgaaactctttttttctatcaccgattatggcaattagatgttatagaacaaacatcaatttcctaatctcatatggttgctagaatcacaaataattcatcaaaacgggtaaagaaattaaaaaaattgagtagttcaaacttgtccaaccattgaatcttcgaactctcttgcaaaagcactaaaggcatatcaaatttgcataggatagaagctttaacccaatcttaggcgaaaataaaattgaaa

SEQ ID NO: 43348 - DNA, 619 bp, Arabidopsis thaliana columbia
ttttcataatagattgtcaacatttaatgtattactatataaatatatattattttgttataaaaccgtttaaaccgcctaaaatgcctaaatcccgactaaatgttttaggcgctaggcggagggtcaccgcccgcttagcgcctaccgttttcttgagtacttgtttgtggttgaattagtacgtattatctctcgagtacttaataattttaaatttcatcaagtcgatttcatataaagtagagactagagagcatatactctaaatgaagatctgttggtaatttatttgcaggaatgactgatcaaagtagtaaataatttgagttattccttcaacttttcaatagcgaccatacatcccagattcgagtaacttctatttttaactcttcaagttatctctaaaagaaaattatgtttaaatcacattagatatgtgtatatttaagtgggctataattgagtaataagtgcaacagaagacatggatggttaaagaaatatctggtccaaaagatgaaacagaaggaacagagtgtgacatcatgaacgtgcaccgtaactatatatgtccaaaccatgggcgtacagttcgcaacccaatagataggtt

SEQ ID NO: 43349 - DNA, 514 bp, Arabidopsis thaliana columbia
gatgttccccaaaggatcttccaaagttaacgaaaaagttaacgtcaagctaaacggcaagtacagaagaagcccattggtctcaagggtttattgagagaatgcaatttttagatgatagatgcaaaatttattggaggttaagcttgttgtaggtaattcatccattgtggctatgtatgttatgtacttatgtcatgtgtaatgaatttcactgtggtgcaaggtacgtaatgatttgtgtgttggcggaagagttgtccaacatagaccatccatagtaatatatcatacatgctagaaataaatatataatatcgttagatcattaataaaagatggaaaaatcaatctaattaatatttaaatttgactgtaggtctatactacacacacaaaaaaaagaaaagtaaaaaaattgcccaaccaaccttgacaatcattatttttttttgtcaaataaacaacttcatcgtatatatctattgccaaaatagatatttaagtaaattgt

SEQ ID NO: 43350 - DNA, 338 bp, Arabidopsis thaliana columbia
cctagctctgatttttttcaattccgatggaggcgggagagcggcgcaatggcgattcgatgagtcacaatcaccgcgcaccgaagaagccacgtctcgctgggttattaaccgagtcagatatcgactctgagttcgctcaccaccagaccggtgttgccagaatcaacaacggtagcttcgggtgctgtcctggctccgttctcgaggcgcaaccgagtggcagcttcgttatctccgtcagcctgatgagttctacttcaacggtctccgtcgtggacttctcgcttctcgaactgtgatcagtgacctaatcaacgccgcatgatgttgatgag

SEQ ID NO: 43351 - DNA, 506 bp, Arabidopsis thaliana columbia
tgcaactacgtcggtagtttttttttcggtaaaggattttaatatacatcaaacatcattcgaagatcagtgacagccaccgacgcaagtggaatccgagaaaagaatacgccaaaaagttttagtcctcattgcatcaaaatttccaagattttggaagttttcgagtttatactgatattctttttcgtcaaagatttattgtacaatacttttataatatttttctcagtttttaaaatttatcaatttcttgtggggttttaattaatttctcttgtgtcttataattatctcatctccgcctctccttagttagtaacgtgattgtacatagctttagtttgaatgtaaccaataactataggcatttatcgggttatacacttctaccacattataatcattttccttgtcatactttaacagggatcaaaatatcctatttgcggaatcttattatggcgagtatatgcttacaaagattaagaaaattataagtagta

SEQ ID NO: 43352 - DNA, 140 bp, Arabidopsis thaliana columbia
cccggtagatggaagagcgaacccaaaacccacaccgcaaacgacgcactcagcaacaacaaacccacataggttagacgcgaaatacccgccaaaaagtccatgcgggaaatatcgagcatacccgtcaccatggggaa

SEQ ID NO: 43353 - DNA, 569 bp, Arabidopsis thaliana columbia
gtaagcgaaagttaaagtagtacttattagtgcagacggagataggagtcacaccctaaaactcattgggtcaatcgaagtctgacattttatttaccctaaataacaattaaaatagtaaaaatgacaagaaaattaaatagaaaaagttatgggccttatgcttcggagaggttgacgtgcgattagggattttatatatggttctgctcatatgtaacgtcacgtccctctgcctgtagattcggttccacgtttcttccttataatcattttttaccgattcttattcgataaacatttgttcaaataagattcttctctcttccataaataaagaaaatcttttatatgacgacgacgttggaggataacaaatcaattcattagtgtcaccttacaacacaaaaatatactaatttgattaaaaagttacaaaaatggtgggattaccaacaataacaaaaacaatgtcaaaatcttcaaactaagcttccatcattttgcttagagactatgacttgctctttcatcaattttcttatgaacaagaacttggtctgtgtttt

SEQ ID NO: 43354 - DNA, 615 bp, Arabidopsis thaliana columbia
gggtaataaatcctcaaactattcacctccacaaaaaattagccatgtcaatcgtcaatggtatgttattttccacgtgttagtgtaatgcttagatttaggattttactaaaatatacactttctaattatataaataccattataatgcatatcaaatcccttcaagtattctacaagcttacaatcttaattaattaagacatttcacagaacaaccaagaagatgtcgtcgagccagcagttgagccacagcgccggagaagtcaccggtcaagttcaggtacatacaacacacaaaatagcgacatttgttttgcttatatgatctgaaatttgacaattttcgaaatctgatttttgtgatgaatgaaccatcaaatatatgtttatttatagctgaagaaggaagagtacttgaacaatgtatcacacgcaatgaaccagaatgctgatcatcacacccactcacagtcgacagttcactcagagcatgatcagaacaatccttccctaatttctcaagcctctagtgtcatccacaggttaacgattctcgcaaaaattttgtcattattataatatagacaatatatcattaatatgatttggagt

SEQ ID NO: 43355 - DNA, 541 bp, Arabidopsis thaliana columbia
tgcaaaatctgcaaacttattcgaagagccagagaagaagtagatcttgtggctactgctctctcctctgaagcctctaacaatcatggcctgcatgcacataaattacaaacttcttcaacagagaattcttatttgattctcaaatcaatgagatgataataagtgaaatctatttgacctgtgatatttgttcggcatgacgaaatatattcttgaagatgcggcgtatgaatgacgcgaaaactacaaaaagcgatcacttgtaagatgagatgtatatagaaagagagaagaaacttttagattcttactatcaagtgtctccagaacagtaagctgctgccagtttactcttcgcgatacaattcccagtgaaacacttcggacctacaatgtaacatatgcacaacgtaccattatgtggtttaggacttggaataactaggctgattgataatattaaagcgaataagtgaacagtcgttacctcatcgaaaaccaaattaatgaatctcagtgaaagcagtagcgtgaggat

SEQ ID NO: 43356 - DNA, 467 bp, Arabidopsis thaliana
ccatgacgacgatgaccgtgaccgtgaccgtgaccgtgaccgcgaccgtgaccgtgaccgcgatcatgaccgtgctcacgatgaccatgaccataaccatgaccatgacaatgatcacaatgacaacaatcacgaccataatcatgacgccgaccaccacaacaatgacgacaacagccacgatcaacaccgccgtcgacaccaccgccaccaccaccgccaccatcatcgacacagagaagagacgtttgcgcaacaagagtgctgcaagtggttgaagcaaatggacaacgagtgcgtgtgcgaccttctggtccggcttccgccattgctagccaaaccaattcataactatacagtctttgtggatgagtcatgtatcgtcactttcgtctgtggaggcagactcattagctgattctctttcctttctaatactatactgccatgtcttctcttcttcttcg

SEQ ID NO: 43357 - DNA, 474 bp, Arabidopsis thaliana columbia
ggctaggaactgttccggacaacgttccgtgaaaaccaaacggacccttagcaggggtttctaggcacggtttctgctctatctcttctctacaactattaagactcatctgtagactgcccccgctctcaattcctctcgcgcgcacacgcctaactaacgcgccgagcatcccgccgccgcaaacaaccgccgccgagtttcccgtcacccgcccgctcgccctacgcgcgcgagtcacgcgcacgtcgtgcacgtcgcgcacgccagcatcccgccgctgcaaacaaccgccgccgagtgtcccgtcacccgcccagccgcccgccctatcccgcgagtcgcgacgccacgcgagttccccgccgcccggcaaccaaacgccgccgaggatctcgccaaacccagccgcaaactgcccgccgcccgcctcgctgtgatgcccaccgtccagcttgtctggctctcctcttc

SEQ ID NO: 43358 - DNA, 291 bp, Arabidopsis thaliana columbia
tgcagtttgccaaatttgaccgcaccataagttacgattgaacgctcggcatcggcacaacaagctttacaattcagatcgcgaataaacacttggtccggcacgaaaaatctcacggttcggtgaccatgaccccgcaaccatggagcatgaacaaacgctcggctcgacacaacaaagccccgcagttcggcgaccacgaccacgcaaccccggttcgacgaccatgagcgcgcaaccatgtagcgcgaacatacgctcggctcgacactagaaagcgccgcggttcgg

SEQ ID NO: 43359 - DNA, 549 bp, Arabidopsis thaliana columbia
ccagatacttgagaggtacattttcatgccagttgcttcagaacaagtattcacttccattcccttacttgtgttagttcagcgcttgagaaatattatgatcttgtttcagactttcagctgtcaagagacaaggcccgttttactatcaggttaaaatcatggtcagcttcttgtcccaaaccacattgttgcaaggttttgtaataaatcttggctcgataatgcattcagaaacttcttctactcatatctcaaaatatgttttgaattctaaaccccatggttatcaatataaagaatattagtatctatttttctcttttctggtgtggttgcaatttatcgtttgtctctttcgtggaaacccttaattcaggcggtattaagtctttctcataaaactttctaagtcaaaccaaaattccaatcgaaattctcagcatgaaagtctcgaacacgtttacatttcttacgcacccaaagactcttgcttcttgcacacgtctctcttggctgtcctttacgataacgaatttgatgagattg

SEQ ID NO: 43360 - DNA, 487 bp, Arabidopsis thaliana columbia
cccatcaataagcatgtgcagcgtctttaaggactgaaaaacctaccacgatttcttctagctcttcctttgcttcatcaacacctgcaacatccgcaaaagtgattgtttcacctccaccagagacttttcccccatcaggaccaccagcctttcgggtcctaagctggccggttgaactctgtgtacacccatagttcttttaggaaattcaaaattttaaacaaccacattaaagtatagtagagatgcaaaccgtggagaagctaacagggaatcgaataagcccagcaagtaccgctatgtagaaaagagctatctgcaacaaacaaaaatagaaacttttgaaaagacccaacctattttatagcacaatcaccattcattgcaaaactataaagcatcatcatcaaggagtaggacaaatagtaaagatggaactataccaatgcagagttgaagaagccacagaacgcttctcaggcga

SEQ ID NO: 43361 - DNA, 100 bp, Arabidopsis thaliana columbia
ggcccttaaaataattatttatatttaagcaatcctcactatggtcaattatatggtaattctttactattatcacttgaattaaaatcaaattactact

SEQ ID NO: 43362 - DNA, 573 bp, Arabidopsis thaliana columbia
gtaaactaaagctttaccatgggaactcaaactggttgttgatgaataaatagtagtatatttgtgtatatatagtatatacaacattaattgttgatggttctaaactcgttgagacatctttacattggagatggtcttagggtcctaatcataatcccaattaccaactcttggcctattaaagaaaagatttaccaaatgttgacccaaatatcgatccttttgttttcggcttcttaccctgtccggtttttacaggttttgtgtctttaccgctactctctcccggggtaaaacccgagagcctgctcactttttcatggtacacagccggaggtgcaagccttaatcgaggcaagctctctatctgtaccaatctctgatctttctgaaggttggttaagatttcaaactgcaacgttgaacagtgtatttttttttagttaattgcaaagaggttttcagttttagaattataaacatcttacccgtgaaagttgttggttatgagaatgatcgctcatttcattctcgtgtgagtaaggcgacgacgttgtgaagaccggcgtt

SEQ ID NO: 43363 - DNA, 551 bp, Arabidopsis thaliana columbia
caatatattgcacagacaaaattactatcataaattgtttccacaaagtcatgttctataaatctctataccaagaccttgaaaacaaaccatcaactgtaattatttgctaaagtaaagtcttttcaggcaacagacgttcttatgcgtctaatagttactgtataatcagcatcatcagtagaaaagtaaagatgaagcaaactcctcctacctcaacatttgaggtatttagtgtatctgagtcaaccaattctgggctaaccggctctggaccaaccggctctccaaaggaagaactcgaacctgatgaaaaaagaggaggtgctcttggttctaccttttctctctccagttgacctgtatctttctcaccatctgcacaattctgtaacaaatttactcacaaagacagatacaactgatggcaaatgaaatgatatgctgggagcctgggacctttcaaaatccaaggtaaccgctaccttgttcaaggaggctgcgctaatatcttaatcttctcgtcatataagaagatccgatttttctga

SEQ ID NO: 43364 - DNA, 353 bp, Arabidopsis thaliana columbia
aagaaaatactctaacagaacaaagaaaaagaaagggttttttttttctgctatgcttccacattcattctttgatggttggtccactatacatcaatgcagtaaccgttaaatcctctggcttctcttccctctccttcaaccatgcatagccttccttctcctcctcggcaaccacgactccatcgactgaacattccaataaaacaacacaaagatctcaaactactaaataggcaagcgtgacgatttggttttctacagttcgataccgatattttaggttctgggaaacaaatccagactcataacaaattctaaatcgtatcaacattgattcatattttgaaagt

SEQ ID NO: 43365 - DNA, 486 bp, Arabidopsis thaliana columbia
acctctagttttcattttttacaaacacgaatgaatctggagaacatagctgctacattgagtggatctcgagctgttacattgagacaaacttatcacattcatcaataaacttatggaacttcagtattaagttataaatatgcttaaactttcaactgacactgagtgtccagccccgacccaacataaatttgtgtattacgggaatttgtttttgtttggaccttttgttatttgaaaaaaaaaaaaggcaatttttagaacttttttgaagtaaattttgagtgttaaaaaaaaataaaaaaatagtgttttaacatttttaaaaatatggcatttttgtatataaaagaactgggttattctaatatatctttaaaagaaatttaggattgttatcaattatatttggacttttttttttaccaaaaaaataaaagcttttttctcatgtaaattttttaagtgagcatatactttaag

SEQ ID NO: 43366 - DNA, 389 bp, Arabidopsis thaliana columbia
tcaaatttaattggtcctattgaagaaatcagcttctatggacatcccattacttacatggccccaagtgtgtatggccatccccatgtaagtttttcaactcttttattatcaactctttttcttgtaaaagtgcataagttttgacgatctcattggtctttgattaggcattgacgatgcatttccagagttacatgaaccagatgacgatttcgttgactgtagatccaacggtcataagtgatcctcatcgactacttgacgattgggagaaatctttacaaagcatcacagctgctgtgcaagaaagagactccgctcattagattgaatcaaatctcatcatcgattaatcgtccaaattaagtctaccgtgtttgcttatg

SEQ ID NO: 43367 - DNA, 445 bp, Arabidopsis thaliana columbia
tccatgcagtctagtatgacacttgcacactaagtttcctttgaacaaattagtaaaatcttttggagatggtgtgtcgaatttacccgggtaatcttcagccaaaaaagaaacaagtaaatttcatgtgcattttcctctacttcggcatgtacttatagttagtgccgctccaatgtttgggaaggccctaatcaagataacttttaattcctctttttaaaatactatttaaatttatccataatactattttaacttcgactttaaacgactaaatatttgaaaaacaaaaatgataacttttataggaaaattgtaaataataattaaatttcatattttccaaatgatattgtaaaattattataattttaataattaacctatctcccccgcttttctagtcaaacttttaaacaaaaagcatgaatttagacataca

SEQ ID NO: 43368 - DNA, 503 bp, Arabidopsis thaliana columbia
tcatcacgagagagctttgaaacagaggatttctttccaggaatattaccacttgaagaggtgaagttcatgctgacaacccagtctgctcatgtttcctgggagtttggagacatggagtccttctctggagtagacgatcccaagctgaagatccgttgatgccctgaaactgagaagattcttggacctggccaaattgaactgtcatatcaccagcttcttctcttctttttggaagatatttgtcttgtttagtagaatcctttacattcatagcttttgtgtagctctttgggttgcccagagtttctgcactgaccaatgagccactcaaggggactgtaaacacaagcaatgcatgaggaaatatgaaatctattccaaccacccaacacaatgagatttcacaatccagaatttaagatcaaagatatgccatatccttttgaggcattctaagaatacaacttcatagctataaatcctacaataacaacctt

SEQ ID NO: 43369 - DNA, 781 bp, Arabidopsis thaliana columbia
cccgaacattaaccctaagaacccaatagcttgattcaagaaactgaatgaaggaaagaaatgagagatgttttagaaacatgtacaaaggtacagaaggggtaacaccgaatatcagctagaaagaagcaacaaatcaattcacaaacgagacatacatatagacataacatatacttcaccaaattcatattttgtcatcagccatttcctggtgttctaacaccaacaaatctgatgataagtaaagccttagaaacgccgcacacttgtgaaattcaacaactttttgccatcctcaacattcacggcgataatcacggccatagctgtagtttggcctagctccgaaatcactctcagacctctctgcagcagctctctcttcctctaagctcaatccacccatcgtcttctgcaactgcctgtgatcataaggagagtaatcgactggtgccgatggaccattaggcactccgtagctagacaatcgcgagcccataggtggagcttgtggcttgtactcggtaaccagaaaggcatcaacgggtgctgagggcccactaggcggtggaccgtagttagaaaaccgaggaggagctaaaggaggctgcttgtgatcaatcgatgagaaggcatcaacgggagcagatgggccacttgggaggccgtaattggaggcacgatcgtacattgaacgtggtggaggaggcggataataatacccggaatagtagtgatcagtgaatgcgtaaggagacggagacggtgactgtgagaa

SEQ ID NO: 43370 - DNA, 130 bp, Arabidopsis thaliana columbia
ttaaggtaatttaacagaaattcatagcgggtttgaaaaacatctcacacctctagtgagaggagaaatcattggcaatagatgggtgcacaaatgactttcagaaaatgcctcagagaacatggagttc

SEQ ID NO: 43371 - DNA, 447 bp, Arabidopsis thaliana columbia
caaaaatagtatacaacgtattggttgaaggattaacctttcatatatagattgatagaaagtgagccaaaattgcattagaagctttaaacatattttgaaaagggatgatgtatgtaagaataaaccttcatgattcctaccaagttttatagacaacatattcacttggttgacggataaaccttcatattcccccccccaacaatatatgtccgtgtgtcgaacagcatatatcatgattagaccataatgcatatatacttgcattacttgttgcatagtttatctcacttctactggtaacatagatggactcgaggcatcacacatcaagtcccaaagggattagttgtctggatgccttttgtcccattttatcgaattttcatgcaggctcttcatattaatgagaaattgcaaaacaaaacgcacatgatcattata

SEQ ID NO: 43372 - DNA, 1146 bp, Arabidopsis thaliana columbia
agtcgacacgatcccctgaaaatttagatctattttagtaatagatttgtttggtttagtacaagggattgtgaaaaagataaatttgatgattaaagaggacgcaaagtttggcgagtctttactctatatagagatagggtctaagcattcacatgcacttatgaaccgtccaacatcaacgttaataacgtgtgattcgtatcaaagtttacatatatttggcaaactttaatttattatcttgaaaactatatgtttcatttttgccgttttgagtaaagaatcgtacacccatcaattttcagatatatatgagccaatccataattaatctgattgattagagagaacgttataaacatctttaagatcaacagtatattattggttgaccaaaaaaaaattattttgatggtgaaagtcacataaatcaagtataagttcttgtcaaatttaaagtaatctctacgaataataatattggatacatgaatcataatttgtgatggtataatatatggtacctttcccgtgcaaaagaaattgagtcattgaagtgttaagcaatagtttgaagtttttatattgaatattacaaagtcaaaagcccttaattacatcatacacatcaagtcatgaaatacatataatatcacacatcaacttgatcattcataaagtcttacgttccatcttctctacaggacaagagtctcccaagatatatatacccactaatacccaaatccatagacacaatctccctctatatatccatttctccaaacgaaaacaaaaaaaacattaagccaagaaccgcatatacgaaccaagaacacatcatcgttagttctaattatgaagaaggatacatgcaaggaaggatcatcaatctcgagaaactcatcggtgggatactatgatgaacggatgccagagggtgttccgttcgagtgggagatgcagccagggactcccattaatactcaaccacgggaggttgttcctccattaagtcctcctccagctatgctcagcctcggcctccccaagccatccatctccatcgaagagccaaagaactttgtgtttccaacgatagctgaagctgcggaattggaaacatcttcattgcaagagata

SEQ ID NO: 43373 - DNA, 627 bp, Arabidopsis thaliana columbia
tgcagtctagatcaatcatgtagacatgtggagctcgaataaagaaaacatgttcatacggcatcaaagatatgtttacttttgtcatctgatcacataagtattaagtatatatattttactcgtcataaatgtgttgtatcttaatcgttgcaatgtaaacaagtaaaagtgaaaactgatgacaagaagtcgaacgtattaaaaattcgaatgtagtaaaatcaggagatattattcgagcttttcttaaggctaaggcatattaacaaataacaaacaaagtagcttatactacagaagaatagttagttgaagcaaaaccattaagaagtcgtcaaagtaaatcttgttggctacgtctgaaactctctgactgctgattctgaggacccgagtataagcggtaataactgcttcctgattcgtttagccctggaggagtcccatacttgaggtccattctgagatagaacacaagaaagaaataccggtttaaatttcgtataaacccgagaatagttgtacaaaccaaaatttcaaatgctcacacccctaagtgagatgtatgggaattttcttttacctgatgctgaagtgatccaagtgattgctaacagtgtgtgg

SEQ ID NO: 43374 - DNA, 573 bp, Arabidopsis thaliana columbia
ccagcgtctcctttacagcaatagtaaaataaagttttaagctcacagtcacagtaatgctagttcaaactttaaagatgacaaggagattggaaaatatttaaaatattacttattctgagctgtgtgaaaattggggggttgtgcagtctcataaacccatccaggagcaaatatggcagctgacacattgtttctcttcagcaaatccagagcagcatttacctagcatgtaaaagaataggaagaaaagaaatatttaagtatagatcattgttttgtactctacaccaatagagaagcaaatattaaagagtggctgagacatacagtccattgcccaccaccaaaagagccccgcccaaaaacatcaattcccatgtagacatcgaattttctgtccccagcaacttcagctgataggtttgggtagctctcctgatacatcattactcactaatagtaaaacaagacaaatagaagaaactgagactcgagagattgatcaacccatagacagaccttccatgtgtagttcatgaatatccatcgcataagtcaaagaaaggtttg

SEQ ID NO: 43375 - DNA, 516 bp, Arabidopsis thaliana columbia
tgtttctgggaatgaggcttttcaagcatcttccatcaattcctgtccagcctttacatgtaagcacattgacacgattccagtaaaaaattcccagctctcagctctccttttttccatgtatattaactgctctaaagtatgaatcacgtttttttgcgtgtatgtagattttgtttcatattggaccgatacactttgtttattgtgtgtagatatataattcctaagagcataacagattcgttgatttgtagactctactatttgttgctttctatattctctgtctacttctcactgcaaaaatattcatgtcaggtactttctcgaccatctggtttctttctgaaacctgtacctaacatgtccgaaagttccaatgatgggtccagtctgctgagtatcaagaggaaggacataacttgggtacctcaacttagatataagattacctcttagttctcattacttgaatacttgagctaaaaaaattccatgctttttgttactttt

SEQ ID NO: 43376 - DNA, 502 bp, Arabidopsis thaliana columbia
gatacaaagtcgaatctggttattttgtatttggaatttattaactgacacagtcatcacaacaacaaaaaaacaccccatatgattaaattagctagaagatgaagagagggcaataagaatgataattgtggagaaagattgattattaactacatttaagacacaatcaatgaattatcacaaggacatagaaaaagagaagacaatttacatagaatcagatcaggtagctcttgatcatcatattcatcatgccttttcggatcggtaaggagagagagtctggcgctcagactcagagacacgagttgcatgaaacttggcgatgaaggcagacgctttacggtcgatgcctggttcagcgacccaataacgtttgtcttcatcactagccattgccttgcgagtgtaccgaagtcgtccatgagccgtctgctccactctgtgagatcttcgtgttttgaagaagctgaagagagagacctcttgctactgtgag

SEQ ID NO: 43377 - DNA, 557 bp, Arabidopsis thaliana columbia
atctatgaacctaagagattgcatctgctcaaaaccttctggaggtgcaactacatctttaccagtctcactggtcttgctgaaaacaagttcaaatcgaagaaacatcagcataaaacagacaaggtacacagcaaaccagactatgcaatagtaattacagacctgaagcagtgcagtgtcacagctgctttatcctcctcctgcttttgtttgagtttagcaagctgctcgactttcacaagataagcttcctaaaaacaaaaaaatgaccatatcaatcataacaaaatgcaataaagccatcatggcaagaccatgtaaatttggtatcaagagatcctaaacacaaatagcctctggaaaagaaaagatagtaattcccagccatgccaagaccatgttacataaactcacctcagtcttcttttctgtcatcttcattacctcagtattctttagtgtcctcttctttacctcggtattctttactgtcctcttcctttttgcctcccagctaatggatttcactgcagcatccgagaaggtactgtttg

SEQ ID NO: 43378 - DNA, 147 bp, Arabidopsis thaliana columbia
agaaatcctgcagtccgatgcaccaaattcatataaacggacctccacggaggtcgttaactcgtatcaggacgccacgaatgaagcgtactgcctccaaatcaaatctagcgaactcaatcagattctccccagatcaccagcaat

SEQ ID NO: 43379 - DNA, 375 bp, Arabidopsis thaliana columbia
ggaccaattatatattcccttcatgattcaccacacaaccttcattaatcatttcctgaaagagttcatgagccttttccggctgtttgcattttccaagcatcacaatcagcttcacatagatgccaacgtttggtttgtaccatagctgttcgcgcaatagttcaaacacctacagatccaccaacgttatcttgttcaatattgcagctaatcaaaatacaatctgaagctaagctactataagcataatctgagtttctcttcttcaacattcatctatatcaaaatctataacctaacataatcacattagtgtagcaaattcactattattgccacaactacacttaccaatttgagataattgcggag

SEQ ID NO: 43380 - DNA, 525 bp, Arabidopsis thaliana columbia
  unsure (1)..(525): unsure at all n locations
ctnnnnnnnnnnnnnnnnnnnnnnnctaaagataacccatgtagtagtgattgcaagtagagctggacccgactcagatacgatagggctgcgctgccctaaccccagcgccaaggtcagagtcattccttaatgagtttgcacaccagagtatattcgggagaactgttcatcgttcatgcccaattgcttcagaagaacagatcctggagcctcagaggcaccgggcaaggcttaaatgcagctaaacatcccgccgtctttaagcaccgtttctgcatggcactaactgtgccgcttgtgcattcttggcataaagtggactatacgattcagtgaacatgaccgtgcatttgttggagtgctccaaagtacacaattgtgggaattggacggtagatcggtgacaaaagctttaaattgacgacgatcgccaacttgatactccaaaggttccgaattttcagcttctcgtcaggatgaaagtctgcccgtacaaagccctctcggtgcttgagagtcttg

SEQ ID NO: 43381 - DNA, 503 bp, Arabidopsis thaliana columbia
cttgacagacatgagtccatgacaaacatatatctgttagttcttaaagttataatgtaatcctacaataaacagaccaaagcattacaaacaatgatcaaatacagagacgccctaacgtcttctcctgctcgtaagaatataaatggtaactatataatcataatctaatgattacaattacaaattaccattgtaaaaaaaaaaaaaaaaagtgtaggttttatgtaggagaagtagaagagtaattcattccactggattctccggtcgacaaatcaagaagcatcttcttgtatggcattgcactcataagcctgcaccaacaacatcaattcttttagattcaattgaaaaacctcaaaattttctataaagaaaaaaaatacaaaatcaaacctctctttgcgcttctccaagaaccgagccaaggatgctttccgagcttgagggactggaaaaaagcaattttcgagtttagacatatgatttgaggaagcaaa

SEQ ID NO: 43382 - DNA, 505 bp, Arabidopsis thaliana columbia
catcaattcaaaacagcgagtattaagtgtatgaacatgtgtaatatgcgtccgagcgtgtgtttgtacatctactccatatttgcatggatctataacctagcaagcgaaaaaccatgatttagaagaatatgcaacaaaatttgaaagaaaacaaagaaaccctagatctcatctaaaagctaaagtgattctaaatggatctatgacaacaataatatattcgtatgtatgtatatgaagagatagagcgtttggaacatcagaagattgatgaaaaactagagatgggaaaagaagatgatggtatgtatgtatattcatgtattgtatggagagaatagatgagagagagagagtttgaacaaaacaagatttgatggagaaagagagagagggagagaggcgtagaaaagggatggtagatgcgaggaaatacactgcggatacaagtatgcaaaagtagtgatgggtttttataagcttcacatttagaacttttggg

SEQ ID NO: 43383 - DNA, 541 bp, Arabidopsis thaliana columbia
tgtttgatggcaaaatgtggcaaaatcgctacatgtaacaatttatcaattctctaaccgaaacaagaactctttaaaataatccaactgtaaactggtcggtgaacttggagtttagttggttttgtctgtagcgccgttatatttctgatgtctgctaaaaaactgaatcgtgttcgtcgtcttccatagctaagcctataatgtatccattaattataattaaagcctcaaagtttatgtccatgactcatcatctctttttgtttgtagaatctcaagaaaacaacaatcatcctgaagtcattattgaggaagcttcaagaacgatcgggttcaatgttagctcatcggatctaagcaatgatcacagtaacaacaatggtggatacgcaggtttgtttgtatcatcaacagcttcgcctagtttatatgcttcctcaaccgcttctccaagtctattcgcaccatcgtcctccatggaacccatctctctctgtctctcgacgaacccttctttgttcggaccacaatacgagat

SEQ ID NO: 43384 - DNA, 415 bp, Arabidopsis thaliana columbia
agccatcaactctgacaaagtaacttgtatgcatcaaaataattttactcattgacttgattaatcaaattcatgactttcatagatttacacatatgttcaaaaaaggaaacagaacaaagcaaaactatgtctacatttcctaaagcttaagactacaattcatctttagcagacccattcttcggtttcaacaactcttcgttgataaaaacagctatgtccttcgcgctcaatttcgttgatagctttaactgcaagtgaaaaccgggtaagatacactacctacaaagcttataagcaaaaacagaagtaatgatgtctaaaagggattgagctagtgagctctttcaaaatggttattaccggtttctccttttcgccagatttgtagagcaagattatcggatattta

SEQ ID NO: 43385 - DNA, 533 bp, Arabidopsis thaliana columbia
tgctccaaataataatcatataactatatattatagtaacctattaatttatttgactagtagaattagctttatgatggatggatgggtgcgtgtggggtattaacatttaacacagtatagacaatgccactagcatcgtagtgcttcttccataactaagcttataacatagtcatagtcggcacagaagaaccctaatgagtagatatcatttaattttgtctttattcctttatcttcaatcctagttagaacacaaatattgttttttaacaatgtgtatgtttattgagctttaaagatatattcatattgggttaaatcgttacatgtttattataaccgatttacatagaatcatactttctgattagttttatagtgatactatttagatatgattagcattggttaagccaggtttgaaatttgatacgatatagatattggtaaatagatctttcaggcataaataaatggttaaataagacatcttccatttgtttagtgattagcactaaggcatgctt

SEQ ID NO: 43386 - DNA, 413 bp, Arabidopsis thaliana columbia
taagaaacagcgtatcaacagctcatgagttaaaggcaaatgacataatcacaaaccaagtattgcaatgatcttgacacctactagttgatcttctaaaattcaatttgagattcagatcaagcagcgttagtgtatagtacctagattcttccgttggaatccagttccaatatctccggtcttcaattccagtaatagacattcctctagcagaaatcgccatacaaactcgtcctgtaactctatcaatccatacttcctggaaacaacgacacagagagttcaactaccaacagagaaagcttcatcccaaccaaaatcaagaactcagcaactagaccctaattcccacatccaatacatcgaaatcacaattcaatcctcatggcttccaagcagataccttatta

SEQ ID NO: 43387 - DNA, 367 bp, Arabidopsis thaliana columbia
  unsure (1)..(367): unsure at all n locations
nnnnnnnnnnnnnnnnnnnnnnctaaagacaatgacaattggggttgttgagcttgtttcttacgagcatttcgtgttctttcaatcatgagtatggctttctactttagctgttgcggtttgcgaccctgccgcaactattgatataactggagtcttcaggtcttggccgcacaagttctggtcgttatgtgcttggctccgatacttgcttcgaaaagcttcactcactagtcaggacaaatttcgcggaagtcctgagtggctgaaatacttggtagacgctaggatcgagnttggtcacgagtggatgatgcgagacatgcttangataacgcgcgcttggaaatgattanttnattgattt

SEQ ID NO: 43388 - DNA, 535 bp, Arabidopsis thaliana columbia
tgctataaaaaaaccaactacaaaaaaattaacaactaagcaaaattcattaacaaaaatacacaaaaagatcatgattacaaagctaatgagataaaacttataaagtcgtgactaagcattaagtatccaacagagagaaaaagagagagacctgaaaaaaatgacgactgatagatgtactgctccatctttctctatttaagtcgtaatcttctagtcaatatcgatccaacttctctctctctctcgcacactattctatgtatttatcttcttcttctccttcgcctgcaatttctacgaatcatcctctctcgtcgttattctttacatgtcggctaattctgggcctataactatttcaatgtccgacttcgtgatctagtgagatcagaatcacttgcgaattcttcaggtactctcttgttgtttcgtttaatctcttcacaatgccttgatttctagggtataattatggtttttgccagacaatttaaggtttttctcgagaattgtagttttattgtatata

SEQ ID NO: 43389 - DNA, 427 bp, Arabidopsis thaliana columbia
tattatctaacctcgattggaaattggccaccgagttgttcaatgtagcacagaatttgaccttctttcacttggtctttctgtcagattaaacaagagcaaataagagattagtcagtggtttcccccatgaaatcaaacactctcttctgttcaagaagattggttatacctctttacaagacgaaggcaggcgtttaccctttatggttttggatctcctgaagaaccctacctgcacatattacacaccatttagattgggatcaactttctgattgaaactataaaatatagcattttccaacagagtatatgacattttgcctttgagttgtgtggtctcttacttttggagattggagaatcatcaaaccctgatcagcggctgacgatgctggttttgagatagccagtgaagtagagg

SEQ ID NO: 43390 - DNA, 534 bp, Arabidopsis thaliana columbia
tcccggttcctctcaaattaactatcgaagtgtcagcttgatcttcttttctggagctgttcagtaccttttctatattttcataccgctacttcagattgttatcatagattttaaatgctcacattagggaagatctcgagttgactgaatgataaaaagctttgcgttttggcgcttgaatgtgtgtgtttcaagctttgtaaccatgctttttaagttccatgacattcataccttgagtttgtgtttgttctgtaattggattgtgaattagaactgcaattctgtgagtcttatccttcttggatgtggacctttggtgcataatttggacgtgcaaattatcaatcaaaagttttacttatgtaagatattctatttgttgatagtattgatcacaacgcgtatctggatgcggcacgacccgggataaaggattcgatggaaggagtctctgaagccatgcccatggattttaatgaagagcaggtgcgtaccatacataatgcacgagggcatacgtatagttgc

SEQ ID NO: 43391 - DNA, 474 bp, Arabidopsis thaliana columbia
gtaacggccgccagtgtctaaataatgttttaaaacaactcttatggatataaatataaataggtcccccgatcggcactcgacaggtatagatcaaattcattaagttggagcacaatcagattcaatcttaacctctttctgatacaatcattttggatttctattacactactatatggttaacgtcatgaggatgtctatgtgcggtaaaaaatataagttttcaacaaaagaattcgcaattcagaaatattcattcatagcccttctatcattctaacttatgttcatatacttaatataattagtattccgcatgtatagacatactaacaaagacatgttctctatcaatattctaaactctggcactggttaatttggaattgtcttatcaacctagtttaattcaaaactctagaagaaagaaacaagactaacaaagttgtatactattttacatactataag

SEQ ID NO: 43392 - DNA, 525 bp, Arabidopsis thaliana columbia
cgtaaagtttgttagttaaggtaactgtccccaataatgtttactagctaacctaatgattccctatactttttgtttgatttatttggttttgtaatttttgacaaaccagcaaggtattaaccattttacgatcatggacatggtataatatatctacacaagccaatagtaacgttgaatacttgaattccgtattttccacactagtcttgtttggtgcaacattaatgttattttgtttggactgcaacttgcatgttggatgagtataatgtcctttgttcaaatttgtttttgtgattatttacaatatcaaataatcttggatgttggcctattgggttgtaaaacaaaaagtttgaagaaaacagaagaatcctactagataaagcaatttatttgtttttgtaaatgaaaaaaggctcacaaagaaaaatgatgttagtgaatccacaaatttatgtcgttacgatttgattagataattgttaggcatcgaatgattgcccaaataatttgaca

SEQ ID NO: 43393 - DNA, 457 bp, Arabidopsis thaliana columbia
ctagaataattgtagactagagctatgttttttagttttctcaaaggtgttcttattggccttgaaatgccaacaaaagcccaattaaagttgaaactttcgtgggaatgggatgcttggtataatggtagcaaagttacaattttatgaatcaattagttcacaattttattggtatatacttttaagtatatggttttacgactttataaaaaagcaaaaagtataaaaattatttttgaaatgactatttctacaaaaaaaagcataacagcttttattggctttgatgatgtcattatgatttttagtaacaaacctcgaaaaaacacaatgttgtgttatatccgtaactaattgtctttgcattacgtggaatatatcttaccattaattatctacagaattttagaattagatatgtatcgttacaatttcctacaaaacaaaatgtcat

SEQ ID NO: 43394 - DNA, 509 bp, Arabidopsis thaliana columbia
ataagattgccatgtgtttaaaattcgtttacttgttatattagttggagatccccgaccacgaaatgttaaaaaacacatcaaattgtataatgacttggacagaaaataatttagaatttatagacaaaacacaaatacctacttttctaccaaaaaaggcatttcaactcatagttttgtggttgataatacttgatatgaatgtaagttggaacaaagcccaccccacgtgtgtgccgacgacgacccacgtgccgaacattccgttgtggttacatgttgttgttgttgctgtttcattggagattgatagatattgtaccgatttcattcattttgcctcacacacaatacttcgtggggcacatgcttccttgattccttccactttcacttctcttatttctccttttctttcttttagcttcttcttattcatataacaacatctttaatagtaacagaggagccaaacggcatgattatgatctcctttgataaaagag

SEQ ID NO: 43395 - DNA, 464 bp, Arabidopsis thaliana columbia
tgattgtttttgcgttatctggcttttcggcaaaacgtggtaagagacttaccgattggtaaagggctgagataaggtttaacgacagtgcaaagagtgaggaccaagagaagagaggcaatgaaagctccacagcaaagtctcttctgatcagttttgctaaaactacgagcaagtactgtatcgtaaagaatatccttctttgtcatctcttgactcttaagttacacaaaacttttctttcttcttcagcaagaaactctataatcagagtttactggctaatgtagagatatgaaggtcaagctaggttgggagagcgagaggattatgtgaggtatttaagaatttgtttgacgatattatctgtgttttttttttcactataacgtttttagtattgagaatgaatataaagggtactggtttaaagaagagaactagctagagcatgttcaaagtgg

SEQ ID NO: 43396 - DNA, 449 bp, Arabidopsis thaliana columbia
tatataagattcaacgaagtggtgcagattcagtgagataatatgtatgtggaaaatgaaacgtatacaaaatgtacgtaaaaagtgtactaagcaatgtacccgtccgagaaatttcgtgattgagtcactcgttcttttataaggtttacatttagaagattttaatgtgcgacttcaacatgaaagttgacaatttcagtaccggtgaagacagaagttatcgatccaagtccaactatacggcaaattcatcatccaatccggtcgtacacacatgttcttctcgatgttgtcaattctgaaaatagtaaagtagatgacatttatagaactcctctaacctcatttgcaaagggtcatcaaggctttgagatgagagatatctgggttaagtagttaagccactttgctccgaaaagtaaggatcaaacgggtctcagcgatct

SEQ ID NO: 43397 - DNA, 445 bp, Arabidopsis thaliana columbia
cacattgtaacatcaataatacaatatttaacatgaaaaatcaaattttggaaaagaaacaaaaaacattacctattgggttttttgacaagtctgatgggtaaagactggtttgttttgaaatgcgttccacggtataatccgttagacaaaaccgtaatttttttatttttaaatgcagattgaataaaatatagtgattggtaacactactacgattttgataaataaaaaagtttcgaaaatcgctttttacaagttaccattcacaaccttagagtttcatcagggcccgtcctaagaaattggagtctaaaacaacaaaataatttttttaagactattattaaattttcaaattttggggtcttttcgtaaaaatatttttttggggggcctatttgaaaatatatttcttatgcgaatcttttggaaaaatttggga

SEQ ID NO: 43398 - DNA, 576 bp, Arabidopsis thaliana columbia
  unsure (1)..(576): unsure at all n locations
ctcaagccgacattaaattttgatattagttttcactttggtcaaaataaatttaaaattttattactcaaatataaaaagatctctttagtatttattttaattaatcagtgtaataataaaaaaaattataaaaagaaaattgcagatattgaaacaggataatgtgtgggaggacgtgcagaccacagcaatcaccattggctgttttgcgaaacgnattagagaatgacatgttgatacaaaaaaaactgggtgccgtttccacgtttctctaattaccgcttccccaagtcacggtttcaccattaaagacaagggatgggccatctctcatcgggaaccggaagtatcggattacagtcttttccagattttgtatctaccggcattacccagtaattttgggcggtgcattgctatttactttatttttcatacattcaccattttttttccttttagaactgattatcgttatttatttattgttgataaataaaagtaagtgtttgacatctttttttttgtgtgtgtatgccagataatcttataaattttgtgtgatatgattgt

SEQ ID NO: 43399 - DNA, 465 bp, Arabidopsis thaliana columbia
gatccagaaaaaaaaaaaaaagtggttccagttgagccttatcatcatggaatgaaatcgagctagcgttgtcaagaatcatgcaaagcgtacctttattcccaaaacgattcatgaccaaagttttttgataaaaacatatgttttgatggcaagtcaagaggccacgtaatcctcaaacaccaaaaaaaagataaaagattattctggaattatacaatctcgagtcttcaagaagtagagcttgtaatttctatcatgttcatgtgtatactgtatgtagactacttttggctcataaaacgttcattaattgacttttatttccacatggtgtaaggttttgtttatctgtttaaaaacaaatcttataaattattatgtattgtcaatgagtgtaggcttacttactattaaacatttctaatttaaaaaattatgtgaactatctaccagttatgaagc

SEQ ID NO: 43400 - DNA, 442 bp, Arabidopsis thaliana columbia
taatctgaacccaagaattagtaaaaccccattcacaaaagcaagagtttagcatttaaaccagaaaagaaggaaggtggtctgacctgcacttcaacagaattagaaaaccccaacgcatagactataaaatcaacatccatagtcattgctttaacctgcaattcaagagtaaaagaaaacttaaaaaacaacacacttgtgtaaaaacacagatgacagaatagattaatgaaaaagaaagcaagtcaagctcatgttactaattttacccttttgaagccagctataattatagtgggaaccatccttcttcatccatcaaagaaatgaggtaatgatcattctcaaggttttcatcactgaaaagggaataaataaacggaaggtagtatgaaatttcaagagcctcaataaaggataagctgagcatgattataat

SEQ ID NO: 43401 - DNA, 499 bp, Arabidopsis thaliana columbia
tctagcaatcaagcatcatgatataagcacatcggttccttaatggctctctctagcagaaaatctcttttcgataacttaatataaatagtgtttgataaaaaatttttttttatcatacatacacttaacacctggattgcatgaaattggaagcgaatacgcggaaacacaaacgtttgggaaacgtcaaagtgagttttttgaaaaattttagaaagcgggtacatgttgagaatttaaatttgagatgaaattctgtttttggtctctcttgtttttatttgaggtttccatttttatggtatttagcttacataggttagtcttgtggaattgaattcttgtgtagatagaattgaaatttgagaataaattgttgtttttgtgtactctagaattttgtttctttctctctatgggttactctagaaaagattttaaaataattacaatattcagttgttttttgtgtacatataaatcaatttttataaaa

SEQ ID NO: 43402 - DNA, 569 bp, Arabidopsis thaliana columbia
caaaacaaaaaggcgaacgaggggaaaaaaatgataagggttgaaaaagagaattagaaactagaaagtaaagaaaccaaagcaaaatttggaagttgtcaagagaatgtgttctgcatcatcaccagtatttaagtcctaataaaagggtaaagcacaatgagaaatacattacattaaagagtaaaacaaaacggtgtctcagtacattaaaaactgatttttattccataatgagaaatatgcattcgaccaatcccccagagccaagatgtacaccactaccacaagtagtagctttatggaaccttaggagtaatggtctctggattcatctagagaacacacgtattgtcttcgaccaatccacacgatctgacttctaagcccgtagaagaaccctatttccaaccaactagcctcttggtgaataacaaaaaaacacaagctttcttctctgctactcatctgattgtgtagagtccataaatacatgcattactattttgcatacatctgatggatttatcgactcaaatgactctaatagggccactctactattatgc

SEQ ID NO: 43403 - DNA, 559 bp, Arabidopsis thaliana columbia
cattttgctccctcgcaggtataaattagtcattccgctgctctaccatttgatatttgaatcaagaattccttgttttgactgaatcatgacatgcttcatttgtttggtacttgtgtttattgaggcagtagccaccctaagctttttctatgacataaaaacagcaaatgatttcactcacctctacaatattagaacaacttctgttggagaccccttagccttttcccatcgtccgtggtgaattaggggcaagatgatgacgagtctgtaagaataagtttcaaacaagtgtcaatcttccattgtgtaatgggaagacaaaagttacaccagatcaattcatgtatcagtatccatcattctcatgtccatactagcttaagtagttttctgctgtcttgtagtaaattccaacttcttttgtcatgtcgtttctaaagttttgaagttttggagaatattgctatgatttccttgtgtcgcccttgtaaactacttcttcagcatttataccaaaaactctaaaaccatgtaaattggttattaatatggt

SEQ ID NO: 43404 - DNA, 493 bp, Arabidopsis thaliana columbia
tagtaacgagccgccagtgtgctctaaaggatgctttgggaagagcgctcgacatacttgacaacagagctcccgttttatccattgtgttcgccatgtgctcttggaagttcatgcagatgataatccctgccagctggtccgcctggtttgcgtggttgtggtggtctggcttgtcgaggatcggcccatacgccctgacgagggattcagtcatgtcggccaaaaaggccgctctcgtttggagtagtctttcgagcactgtcttggtacgctcttgcagctcctcatgtgctgcagagggggccttatggtaccagcgttggcggtcgacaaactgaaggcattcgccaataacgctcagtccgtccaggcaagcttccatcgcattgctgctcaggctgataaactcgctggcaacgtcttccgggatcgagtggtgttgggtgtattgcaaacctggatgagctctgcgagctgcgagcggtggtgt

SEQ ID NO: 43405 - DNA, 605 bp, Arabidopsis thaliana columbia
cctcgtattgctggagtctaccttcacattgatcctttgagttgtgggtggggaaaggttgaagaaattagaaggcatatcttgaattttaagaaatcaggttactcctgaatctacattatctattgaatatcagagtttataattttccaattgtgttcatacatgcttcctgtgacctaatcatacacatcttgttaggtaaattcattgttggatatatcagcatttgtgggctaaaggagtactatcttggatgtgcatgcaacgagctctttgccccacctagtgcctattcctttctgtatggtttgactgttcaagcatcttttcttggcggtaagggattgtcttctttggctcaatttctcacttcaaaagtggtcattaaatatcgttcaatgaaatcttatgcactcatactgtgtgcggaccatccttcatttgttgagaaagctgttgttgaaccgctactcggcctcttttgtaatttaatgtgatcatatctcacttccctgttctcgttatcaaaggtccttaatcggatttcaataattacttgttcgctatcggtctctcgcccgtatttagccttggacggaatt

SEQ ID NO: 43406 - DNA, 569 bp, Arabidopsis thaliana columbia
  unsure (1)..(569): unsure at all n locations
atcataaacaatcctcactaaaaaagaagaatgtccttggagtgatctcttggttaagttcgctgttaagtgcttctatgtttttaccaagttcatattactcttactatttctcgcagaacaaggaaatactaaaaaatcttcttcagtctggaaaaccgtcagaaaatattttaggtacagaatggaaaataacaatgatatgtctccattgattatgtacattccaggtttcttatatgaaacctgctgcgagtatgttgtagcatttgatatggtgaggaagccattgtacgacagacatccaatgctgaaattttcctggacaaatgcagaggagactgatacggttagttattttagccactcttatgttcaagttttattattccattgattaacctcaatgtttgtaagatatggcagttgttgattttggcaatgtgtttagttccgcagtgtgttgcaatgactatacttacattagagaaccagagctgttatgcttcgagtatctggtgtgtattatatcttacagtgttggctattgtgtnntacagtgttgattg

SEQ ID NO: 43407 - DNA, 537 bp, Arabidopsis thaliana columbia
tactcacatgctaacagagaaaaagaaacagaaacagaaagagaataagacgtcactatctctcgagggaagaattcctccacaaatagaaagagttactgaatattctttgaacatgcgctacatgaaagacaacaacaacaacaaaaaactagtagatatatattattactcgaagtcgatgaaaaaaccgtcgttgtttcagatcattattatagtgctaagcataccaacgactacggggaggacggtgggaaatcttcgggtgcgggaaggatcacctttcaagatcgcaatatttgcagacctccacttcggtgaagacacgtggactgattggggtcctggtcaggatgtgaactccgttaacgttatgtccgccgttctcgacgctgaaactccaggtcatcaatcatcatgtcacactgacaagttaccgtacaacaattttctaccattatctctcattttgatatgagtaacgttatttggtgtagaaagagtgataccacacaataagatgtgggttagctttgg

SEQ ID NO: 43408 - DNA, 622 bp, Arabidopsis thaliana columbia
tctctgctctgtaatggtgatggcgagactagcggcccaacttcggcccatcctgaatacagcttccggcccaacatagtaccgcacgtgaggtactcgtgtgccatgtagccagccaataaccagttcggtgtggcggcttctcttagatcactctccgtgtctttacgttttctcgacgcgccctcatgccgtgatggttttgattcatttctttgccttctttatcttatgccacgtggatgacaggttgtaaacaaggaccagggttataatggtcaatgtcaaacgtaagggctacaaacgtcaatgtatgtttaatttgaggcgaaaaccgtcaaaagcgtcaaacgcatgagtgtcgagaaaaaaaaaagttttaaaattaaaataaaataaaataagaaaaaaaaagcgatcggaggcagaataaagacgtcgccgggttaatctgagtgtatcggcgcggtaaatagagagagcagagacagagataagatttttaaaatcggggtattgagaacggaggcggagatcggagagaagattacgtcgccggagatcgcggaggagtaaaaagcggagacggagagaaaaaggggtaaatacagagagagatatg

SEQ ID NO: 43409 - DNA, 582 bp, Arabidopsis thaliana columbia
cagtcttcactgatcgaatttgaataaatgatataaactgaaagaggaaatatacgtctcttttatttgctttaatgaatccacaattagccaaatttcccttcaaatctctactaacgaatcccaaaatagaggaatctaaaatgaattgttcttatttgtggatatatcgtagaaatcatgtacatatactttcaatgtctgatacaaaatctttttatttgattcaacatgctttttcatataatttggtctgatttaaaggtatactttacccaaataaacgcattatttacaaggaatattgtttaattcttgagattgaagatttgaatatggaacaaaagagtggtgaaatagaaacaaaagaaaaaaacttgttgtggattgggttgaattgacgaaaccaaataaaaagtaaggaatcttaggtttaataattccatattttcttttctatgtccaaagtaaaatagtgtctttttttgttaaagtaatattatcatcaagatgtagttgtgtgaaaataaaataataactctttttttcatcacattttaattacgtagtagatgataaatt

SEQ ID NO: 43410 - DNA, 910 bp, Arabidopsis thaliana columbia
aaggattcaacaaatcagcaagagacgcatgggaattgtttcagtcgacaggtgtagaggcacttgttgcatatgactgctctggtgctgtacttctgatgggaaccatctttggaggactcatcacaggctcttgcattggtatatgggcttggatcaagtacagtgaccgagttataatggttgcatctacggctatgttgatgggaatggttcttgtgagttttcttttgtgcactcttttagtcacccaaaaaattacatgaccaacttgttcactttgtttcattgatccaatgtggtgttcaggtgggtttaggaatggtggtagtcgaaagcgctgtgacatcgatatacatatgttttgctgaagatcctttgttgattcagagatgggatgctgatttctacactgagatgtctgaggtgcttcaccgtcgtctccaacatcgtagctcgcgagcccgtgaagttttgacgaccgcttgattagcctatgcctcctcttggaaaataggagatataactgtagaatattatgctattagagggtgctaaaagcgggctaacccttgtggctaaaattattttgtcaaatgatttatgctttctatttgttgaatcatgaataggaggctgtgggcgtttgtatcaaaatctaatgtattgatttttgtgtttattagaaaaacaaaatcaattgaatagaacaaagttgatctagaggggttggataaagtttgaaacaagaactagtcagaagaccaaacatagccacacgcatttcactctatctcaaatagtttcactaagggagtagtgttagcattagtaaactaagaagaatgtataaggtttggaacaacagaaagtgtaaaagatgtaattctatcgggttcgaggaatggtc

SEQ ID NO: 43411 - DNA, 381 bp, Arabidopsis thaliana columbia
ggtaccatgggacactcataatggaaactagaagcaagcttttgaagttcagatgcagaacattttctaatctgagcgattggtaaaagtgcagctacagttctccaacatgaaaaactacctgaatgctcgcaagtaacacttccacaagtaatattctctgtgtcatcatcttcagtagcttgagagccactggttgaacaatccaaacactcatcagattcaacagcatcgtttgaattaccctctcgatccttaacaacaaatttgtcgctgcagaaaaagaataatttgctcaaccacaatgattgatagaatcaaatcgttagcctaaggagaacataaacaagaacgtacacggtatttagctaagcagccatg

SEQ ID NO: 43412 - DNA, 597 bp, Arabidopsis thaliana columbia
gcatttagtacaaagtcaaaggtggtgatgcttcttgcactcgtaggcagcagcgccattgttgaaatctcccgttgacaacgcagcggaatctcggtttaagcgcgtccacttcacggcttgtggatgcatcgcgtgagacgcactgctccgcgtagttggttagaccattaattaaattcaaattaagccaaatgaaaagtatctcttcaaagtccaacataaacaccatttttgaaccaaattaaaaccttctccgtctagttttggcggctatcatcttcttctccgtttaattttagtttccgacgatgctcaggctatggcggtatctgtgtctactcctcactgtctggttcttgtgtaatttcggtccggtttacgtggttcgagctcaaaatcgaacaggagccaccacacatcccgacgaaggtctgtcttcttcttctttgaacaacttgacaagttcaaattcaatcgatcggattgaagactgtgtagctaggtcttaagctactcttctgatcctaattgataaaaccgatgtttacatttataatatttgtttatgttatcctaagaagtgtaccggtttag

SEQ ID NO: 43413 - DNA, 492 bp, Arabidopsis thaliana columbia
ggttatagaacgagatcacacagatgcttgagaaactacagtcagtaaaagaagcaaagatagttaattaaaatcaaagtgccgtgccaaagtggaagagcaaaggtcttcaaacatcggtcaagtactatatatttcataaaatacatgtattaaaattgaatatttgcaaatcaaaactagagtataattgtgctagagccgaaaaaagagtctcggagaataccaaacgaagcaatgagcttgaaacccctaaaaatcattaaactttaaacacaaaaccttaaagaactttgagcaatacgagaatactgcaatgcatcttatccccagaaaagtcgaaactttacaaatgaaaactagggtttgtttgtgctagaacagagaaaagaaactctaagcgtagtaccaaacgaagcaaatagctttaaaccctaaaaaagcttagaacataaaaccttaactaaccctaaactcgagcaaactactgga

SEQ ID NO: 43414 - DNA, 581 bp, Arabidopsis thaliana columbia
tgagtagatgaagatttcgtctgacaggattcccaaatattctacaaaagtattttttttgtcagctttcagtagttagttctgtttatctaaattatacaggtgcgattaggtcttaaacggtgtctgtactgtatgataaattgataatcatattatcgcttttaaaatgtactaagaaaataatgttgaagctaatattagtaattatacaagggagtttagtatatagagtatttacattaattagaaaatataatttttaatatagacaaattaaactacttaggtgaataaatttctctagtaatatacaataattaagtagaagaagaaaaactccatctcaagtataaatattatctttgtttttcttatagttatcgctctgtgtgtcgatcaaactatgttagcaggttgtggccgaaaagctttgtatattttaagaactcatttaggtcatacaatgatgtcccaaaatggtacatatctgataaaaaggatcttggtctttactctttactaatgcgtcgttcaatctcattagatcattttaaatttggggtcacctaatttttata

SEQ ID NO: 43415 - DNA, 527 bp, Arabidopsis thaliana columbia
gtcaataatcttacattagccgtattactaagacttgtcataaaatgatagtaattttaaattatagcaaatggggatagtgggagattagtaggtaaattggcagaaagttaagagactttatacaatcgttagcttatctgtcaattgactcttacaacaatgaagatcgatttggtctcagatatttgtctgtccatttataaatatacacatgcacgcctattctagatataaaactattataagtaactaaatgcgcaacgtgtatccaaatgattctaattaagtgactatataataatatacaactagatgcaattcccaaaagtcttaaattaaccctaatcatctatgatagtatatatatacgtaatcaacactcctagcaaattagtatatgcatgctaaattgtgaaaactaaagtgattggaaagtgtcgatataaattaatgtgattatcttatctttttgtcgtgaaactgcaatatccatgccactttgtttgatccttgatgttttaggg

SEQ ID NO: 43416 - DNA, 570 bp, Arabidopsis thaliana columbia
gagaaaaaccgaaaagcgaggaacttctaaaactaataagaaatctacaacagggtttcatcgcagagacacagatacagcttctactgttcattctctcgaataataataaaaactatacaatcaccaacaatacaacttagccagcttcttgatcgacgaataaatccgatcgtagaaattgggggatgtctgataggaacaaataattagatcggagtacttacaggggaagagaagataatcaaagaatgagattttaagagagtaacaaaaatgaatgcaagatatttttgttgtctgaataaatggtttggtgaagatgatggaatgaaatctgaaggttgcttaaaaagaaaaaaagatccgtggacaaaaatgtaaattagttaacatgttgacgcgcgtgtactttatgtttttccttcttcttttttcagttattgtaaaactacgaaaataggctcagatacgtgttcatcttgtgttttgcactaatttatcgcgagcgagttagggtagaagtgacattccgattttcactctgttttgtatggacagatggccggt

SEQ ID NO: 43417 - DNA, 553 bp, Arabidopsis thaliana columbia
ccaataaaattggattcctagtaaattgacgcatatgatgtcacatgtacagtgatggctgaacgagagataatggaccaagtgtcacggtctagaccccacgtgcttgagggtgggagcaacgcgctgttccaaagcttgtctgtggtgaacacgcgtacctctctgaatcctcgtgatcttacggtgggctccactaatttcgctgacgtggaattgtccacacacagtactcttcttggcactgtacgctcaacacaagaggagtcaattatgccaccactaactatatattaagattagactttaacaacaaaaaacctatttaaaattagatttttatatggaattagtaaaagcagtatattcgtacgagttccaaagcactcagagcctcaaccattggacgtcattcatagatgtacgaattaataatcattgtctttagaaatagtctgtaaagccgtctagatggtaagtgtttgagtcaatcgtttttgtagacggttgtcatacgaaatgtaattcaaaagctgttttgtaaaagattatg

SEQ ID NO: 43418 - DNA, 609 bp, Arabidopsis thaliana columbia
tcgataagtgattcatcgataatttctttcagaagcgaacgcctgcagaacctgcaatggaaatcctcttgtgaaaaagctgcaagctaaactgaactacataaaatggtgatctgtttactggaaaaaggttaaaaagaagcccagaattgaaaccgcacagactcagtagcaattagttatagaataaatatcacagaaggagaaggctatcaatcaggatgatatcgtgaatcttttggtatcatcaaaaatacttagccaggacagaaagaattattgcaaaccatacatcagcaaacttccatatgcaaagtgacttggcagctaaaggtattatcagtcctggttatctcacaactcttatgatatgctgttttaccaccccacaaaactaaaacatacgcacaaggtcttctaaacaaaactctatgatccatctttggtcccatccaaaatgctgccgaaaagttttgatcttacctcatgatgaagcgagaacatactagctaagattttataaacttagcctagacggacttaaactacattttgtaggaagaaacatgacatctgagtacgcaaaaaaagtcagagatggaatgatga

SEQ ID NO: 43419 - DNA, 345 bp, Arabidopsis thaliana columbia
agcaagtaatttcctctgagaccgattcattcacttgctcttagatcctcctccgccaccatcttagctatctatcttcatcattgagattatcatggtacccatccttccaaatcaagaacccagacaggggcattctcaagacaatggaagtcaagagtttttaaagaagagaggcatggacctacatgggatcagcagcatataggcctgtttgggtactgccatcgagagcgacagagagagacagagtcggtgctggcgccatcggccagtaactgtgctgaatacagttcgctgtgaaatgtcgtgccagcggttgaaaaaactggcactgaggataga

SEQ ID NO: 43420 - DNA, 488 bp, Arabidopsis thaliana columbia
atcaactagaaagaatagtgtaaacgatcaaacaaaaccatagaaaccgccaacctaaatttgatctaaagttcccatgaattcctctttgaaaccacctcatcctaactagagatctactcgctcatgacaagggagttaatcaaaagttgggttgtgtaatccataataaggagatgaataggacttaaaaagggtttagagatgacttcatgcaatgtagaacacaagaggcgaagtccaccttaaagaatcttatacgaaacgaaagagagaaagagtgagctggtgcttcgagctcaagggtgcagcggcaagttggcagctctcggcatgggctagggttcgcttgtgatgaaggcacgccttagggttagggcttagaacaagtatttatactaggtcggcaagaattaggtctaggggtaagaacgtcaatatgtcgggtcagtatgtgatcacacctagttgtggacttcattggagaa

SEQ ID NO: 43421 - DNA, 553 bp, Arabidopsis thaliana columbia
tcaccccttaatggaataaatgttttcacataaaagtgaaaaacaaatttgaacaccattgctttttcatgtctatatatcactttcgccgccataccttataggaggtttttaaacctcatagataaacgacgccgtttaaagtatccgattgggttaaaatgttaggccatttatggatttgggcttttctgtattaaagttatgggcccacattttcctctgttgctacataatattctcatttaccataactccttttttatttatacataactccttttctttctttaatttttttttttttttgcaagaaatggtttaaaagtatattttgacttttaattaaacggactatatgtgaatctttaagttaaccatgcttgaatgaactatgaactatgaagtcttccgatttttgaattagtcatgctaggtataattgaacacttgtgcattactctttttacattcgaaaaaatgcttttcgtagagacgctttactacagcggaaaaaccgaactcttgtttttgttgaacatgaacagaggag

SEQ ID NO: 43422 - DNA, 544 bp, Arabidopsis thaliana columbia
gttccgcagtaaatttatccaaattcactgtaagaacaaataaaaaggaaatgaaagtataagaacgataacacaacacgtggggacataatgctggagtaaaacctgtgttcttatctaagtgtatctgacttagaattctattaaatacaaataacattaaatagtaattaattaaaataaattatatagataataaaaacttgaccacattccttaagtaagtttctacaaaagtatgatagattcgttatgacatttggcgtagttaggagaacgatcataattatgagatacatattgacccaaaattgttgaatatgtaaatttgaccatagaaatggagcatatgtttctacagctgacaatacacaactcaaatctattaccttttgatcaatagactccatataagttaggtgttttcatgactcctcgttataatataaatagactccatacgattttccaatcactagcattcttatacattgcacaaaatagccacaagagagtaacaaggtaagaagatgatggtgggtgt

SEQ ID NO: 43423 - DNA, 637 bp, Arabidopsis thaliana columbia
taacttccgagttgtttgggatctttgggagaatccaattgtaattggtatgtaaggaaagtctttttataggacgtgtaacaactaccttcattcacttcctgtctctgtcggatccaaatattctctgactagcgcgtcgtaaaagcatacccaattctctcttcatctctcagatctcctaaacgtcccatttttacaaataatcgactgtctaattaaccttgtacaccacaattttaaagttgttcatgcaaaaacgtaacaacaaagtgagtattggataaaaaagaatccaatcagaacattattaactgccggctaaggaagggcatggtaaaaacgttaaaatccaataagaaatgtacacgtgtagtaatcagtttaggccgagtctgtaattaggttctcgcttaatagttaataatcgtgatgggaggaagtgctagtctccagtcagactcgatggaagcagcagcagcagcagattcttcgattcccagagacaaagactttggcaaattccaattcgggatcctctctttcccttggattcgatttcatctcttgatttctgggactatcctctgattcttcacgattctgtgtacagatgcgagcactcaagagacgatgt

SEQ ID NO: 43424 - DNA, 588 bp, Arabidopsis thaliana columbia
cgtcaagctgtttatctagttctaggtatgtttcacatcaccttgccttagagtttagattagggttatttccctctgttttcgtttgcttagtgttttctttagatcagtaatgagctctctgatgattctagtcgttgaaatagttcagtcatttgtctactaatgtgtgacagaatctttattactgatttattaccaaaatattaattatatcttcttaaaaattgtgatgatgatttaagtgtgtttataagagtaacctttttgtagttccaacggaacccccactgccggatatccatccaccggaaattcaaccacagcaagtccaggcaccacaaatccatccacaggcaattcaacaaacagcacactacccactaatgataagccgacttcatctacgataacgtttcctgacagtactactatgggaccatctagcagcacgagtggtgatccaacggtggagaagagctatccgtcagaaccacgacgatcatcttactgactaccatcgctgccgtggcattgaggggttaggtaagatcactcaagatgatgacgaggcgcttatttgttgtg

SEQ ID NO: 43425 - DNA, 546 bp, Arabidopsis thaliana columbia
gtctttcaaaattaaaacatgaaataattacaagaaaaagaaaaagaagaataagaagaataagaaaagacatagcgtatgttttgctgtgcatgcatggtcagaggtttcgtcatgcatgcagaagtggacccgaatagcttcccatcttcatcaaccgagtggacccatctgcaacaccgagttgactcagagattcccctctgagtcaaaagtctcatatttcaccgttttcttcgccgtgcttaaaccatcctctcgtcacttgaatctcatacttcacgtctctgcacttagagaatatcataaacagaggaatctcgatatttctcaaaactcatataacataatgtaatttaccttatagtatacatgaacaatacaagattactggttcatgtcggcggttggtgtgccgtccgtggaggccgcgagagacgagtctggaagattatggttgccatcaataacggccaagaacggtgttgacttccacaccaagaaagtctctcgtgaaacctctttcatcaacttccttagttttga

SEQ ID NO: 43426 - DNA, 518 bp, Arabidopsis thaliana columbia
ccagcacttacaattctgtcaatgagattaagttcgcaaatgtagatggaattggaccactcaaactagtccccagaattctcctgcggaaaagcatgtttcaatatatagtgtggtatatcaagtgttgattgttaaccgttactctatacgttgcataagcgatacgttattcgcaatcaagcaagaatgttctgaagcgctgcaaaatgaacactgctaaccaggtagtaagtcatgtccaatacactataaactctggtatctgaccagtaagacggatgtcgttgatccaacagatacgcaatgtatctcgtgctcgtcagtcctgggcgtacgatcgttaagcagaatgccgcgtgtatcttaatgtattgccagatactatacctacccccgagattgtcatagatagtacacggacgcttctcccatgtgcccatgattagctgccgcatgcaggtattcaccacgtagggctgagcatccagtgtacctgccataaaatgtgagaaact

SEQ ID NO: 43427 - DNA, 501 bp, Arabidopsis thaliana columbia
gcagcagtaatttggcaacacttaagaagaaaatatccaagatatgatttggcaacactttagaagaaaatatccttcaatatcttggatcgtgaggccctttggacatattaatgatgacaattttgaattgatagaaaaaacaagttaagggtttgtgctttaacgtgtttggtccttagtcatagtgtcatacgattcgagctgctggggacactctttcgcttctgagctggtttgaagtgggcactcagatattattactcagaaacaatgaaataattgtatttagtcctgcatggcttttcattcataacaaagtaatatcatataaaataatatattaattaaggacaaaagagaaaaaaaaaactaatttgaaacagagtgagtttatgataacctaatgattgacaataatactaaatttgatttgctttagtattgtgttctccttttatatagaaagtgaaattattaattaacgagacaggattatga

SEQ ID NO: 43428 - DNA, 531 bp, Arabidopsis thaliana columbia
atggatgtggattatgaaggagagaagtgacatagtcagcgagttttgttggaggtttctttttcctgaatccaaagccgagttgttctggttcagagttactgtttgtatccgttgaagacgaagaagtggaattatcagtgacgtcatcaatggcagaatcatgatcggccagagaattgtcatacgcttcattgatatcttctgattggtcaggacgagatatagattttggagacgatgaaggtgaatcaaccggatgtgtctgcgggtttggttctgtatgcgtagtagaatcaaccggatcggtttgaggttgaggttattccggttcagttagaggcggagaagactctggttcggttggagattgaggaggatccggttcggttggagagtgagaagattccggttcattatcatcaaaaccgttggtcaaaccgatagcttcttcttcattacttaagcttgacgagagagatggttgatttgggagctcaattgtataaggaaaacagattcttgaaagat

SEQ ID NO: 43429 - DNA, 479 bp, Arabidopsis thaliana columbia
ataggattgcacaccctctactcagcagttgaaacagaacacaaatcagatgagacagacatcacaagatcacatccatcactagctgttatccaggggattttacagtcagaatttgcccgggggaactccaaagcattacttttggctgagaaagtgttttggtcctcgctgaagaggctactgatgtccatggggttatcttacaatgacctcaacagtccctccccaagtggaaatcgaccaaatgttcatgaagccatagaacttggtttcctgccgatttcagactgtctaaatatctcttacgagtgagtataaaaactatctatagccatatcctcattatcaatgatcatagcttttcacagttgaatttcttgggaactagaaagggaccaaagaattgatatattgcggcctgaaaagcattttcgagtcttttagcatggtgattgtaagagatccacaaaatgttg

SEQ ID NO: 43430 - DNA, 487 bp, Arabidopsis thaliana columbia
ttaatctgtgttttactacagagctaagaattgctctctttcctaagaattattgttaccgagaattatgctgactctgtagtaagtgttcttgccatttctttttttttggtcaagctttttaaaaatatttaatttagagaatatcaaaaattaggctagatgattctgggcatagttattgtaattgaatttccttagaatggtcaaaaggtgattgtgtttctaatttcttattcaaatatgtgaaatattttagataactttttatatctgcatttttagaaaactgttaaacgtttagttagagtctagtgtgtagatattattcaaaataatatttaagacagttgcggcttcgctagatcatatatcacacatcaatggttacattagttgatcttggtgttgcaatttgctgtattagtgatttattacatagcttcaagagcttccttctgacattgaaaactatgtttaccggtat

SEQ ID NO: 43431 - DNA, 283 bp, Arabidopsis thaliana columbia
ctctctaacattgaactcaaatctttcgatattcctcaagtcttatcatagaacctagacaaaagcaatggtttgttctcttctctttttctaattcatttgtaggattgtttggttctagcattacatgccatcaatgtgatgatttttttctagtcggggcgaaagatacacgatattcaaatctatgaaatgtactagtcacaaaatctgatttaatttttgtctaatcatatgttaattagacgtcgattttaccatgttattgacgtgtctctcattt

SEQ ID NO: 43432 - DNA, 540 bp, Arabidopsis thaliana columbia
ggtggaatcatcataggcgctgcagtcgccttctttctcatgtattcctatctcagtagacgcaaaatcttttgaaccttcaatcctaaaagacgaaagaagaggtaaacctgtttcttcttcttcccatttccatatcccctttaaatttgataaagagcgctcaaaatatacgtaaatattacaggtttaaaatccgtgaagaaagtgaatttcattcatcacagttacattatggcattaggcccctactagtagttagagcgaggtgagttcatcaaatgtctgataaatatttattgttgtggtctccattgaaccccagtgacttgtgtgctatgtcctcattgcttggtaatgttgtaagatcaatgtatcatttaataaactggttcgaaagcaaatgaaaattcaaatatagggtttatcaaaactgttttcgagagtaaagggataaaaaacaatacagtatctaaatcttcgattcccagagaagaaattcaaagacaaatacaaaactttttcaggcatttatatttg

SEQ ID NO: 43433 - DNA, 494 bp, Arabidopsis thaliana columbia
  unsure (1)..(494): unsure at all n locations
gtttatccgtgttgttggttgctgaggcagaagagaatgaagaggatggtgctgccttgttagcccctgggtttcttgctgcataaccacctgttcccaacccaaaaccagattcaccgtttcctccataaccaaacttcacattctcgttactcacagcattgtttcctcctccaggagcaccccaattgactcctgaatttccaaatggaccactaagtgtgttgttccacttgatgatcctcccatatatgtattggagtttgagtttgtattattgttgttatagttaagaccaccattgtttccccataagttccgtgtaaccgaactgaagaaggatgagtttcctcctccgttgcccccttcatagccaaccgcaggaccaaacctgtttgtgttaccaatgtagtacgggctcattcctcggccatagtcaacatttccattgtaatttgtactcccgtgaaccctgtggcaantcctgatcaaag

SEQ ID NO: 43434 - DNA, 586 bp, Arabidopsis thaliana columbia
tgatggcgactacctaaaaaatttcttccgaaggttttactagagtctctttacgagcagaagtttcaaacacagacgaaagattgggttaaggttgaggtcatatctctgtcctttgaacagctaaactaaaagttgttaatgtatttggttttacttccgtttacattagcttgtacgggctttgtattttgtaatttaaaattgtaaatcagttactaatttgagacatcaactttgactggtgtggaaaatggaaacgcgtcgtgggcggctctttcaatggaataatgatgattgttagtcactaattccaagcattaacgacttgaggaataattttccaagtcttcttccgatagcaacgtgtattggaatcttccacacaaacttttaattctttttcgaaactttttaggtaatcgaaatacagtaatatgaatttcgattcatacgtctctctctaacattatgactgttttctctatataatattgatgaatgatcgagttggatggtttttgtttctaaaatctagtgttacattatttgttattttagaagccaagtacattggatcttatat

SEQ ID NO: 43435 - DNA, 572 bp, Arabidopsis thaliana columbia
cgtcggatgaattgtaagtcttttctttcacttttatttttataattcctgtagaaaaaacaaccttcaaacaattagtcagtaagttgttggtttagcttttgagccatttgatcgataaaagctttcacaacatttatatttgttaaagagcttttacaacatttcacacattgagaaatttctgaaacacaagatatataagtaaagaaagtctttggtaggttttgagcttaaaacatatatcctctgtataacatatttttttcatataaaacatttctaatatttgtgcgagaattcttcaaatttattgtcaaacgaatctgtcatcttttgaacgataaacatattttttgtttatcctctgtaacaactaatctctgttttttattttttcattaccaaccagtcagagcaatgttactgattcgaacagcgacggtcgctcttcttctaatcgcgtttcttgaaaacgctgcgtggtgctgcaatgatgcttgtaagtttggcttcttacgtgaagatacaacttttatgaacctaggtttacttgagttttttgaagggag

SEQ ID NO: 43436 - DNA, 490 bp, Arabidopsis thaliana columbia
taaaacgtagcagactgtcagaagatttggtggaaacggatatggtatcacctgacattagcaaacatcataaagcaaaggtaaaacagatcacctcttaacctttcagttctgagctgaatgttgtgcatcttgcttcacaaacccagtggatcataaaattagccttactgatactttttcttgcttttgtttcaaggagcctctcttggtttctcagccacaatgctgcagaacaacctacgatggatcaagtagttctgctagttgtacatttcaagctcttggcaaacacttgctaggaatgaaattatcaactaataataagggcaaacgcgcctgcattgtagcctcacacccaacaaccggtaatttgtttttcctgcatgatctatttactttgattcaaaagatcttttgagatcatcagccaccagaaaagcaccaatgctgattttgtttccatgattattataccataacaggttta

SEQ ID NO: 43437 - DNA, 465 bp, Arabidopsis thaliana columbia
caagtggaaaaataaaaatatgaatgtgttaatataaggtaatagaaatttaatcatttttttaatctatatgtaaaaagtatttaaccgatatctacaatttgacgcctcccaattgaaaggagccaaaagcaaccgatcaagtggagaccagtagccatacacattcactcctacccttacatgagaaagataagattatggagttttctgccacgtgatcttatcctagtggtccaaatcgataagggtgtcaacatctttccttaatcctgtggcaattaacgacgttatcatgaattatggcccctttgatcattagggctagttgcctctagcggttcccactatataaagatgacaaaaccaacagacaaacaagtaagtaagagaaaaaccaaaagaagaagagaaacaacaagaagaagtaatggcttcctctatgttctcctccaccgctgtggt

SEQ ID NO: 43438 - DNA, 853 bp, Arabidopsis thaliana columbia
tctcttttatttagtcttctttatagccaaaatagttaaggtagttgatctagcattgttagtgaacgatcatgatgcaaacttgaataggttgcggattatgtggcttcgtcttcctttaaccctcattttgatattggtatacaggttcttcatttcgcatgaccgggaatttcatgtggcctcacttaattacaaacccgacttcaaggtcatgccagaaggatgggatggtacaatcaaagatatggatgaagtccattatgagatctcaaagaaagaggatgacatgctttacgaagaatttgtccgaaggtttgagttcaacaaaatgaaagtaaggcccttcttttgcccacttgagtatgcattgacttagtaaaccattactacatttggtctattgagacattttcccatccatatgttaattatcaagtgacctgcttgcaacttagaaggaaaacttgagactagatgcaagtttggaaccctctattctaaatttggtaacttgtaaaataaccttgaaagattgaaagtaataatggtattgcaacttgcttgtggattgtttaaaaggttattggtttgaatagatccacgccttttgattgatatataacatcagcgttcctgcttgagttcttgctgagttattagacgttctttggtcatttctccttggtgataacaaacgttactttaccttttgctctctaaaccagtggagaggagaagtgatgtgccacaagtacagcaggagacgttcatcagagggatggaaaatcacggttgagaaattgggtgctaagggcaaacgtggagcaggagtggctggaagtttatgagc

SEQ ID NO: 43439 - DNA, 444 bp, Arabidopsis thaliana columbia
tgaagaaacaaaagcagagggctagaccaagcatgaagttctttaacgttattttttgttaagagactgaagaagaaagaaggattctatggagattggagagagtggttgagctcgggcaagagaataaaccaatgtaccactttagatacaatgttttgagctttctgaagagaaaaaagaagagaaaaacgagactaaacaattattagtttttcatagttatatttaactacaaactgattgttttcggtgtatgtgtaatagtaccaaatccatgggctttcgagattgagattaattaagacactcataattccatacatacatacacaatatatggacgaaatttgagtaaaattcactaagcttctgtccataaaaccttaagtgaaaaagggagatcaatcccaagaatctattgaaaatatgataatcttaagt

SEQ ID NO: 43440 - DNA, 540 bp, Arabidopsis thaliana columbia
tgattgctttcttcgtctctatctaaagtattggtcttaaattactcgttttattcccaccgttcaatgccttcaatgtagtgtgactgttatgtatgggagaatccattgagtttgatagaatcttggaaatctacttgttggaaagattgatgatttataaactgtctctaccaactattgtttggatccatcataaaggatataaaactgactcgaccaattttaacagagtgtctgttagaatgtatctgattggtctgagtaattttcgaatcacaaacagttcaggcacaaggtgcagggtacttgagaagcaaggaacacagaatacaatccagacagactctacccactaaaaatccagactgcacaggtagcaatctgttcagagaaggaatcaagaagcgtaacgaaagaatgttgcaagatctccgtagtattcggatgaatcgaaatctagaaccagatgtgcgctgtgtttgaactatgatgcaactgatgctacaaactttgctgcttcatgttcattgaaaaaca

SEQ ID NO: 43441 - DNA, 582 bp, Arabidopsis thaliana columbia
ctaaagagttttgtgttgcaggcaagtttgagaaaagagcttgtgcaaaagagctgtctcagcttgacacaagaacgtatgtttctcttcatttttttggtgtgtcaggaataattttttctttattatactaactaaccctctatttttccttcatataaatccaaagttattgaccaaatggcttagcgtacagatagcaacacgatacgattaagaattattcgaaaataataaataatggcttgttaataatgattttctttttgtaatgttgtggaggcagtggagtgcaaattaaagaggcacttcagcttcaactagatgttcagaggcatcttcatgaacaactagaggtaagttacaaaatgtaactatataaatatattagcttgctttattatataattaagtttctttataccaagtaaatataacccaatgttacattatggcatttagtgcttccaccaaaacaaaatgaaggctttctagcttagagattgtatatttgcatgtgtgaacatctgtggctctcgcactttttatgagctatcactgataatgattacatagatatgt

SEQ ID NO: 43442 - DNA, 454 bp, Arabidopsis thaliana columbia
tcacaagtggagcatcacctatgtgaaaaaaaccaaaaaagacatccgctattttaagacgaggaaattatctagaactgcccattcatatggctaagatctcccaataaatcaacttaccataacttttcttctagagatcagctctccccaaatggcgtaagcaagtgaatgaggtagagccacagtgagagctagtacactcagtcgctcaccactgagcgtctgccatggacttgtagatctttgagcatcgacttgagcagctatcagctgtatcagtacatcaccgcagagtacatgcgtcgcagattgttgtagcatttgcgctgtccgagtactatgctgggaattagatggttagcgtatgtttgattcagtccagaaaattatccaatcacatggtaggactaggtgactcatagtcaacaaaagcagagaccttatcagtgta

SEQ ID NO: 43443 - DNA, 539 bp, Arabidopsis thaliana columbia
tgcacgatgggttattgaactggtggtcattttccaaatgatggaacgggttgagtgcagacatgcacgtggacaaataaggacggttggatgaaaaaagctcgtataggatccgatgagaatgaacgaacgcgtaacaagggaagagagcacgtgcatgtcggctcgtttatcagtaacttaagttggtgccttcctcctccatatttgttgggaatctctctatcctctttaatggtttcttcttaactaaacgagatcacgatttcttctttctcttctgacttcattagtgagttatgattcgtcagatgaaaccggacttattaaattatcaatcttactactatataaaataacgaagacatttactcgcatcatttcgaataggaattttccttttcttttttgataaaagcaaatgtaaaagcaagtaaaggcacatgagatgagcaataatagatagggatcatcgagtactgtgtcctgctattatgatactactacccatctttccacttgcttttagcgtatttact

SEQ ID NO: 43444 - DNA, 542 bp, Arabidopsis thaliana columbia
tgctttctgtcatttcatatagtcagtagttttaggtagttcagtgaagttgctatggagaaagttgattcttggttaatttggtttagaagtctcagatgcatttcttttattttttctgcagatgcaaattgcaacaggaaagtatcacactttgctaatcaacaactcaaaggtttattcttgtggtgtaagtttgtccggtgttcttgctcatggctctgaaactactcagtgtgtagcatttacacctatagagtttccgttccctgctcaagtggctcaagtctcagccacacagaaccattctgctttcgtattgcaatctggacaggttggtagcttctgtttcacttaaaacctatcctgtgagtatattgtcgtttgccataatcactcatatttgaaatccggcacaggttctcacttgtggggataattcatcgcattgctgtggtcatttagatactagccgtccaatatttaggcctaagcttgttgaggctttgaaggggactccttgtaagcaggtagaattgata

SEQ ID NO: 43445 - DNA, 445 bp, Arabidopsis thaliana columbia
caagttacttaaactgccatccaatttccaccataccaaatgacactccagcccaaccccatgttagttactaatccttaacatcataaaaatgatatagtctcatcctcattcaaccaaacccaactaaactactaagaactacttacttgaaaagtggagaaatcacgcatgactccgtcctgtccaacacggccaactctactgatctcttgataaaaccggggcagatgctcaggcatgttacagaaaatgtagtagtactgattgacaaacgcactcccaacctatattaaccaaacccaaaaatacactttaacacaacaaaaacggaacaaaccacacaaggattcacatttccacttggtaaaagggagagaagaaccccataattgaaaaaccatacagtaagtgggtcaacaacacgtttggttgcagcagtaga

SEQ ID NO: 43446 - DNA, 573 bp, Arabidopsis thaliana columbia
tgtgtgcatttgtgcatgcaatgaatcatttaccccggtggtttggatattacagtgttgtgaactgatgagtcatgaaaacacagcgtttcttgatgttgaatattttacgagggctctatgttgaatcacaaactaaaaataaactgtatcaattattcggttctcaatatgaaaggcgatttgtcaatggtctgctctttgtcacttcgagtggcctagattcgtggtaaaatttctttaacaaataaaatagattcgtggtaaaattcacaatcattttcgaactcagcttttagtaatacgaaattcacaatcattttctaagcttcgccgtgttattttctttaatctttttaaaacccaaaaacagaacgacttgcaagagattttgggtaaatatttgctgaggtgggaagcatatttttatgttatttgtcaagaacatgttaatgttctgaagcagttgactttattttatactcaccaaagacataattaccattactacaagctctttcaacaattatagtaccaagattgtagatagaaaacatttcattaggagtttga

SEQ ID NO: 43447 - DNA, 535 bp, Arabidopsis thaliana columbia
ggagagagatgcacatcatattagaccaagagtaacaattgcatatggaattcactgttttatgtcattcacattaattttttcaagatgtttaatgattaactttttacataatgttttggctgctttatttttgataaaatttctattttggctgcttgttgttgtgagaatattttttcaaaagccagataaaaaatggagatggggcatcgtcgcacatggtggcatggacacatttccaaaactacaaaaaaataagtgttttggtaagtcgaaacatatatttatggaaaataaaatgaagttgttcgggattcaaaagcatcttcggttaacatttaactgctagtggtgagagaagcttatacaatttggttatatgttttgtttatcataaaaagttaatcttactaaagaaaattgatttccatttctctttattatagccacccatgtggtggttactattttaactgaagccaaactttgaaacttactaaaagttataaagttaagaacttaaatttggttt

SEQ ID NO: 43448 - DNA, 488 bp, Arabidopsis thaliana columbia
ggatgggaaaagagaagattcataggcttgcttgtgatattgtttattcgaaagagatggaatccggtgaagtagacaactgtttagttctagatttgaggagaaagttgttggttgaactggagaagttgattcccttgccaattgttattcctgagagaaggttggaacatttggttgagactgctgtgatggaccagattgatacgtgtatgtatcataactcatgtgatgcagtatcgctttacaaggatcactgttgcggtagagaccaaattccttcagagacagtccaggtgctgttttctgccttagggaaccattggttttcattttcataaactcgttagtggttcttatagtttctcaatctcttattatcttacagattttggtggcaccaaaaatgaagtgtggtttgtgcaattctctaatagtggcaaatatctggccactgcatcaagcgattgtacagctataatatggaa

SEQ ID NO: 43449 - DNA, 440 bp, Arabidopsis thaliana columbia
  unsure (1)..(440): unsure at all n locations
tgtggcnaacagtaataacctagaacaaaggaaaaagtcagatcaagagactcaaggagaccaaatcttccaaactaaattagtaacacagagataggatcgtgtccgaaatagtttaagacattgtaatcgccttgggggaaattaacagattcacataaagccaaagccgttcacgaagtaaaagcctttaagtcaaacactgtgcaagtcttctttctccaaaaaacctaagcaagatcgtattttgaggagaggaatgcgaagaagaagacttacccagtagagaaaaagaccagaaaagacttgggccaagccaatttcggaggtatagagcttgggattcacgacacacaacagtgaaaagacaaaagagacaaaggaacctcgaacacgagagaattgatgctaaaaaggagaaagtcaaggagagtagtatg

SEQ ID NO: 43450 - DNA, 507 bp, Arabidopsis thaliana columbia
taattagcttttccacagtatattttcattttgttaaatcaaataaaccatatttttatggtctaacatattaccgacatttttttttctatcgaaacacatttgtagctatatatatcgagttcggtgttttacaatttaagatacatcaataacaccataaaaattaacaacttcacaatcaatacccaacaaacattataatagtagcgtagtacatctacattaaaattgataacattactcaaaacattatacaaaccatgcatgtcactgatattaatgagttactcttttggcagtgcaacaataaatttggctagcgacttggcatccccaaaagtagatgggaaaacaaatactaccccttttgagacacacccaacccaacatgaagtaacttcaagtctttccccaaacgataaactcttatcaagtactccatcatttgtctcctctgaatcacgaccgcaatcgcaacccttaatcacttcatcactcgaatgt

SEQ ID NO: 43451 - DNA, 510 bp, Arabidopsis thaliana columbia
tacgcgctctcttttgtcacaaagaatatgggcttttattacttttccccactctccatgcaagttattaaacaaaattgctaatatgggcttttgtaactttgccccacttttcgtaattgtgaggccactttgatctaaatttagaatatggggactagggaccatagagaaattttaatactaccatagaaagttcggaaattctgctagtacaaaactcgccgttgtactttcagaaaagtacaatgatgatgattttcttcttttaatcaagtttgcagtacacatgtccgaagttttttcttgtactatcccaaacataatgaatgccacataacttgctcgtgtactacacaattgttgtggtgttattgtgtactacccaatccattcattgtctgtgtatttatagtttccagcatgtttgagacaaaccaaaactcaaaatgtaataacaagaagatatcaatatatcatgaaggtagtggatctcgacagggttgatat

SEQ ID NO: 43452 - DNA, 432 bp, Arabidopsis thaliana columbia
aaggaagcagcccaatgcctaagacataaataacgataaaaaatagttttaatattacttcaacaaccccttcaacaaggtattcaaattagaaataggttaagcacctgcttttgctccagtagagaggcttgtatctgtggaatggcaccagaaaaaaaggttagtattcgaactaaatacatacctgtgaatcttactggaaatgaaaaacttgaaactcgaaggagtttctgtatatagttatcagaaactaagagaattttctgtagatgatccaatcaaaaagtcgatttagggaagggactagtggtgattcttgtggaagaaccattaggaaattagaacatgtaggaaataatacccgttgtttctagtagggttttgtggctcttgcgtataatagcagacgaatctacttgaggtttgact

SEQ ID NO: 43453 - DNA, 642 bp, Arabidopsis thaliana columbia
attaacaaacaaaggcattagcagtatagtcgattcaccaccaaaagaaaagaaagagtcatctctagactcttatggtacccaatctaaagatgctgtacgggctgactatgtaaacactgagcctaatcagggctgtctgacttctggacatctagttgaaggaaacgataatgttattgagagggagactttgtgtgagtcacagagcgatctgtccatgggattaaaagccaatgaaggtggtaaacgctctcatgaagttagcctaccgatccaagcctcaccagaacatggttttgtcactaaacaagctcacttctcgtccaattcagtagatactgtgaagtcagatgctatagtgatccaacctagtggctcacagagtccccaaagttaccaaagtcaagagtctctcaggcaaactggtcggaacaggtaccacagaagagatttaaaccagatgcacagagattcaaaacctcgttctcaagagagacctcctcagatgccatattctccagtcggaactggtcgtgaaattcttggtcagcacatggcttttactcatcaagacaatcgagtagcgctacaaagctcaacctctcagaatccgcaaaaccaatttcagaactctgcacg

SEQ ID NO: 43454 - DNA, 569 bp, Arabidopsis thaliana columbia
tctctattcaaatccgtaaaggatagtgttatagctgataatcggaaaagtatagaaaagaaagaagagagaaccttcatttgagacataatatcatagagctgacttttagtcattccggcgagatttgccggtaaacctccgtctccgccgatctgcttacccgccatggttctcgtcggtaatcgctaccgagcttaacctgtgtgttaaagacgcaacacaagagtacttgtgaacaaacctgggccaagtataatacgggcccaattagtataattccggcccatttaaaattctagacttattagtctatggcgcctgtagatcaactctttttttggtcaaaaatttaccatttttctcaaaacaaaacacaacaataaaatatagagatgcattagatatgtacgttaaatatatttatatgaaattattaatatgtttctttacatgtaccatgttaattgtacacgtaacatgcatgtatattgtataatatgtcttttggaaaagcaaaagcttataaacacaagtttacattagagagaagcgtgtgacacggtttt

SEQ ID NO: 43455 - DNA, 657 bp, Arabidopsis thaliana columbia
  unsure (1)..(657): unsure at all n locations
tcatgtatatgtttttaaaactgactgtgaagctcatggattgttgtcatcaggtcaagaagcttgaccttcattagacttaagcagtttataatcaactaccacgaatagcaatggataaagattactcggtacgtacgtttttttttccagtatttcaagatccttaatctcttttcttatacaaattgatagatatctatgtataagattcaaatcttcctgcttatgatattaacttcattctccaattctggtttttattaggcaccaaacttcttaggtgaatcctcaggcggtaacgatgataacagctctggtatgatagactatatgttcaatagaaaccttcaacaacaacaaaagcaatcgatgccacaacagcagcaacatcaactctctccttccggatttggagcaacaccttttgataaaatgaacttctctgatgtgatgcagtttgcggacttcggttcgaaacttgcgttgaaccagaccagaaaccaagacgatcaagaaaccgggattgacccgtttatttcttgaagttcctgtcttgaacgcaaaatagaggccataacaaaccaacattcatgcttctcacagacgcncaagaggaggtgagtgtgagaacatagcatgtgtcttgagaaagag

SEQ ID NO: 43456 - DNA, 576 bp, Arabidopsis thaliana columbia
gactttattaagctgtggatttgtgattcacaaagcttttgaaagtttaagttgcagactcataaaatcttggatttttgctggaagagtttgtctttagggtttgtctgaatcaggatctctactgatcctttatcaaagagacaaaaagtagttttgaggttgagatgtttgagtttgattgttgacacttgacaacaagtggtcttgggcaaacattaccatttctagaaattcaagatctgttattgtttctgtttctaaaggcaagtactgaatacccaaaatgtagttctttgatgtaacaactttttggctcattcaggtataacttgggattctgggatagattggtttctcaaattagtacgctatttttttctgtcgtatcttcaagtgaacctgaaattagtagaatttacttctgtaaggttatgatttccatcttatgacattggaaaatcctctaaatatgttgtggtgtttataggtatgactattcagggtatggcaatcatcagggaaggtgagtaacacagatcctaaagctctcttagttctgagattcaaatgttg

SEQ ID NO: 43457 - DNA, 538 bp, Arabidopsis thaliana columbia
aataactcttctatatgttttatctatttatgatattttggtaatttccaggtaaaagatattctaaaaacacgagttagttttggaacataattttggaatattttctgtaacttcctcgaaatttcaaaatacaactacaatacagatgacattaattgcaaattatagtaacagaacataactaacttataaactaaactgtagtgataattaaatataataagaatatcaaattcattcatctcttctatatgttttatctatttatgatattttggtaattttcagtacaaaattatttctaaaaacacgagttagtttttgtctttacgaaacataagtttggaatattttatgaaatttcgtcaaaatgtcaaagtacgactacaatacacatgacattaattgcatcgtcgttaactatagtaacagaaaataactaacttataaattaaactgtagtgataattaaaaataatgtatacaaaattccattaatctccaatttccgttttattttttacaaatggcaaat

SEQ ID NO: 43458 - DNA, 593 bp, Arabidopsis thaliana columbia
tgccccagcttacaactacaaaccacttgtggttatcatccggttctagaggattgcggaatatgaaggtctgtcaaactctagttctagcgtttacaaaaataattttaacgagtggttgaaattttgaaattttttctctaaccctaacttccatatagtgttagggaggaatgccttattcagtgagaatgagccttcaaggatttacttcgaccccacatttccagattataatagtgacaatttcctgtatgtacttagtttataatttttctttgctatatttagctatgacccttcataatactataacattgttcacttattgttttgaatcagccgttgtttccgtgaagattatgaagatgaggagcccttgaagatggaagtgatgatcgagaactgacgtggtgaaagtaggctgtgaagaggatttagtcatttgtttgtttgatattatttgaatattttgctaaactcgatcgctctcagaactctatgcttatgtattcgatttttattgttaaaactcttggttatgttgttgaatacatattgctattttatgtaattgctttgtttaaaattga

SEQ ID NO: 43459 - DNA, 979 bp, Arabidopsis thaliana columbia
cacaataaaggtaagcaggcacacaaagctgtcttcagggtttggttttcatttcgtgtaagatctctaaaactaacatttgcatgtaaaaatatgtgtacagatatggagcccaaccgcatcagtcccatcaattgtagcaggaggatcagctggaccagcaaccgccaatgtagtggaagtaatggagagtaatcaacagaagctaagccgcaatcgagagaatcctctgtaagttttctgggataggtggtttgagttaatataaaagctccaaggcggtttcagagtacacaaaatgggtttgatgatttggtacattgatgattcatttgcaggtctgtggagctaatgcaaaaggtttaggatgcaagaatttgcagaaggaaactttcacccatttgaatgtactcagagctaaagcaggagggaactgtagaggtataataagcttgctttgtgaaggtgatggtggaataacaatggttttgaatatgaataatgaataataaggtttgattaggtttcatatgtagcaaaagctttctctctgtaaaactcatgcatagcttccttctaaaagctttttttgttgttgttgttgttgttgtacagtttgatattggcttcttcttttgaatgtgaatattcatcgttattttacattgttttttcatttctgtcgcgtttagtagacagcataaggctgtatgtgttatgtgtccaatctcgttattttaatatagacttgtggaggaagctctaaccactttgctgctttaattaatcttgtctagtgtaaacttttttacctatttatatattgctgctgggggcacttgcgccacaagccataacgtgggtctgccctgactttagtatgtatttggacaaggtatgcttctatttggactaacccgcatacgtgtttctttgtatcaattattagtatattttatggtgttataatggtagtaag

SEQ ID NO: 43460 - DNA, 477 bp, Arabidopsis thaliana columbia
cataaaaatctgttcccaataatattatactcatctcattattgccgatggtttagtaagttaataaggtatcaatcattcatttcaagaatgttgcaaatcaagccaaatcattgaatacaagaatgttgcaaaatcatgccaatcataattttaaactgctggcttctgacacaaagggaaatgtcagacaactacataacattttatcagatagcatctttggtttattcatatataccctatgtataagatattaacacatcataaactaattaatatactcaagaataaaattgtgctctattaacagaaaaaaatcatctaggagccaactctgtgatgctctggaaggaaatattagagttggacgtcgacccttgaggaacggctgagcttttccctttgtcacgttgcgttgacgagctctcctgtgagctgcctccttggccgaccctaagaccgattccacggtgg

SEQ ID NO: 43461 - DNA, 542 bp, Arabidopsis thaliana columbia
tcatcatagctagaaaacgaagaaacattgctgtttccaaatcccgagagtggcatcgactgaatggttgaaatagctgttgcagcaacaggactaatccttcgggatgtgcgataacctataccaagtagagcaccaccatgcagaccaatgacctgaaaggaaaattatgaagcatacgaatgttgcttaacctagacgtccagcattgcatactgctctatgatcaatttttcaaagtaacaaagataacccaccacttgaagtcaagaagaactctcaagtaagattctcacgtttagcaacctttccttttagtcaaattcaattaataaactactgtgttccaagtatgacatttttttgtactaattttacagtattttcaatgcaaaccaaagcacacaaattcttaggagcatgattagattaaatattcaatggatctgctctagaatacatgcagatgatctggtataaatgaaaaaaacagacacataccggttcagagcgacctcctcggatctcatgagtatgtttga

SEQ ID NO: 43462 - DNA, 607 bp, Arabidopsis thaliana columbia
catcagccactatcgcttcagcagcagcagcagcatcctcaatacattcctcagcaggttagttatgagcctcaaagaatatcacagccgttgacatcgagtattcaatgtacggaatctcagtctgattgggttgggttcaatgaaaagcggcttgattcatggacagtggattcaggtccgggtcgaagccgagtggatgatggtccaagccgtaactatcagtatgactacagccgtaactcgtcgggtgttaatcgtggtttagatggtagttctaggtctagagatgagtttcgtagtcttggatatgctagaaaagaatctggagtcactagaacagaggggaattatcaagcccgtggtcagttaaaatcagaatccgatagatatgttaggggtttaggtgatggaaatagggttttacctctagtgttggttatggcagtgacagatatggtcttacagtaagtcgagatgtgactaggtcatcagcaagccgtgaaggggctagagaaacacgtaatgaagggaggactctctatcccgagaaaaaggatgattactatcattctgagattgaacaatattttgatcgtggaaggag

SEQ ID NO: 43463 - DNA, 460 bp, Arabidopsis thaliana columbia
atctctcacattctgcaactttgaatcaattggtcagaaaaattgttctaaacactaaaccgtttggtccattggacaaccagcacatcttacatgatcaattaaggtcttgaaccacttgacctatttgtatgaccaatttacacaaaattgtggtgactcgcttcaatttcggaccactcggtgctagagccggtccaacgttatgtgttgaatattataaactcatatacgaaataccaaaaaaccttaattgaataacattttaggtcataaacgaaaaaaaaacgaaaaaaaagaaggtgacataacatatatgcatgtgcattttactatgtttactcttaaactgcgatgattatatgatcaatctagtcttggttcgacttttacgggaatacttttacgaataaagtaacattccatatacacttatatcgtgcataagttatatggttaa

SEQ ID NO: 43464 - DNA, 513 bp, Arabidopsis thaliana columbia
ttctattctcggagctgaggtatatgaagaatagccgctgaccggtcatagaaccaagcctgcacacaccaaacctattacaaaggagaacaactatgaatgaagatgactgctagttcttcttctgatgcaggaactatgtaggaattcagtgtcatgttaagccattagaaaggctgagaatgttctcgttaggataacgaccggcgcctcttgttaaaacctacttgagtccgtaaaatcatgtcgaagagaaacctggtaacattaagtccatttagaggatttttaagctcagacagatagacaagggcagtgagctagctgtccatgagacctgaagtttgtagactttgatcagcagaatagggtatttgactttagagaagcaactttctgtagctgagaagcaacttcctgccgctggccgctctatcttgctcgatgtcagagttaaacgcaggggtatatcaggctcggctcacaggagatgggttagggggcagcaagaga

SEQ ID NO: 43465 - DNA, 193 bp, Arabidopsis thaliana columbia
cagaataaatttgcatttgaatgcgtgtgcgtaaagtgatcaataagaatattccgagtcactgatgatctatgttagtaaggtgacttactagatgaaatgctcgtagacagtacaggagagagtccgtccaaagaatccccaggtgctagtcatggaaactaaaatggtttgctgcggatcaagagagtat

SEQ ID NO: 43466 - DNA, 486 bp, Arabidopsis thaliana columbia
attagactctatgttgccttcaggaacaccgttggattctggaagaggcgaagtttttccctcattttctttcacatcagagtcagtagcacctgaagacgtctgcctaatctcatcaaatgcaagagcaacttcagcagcaatctcagttgctttaggcaaagaattatcatcagcctcgtttgagactattgtatcaacatgcgagatctcaaccagttctccagattcgggatcattcggcacagctgaatccatcaaaccagtattctctacaatcgcattagcagtaaatcccataaacggagcatctgcagcaataggcacaggttgaattggcacagaactcacagtaataacttcagaaacatcatcaccagtcttcttatcatcatctatcttcttgacttcccgtgactcatcatccgagctggagctgctgctgctgctgctactactactgctgctactagagctcttgtcatg

SEQ ID NO: 43467 - DNA, 552 bp, Arabidopsis thaliana columbia
agaggatccccggatcatacagttcttcatagactctgctttagcactgtttgcatcaaaagcaaaccacttctttttttttccacaagcaaaccacttcacaaggaagaaataaacttaataatttttcactccccccaaactttcattattggtataaaaagattattttgtttgttttttcgtgatgatacacagaagggccagacccaaacaataggtgaatactgaaaaataaagaaacttgaaaaagcccaaactccatgaagggggaaaccaggcccaatacgagcaaaacagaggcaaaacaatccgatgtccaagatcgtcgaatccgggcccatatccggaaatccccacaacagttgaccaaataaccaagtcaccttgaagaagcgccggagttatcaacaagttcgttcatgaattcatacctgagttcacagttttctgatattggaaggtaaaattaaagtcattaaaccaaatgattcatgttttttattcgtttttttgttaaatgaatgagttcacaaaaaatgtctagatttt

SEQ ID NO: 43468 - DNA, 532 bp, Arabidopsis thaliana columbia
attgcaagcaatgagaacgtaaatcggtaaggcatgtattcccatccactctaacacaaggcttgctcgtttgtatccataaacgtcgacctgtgaagatagtgagagatagatttacattttaaccatgagtgatgctttcattaggagtctcaagataatagcaaaccaaaccattaggtatatcgcggataacaaaaatcccgaggcccctgaggtgacacacatgtaactcaatgtgtatagaggtttatttagatgcattcctgcaagcaaccaaaaaaacgaatgacatgtgatttactaaggtattttgatcttgcaatgaattaggacaacaaatgatgtaaatgagagctataagagtcaaggaagataccaaagaggttcagtgcgagacctaacatcagaagacaaaaagaacgtaaaatccattgattcaaacgctttttgtgatcctgtaaaaagttaattacatatagcaacaagtaagtttctgataagataaaaaaaaatgctatacaactgatat

SEQ ID NO: 43469 - DNA, 246 bp, Arabidopsis thaliana columbia
taactcatgtcaatatgttaaggcacaccatatcatattaatttataacaaaaatatgcattattgtacatgtatagattaaggtcggttctggatttttttcaatttttcaagatgagaaacatttaagagaatcccaagaaactctgtctgcgcttacttgaaatctaggttggtcttaccataattattcaatgtttctgcacagcttacatagacttatgaatgcacatgcatgatcatata

SEQ ID NO: 43470 - DNA, 479 bp, Arabidopsis thaliana columbia
gaagtccactaaaccttatcatttagaggaaggagaagtcgtaacaaggtttccgtaggtgaacctgcggaaggatcattgttgttacctgtccaaaacagaacgacccgcgaaccaaagatcaccactctcggtgggccggtttcttagccgattccttgcccgccggatccgtggtttcgcgtatcggcatgatcgggagcttttatctcggtcttgtcgtgcgcgttgcttccggatatcacaaaaccccggcacgaaaagtgtcaaggaacctgcaaacgcaccgatgtcatgtattctaccagagtaatttgacaaaaaacaatgttaggagttttaatgttttgaagaagtgggccagatgtttggagttttaggccaatgtagctcatcttgggcccagtacagaaataaatccagtgatgattctttctgattggctggaaggtgtgtgtacgtgaccctgtccgcagtga

SEQ ID NO: 43471 - DNA, 393 bp, Arabidopsis thaliana columbia
cgataactctccttttagatcatcgagacacatggcttattaccgatgattggtgattaccagtgagatcattgatcctatatatgaatttgataatcggtaagaataaagacacccgaagagtagttcagattttcgttgtgtagctgctatttaccacttggctcattgaagaatagacaacaaattgtacttacaattgtgctgatatatataccacagtgattttcacaaaatgggaagtgaatttattttacggattgcttcaaacccttaattctatatacttgatctctaaacattgtgtaaattgtgtaaatttcaaccaaaatctctgaaatgtgttttaacgtgtttgatcatataagtggacaatatgaaccgtgcgatttt

SEQ ID NO: 43472 - DNA, 372 bp, Arabidopsis thaliana columbia
atcgggtggacttccctctcctatatttttttagaaaggaagtcattagagttttttctctggcaacggtagttccgttgtccaactatccgtttagaatcttttggcttttgactttttggctttttatccgataactttcgtttttatggcaatgtttggccagctttagttttgacaccgtccgtttctctttacggtggtggtcggctagcgtctggcatctgtcggcttttacaaaggcggttgactggcttatatctagagtttcatcgtccttctattgtgtctcgtctagcttctaatcggattttttccggtttaaatttatcttttcgttctttagttttctttacatttggtttgattggc

SEQ ID NO: 43473 - DNA, 353 bp, Arabidopsis thaliana columbia
ttgctaaaccatgtcgtaagctgtaactgtagaaaataacctccactgcaacatactacacatgcaatcaggcggaagaagattcgatcaaacggggcattgcaaatccagagagtgtgagaagattgaccagtaggaaacctatgaagtggttcagtctgggacacatgacattgcctgtttcaaacaccaatcggatccagcgaattaccaaagatttcacgtattgctcgatccagaagggttggtaaacactcgagtgactaagtaatagtgagagatcgtcgggaaataatactattcgaaacggtagataggtcttacacgtgagcattccgtaagtggacaaggat

SEQ ID NO: 43474 - DNA, 507 bp, Arabidopsis thaliana
aattaatgggacaaacacaaaatctccagtccttgggagagaatcagacttagtcctaaaaccttacctcgcatgcatcatgatacaaaccctattcagtaatacaccattccaatccactacaaaccagattctctaaactgtcatgccctaatcctcttcagaagtccaaatccatcacaaatctgattttacaagaaccaaaaatacagagaagagaaaacgaaaccatagagtttgttggccctaatcgtgccctaatctagaagaccggaaaacaatgaaaacccacatgccaatttggaaaatttctcatgaattgaacaaaatcaaaccccaaagagaagggggaaatcgaaaaatctaagataaaagagtaaagcttcttacccttgagccctcaaggagcgacgctggtgttgagatgcacaaatcgacaatagagaggacaagctagctcttctgatcctgagctggtgtcctttcctcacccatcaagcgcaaagt

SEQ ID NO: 43475 - DNA, 551 bp, Arabidopsis thaliana columbia
atccccgaatccaaagaacataaaatattaacagaagaaagaaggcataacattagtaacaatttaaaagaatatgaaagtaaaagaaaacctttgcgtatttttcaacgatatatgttttttcccaaaatttctcgacaacatacgccttcatgctcttcaaattatcagcaccaatggatatcttgaataacatggttttttcccattaaatcagcaagaacctcgggtaaaattgaagggtccgattgctcgaacaaatagaataatttgtatatcaacaagattttttcagtcattattgcccaatttataagttttcagaaatttagaaacatgaaaacaatgaaaactcctctacgtacctctggaacttcggcaaacagctcaacagccgttttaccaataagacgttgagccacccatcaaagaagagcaatttaaccttaggcgacgtccataagaagcacacataatgagcttatacctatatagattgagagacaacgttatttacaaaacaacgaagctaaaacattgctgatgacaaa

SEQ ID NO: 43476 - DNA, 202 bp, Arabidopsis thaliana columbia
tggtgagcgcggtccaaatagtgtgtggtcgagcgtacgtggcgtgcgagtactcatcaatgggacatatctgccgacaagctatcgtcttgcaccttgcaggtgcagtcatcctcacattcctctactggtgcgctggtctaatccttcgaatactaggccagtaagcagtcgtagcacacgcgggtcagatctttgcacg

SEQ ID NO: 43477 - DNA, 513 bp, Arabidopsis thaliana columbia
atgctagctagcctaacattgctcagcaattatgtattagtccattaattcaatatattgacaatgtatactgttctttatggcttttctgttaatatgacattacctattagaatcatgcctttttgaagcaggacaattttttcgatactgtaaaactcaaaatgtccttatcaaatttgcattgttagacagctcattgctttatctcttttcctttcttaagcggaatgtaaaatccattccggttcatcagcatttatttgccctgggaacacagaaaccggcagatctcatataataaaaggctgaatcctgattcatccactttggagcagaagaggggtttcttgtcaaacaagtaactattcgtttttaaattaactaagaccaagaagaaagattatgattgtatttggaggtggcattgcaaaacgtgcattgttgtaaaatctgaactagtaggttttcaaatctagtcttaagcttcaaacgaaacataacattaaacat

SEQ ID NO: 43478 - DNA, 503 bp, Arabidopsis thaliana columbia
  unsure (1)..(503): unsure at all n locations
cctgcatttgctctctttatttgttctctcagctgtatcccaggagccaccttcgtcactaggatatgtattcccatcttgtaaagtgattggttctataggttgagactgagacctttcaagaagcgaactggttggtagatctggctcatttctgctgctcgacagccttcgagaatcagcggcctttgactgcagcgaatatggcatagttcttccgataatgtcaagttctgctctggattcagatgcctgctcaattattggctccgttctggggacgattactggaaaataatcctctttattgactactggaggattcgcctttgggttagcttttccaaaatttctctttgaggctgcagcattagggacaactgtagaaataccagaagcactttttggagcactggtcaaagtaaccctgtgangagagtctgatacacttcctgtggcttcaacaaacagcagactaacccaaagatgtgatatcatttagt

SEQ ID NO: 43479 - DNA, 552 bp, Arabidopsis thaliana columbia
gggacaatatcgataaatctctatgtgttgttgatgtcaagcaaccagctcgtgcctctgctattcgccggattgatgctggtttaatacctttacctcaattccatttgtctccatactcttttatttctgtcttgacgaaattcacttttatctatctctacttggttcatttttttctcagggaatgattgtatcatcattgttcatatcgacttcaaagaccctaaatccctaccagagtatgtttctagacaaacacacactctcaataacctacttgtcgacattttttaatagttataagtgcttagacaggtcccggtttattggtcctgtgccttcagctacgcatatgaacaacttgcatatgttatggagaagaaattgcaaaagatggtaaaattattttgtctctactctcccattttaaatctctttcgagaggttggttatatagcatggagttatatggattgttgaaagcaggaatgacgggttaatgataatcatacaggtcaaatgaaagatcatttcctgagaaccttgaat

SEQ ID NO: 43480 - DNA, 589 bp, Arabidopsis thaliana columbia
ctgagacgatctctttgtagtgtcccaagctccactggaatcacctgatgcaagctgaatcgacgcaagcttcaccatttcatttccaatcaccacgtgttcatcctcatacagcctcttcagaatctgccaccaaactcataatttatctcatatctcacccataccagttggggtaatgaaattacacgcatgaacgaaaagctttaacggttgtttaagggatttggtctgccagataccggtttgctcaaagcagttttcatattttgtcaatcaatgatacaagttgtggtctaaatcgaagcagtatcagtatttatcaagggcttttaccttaatggatgcttcacaatgctttcttgcatctcaccagttccccagctaaatagcacgcctgagcaaccttatcctccgcctgaacaaacaaaatcttggaacgtgagtcatgtttgtttctctcaagagtggagaggacatgccttagtcaccaaatgtgatatagagtaacaacgctttaagatcctttagcatttataaaagaacttgactcacatcagcgatgtctttgttaacatgtgcaggaaag

SEQ ID NO: 43481 - DNA, 486 bp, Arabidopsis thaliana columbia
aaatacgatgaacacaaaaaagaaaaaatttatgatgaaaaataaaagataaaattaaaatattgaattatcttcacctattctttttaaaagaaagttttttaacacttctgtaagattatcaacatgcatgtctttgcgcttcaacgagaagaaaggagaacaaaaaaaatcacgagtattagtctgaatttggttctgaatcttttggtcatatatttgattaaattatgtaatatgtaaaaacacaaataattagtgtaaaaaggttttgtgcttacctaatcatcacgtctacaaacacaaatattgggcccaacactccaacgcatgcctatttcattacaccatctacaagttcttctccacaaatgtactttcatttttgttcttggcaacaacattctctttttcgtttctttttttcaaaatatacgttttactacaaaattaaaatttcgtaaagtacaattttgcatacattta

SEQ ID NO: 43482 - DNA, 566 bp, Arabidopsis thaliana columbia
attataaccttaaaggtatgtatcattatcgttttattgtttcaattttgattaatggctttgatatttcattttttttttataatgtttttactctacaggcactcgatcggtagccttagaggggacaagcaacacaaaacccaaaatccaagtacaactgcgatttgcagttctatttttagcaagtatttaagggagtaaaagtactaacaagaacgtaaaacatttgtaattactatctgaaacttttgtccataagttagctgtggaatgatttatcttatttgttatttaaagaaaagtgtatatgtttattcgcttgttgttgttaatctaacgaaaacgaggaagtctgtttttggacttattctatcagataaggttaaatctatgaaatttcatcaagtcggtccacatttccggaagtatgtttgtgacaaatcaaattataatatttctagtttagtgaaaaaagtaaacatgtcagtttttttgtttacatttccccagacaaatgtccaccaatgttagacgataagagaattccagctaaataaaataaa

SEQ ID NO: 43483 - DNA, 465 bp, Arabidopsis thaliana columbia
catgatctagagataaactctgcttgatcttcttctctagacttttctgttttatgttcatgccaaacatcaccagaattatcttgtctacatctgaatccaagttgtacacaccgaatgaacaaaaccaaaaacacaacagaaagatagttgtaccataagcgagataaaccggacaacaccggggctcggaggtaaacgaaagctaaccatcgtcgctagaaaagccgatcgatgctagatgtaaagccgaccaaatatcgttttataagccggagtatgtcggacgtaatgccgaatttcgtaccggacgacaatgatctgttttgatgctttctctctctgaaagatattaaaaatagaaagagagagaaatcacgcttcttgacacagttacagttccatattacagttccataatacctgaactggttttttggttggtaaatatatatatatatatat

SEQ ID NO: 43484 - DNA, 525 bp, Arabidopsis thaliana columbia
aattccaaaacgctacataacctagaggtaagagctgcatagttagttactggtggtggatgaaagaaaattaacttgaagctaaactaaactaaagaaaattctagcattcacaacgtcataagccaatgataattatatgatgcaaaaccaatcaacgaaacatattagaaagaaggaaccatattaacaagaacaaacccacaaatatccttaaatataattcagtcacaatttaaactttaaaaacaaaatcatttattcatggatacaagacttaatctgataaaaattaaatcaataatggagtatcggaggagaacgattcgattttttgtgacctcgggctgttcgatccaccgtgatctcataatctccaccgacacagggtctcaacggcgactaacgggccatcgttaccgactgaatccatctggtttccagatccggtaagcttttctggcgctagacaacgaacttgtatccactgtaaattttgcttcaactcaccttctggattgttgt

SEQ ID NO: 43485 - DNA, 579 bp, Arabidopsis thaliana columbia
ggatcccgatcgccgaaagctcgaatccatatttattcattcttctttttagcctagggattcaataagtgagctataaggaaaatcgggctttgataatttgactagcccataccataacccatattgctaatttggctttaaaatcatgtctactatttgttggtatatctagctaatcaaagcagatttaaaaagagtctgactgatgttgttagtttaaagtgaaagtactcttaacattgtattagttttgtagtgcgtaccaattatatatccagcgaataaaatgaaaatcattcatatatctcgtgtctgccatttgacgttcatgtcgacgtaagcttgtatttagtgtaagggacacaaacatgcattcgccatatgcttttcgttgcttccttcaaaatcctctaatcgacaacatcaaaacaaacttacctagcttcttttctgcgtgcaaattcattatatacacagccttatgtgcaaactgcaaagtattcatgaaaacacacgcgtagttcactcgcttgtcatgagattctgaaactgttcatttatctgagtgacacagag

SEQ ID NO: 43486 - DNA, 545 bp, Arabidopsis thaliana columbia
ggtcccgtcaaataaaataaatttctaatcatgtaaagataatttttagtatgttttttatttaaatgaaattctattagatctcaccaataaattttcttatataagtaaaagttatgttgtgatttttaaactaggttattgttttatcgtctataatagtttcataaaaataatcaaaaatgtttgtcagtttttaaattttaaatatgcagattttcatttcaatagtcatacatgctgttcaaatacaataattgatgtcattattcacacaattttaaatttattgatatcgattgtatttgtgagttcatatattatctttgttatttattgcaaaaaaaaaaattctcctaaatattaatggttcaattctaaaacaacaaaatttataacatccaaaacacttaacaatgaaaacaaattctctataaattaacaaatattacaataaattaacagcccataagtctttttgggcttgtgtgctcttgatctgtgcgccggctctgtttatatgtataaagtgttcagagagtaga

SEQ ID NO: 43487 - DNA, 745 bp, Arabidopsis thaliana columbia
cggttatggtcgtcctccgccacctccaccaaagatgaactaacaatcatgatgaagcaaataaaaatgtgtaattatgttaatcatgctcgcgcggagaactagtatgcatgtgaagcaaaaaactatatgctatgtactatcaaactaatcaatgaaataaataaaatgctaatataaagttggtcaactgtttgaatcattgaattttttcttagttatcaacataataaacttatgattctacaaatttgatctagatatcacttgatcgggaaaattacgcatcttaccattaatgaaaatttgaaatgcttcaccacacctactcaaattttaaatgtttgatacaccgttgaaaacctatgcacaataaggttgaacaagttctcgagagaggatcttactttcacttcttaatatcaatgttcgaggttgatttggttcaattcttccattttccattagaccggttctaatttttaaaatttccaagttggtttgggctttaccacaaggctgatcttttaatttgtttggccaatagttggaagaaaaatgaggcctaatgcgtaaagcttggggaaaaaggaaagaaaaagaagtataaaaaacaaaaaaatacaattcattataaaaaggtctaggtcactaaaattgggagaaacccctagaaacaaagcctaattcgcaagcaatggaggagcagaatcgtggatgtcccaccgttgtgtggtgggattta

SEQ ID NO: 43488 - DNA, 397 bp, Arabidopsis thaliana columbia
  unsure (1)..(397): unsure at all n locations
caaactctaatggatagatactattactacctccagttactggtttggctctcctagcagctgcatcaacaactctgcaacaagttacccaacacttaactcgcaactcgcaactcgcaatgaatacttcatacgtggctgtggttagggtgcgtcataccttttcagtgcgaattgtcgccgccttctttctagagtatcttcaattctctttagaatatattcaatcacaggctttgaaataagaatcacaccaagaacagttaaacccatggaggcatacttgaaccgcctgccaaaagaaagagatcttttagaatttttttcaatcatagnttttcgaagaaaagaataggcaaaaacagagaaaagaaacaaccttgacaaatctcccaat

SEQ ID NO: 43489 - DNA, 543 bp, Arabidopsis thaliana columbia
ccatctatataaaggaaatataatattttcgttggaaattttcaaaaaactaaaagctttctttataaaccaaaaacatatacagtttcttaataggtatgatatatttcttatgttggataattaagtttctttaatcgtagttgccaatggcaacaatcatatgtgcattacaaacgaaaatgagtctaatcctccgactaaatcgatgaaaccacccttgttttagtttttatgtactctaaataattcggttacaatgatcaagaaatagatctaacaaatagggattgtagttggccactatgaatgtttttaaatgacaagaacacatagcttttttaacatgttccaataattagttttagacatcgttttacagataacccggttcaacctagaaaaatcaataggcaaccgaatcacgaaacaaatattctttggctaattccaaaaataacatttttaaaactatctttgtatagcagattacataaatattttcttggtgtgtcatacaatgaatgtttagacggttatggt

SEQ ID NO: 43490 - DNA, 664 bp, Arabidopsis thaliana columbia
tccgatacacaatagaatgcatgcatgttaataagctactgaacaatccgagtaaaactgattcatgttcagaaattaagagtttagaaaaaattataactcttatctttaatgttgagtatgatattctaagaagagattatggtatcgctcgaaaaagaaatattgtaaggaaataaactacagtattacgtttagaataattcacaatttttctatttcaattggaacaaatagaaaatatataagagatagcctaggtccgagaagattccaattttataatcacactagaaccacattttgtttcataagcttatataattattagtatatgatattaatagaattatatatcgcccttaggaattttataaatatgatgtcatcgtattagatggtgttagtttttatagtggattaactcaaaatcataaaagtgtttattaatctttactagtgtttactaattggttgagtattaattatggaggttttactgtatcattaaatccacattgttttttctttccaaaatacagtaagtgaagggcacaacaacttaactaaattagattattggccactcagatagcaaagcgggcatttgcttgattttgactgactcacacgggaaatatacctcaaaggctgacctcgatcg

SEQ ID NO: 43491 - DNA, 424 bp, Arabidopsis thaliana columbia
tgctcttcttttttttagagaaagaaaacaaaaagacataagttttgtcttaaattttcaggcaagtgcagaacaacaacttgagtggggagattcctgtgatatgggaaaataggatcttgaaggcagaggaaaaacttatcttgtaagacacgtcatatctacaaaacactagagaaaacttagtaattgttgattgatttttggttgtaacaacttgcagggacttgaggaacaacatgttttcaaatgtgtcaagtgttcttctaaaccctccctccaatgtcacagtcaagtaagattatgttttgaaaaagaacaaaagattaataatttggaatgttggatagagaaatgagagaactctgttttgatgagcaggctttacggaaacccggtttgtgcaaatgttaatgcgggaaag

SEQ ID NO: 43492 - DNA, 538 bp, Arabidopsis thaliana columbia
cttaaattaacactaacaagctgtttaaaaaactaacaaataaccagaaatctgaaaaactatgtcgccgtctcttgttcccacaagattgactatttttagagagttgttgtttaatgacaaaacccagatgtttttttgtttcactgcttctcttcaattctgttaccaaaaccttttttgtttaagacagttatagctcttgattcggtttttataatcatatgattctcttgtttctatcatctttgttcttgttaacaagttttgtccaatggagtttaatggtgataggatcccttacctgagagatacatggagagatgcaaacatgatctgcggtatcttgcctattaacccgagctcgagcgggctatggcctccccgaagctcccagatcctcaagcaaacattgagttctggaattacatgtttccacatgttcagatcattttccttatcgtcactattctctggcaattcttccatttcttcctcagacgtctcggcatgattcgtttcactcccatatgcttgt

SEQ ID NO: 43493 - DNA, 562 bp, Arabidopsis thaliana columbia
tttgtatctctcaactttgattttttcctttttattattgtagctgattcctcttgaacctctgaaacttgttaatcgtttctgggttttgattgctctgttgataaaaaaaaacgtttttttttccgtttcttcttatgtgttgtagatgaatgtaaaattcaattatctgggctctgtctctgtgctttgtctattgaatggtatgcatgttatttcagataatctagggcttaggtttgtagaaaatctcagaatcgtgtatgctgaattttgatgtcattactcagaatttgagtcaatttactaactttattctagtttccggtgtagctatgacttgaaccggagttaccagctcctagtttttgtttctttgagcaatttttgtttcactcttttcttttaaaaagttcttgtggcatagtatgaatcctatgggaaattagatgaggaatagatagagcctcagacatacatggttctgttttctgatcacatgttttggtcttcttgatggcatattcttgtttgctatatcactaagtagaaccatgagatt

SEQ ID NO: 43494 - DNA, 533 bp, Arabidopsis thaliana columbia
atacatatactttgattttctttgtaatcccataatgtgtttagtcgcgcaccctataatcataatggtgacgagaggttcgagaaaaaagtggtgaagagagtgccgacgagaatgtttttcaaagatcataactgaataactaattttatctataaaagaaaacactaatccaataatgttttttcaatggttgatcaattcttttgcaaatgaaaatgttgatccaaattccatacgcaaataaatcgttagatatttttaaaatatatataaaaaaaattattagatatttatcagaaaaagacaagatttattagtgcagaacacacggtgacgttaatatgccgacgagaaaaagaacaaaaatattcgtctctaacaaaaaagtttacaagggtgagtttgtaataagagtaaatagtgatcgcatttgtataggcataactttttatataaagacctcaaagtcttaccatttgaacagaaaaaagctctccacgcctaaaaaaaaagaaaaaagagacagaaga

SEQ ID NO: 43495 - DNA, 476 bp, Arabidopsis thaliana columbia
aggatacataaattttgaatctttcaagaaaaaacaaaagaatttaaatatgagtaaccaataaaaacttttgaaaaagataaggtacaaaaataaatcgttttaacataaagtaaaaaacatcattattaaaggtactgcctgatttctaacattctcactccttgagataaaaagtatttgcaaattcaaaaagttaaagaagaagaaacatctcgttaccatggcattgcaaggagaatgagcatgagtttatgaacttaagagactgggatcgaagagctcgattaatccgcgaaaacccgagttcaagaagattctcagcttcatacattggaagctatcgagaagatcaccacaagtcatcttttagaacaacaaacatatcaacaacatctctagtactgcctcatacatctggctacactctcaaaggttttatagatacactcactttgtccaataagtttatgaga

SEQ ID NO: 43496 - DNA, 505 bp, Arabidopsis thaliana columbia
gagaatgtttaacggcgtttaatgtaataaaaaagaaccgtgagttttgacggaggtttattattttggtgtgccgaggaaaaatattggtctcgagaagagacggcaaagagggcccatgttgtctaccggtgacggagatggcttacgtgtggtggaagtagaatacgtggcggtttctgattggtttgagacagctgaaaccgggtcgggttttggtcacgatacatttgacaggccaagggaaccgtcgcatcacgattcgctttgtgtgggttcatttcatcatctctttttattttattttactatacataatatatgtgtgtttcatcgttttgtcttgttttggttatgatcatgtgtgccaattttttgttgttatgtttctactacatgagtaaagaagcatcgattgtgaatagaatcaataacttgttcattgaatttttttcatttggacatgtggagttatatcatatagtgtgaaagtgtaagttgaagt

SEQ ID NO: 43497 - DNA, 480 bp, Arabidopsis thaliana columbia
ggattaaatctcagtaacaccttagtaggaaccaaaattaaagtggtggtgcattgagcggattgttatacttgttttctgattttatttttgatgacattttttgtatataagaaccataatttattactgaaaaactagcttgaacatgttacatgtatatgttgatcattccatatactaatgtctagttagtttttctctttaaaacaaaaacgtgtagttaataacttgatattgaaattcaatatgatcgtaatgtctacttcatgttctttttcgagaaaggaaatagtaatcaaattaaactaaacatcaaaaatttaagcaaagaaaaagaataaatacatccatggtttttagagatcactcatatgattatgtgatatctatgatttgtatgtaaaactgttaataataatcccccgcactatatgcaaactgttacttgacgcacaaaagaccccgacaaatgtggtg

SEQ ID NO: 43498 - DNA, 530 bp, Arabidopsis thaliana columbia
atcccccctctgcatgcgattcattcacatgaaactcataggtccctcaagcattcattgacattgccttgaagctttcggtccaaaacctctccacatatattacccatcaaatgataaaacgccataagctctgagagttgctctatgttcatctttttcatcatgttcctcgccatcctctgcttatcctcgtccactttcaactttttcatatatgatcctccgttcctcaccgtcgctcccatctccttcagcctcatctcttgctctgcgcttagcgcgtgttcgactacacacaaaagaacaaagttagcaaaagatacaataataattcatctttgataaaaacattgtgggtcaaaatagtaggacatcactaaggttgttgtggtggcctggtgggcaaaatcccgtgagccgggcctaacgatatccgttttcaagtaatcaaaacccaccatgcatgttatgtccacatgcatgtttgcttccacaagccgaaatcagaaccggcataaaatgggctg

SEQ ID NO: 43499 - DNA, 580 bp, Arabidopsis thaliana columbia
tatgtgatgcagggaaagtatttgtgtactggctagggatagagccgttcgtgtacgtggccgatcctgaattcttgagtgttatgtcgaaaggggtattggggaagagttggggaaaaccaaatgtttttaagaaagacagagagccaatgtttggtaccggtttggttatggtcgaaggagatgattggacacgacatcgccacatcatcactcctgcatttgcccctcttaatcttaaggtatagatatgtacttacaatagttaaactttttttaaaaaaatcgtttgcattggcaagagtccaagttgtagaaaattaatagggtgactaatctagttcaacaatttagactatatagtccttttccaaaagcatgagccaccatttttcatgacataaatttcaaggtcttatgatgttgaaaagactagaaagtactatattagactcattcaaaatcagagattcatacgaaatattcctctttttctcattacttttaattattcgtcttaaaaacaggttatgacaaatatgatggtggaatcagtcccaatatgttggaccgatggggc

SEQ ID NO: 43500 - DNA, 567 bp, Arabidopsis thaliana columbia
ctttattatttttcgatagtggaattacatgtctttcaacggtagggatcgtcactttacgaaattagaatatcggattaatcgctaagcttaggtatcgaccacataatttgccaacgtaattaccggtttagtaactctgttcgtggtgtggtaatgaattctatggaagagcgagcaaaagtttcttctcagatggccacaagatctgagttgaaccaatgtagttgataagaatttgtcccaagtttctgtccaatcaacatcatagagaatacatgcaaagcaatggtgtgttgttgttataaaaaaaaatcacaatcacgagtaccatagtaacgcatgatatgattgatcttgccaacgcgaatcatgatattgtaggcttgtgcagttgtgcatatctctcaacaaattctgttattacaggctgaggttaagaaaaaactaacccaaattctgttattctaatgggttttggagaattggggtaagtttggaaagaactaacccaagttcaatcaaccttacaaacaaaattgtatatgtgtgggaagtatagatttg

SEQ ID NO: 43501 - DNA, 601 bp, Arabidopsis thaliana columbia
catgcttagtgattatttgtttgaatagatgtcagaaagggaattgctagtttcatgtttattgttttgcttaagtaaatgtctgatagggaattgctagtttcatatgtattgttttgcttaagtaaatgacatattgggaattgagtgaaggcatatatttgtggttacaaatcattttcatgcttagtgattacttgtttgaataaatgtctgatagggaattattattttcataagtattgtcctttgcttatataaatgacagattgagaattgatcgtttcagtttttttttctcttcttatccaggtgatttgaaatggtagctggaaataaaaagagaggaagaagacctaagaagaaagatgatgaggttgagtatgtgtgtaccgtgaacttgtaccagtagaaccagacgcagcagatgaacaagttcccgagctagaaacagagattgctgatgcgcctgttgctgagctaaacaacgaagaagagcatgaaggtgaggtgcacctactgatgctgcaaaggtctgattgatgaagagactgaagttgagatacaatctctgaagatcatgacaatggtgagagaagag

SEQ ID NO: 43502 - DNA, 633 bp, Arabidopsis thaliana columbia
aaaagacttatttttaagaagaaagatttattgtggttaaacacaaaaaaaaatggataaattgaattacacaataaaatttgattcgaattttgcatgatctattttaggatatttcctgatactgtattgcagacaaaacttgggacgacttgatttatagtgaacaagtaaaactcgtacaacaacagagaatgtttatgagtcttggataatccgagtaactttgcccatagcaacagttcttcccgatgatctaaggaacactcttccaagagctctactctcagaaaatgtctccacacatactggattttggagactaacctgcagttacaaccaaaaattgtcagatcgaatccgctgttgtaataatttataatttacctcataaggcaaagaatttttcaaacctcaagcattgcgctctgtttagcagttagacaacgaggagacttctttgttggctgcctgttttgggataagcattgcacaagtttccaactgttgctgctcctttgcatgatgcacatgaactccaactcaatgattgaatttcatgaaagaatcagaacatggacggatatggagatcggcagagggccaaggcctttttttgtttgggttactgag

SEQ ID NO: 43503 - DNA, 441 bp, Arabidopsis thaliana columbia
gttccccatccacacatcgaatccttgatccgccaaaatcaacggcagattttgatccgctggattcaacagccatgacatcccatcctgcacatttaactcatgattatttgactatcatagtaatgtaaactataagaaattaaaggaccatgttgtcaaagagacaaattacaattctgcatacgtacgactgtcgtctctgtccacataaaacttaaaacataaggcaagtcataaagtattttctttctagcaggctgatgaaaatagtagtactgatctcatcaagttttgtacttatgcactttatcgatgatttttaagaattcgatgagtaccagagtcgagagtcgacacggttatttatataatatcacttacgtacggtacaatcattcttccataccagaaaagttgtttatcacttgagtttatttt

SEQ ID NO: 43504 - DNA, 465 bp, Arabidopsis thaliana columbia
acacttattttatactgtatttagaagcttgtttctccaattatctcatttggtaaagacgtttcattagcgatatcgtgttaacgtcgaaagtcctcctctcgttacggtccggtccgacacagaaatttttatttaatatttactttattttttgtccatttattagaaagaaagtcattgattggtgcaatttattaatataaatttattaaacaactatataaactcctcattactgcccattaacgagcttcccttttcctctgttcttcactttaagaaaattacaaacttttatcttctattggacgaatctttgatctggttttaattaatcacacgcttactttaggatttttttacctgaattcgaatatatacttttgattttcatcttccgtagtccgtaccgtagaattgaggagcttcatggagaacgagctgtttatgaatgccaggagt

SEQ ID NO: 43505 - DNA, 534 bp, Arabidopsis thaliana columbia
atcccccagtgtactttgaaacaatttttctaatatattacactaacgaagcatgtagtaggaggcataagacttacccagcgatggggcatgacactaagaattgattctctaaattccctgcactcaaacttcagtccagcaaagctttcaaattatgatagtgcaatagaaatctcttccgaaagaacgaaggaaaggttaactaattcgctcaataatcaatggagaacgaattaattttacctctcctgggtgacggctatttagagcatgcacatcaagcttgtaattgtgttgtggaattaattgtgatgcatctgaggtgtgagcttcaacatcctagatgagaagaacgaaaaaaatctatcaatctgaccaccaaatttgttgcaggtacgaatgtagttaaggaatatgcagataaagaagtgagcagaaaagaataaataactgacatcagtctttttactccatcgaagaaggccagtcttgccagcaaatgcatagacgagaaagtgacgcaagtttatg

SEQ ID NO: 43506 - DNA, 500 bp, Arabidopsis thaliana columbia
cacagtttccactcttctgtacaatacactccaagcaggcggaattagttcaacaacagctgatcatgcagcttcacacattggtaaagccagtggtcttgtcttgctgcttaaatcattaccgtaccactgtaccagaaaccgtcaccagagttacatccctgcagatctcgctgagaagcacgggttgctcgtgaaacaaggtggacgattagaaattcttctggataacgattcaagagaaggactaagcaatgtcgtgtttgagattgcatctgttgccaatgcacatctcctgaaagcccgtgaactggcgggaaaggttcctgcagaagctaaaccggtactgcttcattctgtgccggtacaagttcttctggattcgttaaataaagtacaattcgatgtgtttgatcccaggattcaaagaggagttcttggtgtcctccactcttgtttcagtttaaactcaagtggtattcatggagagcaatgttttg

SEQ ID NO: 43507 - DNA, 293 bp, Arabidopsis thaliana columbia
agaggatcccggggtggcctcccaacgaacgatccgtaaattcactttctcattagaaagaaaacgtatcctaatttgttgttttctctatgaatgttaatatcatctaataagtccatatagactatatctaataaatccatatagactattgtctctgaatatcaatggatttgaatctttggccagaaaattacacaaagagacaaatgatgtggaagtcacattacatagtggggagttaaaattaaccagagtttgcattaggttgcaataacgcttgcatttacgtc

SEQ ID NO: 43508 - DNA, 652 bp, Arabidopsis thaliana columbia
caaaccaaaccctctatatataccaaaaacagaaaaacagaatcaaactttgtgggtggtggtgaaaaaacaagaatgaaatctattttgctaagaatagaaagaaagaaagaaaaaaaaaagaaaacaagaaacgtggatctttacaaaggtatgagtcggatatttacaagatgtaactgttattctgtgcttttcctgttattacgactctgttcaaccctgccgtacctgccaagtaaccaccgttaccttcctgtgcaaggctcatttctttctccagaccctctttaccatgctcttgcggagaatacccaccgagcgaaacattttgagaaaccaggtagtaaatcggaaccacccattataggaaactgtaaataatgggaaacaccaaacaagtcagtgtctttgtttgctttggaagacaaatcgttaacttcaacaagaatgatatgtggatgaaggagatttacgtcaaaactggagttcgtattagttaaagaagtgacggattcatcccggtcggtgaacaagttatctgacgaaacagactttgagctgcaggaaacatttagaacattacaaggcttacttagaaggaagtctatgtctgaatattgtaatgtatagaatgtataggatgagtgtt

SEQ ID NO: 43509 - DNA, 386 bp, Arabidopsis thaliana columbia
agcaattgctttgtttgagcaaaatggagacattattgttgcgagaaagtgtttcaaccatgtcaaacagctcttcttcaaaccatggtgcatcaccattaaagtagatgcctcccaaccaaacaaccatcctctctagcgtctttgcgtttctcagcaccaaatccataaacgaagccacgagtttcaacgttgcatcattacaacccaacatcttgtagatctcctttgaggtaggaaacacctcacatgttgatctccaacattgatccggatataaaccttttaaatgatgcattttctgtagaacataaaaaattatcctatagagaataagctcatctccaatatatttttcaattagagtaactcaaaatatagtagag

SEQ ID NO: 43510 - DNA, 472 bp, Arabidopsis thaliana columbia
gaattatcaacataatttatttattccattactaaatttcataaattaaatcattctagttttcattaataaatagagcaaaaaagacggataatttggtcaaacatgtaacagaagaaaatataattacctgcaaatttgatagcgtttttacaaattgttattttaaccccacttccaagttcaaagttcaaactctgatccagtaaattaaagaatataatctggactttaacggtcaatattataatttggactttatacaaggaccacaggcttgatgtgtcactctattcatcatcaattcatcacctccactcgctttgtcccttggtttatccaactcttcatgcactatccgtacacagtaaaaccaaaaaattacggattaatagcaaattttgattgtttggcctctatccattttgtatttttggactacttattagtacttaattatttacattagtat

SEQ ID NO: 43511 - DNA, 496 bp, Arabidopsis thaliana columbia
tgtattatatggatttgaaatgaaaaattcatatgacttatatagtaggatatatttctctttcttttctaagaatactaaatagattactaggcatacaaaggtttttgttattaaaatgttttgatttcatatcctttattatccattatcatagattgcattttagtgtgttgccaatacaaaaaaacatatgaaggtaataaatattacatggatttgaaatgaaaaatccatatgacttatatagtaggatatatttctctttcttttctaagaatactaatcagatcactaggcatacaaaggtttttgttattaaaatgttttgatgtcatatcctctattctttatcatcatagattgcaatattagtgtattgccaataaaacacatatgaaggtaatctgtattacatcggggttaaatgagaaaatccattgaacttatatagtagtatagatttaatcatggagtgtctagtcaatggtgggtg

SEQ ID NO: 43512 - DNA, 653 bp, Arabidopsis thaliana columbia
  unsure (1)..(653): unsure at all n locations
ttacaaaataattcttacaataacaaaattagatcaaaaacctaaaccacaataaagaaaaagaatgaaaccttagtgtcatgcccatatatatttattactttctatgtgtctagaagacctaaagttgttaagagtagttgaactcttagaaagaggtccattgattggatcaaaaagaagacctcacgatgcaaattaaaaaaacaaaaaacaaataaattatgattagaagaaagctttgaggaatgagttatgaggcatagcatgatgaggacattcagcccaacatcaacgttcggcccaaacgtctgcgcaagnccaatccaagatacgattaaggacttggtcatgacttgactaagtctctcgcatttctgtttcattgctaataatgtggagtatccactaaagtcacttttccatgattccatgtttgtaggagttaagctccatgatttgtttcaagttgttgtaaggaggtgaactccaagtatttatataaatgaaaaagccaaaaagaggtagtcattattcccaaatacaatcaatcttaatttgttatctacaaatctctaagctttgaagagggccattatacaagattgtgaagctaataacgtattattcctttgattgttttaaaagactat

SEQ ID NO: 43513 - DNA, 579 bp, Arabidopsis thaliana columbia
gatgattgcataagcaaagttgttcgatttgatgaattcagcaatgggatttcactatcaatatatttgatttgttcctgatacagttatttcaaaacaattagaataacatagataatctaatcaaagcgattctacattatttgttcttgatgatcccatttcacttacaatagtatctgcaaattcatgtctaacaggtcgcccatctgaatgagtatgtcttgctacccatattttactcctagtcactttactaagctcagaactcttgatcctctacaagcagcaaacattgtttaatatttgaaataaccaaatataaattgtaaatcacacgtaccatctcatgaccaagtctcatcattccttttctgctggtggtgtgtagaatttgtgatatgtctataatttgcatgatttaggcattcattcttcgaccactttgtcattgtttcatccacatttcatctcattaggagtcgttttaatgtgtttacatacttaggacgattttgcattaggattgcatgtgcacggcatatttggttattttcaggtactttggatgcttttgga

SEQ ID NO: 43514 - DNA, 440 bp, Arabidopsis thaliana columbia
gatcattttacaaagcaaaactatgttctacccatgactcaatccttagttaattggttaatcttccaattagtaacttatattcttgtagtatataaagggtttattgctttaataatactaatcgaaaaacgataagaaattagcgtttccaatatcagaaacggtattttcatttttagttttgttgtattgttatcttttaccgcgactttgcttatgatctgtctattaacaacaaaatataatatttagttaatcagtgattttctattaaaaaaaaaaaaattaaagaaactttgtaaatagtagctacgccattgattcaccatcatggtttttgctgataaaaagacaaataaaacttctaaaaagtgtcctcttcttgctcgtgagtgccactttgaagtggattctttggactgtttacataaattatg

SEQ ID NO: 43515 - DNA, 511 bp, Arabidopsis thaliana columbia
agagtttctatagatattcgggctaacaaagcaagctgcaacttctcagtttatgagtagctcaccatcgtggatgctagggatagctccagaccatccagcattgacatatgcgattgaaattgcaccaattctgtcagtggttatactcatttgcgtgctctacgtagccattgcgaaacacccaatgagggggtgtggaagtatgttactgttggtagtatggtaagctactttttcatagcattgctttgggcttcggagagcaagatatttggtttggatcagttgcttcaagtgacgggaggaagaaaccgcattcctcaaacggtttatgtaattggattggtgcagctctgccttttagcttctgcacgtatgttttgcacagaaaaagacaagaattgggccatcagaactgtcgctcttgtatctgcttgtagtcgccaataattctattgtcggggaacaaggataatgcttcattagtatatttagtgctggtactttt

SEQ ID NO: 43516 - DNA, 572 bp, Arabidopsis thaliana columbia
tggtgttttggtatctcaaatctcacactaaaactgaatttattattattttattattaaatctaaaattattttatattttgataaacattatttatttatttttttaaccctcaaaaatcatttattgattatgaatattttatctattttgtaacccacaaaaacaataattattttataactaatataatattataatcggtaattaaaaataataataaacaaattattttagacatgaaaaattgaaccctgcaaactacatgattaaataggtagaccagtattttcctattttgatttatgaatcaattaaaacttacaattacatactagtgtataacaataaacctcaaaaacttgtgatgaatgatgtaggaaataatagtactcttttgaatatcaacttaaatgtattttagcaatttgactaacaaacaattgttcttcacttttaataatcatccaatagaaccatagagaaacttcaagactttccacaaaaattcatcatcatcacataaccaagaaaacaaacgaggaaaaaagccaaaaaataagagaaaaga

SEQ ID NO: 43517 - DNA, 577 bp, Arabidopsis thaliana columbia
ggtatagagaaagtgaagacagacaagaacgacaggccttaccaagatgtgaagatacttaatgtcaccgttccgaaatcttagcatctttgctactgtctcaaagatagtgaacaatctatgctgatccgtaaccccgtgattggttctatgctgggaagttgttcttgcggagatggatcgaactgtgggatatgtttgttgtacccgagcagatcaggttaagttggtggcatcatcttcttgacactaaacattattttatgtttttgtcaaacaaattttatgagaatgcttagtgaacaaaaagacttcaacttctaatgttacttcaattcctcttattttcttgaaatagagttgatctactttcttctaatttatccaagcttcatgggtttatgtctgaaacgacaacacgacaacaccaatgtttgaagttaataacatagaatctcaatttcacttggatttggatttttctgtttatttgggatcactaaagataaacttttccatgagtgtatcaaattctagccctcttaggcacttattttgtgatatgctaacatactat

SEQ ID NO: 43518 - DNA, 478 bp, Arabidopsis thaliana columbia
cagcatctctatgatcatggcgaccaattgtttaccggctcttgccttctctctacacgccggctcaataaggcctatcaccactcacactctcaacccaaggtcagctacattatagctaacttcataattttaatcgaaatttcaatttagcatttaacactacgttactatatccattttacattttctgactatacaaccatttacactgttaatattgcagcctccggaggctttcaacgtctttgatgacaaacaaacggttgctttcaacaattttgcgataaattctcaaaatgtaagtaagtttcatatatgatatatgacatagaacattgtatagtgaaaatgttcatcactagacgaacaatttgcatgcagggaataacggttatatgcgccaaaagaggaggcgacggaagagcaaagagccatagcgaatggctaataacagtcccggacaagcctgacgcga

SEQ ID NO: 43519 - DNA, 469 bp, Arabidopsis thaliana columbia
aaaaagactttaaaatagtagaaaagcttgaaataaaaaaataaaaaatggtcaaaagttttgttggattttgtttagattaccatatcatttgttataaaatttcattcaataatagaaaaccaaatgacatcacgtatcgttgaatatacacttctacgtatttaacaaaatgattaatgattcactttcaatgaacccaaatgttttttaaaatccgataaaactttaaacctaagatataaactttagaaaaagacttatgaaatataaacccaaactaacccataacaccacctaaaatattctgattagaaaaagacttatgggtggggacatcaatgtaaactttcataatttgcagaaatcttacaaaatttactcgaggcatttattacaaaatatggttccgcctctgcgcatacactatacataaaattggaaaaaaaagttttaacggataatatga

SEQ ID NO: 43520 - DNA, 747 bp, Arabidopsis thaliana columbia
cgaactctggtccagcttttatatatgtacagttcaacgtccggtccggtttataaaatcatgatcataaacgtattgtggaaggatcgtaaataatctaaagtttgtgcctccatgagaacataccttagaatctaatctgcctcagcttcattgttacgttttgattaaccaaaatttagcaattagattccatcttttatcgtttatactctttatctatcttttttctaacctcaaaaaaatccttattttagtgacagtgctgctatcagttagcaaatcagactgttaacttttagcctatatgtgtgatgtatctaagactaggagttacttttttatttcaagttggtagaaacgaatttagtaaagcatgtgtttggaattggagtcgatcaaatataaacaaatcgtttctccctaaacaaagatgctagattgctagagattaagatgacgatttgattaatcatcgtcactcatatttaattggtttccttaactaaatttatctaaacaaagatgctagagcttttgtttgcgtcatctcatcctaatcctcatatcttttaatcctatcctttttgtcccatgccctatatagtaagtatataaaattggcttggtgatgtatatgaacatatgatgaatcatgtgccatttgaaatatagtataatagatgtacacttgtgtaaaatagcttttggggtcttttaatttgttagaatagcatttttagattg

SEQ ID NO: 43521 - DNA, 476 bp, Arabidopsis thaliana columbia
gcaccaacaaatggattagcctctgagcttgagcttgaggttaaccaatgagtaatctggttcatgtcgattcattaccatcgtgaacattgagccctcgggtttgcaggggcaagtgatgcaaggaatcttcataagctcctcataacaaatctctgcacattttttcaccatttcaagttttgatgagaagaactcttcctttgtattcccaatgatatcaggcattgctccctgcctcggacaaaacaaaaccaaaatcatttttcttgaaaaactccagccgtgattcaacaccaatgcatacctgaataaacgttgcaggatccgtcgacatgttgacaacattgataagagtctgaacaaactaatagacaaaaagaaacagagattgatcacaaatacattcttgacaagatattaatcaactaaacaaaatgtaactactaaccccagaatctttcatgatgccatga

SEQ ID NO: 43522 - DNA, 310 bp, Arabidopsis thaliana columbia
gcatattcttgtatctgttgcggtaatgtatgaggttagctggatatttcagatattcaatgcgtaaacagagttgtcacctagtcaatgaaatgaggtcatgaagagaaacagatacatctttagtatttacatgtttacagtagaaaaacaagaaaattatctgtttcttgtaagaacatggataatcgtactattatgagtgttgcaagcttcatatactttctcataacggcaccacatgtcttaccacaacttgatgccatgtactcgcggctcagagcatgatacatttaaccaaattattctt

SEQ ID NO: 43523 - DNA, 420 bp, Arabidopsis thaliana columbia
atcacacacatcactacctacgaatctgtccttcctcgcatgcttactccaccatatacttctactaccaatggcctaacttgttgattgcgacttctctcttccttttacctttttgcccctcccgtccttccccgtacggttctctttctttattttatttaccttttaccatagttacacttctacccctatttttcttcaataagagatggaagagcaagggcaattaagtaatttgacaatatccttctccttcaagactctctctctcccacagaaaacaaactgtttgttgttaataactgtgggttttttccaaaatcctcaaagagagactatacttctctcggatccttcctgatttcaaaatttcttcaacccaccagcagcagcagcagatgaagaaggttaaacaga

SEQ ID NO: 43524 - DNA, 482 bp, Arabidopsis thaliana columbia
aatttcttcgcatatacaagcttagaactcactgattccaaatcatcaagacctgatcttcttctactcaagacctcgtcttcatcaacctctactttcgccacgtttccaacagaatccagatagacagtgaaaatgggattcgagcaaataccacaataccctgttcttcatatttcacaggaggtacagatgcagcttttccagagaacaatgcttcacgctgttcatgatagttgagatatattttgacaagctgagataacactgatgacaagttcccaagcgttcatttttatcaaatacttcactgtgtcgcgatgtgcaaaacttccactgtaactgatcttacaaatccttgtgctgcctagaacttactaattccaaatccccaagacctgatcttcttcttctactcaagatctcgtcttcattaacctctactttctccacgtgtccaacagaatccagtgagaatggga

SEQ ID NO: 43525 - DNA, 516 bp, Arabidopsis thaliana columbia
ttgtttttgccgtttgtgttctcttcatttttatgagtcaatccattgtgtttaacttcgatatggtcatttttgcacgatttcgaccgtagaacccaaataactctctttctcatccattagttttatacttgtatatgacaagtcttaaaatcctttaccaaaaaaaagtatgacagtctttaaattttgtgaatatggaacaaaatagttttaacaaaatctcgtgttctatataatgtaaaatctttaacgtggagcattactttttttttataatgattagaatacttctttttccctgaaatcagaatgagagaaaagtaaaaaagagttggcaaaccctcgaaagcgtaaatctggaggcgagagagagagaatagtaactgtactgtgtgtgtgtcgaccaaatagaggatgttaaacggcgaagtcaggattttaagaaaaaaggatgacaaaatcaagacacgtacgagaaaagaagccccagacgtcaactaaaaaaacccacgt

SEQ ID NO: 43526 - DNA, 913 bp, Arabidopsis thaliana columbia
tgtagtttgaaagattgttgtagaaggaagtgatggatctgttagacctggtaaaaaatcaggaaaggagtactggcagcacacgaagaagtggtcacgtgggttccttgagttgtacaatgcagagactgatccataagtgaaagctgttatgagagacatgggaaaagacttagaccgatggattacagaagacgaaatcaaagacgcagctgatataatggaaaagcctccagagaggaacaagaagttcatggaaaagaaactcaacaaactcaagagagagatggagttgtttggtccgcaagctgttgtcagctaataccgcgagtatggataagataaggaagacgattatctatggtggttggacattttattactaaaaagctcagttcgagcaggcacttatgcaagagatgctgactgtttgtttttaaccgaaaagagcttattggtaagagatgtttcttgtggataatataactcttctttgtgggtaaaaattggtttgttatgtaaactagtaacttgaatattgttttatctcagatgttatcagtgctgtttaaagtgtatggggctatggtagattctggttttccggagcatgaaatcgcagcatccgacaaagaaaaggtgagtaatttggtaccactagttcctacacacggaatcatccaatcttctgaagcagagtattgtggtatttgttcaaatcccattttcactgtctatctggattctgttggaaatgtggcgaaagtagaggttgatgaagacgaggtcttgagtagaagatcaggtcttgatgatttggaattagtgagttctaggctgcagaaggttttggaagatcaggtacgatggaagttttgcagaaggagggtttggaaaatccattggtttcgta

SEQ ID NO: 43527 - DNA, 617 bp, Arabidopsis thaliana columbia
aatatcagcgatatcagcaacgtgaggaaatgcggtgagatgtgtttgtcagattgcaagtgtgtagcttcagtttatggtttagatgatgagaagccttattgttggattttaaagagtctgaattttggcgggtttcgagatcctggctcaacccttttcgtgaagactagagctaatgaatcttatccctcaaattcgaataataatgattctaaatcgcgtaagagccacggattaagacaaaaggttctggtgattcctatagttgtggggatgcttgtgcttgtggcactacttgggatgttgttatactataatttagataggaagagaacactaaagagagccgcaaagaactctcttatcctttgtgactctcctgtgagtttcacttaccgcgatctccagaactgtaccaacaacttctcccaacttcttggatcaggtcagaatcaacaatcatcatataacaagttttaacttagaagtgttcaaatcttattttctttgttttatgatgtggtaggtggatttgggacagtatcaaaggaacagtagcgggtgaacgctagcgcggtgaagagttagcagagcattactcatgcgagagagag

SEQ ID NO: 43528 - DNA, 465 bp, Arabidopsis thaliana columbia
ataatgctattttaccactcttgcatttgcactgaatgcagagagaagctcttgaactataatagactaaattacttgtgtttcttcttaagctcactgtaaatttcttaccacaagcacatgctccggtccggtctttctgtttccttcatatgcgagcgattctatcagcgactatcagatggctaatgtttgcaaggaaaccaaaaaataatgaccagtgggccataagtttgcataagaaaaattcacgcccatacaagtgcttagtgcgaattgctaagctagacttagctagtatcaaagatgaccattacacgataatatgctcacagagtcaagcacacaccatgagttacatgatcatcattgtatatagcgatagatagctcatatatctcacacatttacattaggtcaataacaaagatccctcctccggctggaaatgatcaaaataaccct

SEQ ID NO: 43529 - DNA, 511 bp, Arabidopsis thaliana
cgttcacatggaacctttctcctaagcctctcgtctttgcctttcgtctcttctctgctcgccgatcgttactccgtcgaaatcaccatggttactctctctcactctcgatctgtctatctgtatcgctttgttgctcttaaagagagaatctaatttcgaaatgttgtgtgttttcaggcgccaaagaaggataaggttccaccaccgtcatcaaagccggccaaatctggaggtggaaatcagaagaagaaggtccgttttcctctattatccattttaaactacttgtatagctacttttaatgtcgatttagaagcaacgtgacgctccaattcctacgtttatgtctaaagttttgagaaattgaattaggtttcgtagattgatctaggtttagtatgaattggctgaaaatctaggtttctgtttgcactgatttcatacaaatctagaaacttgagtctctgtgattcatttctcgtaagctttggttatgtatatacagtt

SEQ ID NO: 43530 - DNA, 507 bp, Arabidopsis thaliana columbia
aaaaaaggtgggctttgtctgtacatgtccttaaattatttgttttgggagtagtttaatatcgaatgatacgtttacacgtaaaaagtcttttcttttgagtcgtcgtctcaggaaagatgagattcgtttctaggagaggttgactttttcaatccacacttataactctagaatcttatgtcattgatgacgacctcctctacacttttggatttgtatgtttacaaaggaaggaaggattaccttagaacagtttatgtgatgtttgtgtctttctaattttattcaatgaaatttctttacatggaccttggttagccaaattggcctggatccaaccgaattttttggttgccaaattaccaatttgtgaaggggattttggttcagtccataaatccgtgatttccatatggtagatggagtacaatgcgcataaattaaggggagccattaaaaccaaggaaagagagacgtgtctgtgggtaatgggtcgtggtgaga

SEQ ID NO: 43531 - DNA, 931 bp, Arabidopsis thaliana columbia
tgatagttgaatcttcttaatcctcatttgggatggttttgctacaccaacatagtttcgattccatatctggataggtttgtgctatggaattggagacatttgtgggatactgatgtactcagggatctgtattgcatagaattttctgttcaataggaactattgttgttgaatacctcagctttaagcatcaatgagagtttaactatttatgtcttctgtgatcaggaatctatgcgatatgatcaacttcgggacttggtggctaaacgcaatcctggctgggaatatttgcaggatgtaagatcgcctatttgtggttttaaagtttaggcaaatctggggaactacattggaatatgttagctgaagaagtttagcaatcaccatatagttgtcatggttttacaggccttggtctccattgatcctgtccgtgctcgggaagaccccgtcatagtgaagaatgtcccttattacaaggctaagaaatctctggaggctgaagtcacgaaactcaatccacctccccgtcctcagaattggggtgtaagctttcttcttctttttggttttagcatcacagttcctgagaccacgggtatagttaagaactaactgctgaacatgtacaggaactgaatctcccattgaatatttcctcttggagtgaagaggatctcaaaaacccggcaaaactgtacgagaagacagttcttctcaatgctcaaagagaaatcgcagacaaaatcttggatgcacaatgggaagctaaatggcgtcaagagaaggttaatcaaggaacttttttacacaattcggtattcatatcacattcacgactccaatgcataccgtttatctttttgatttgtaggtggaggaaatgttggagcagaaagtgagaccttacatccaagactcaagc

SEQ ID NO: 43532 - DNA, 857 bp, Arabidopsis thaliana columbia
tcaatgtggatcattattatacatgaaacaaaacaaagaaagctctttgattttgaggttctctttgatatttccggttctacgcatctacaccctgaattatgacgatagcaatacctgctgagccttaaagacaagcttctgaagcatgttttggtatttctctggttcctccgtcatcatcctctgaaataatccaaattttaaccggtgagccaaaaaatatttggaaacttattattctttcaatgatgtctttccaaaatcaaaatggtgaatttgaaaaatcctcttgccttcagaagaaatgctgaagagtaataagccacccttgaatcagtatcatccaggagttccctgcatagataaacataggttaatgccatgaaacatgttgcacagataaatcataaatcatctatggtttggaagcatggaaaagtcaatcaattacctaaagaactcctctccgccaacttcttgaaaagcaactgtatcggcggtgcatttaccaatcagaagtaatagcagggtggctcgaatatcagaggttgcccctggaatatttcctctacctttgcttccaacggcgacaccaagtgcaatgttgtcagttgctgcacctgctagttgaatcagtggccaataaaacaaagctgctggcacacgcgcaaccagctgcataggaacaatggcctgtccacgaagaagcatcgctgccattgacgctgtctcacacgttgaaacagagacgttattgtaccgaggcttggtgtcacttcatccacactttctttatagctgttacgatgagaagtacaaatttgctattcctatccgcagaattggggacatgc

SEQ ID NO: 43533 - DNA, 988 bp, Arabidopsis thaliana columbia
tactttttgcaccatggctcatgttcctatcattgcaatggtttaacagatttttttccaattgaactacaacacagaacaattaaacagtgaagattgaaaaaacttaaactttgtgaaaggaactgaccgattctttaaggacgaggcgagtgcggcgcatgaactggtcacggagctgcttacggcgtttgttcggaatgttgtccctggggattgtgaaacgctcacgaggagggacgtgatcaccgatctcgtgcatctctccgtctactatccaccactcggatttctcttccttcttctttagcggaagagaaggcaacttgtttcgccgtctcggctgacctgcctctgttctcgcgagtcgaatctgggaaacgccgccgtgacgtatcgacggcaaaatggagcctacccgtctgacgacaaagttcatggcggttttccggcggtttgtaaagagcgtcgcagagtctgagattagaagtgaagtcgggaagctaaaacgacctataccagagctgctttctaaaccagttatgaaccgaaattgaacgttactcggttttcctaattctcttgtgatttcatgtctggttacgatttctggatttgaggttgagtttagtcatgatagagccagccccggcccaataaatataaaagtattagggaaaaaacttgtgtttttttgctttggacttttcattatgttacagttttaattgttttgggctctagattcataataaaaacaaaattggatctttactgtatttttaaaaaatattgggtcttatatgaattgtttttaaaaaggaaatgagccttatacacttgcaccttgccctacccaattgggccgggtctggttagaacttaacgaacttgtgtgattttgtaagattgtagttcaaagattaactgcactgtgatgagaccatgtccattgtccgattacggtttctaaaccggttatgaaccg

SEQ ID NO: 43534 - DNA, 585 bp, Arabidopsis thaliana columbia
tacccttttgtgtagcttttggatcccacttcaaagtatttatattgaatgagttggaacaaaaaaagatgaagattttaaaggtctagtagtcagattctaagagatcaagaactaagcatcatcattatcttgtatgttcaatgcgaatttaatagattgtagatcatgtagaacattatggacccctttgcttagatcttcaaattgttgctttggtatctgatatgtcacttcaccatcttcgccaacttgttcccgtagagtcaccacctcttccagtaacttattagccttactgatatcgagctgagtttttattggtgattcttgtttggaaactatgatgcttgtgtcagtatttctcttgacaacagaattgcctccggatgatgaattaccacatgagttgacattttctgaggatcttggtgatttattccttgttgcagaaggagaaccagaaatagatggtgtcttgttcaattcttttgaaactcgcgggcttgggggatgattgtaaccacgtgaactggaagcttcatgagatcttggtggcttcttcctcgttgaagaagaaccaga

SEQ ID NO: 43535 - DNA, 496 bp, Arabidopsis thaliana columbia
tggattttttaagaagttgtccatagctttcaaattctttgggagcttctacaagctttggagagcttccaaattcgctcggaacattcataatgaagaaagtagttgcgaccaaactaccttctaagttttatcttatcaaattcattactaatcattaggattgaccctacaagacaaaaacttattccaagtttttaaacattatactataatttatcaccgttttcttatcaaaattatttagcccaacagtttttctaaatgatcatttacgttttaagtttataatcagttaatcaccaatcattcttttcattcctatcattttatcttaactccttaaatattgaattcttcaagtttgtcaattgatcccaaaatggattttctttactaatataagcattggtttaaaggaaataaaaacaaaagcattggtttgtaataaatgaaaagtaaaaaagaaaaattcaaacatcacatttggcacttt

SEQ ID NO: 43536 - DNA, 524 bp, Arabidopsis thaliana columbia
caaatgacattcattttttatacagcctttttttttttatctaaacgccgcaggaaaaaacctaacgaagatgagcatttggttgcatctgtagggctagttcgtaaacttgttactatagcacaaagcctctctcttggtcaggcaatttttagctctcaaatcatcacctacacaatttcaaaacagctatgagttagtgatacggcttctcttccttcaattcacttttctctaagctcacaagaaggcaaatcacaattgaatctgttgtgttttctttagcaatttatggggtttggttaacaataagagtatctgtatcatcagattgttcgtctgagttttgctctgacggcattttcaagtctatcaaattggctctctgcgatcaggtcatctttgtatgctcttaatgatcacagtcaagattctttgcctcttatctttggtattaaaggagagttttgcaacggttgttatatttctatacaagtagttagaaatcctaatcagagagtata

SEQ ID NO: 43537 - DNA, 553 bp, Arabidopsis thaliana columbia
gactctagaagaaaagataactcttcccgaggcccccgctgaatacaaaaaaaattaattaaattattaacttataaaatgtattgtaaattgaaaagaaagggaccacatatttttttattaattcaagcagccggataaataaagtttagacatggaaatgttattggtcactgatgttgtaattattatattattagtgaactaataataatggttttagtaggatagattattggaccggctaaaaaacaaatattccgggataagtgggatctttgttcctcacgtttcctccaaatgatcgatgttgactttcattgacttactctgtgagattcccctagccgtaggatatttgagtactcttcttaagtccgtcagattcggaggttcccaaatcgtggaataccatcatcccgaatctggtgcagttacagaaacgccattacatgagtcaacaacttttgtttttcactattattattcattgtttaacagttttattttgtattgttggataggaaaaaacatttggctagccaagttgttg

SEQ ID NO: 43538 - DNA, 608 bp, Arabidopsis thaliana columbia
tgtgtgtttttgagtgtccattgtttttccatttgcttgtgtatctttgggtttaagttgatttggttccttacttcctttaggttcacatgtgaatgaaaatgtgtaatttttaatggctccttggagaatgatagtgttaattgaagctgttcttgatgaaacatgcagatttctaaacacaagagagggataagaaatggtccaaaggctcttaagcctgttcctgtgatcatccgttgcaggtaagagattagcttctcttctttttctttttttttttgtccgcagattagcttctcttcttgttttatctgtttgatgcttcttaatatatccattaggttgagtttggtatgggtgtttagttttgaggctgtgatagaaaaattctgttaggtttatctaggttgttgttgctgcagcaacagctgaagaataaatgcatatgctttgtgattcattgtctctcctaactatcacttggtataaactgcacttgagtaactagaactgtgtatcgttaacatgtttgacgaaagacctacttgtgtgcaacatggtacaaaatatgagtctagttgttcggttttggtatatgtttgatt

SEQ ID NO: 43539 - DNA, 763 bp, Arabidopsis thaliana columbia
taataatagatatgggattaattaaaattatattgtattacgaatccacgaaattaccttggtatcgggtataaagctacaacaattctgttgactaacaaaaattaacttatccgaaatctattattaatggataagagattatctctgtatatttgttatccaggtatcttttttgtattcattgtctatcactacctgttagttaatcactggttttaagcctattattttttgtccctaacatgtctaatatatactattgtatcgcgataatatgattcttgtcaaaacataattacacaacgatatcgttatatgtatagttacccgttaacagattattatgataattggttactttttccaagatatttgtttttgtttaagatgtgttaatttactacttctagttggtaagaccaacatcacgatgtcaaattatctggaaacaatgaaacccaacgttttgttaactcgcgatagtaatggtataaccgtgaatatcgtctgtgttatcgcattttcgaacccaatggcgcggtacgcgttaatattatactgtccatctggtagccgttaatattatagtgttttgagcatttagtacatatgtgtcagataactgacactaccttctcgcgttagagttatcgtgtttcgatgtgttatagtattactgaatgcatcgtttttatcttaataaagcgatattaatgtcattataaacaagtgaatccctttagtaagatacaaacgggat

SEQ ID NO: 43540 - DNA, 540 bp, Arabidopsis thaliana columbia
tcctctagtcactataacaagggacccacagtacatgcctcaccttatcagtatttagccagctaacatattcagttaaccctccagcataaaaatattcactatacacgtccctttctggatcatcatcctccttttttagagagattgtaacctgcattcaatatgaacctcttgattatgacaaaggaaacagtcgaacactagcttctgctaaataagaactcactaaaacgagcaggttaagaatgctccgtgaagcacacaaatcaaatatcacggctgcctatacctttggattgagaaaagcaagctccctgatccgtccagcaatagtgttatggtcgaattgaattgcagttgtgaatactgattaccagtttgtttcagaaaagataagttagtcatcaaatcctatctttgggagggtacaatagataagtacggaaaacaggcaaaaccttctttgtcaggccagaaccggatgcatgtcccttgagtccccttgactctggtggtaggcatgacatgtaagtgttg

SEQ ID NO: 43541 - DNA, 543 bp, Arabidopsis thaliana columbia
tattatttaattttacaacaattaacagtatagattggtgaaattttatagtattccgttagtaaatggaaaagaaaagtctataataaaaaaggaaatttttaagggaaaacatccaaataataggttttttacattttcttaaaaaaattgctactaaaatcaaagactagagaaacctttaaaaaaaatgatgaatggataatgatgacttttcaaaaactatcctaaaaactacaaacattcagtgctgtaaatattttaaagaagcaaaataaaatagaataaatgaattttaatctcttgcaaaaagctgatacatttctgtctttgtacaaaaataaacttttacaatccgaactccaaaaaattactcagaagctacaaaaaagaaacaagaacaaataaaccatactcttgaagaaaaaatcccaagagaagcttctaaaattaaccacaaaaatgtatgcaaagatctctacctcattgtttttttttaggtgttttttttcatgtctgaaactatgaactctgctttgaata

SEQ ID NO: 43542 - DNA, 433 bp, Arabidopsis thaliana columbia
tctttgactgctgccatccatgtaagatgtgacttgctcctccttgccttctgccatgattgtgaagcctccccagccatgtggaactgtaagtccaataaacctctttcttttgtaaattgcccagtcttgggtatgtctttatcagcagtgtgaaaaatggactaatacaattacctatgtgtgcattgccaaatatgataatttaattttggctagttttgaatttcatataaatgagatcatatgatatctttaatgtctctgtctttgacctttatattatgtttttagaagtttttttatgttgctgcaagcatatgcagtttcttcatttttttttgttgctgtaaagtattccattgtatgaaatataccatagtttatttatctattctactgctaatgggcatttgttttgccccaatttgag

SEQ ID NO: 43543 - DNA, 485 bp, Arabidopsis thaliana columbia
gaaaaagttcatgccagatacgacctccttggttagccactcactttacagtttccaacctccttcgtgttcatattgcctttctaagttataactatgaatttatatcagatttaaaagaaataaaaatcttcttatttttcatatatagtttagaatccgtacaagttaaatatgtatacaacggagagtattacatgttaagttcaatgagaaaccccatatttcttcttgtaatttcctattcttttatggtttcaatcgtcaaaactctatgctaattctagattaattggctattatagaatatatatatatatatctacccgggggttcatgtaaaagacttatagcacgcccgacttatgacactctccactcacttttaagacgcactagctccaaggagcgacgagtacagacacacataattctaaaagatcacaagtgctcccggttactgattggccatttgattttgtcgg

SEQ ID NO: 43544 - DNA, 474 bp, Arabidopsis thaliana columbia
taatcaaaaataaaaatatgaatcaagcaagcaaactcgaagatgaactacaaagacgccacgtggacgagtggggcaagtgaaagtggaagccgacgaatcaaaatggcaaagacgaattagatgtaggggcaaaataggaaaatcaggtttatgtttcgcctgcatcttcctctggtctttctttttgtctcagacggacaaaaccagagagagagagagagaaagagaaaagagagttcgcgtgctgtttgagtatcatatctaatcccagattctttcttccttctctgtatatttccacgacggttgacctaattttcgtcaccatccaattggatttgagaagagagaaaagtattctcatcatctgaagaagaagaaagatagattgatagatagagagagaaatgggtaattcatttgggtgttctgctccgcgagagattagtgtcggcggcgagagaatgggga

SEQ ID NO: 43545 - DNA, 347 bp, Arabidopsis thaliana columbia
attgtttgcattaacttctgattatgttggttaacaattttagggtgacttgatcaagaattagtgaaaaaattaagaaactatttcttcttaattatttgttttctgaaaaaaatggattccacatgtttatagcattcaaattgtttgttctttgacttactccgttatagcaaagttttctaatatagacatcaagctcaatacattatatgttttcaatatgttttcaaacaggacgtggttgttccttctctcatggacaaagacattgagttttcaacgtcaactctgtcaatggtcccagggatacctataaaacccatgcttgcaaagtaattgtgcag

SEQ ID NO: 43546 - DNA, 903 bp, Arabidopsis thaliana
ctcgtgaatgtagccctccaaaaccatcacctaagcctcacaaaccaccaaaacattctgtcgtcccacctaaaccaccggcggttaaaccacatccccacccgaaacctcccactataaaacctcctccgcctaaacgacacccccaccctaaaccacccaccgtcaaaccacaccctcaccctaaaccccctaccaaacctcatccccaccctaaaccacctaccaaacctcatccccaccctaaaccacccaccatcaaaccacctcctcaccctaaacctcgtccccaccctaaaccacccaacgtcaaaccacaccctcaccctaaacccccgacaaaacctcatccccaccctaaaccccccaccaaacatcatccccacccaaaacctcccaccataaaacctcctccgaaaccaccctccgtcaaacctccaccatcaactcctaaacctcctacgaccaaccctcctccgtctactccccaaccccctacccacaagcctccaccgtgcacaccaacaccacccgttgcctcaccaccaatggcaactcctcccactcaaatgcctcctatcgcaacacctcccatcgccaaatcgcccgtcgcaacaccgcctattgcaaccccacctactgcaacaccgcccattacaattccacctgttgcaacacctcctatcacaacacctcccatcgcaaacccacctatcataatgccacctatagcaactcctccagtagcagctcctcctataacaaatcctccaatatcaaagccgcctgttactacaccgcctactaccactcctcccattgcaaaaccacctatcgcaactcctcctatttcaacaccaccagccgcaacaccaccagccgcaacaccaccaataacaactc

SEQ ID NO: 43547 - DNA, 932 bp, Arabidopsis thaliana columbia
aataagcttacaaagatacacacacatgagatgagactgtttactagtgcgagacttttgatctcaatgatttagcattttttttaggtagacatagaaaataacattatcactgagactcttcctcaggtggttcttcttcttcttgaagaaggttctcacggttgtcatgagcccagaagccacgcacatctgatagcatgctcgcaacggttccaccttgtttacatcccaagagatcacccagagtgatctttaatgggtcagacggtttcaccatgtcccagatctcgtctcgaacatcttctatgcacagttcatagttcccaccttctatccatttctggtgaacatctctgcaagttaaacagatgaattcagaagagagacaatggcattatcacacatcaatggtgtgtttgatatgcactagtgtctttgcagatatgagactcgcggaacaaagctcagcttccgcaagcaggaaatgcagagtgtttatttaggaagattgtatcagataacatcacaactctttgatgctccccttctttacttccatgtttcaaacaaaatttactaaaaagtaagaaaccaaacagattcagtcgcttcatagagattcattacctgaaaagagagtgaatatcagcagtagtgagaaagcctctcccttggagatcaaggcaacggaataaatacgtcaaaccctctggagtatctttgttctccaaagcaagaacaaaatcgaggaaactgtcaaagtccatttcccgggaattgcctgccacgattttaccacggcggacatgctcatcgaacactaaaaaaacacaggggaattagtatactaagcgtgtctcgatcagtaccacgagcctacaatcaccaaaagggcttaaatttactctttcaatgaaaatctcagttag

SEQ ID NO: 43548 - DNA, 576 bp, Arabidopsis thaliana columbia
gtgaaataaaatattattattattaggcaattagaaatttctttgacccagtattcaatcgctcgtaaatgtgatattttttgcgtacaggaagagcctgcattaaaaagatactgctcagtaactgtctgcaggaactaatggaattgcatcaggtaagtttagttgaaggatgtatgacatacagcttcgtcaccgtataactttccactttcataggctacttgcttgtgttttctgattgttccttggttactcaacgttaggaaagcgaggaggaagtcacagacactgaacaggcagaaaattggttctctttgacttcagcccaacgcatatgtggtgggtgtgctattttgtcttaatagctgcagagaactggaaacaactctcgttatgtcatattaagaactaaaatggagattgatctagagtttctctttcttctgtagatatgttcctcgcacttgataaagatatgagtggatcgctgtgcaaacaagaacttaaagaatatgctgatgggaccctaactgagattttcattgaaagaggtaaatttaagcccttttggtg

SEQ ID NO: 43549 - DNA, 780 bp, Arabidopsis thaliana columbia
aataactattaattaatcatgttaattgtaactaattgactctaagacgaaatatgcattcaattctcaaaaaactatcatttatgtatttttcttttcttctgaacttaccataacttacaaactcttactatcttgtggtatttgaaaaatttataaattttccgctagttttggacgagaacaacgtaaaattgggtgtttaaggtcatttctctaaaacaaccatactttgatcattcaaacaatccttaaaattggatgggaatttctcatatttttccattttttcggacacaaataaacttgattgattaacctgggagtacatgagtagtgtggtgaatgagattgtgcaagcaacagaatctttataaaacgattgggaataaaaataaatgtttcatatcaagtcttaggttcagagattagcaatttacagattatgttttgtcttgtaacatctgtggtagtccacaaggggcaaaagtggaaggaatgatgaagtaattgaatgatacagagcttatcatacttcagtagcgaccgaacatgatcatggttaatgcacttactaaatttcagacacacactgaacatgtaattctaatctccgagatctaaagcattttaacaaaactcagaaacaaaattagcaaaatatgaaataattactgaatgcagagtctgaaatacaataataccaaaaaaagaagaagacgtagtttttgctcaaaagagattacaaattcggttcaacacaccaaaaccaaaaagaaa

SEQ ID NO: 43550 - DNA, 433 bp, Arabidopsis thaliana columbia
gatttatctgaagttgatttacaacaaattcattgttgattggttgcttcgtctcaaaaataacatgtaaacataaaatttattatttttaagaataagatatgtataaattgtttgtcttcataatatgtaacttataaaaaaaaaattctcctcaattggtacctcttctttcgttaaagtttaaactttctttttaataatatagatatctgcatatggatctagaatatagaataatccatttctcaatatattatgggtaaaagttttttgataggaagaagaatcaaaatttataatttaaaaaaaaaatcttgttactattactggaagcaagcatttgataaatatacaaatcttatgagctgtgaagaatgtaaaatcattgtggacatcaaatgctctgtctttttagacatgcctacatttt

SEQ ID NO: 43551 - DNA, 520 bp, Arabidopsis thaliana columbia
atttggaacaatttctaaataattgctcaagttctgtctccggatcaataaattaatatttctatcaaagcatatttttacactatccagtttttctgcttccgggaaacctcggaaatcgaaatgctgggcgagctgtcagcgttgctcccttcgaacacaggcatctactatcttagttaaaggttcgtttttctccattgactctgttctagtggtgaatgtgattacagtttccagcggtttatctttcccttgagatctttattgaaaatcgaaaagtctacacatggctggaacagatgaatttgttgggtttcaaatgctggtagcgacagttttcggttttttattgcttcccggagctatctttttttttttgtgatcagagatcaggagtgccttctgttgaaatagcagcatgatgttgagaagccttgttttttggatgtgtatagcttgtctgatctcaggtttaggacagatgaatcaactacgtcctgtgttatagttgggttgt

SEQ ID NO: 43552 - DNA, 555 bp, Arabidopsis thaliana columbia
agtcgactctaccgtatagtagtatttcaattatgacatataaaattaaatttacactaaattaaaacccatttcttctaagcgtaggacagataagctaaacatgaaaagcaaactaagggtgctgttgggcattttaatatgcattggagttggaggagctttattaattaactcacaatgtgcaaatagaagaaactcatcatcgataaataatagaaaatattagaataataaatataaaaagagtaagaggatatcataacccaaaccaaataaatatgcagattaatcagctggttttcaatctttcactttagttattgtgggcttgggccagtttgctcattatgtagttggttgggctattagggttatgtaagtatatactcagacggcaaaagaaaatgtagtaagagtagcaaaaaataacataaaaaattaaacgattagtagaaacaaatgtcacatcgttgtagaaaatagtgacctattaaaattcatatacaagtaaagtaaattcgacaaaaaaaatgtattggtagaatgtggaag

SEQ ID NO: 43553 - DNA, 454 bp, Arabidopsis thaliana columbia
  unsure (1)..(454): unsure at all n locations
ctcaggaacattaagaagcatttaattttatatttattttctaaggaattcgaatttctttaattggataagaaaacaaaattttgttaactttgttgggtttgtaatagtatatcatttatttttcaatttcaacttctagatattctaccctttgcacaaaaaaagatattctacccttcgaaatcgatgatactcattgaaagtttggaaccaaatgtttttgatcactacggttaaaagttttaactttgaagttaacacttttaacttaaaatatgataaccacaaaaagcatacggactctagatagcttacggactgtttaaactgcttaaaaacgccgtctaagcttcttacatgctgccatttcaactaatcccaccgtcttanactgtaatcgccattgtaaaacttgcttcgagttaaaataatccgaaagtaaaatagttat

SEQ ID NO: 43554 - DNA, 567 bp, Arabidopsis thaliana columbia
ttgttcaatcattgtgttccaaaagcatttctcccacgtcactgttgtttaatggttgattggttcctgcctgttattgctgtcagggggatgctagaatttctgctcttgcaaggcagcacgttattgaaaagggctctgattcacctccaagtgtttctggagaatcagtgcgaatagaagagaagatacgcagattacctgtgggtggtgaaggatgggagacaagaatgaaaagaaaacggtctgttgctactctaggcaacagaattatgaatcctgaacaacgtgttatgcagccaaagccaacagctgactctaagttgcgttcttgtgactcccaaaatttcaggtgtgcattaaagatataagattagtaagcctgcctggtagttatccctgttgtttagctaaagtacaacttaaaggaatccggacatataacactgaaccccatttgagaatgttattacctattttctagtccaagggccagaagtggacctacaagagagaaatattgcgtttatttactggttgttgcgcaggtcatgatttctagtgggg

SEQ ID NO: 43555 - DNA, 803 bp, Arabidopsis thaliana columbia
aagccactttatctgagcagcagaagcaagttcaagagaacattcactaccaagttgaaaaattctgctctttgatggatggaatccttcttcctgatgttaggaggaacgagtcggggtcacaatcaacaagccctcgtcctcctcgtagaagtggtcttactttcgccattggtagtaataatgccttttccacatgcagatcagccccgtaagtgttttactttacttgaatcgatttgtgaacttattactcagtatttttctttcagcttaattagtattctcactgattcttcttcagcacagttgttcccgagacaaagcctttgaaactcaatgacgtctcacagagattaatggatcaaatgggttacaccctcgagaccaaaccgtctgtaatacctcacaaagacgctggtcaaggttgttttatcaaaggcgaggcagatgttggaaccgtcttagccttttaccctggagttatttactctcctgctttctacaagtacatacccgggtacccgaaggttgattcacagaactcatatctcatcaccaggtatgatgggactgtaataaatgctcaaccttggggtcttgggggagaatcaagggaagcatggaacgggtcctacacacctgcggtcaaagcaaacaccaaaaccgcagaaaacgggtcagacaggttatggaaagcgttgacaagcctctcgaaggttcgggtaaaggaaaagaggttcttgagaggagaaatccgttggcttttgggcacttagctaaccaccagcgatagagatgac

SEQ ID NO: 43556 - DNA, 310 bp, Arabidopsis thaliana columbia
gattagcgaacgactcatccatcgatcaaagagaaacagatatcaaagagaaacttagaagataggttcttctaatctcattcaaaaatcgataagatcggaaaaaaggtcgtccctttttcggaatttttaaggtttctgggtttgcttctcctcctccgtcgtcgtggaagcactcgggataggaagagaaactacagaaagaacgatccacgcgctttcttagcaagtcggtaaaacacgcgctgatcacattcggacacgtgctttgccgacttgggcccagacaatcgcaagagtcagacacgac

SEQ ID NO: 43557 - DNA, 1038 bp, Arabidopsis thaliana columbia
gttgtgtttatctctgttttgccgtcaagcaactcgttttgattcttctattcttaatagttcagctcgttttaggtggtgagaacatctctctggttgtggatcctccatgagccagagcagaggaaccaatagtgttgtagacaaataaataaaaaatattaaaaaatcagttcttaggaatatgcatgaacaagtgggtgtggaaaaagaggttatgcatcatgcatgaattaggataatgtaaaatgtcaatacaatgtggatattgtgtactttatgataacaaatatatctagatatgggggataataagataatgttgtaaagatgttcatgttgacatttaaatgaaacttgaggatatgctaaagggtaggaccagaaaaaagttataggacgataaagtttgttcgagaagtattacaacaaaattgaagacaacaaaccaagacaacgttatagcgatagaaactcaagacatgttagacatgttactcacttttgtgaggtttaaattggaatgggttccttatatatggcttccacctttgagccagagttcatatcgacgatccaattcctcaaccaaaagcagagtctctggatcaacaaagtcggcagtttcgtcttcccaaacaatatcagggaatgggtacttttccggaggcaagacgtccgaatacttgttcaccaaactagtagcagcagcatcatcttccacactcgccatgaactccctgacctgatcgagaaggttcaaagcaggaatgcagctctttgcaaaagtaagcatacgcgcaagagcagtcactcccagggacctgcacttgtcccttgagtcgcaatcatcgtcctttctcagaagatccacatagttaaaggacattacattgactagcgtttgtgtcacggagacttgacgtacagctcgatcgtaatgatacatattgtagcgctgatggagaagactggcgtacaccggatcaagatgacggacgcaaggaaactcgtgtaaaacatcattgagcttgtttg

SEQ ID NO: 43558 - DNA, 373 bp, Arabidopsis thaliana columbia
aagcctttggcaatgacacgctaacattattataataacggaaaaacaaatctcattagtctcttgtttaaactagtctaagcaaatgtttacggatgaaccaagtggtggtagtctaatgggttccacttgaggaagaattgccctgttggtccaggtcagggatcgattcccctcaggcgtgaaattactagttatttctatttggtcaggggctttcacctagtattcccggcccggatcctgaagggattaagggtctcggccccgaacctcctggttataaaaaaaaaaaaaaaatgtttaccgatgcatttactacttaacatgtgagctttaccttcataaaaccactaaattaattatctcaatt

SEQ ID NO: 43559 - DNA, 665 bp, Arabidopsis thaliana columbia
caagttgtaaacaaagacataaaacaagaacggaaaagagaacatttgaagataaatgttcaaataatatttgattacaaaaaaaataatgaaacttgttatcagtagaagacgacttgtgaaaagcaatactatgtataccattcatgttgtaaatatgacaaggaaaccaagtggtggtagtctactggtttccacttgagcaggaattgcccggttggtccaggccagggatcgattcccctcaggcgtgaaattgctagttatttttatttggccagagactttcacctggttttctccggaccctgcatggattaagggtctaggccccgaacctcctgcttatcaaaaaaaaaaaaatatatgacaaggactcatatttaaaatcccatcaatatagagacaaattaagattacccaaaaggtatgagtgatacacgtcaatgctccaatattccaaaagttgaactggtcttacgttggtttgttcgccacatacgcacaatttgaacgtttcaaagagtcctttttcatgcagacaaaaaaatatgtccttttcagacggaactctaaaaagataaggaaaatatgccgtggtgtttggtgtttgtttatcaaaacgaatgcttaaattaactatcacaactatatgattttcttgg

SEQ ID NO: 43560 - DNA, 788 bp, Arabidopsis thaliana columbia
tcatcatcagtaattcagtttacaaacattcgttgacacccaaagcttggaagtctaaaaaaaaatgtaaaatgtgcacaagtaagtaactacataacgcagacgctgcctttgaaacaatatcaaagatattgcagatataaagaagtaaaataagagatgactttaaaattgaagtatttgtattaatacaaaaatcttgcgtgaaaatacaattgcggtttaatacaaaaaagaaattgcaaatataaagaagtaaaataagagatgaaagaagaatagtaaaaagtatgagaattaatttaccattaaaaaaacacttgagcttcgattaagatattaaactcacccttgttttaaggcaactgttcagatgagaagccaaaatttgtcgttgttctttgagtgtttgtgagacgggagaatcataggcattgattgtattaaagaataatcctatggaaaaatggagatgtatgagagaaatcgaattcagtcaaataaagcagaaacaaagcaaaaaaaaaaaaaagccatagaaatctagaagaaggatatatgattttcggatctatggagaattctatatatataacacaaaattacaaacaaaaatagaagatggtaaattggttcattgagatgaacaaagtacctgatttctgagtaatcgattaatgatgttgagaacccatctttgagattttaccagtagtcatggagtttttggaagagagacagtggagatgtggagatcgtggggatgaaagagaaatcgtttgagaatg

SEQ ID NO: 43561 - DNA, 1157 bp, Arabidopsis thaliana columbia
atgaagaaaaaaaagcctaaagcgttagatcatgtggatcctaccagtgcgatctccgtgatggctcgcgcctcccagcctcacaccacgtacgagtgcaaattgtgcaaaatcaattatacgctttttataagaaaacataaaaggggtctctttttgttaattaataattatatatggtgacttgtaaactgaataatggtgatactactagtaagcaccgataagaaatacgaacatctttaataatgtggtcatttccaaataaaatgattcgaatatgccacccttgcatttgttgatctcatcatcactattgattttctgatcttctcgatctacgttgattttgtacatatgaataataccatgaatgaatacctaaaagttgattatgtgtctgatttcaagcatacgaaatattagtgttgttagtttatccagaataaacaaataaatatatatgccttgcatggcaatctttgtaaaaaacccaacatatataacaaagaaaataagcaatattattcttctaagaacatttcatttataaatatgcatggaaaagggaaataatgtataaaaatgtggtcatatgtatttccaatgggtcatggacctcatggtgaccatatataatgtagatgaataattgtgaggtgaagaagaataatgatggtgactttgtaatcttctcctcccacttaaattattgagcgacaacgtggctttttgttggcccatattcattcgtatctcccatctctccactccttatccaccacgtgtccccagctgcaagaccaactgtgtatatctttgtcacatccaagtcgttacaatgacagtgtttcacattcataaaggttaattatcatctacagtttatgacagttctatgattatatctgttataacatcatatcatcatatacatgcagtcccctgtgactatagatgactataacataattttctctgaacaattgtactgttcatttaattgtttctgattttttccctaacatgttaacttctactattaaataaaactttaaaataaaatttgagtttaaaattaagttttgttaaaagattagtatttggtgcctttgatggatcacattaccaattttagtcatctacttaatttcaag

SEQ ID NO: 43562 - DNA, 511 bp, Arabidopsis thaliana columbia
ccatttgcctctgcatatgtctatgcctggctggcctgggggcttcctacaatggggtatgttttctttgtaatttaagcatgtgatacttttcctaagtctcctttttattttttggttgtactaatgtaaaactctgtgattaaacagatacatggcacctacacaaggagttgtgcctacggataccagttccttatcagctgcagcaatgcaggtaattttgattggatgtgccattctaatatttctctttatatttttttgcctttactgatttaaattttggtcttgtgcagcctccacctcatttactttttaatcaaccaaggccgaagcgatgtgctacacactgctacattgctcggaatattcaatctcatcagcaattcacaaagatgaatcctttctggcctgcagcagcagcgtcagctccaatgtatgggaccaaggcctgcaatctcagtcttatgcctcgcacagaacttcaggggagtgttttgggaagaag

SEQ ID NO: 43563 - DNA, 872 bp, Arabidopsis thaliana columbia
tccacttcggctagttgaaaactctttaggaagagaaagtaaaactgtaaaactctgtcttttacaaagaaaaaccaaacttttgattttctttcttcgtttacatttgttggagctgttgttagatggaaaagtctttcgaaacaaatcgcaattatgacagtcgttgtgtccagtcagagttgagactaaaaaagccgacattcgtcgtaaaactgcttttcgtgcgtgattaaaataataattaatcatgatgatgctttgactgtcattaacaaagaaattaagaaaatagaataaaaacaataaggccttttcgacaactggaagaggcccaaaagcccaagaaaatctatatgataatcgttacttgttgattacgaataggtttggtttatgtccaaactttttaacattattcgtcatcaagaactttcttattagaaggaaaaaaactttaattcgaaacaagtgaaaattacaaaacccaaaacaatgatgataatacagctacgtaaccacagtgagtttctccatacagtgttatcgctctcttgacttcaaagagtattgtccatacaaaacttacacattgtcattacgtctgtttattgaacgagtatctgtttgggtgttgagggttcctctgctttatttttccgttgttcactaggggattgcttgctactagtactgctctcaaacagcttgctgctctttgcgattgtaaggataagctcgagttgctttcgctgttgtcctgcatagcaaagcaagcaaccagctttcatgagctcaaacgacactagtatggacttcttcaattcagccatggcaaaatcttagaagatcccttttaacactcaaatact

SEQ ID NO: 43564 - DNA, 548 bp, Arabidopsis thaliana columbia
tattaacgtgcgccagtgtgctctaaaggaagctttcaggaatgcaagaagctttgattacgtccagctaaccaccccggttaaaatagaacaccttgatatttcaccggagactttgcgacatctgctccgaaatctagcagcgcgacagagatgtattgcccgtgctattcagaatgcactagaagacctgtgctacgcaacagagtacgtatccccacctagtttccatccgcgtgagaaaataactatgacttgtaactctagaaagtgcaaactcgacgccacaggcggccatgacagttcctacattgcaggcgtcatgcgtcctgtttatatatcctgcagagagcaatacggtacgaaattcaatgttagccgaattccttccaaacttctcccactaatcattgattactgcttctaacaggtactggtagcgattccgccgcaagcaaaccatgaaccgacatcttacatcctcacctttatttacaaacttttccagaagtatagccgctgattatgatgagctgatggagacaaca

SEQ ID NO: 43565 - DNA, 582 bp, Arabidopsis thaliana columbia
tatagccacaattgaaaactgtcgaattatatggtctttttttattcggcggatttgtggcggaaactttcattcttctatgtgatatctacggtttaaatgatgacgcggaaagatctcgttcttgtactatctccacgtgttgaatgtcacatgagatatagccacaattgaaaactgtcgaattatatggtctttttttattcggcggaatcgtggcggaaacttttattcttctatgtgatatctacggtttaaatgatgacgcggaaagatctcgttctcgtgcgctatctccacgtgttgaatgtcacacgccggagaatgtctactgttttgattcttgcctaagaaaacaaactgttgtgattctgtttcaataagcgtttgggtatttttaagaagggctttgatatttggtgatcatgttgcctaactttaagggcccaaaccaagaaaacgaaaacgacgtcgtatggagttttgcgtgaactcaaagcggagatcctatcggagagaatcggagaagaagaaaaagaagaagaagggttttgttacgcaaaacttcattgaagatgcaat

SEQ ID NO: 43566 - DNA, 704 bp, Arabidopsis thaliana columbia
gatttgtaaacagttggtgctgctgctgtggtcgttgggctggctgcataccgtgtgtatgccacaagaaagagctcgtctgcctgagaagattgagaatgaacaatccaatctcttaaggtatgaacacggaaagaggatagcaaatctcgtgtactgagtttgtttatcgttctcaaggttttacaacttgatccagagtactgttgagtactgttcttagaagtttaatggaaatgggctttgtttgaagtaattgtggaagaagatctgtagcaaacacaaacatttagggacaagataaaaagagaacatagtcaatagacattgtgttgaatttcaataacaatagaactttgtctcctcgatgttgttaatcttgctcacgtttgctctgttctcggaattaaccagcaacactttaacatcaaatgaacaaaccattaattgcacaagatctctttagagtttaacaaatcgacaacaatttgaagataaaaagataaaaaaaaaagcaacagaaaatcctattttgaagttttaacaggcgaccaaacaaacactttcacaaagacagtgaataaagaatccagtcacgaagcaagccactattgttccctccgaagcaagtcagaggcggaagaagaagaagcagaagatcgtatcgctacgagggaaggtcttctgttcttgaacttaagggg

SEQ ID NO: 43567 - DNA, 568 bp, Arabidopsis thaliana columbia
tctcagcctacaatggagctccaagaaacaacacatggagctgatacaatcacactcactcagagaagcagtcaatgggatcaatcggaccagttggactagttctagttctcaatcctcttttgtctattttggaacaatcttaaccatcttcatcctcttttgtctattttggatgatgtattattcggttaatgtttaggatgttctttatcctcttgaggctttgtaggatgatgtattattcggttaatgtttaggatgttctttatccctcttttgtatggattcttatctattcttatgttatgcatcgattcacattagacaaagacacataagacataacatagatagattcacaaaccctccatcgtttaatctcgacacttacacaatccaaaacaaagacaaacatagccaaaccctgacaagcttcaaaacagagactaatccaatactacaatttcactccaaaacctcaacaacacctacactcttccccaaagccatacaatagatgcaacaatcacaacagcaacccctacagtcttcaaagctgactttg

SEQ ID NO: 43568 - DNA, 504 bp, Arabidopsis thaliana columbia
tttcttttcaatttctcgattctttctggctcattctctcatctctgtttcatatctaaattattgattgagaattcgacttgtggaaatggcaacagttgcatcaaatctcgcttgtatcggaaaagtaacgatgtctagagctagttcaatggcaagtccttttttttatcatgctcgccaaagaaatggtataaagagtggatttggaatggattttgcaggtaggatggaggttgcagataaattgcagaaagaaagagaaaggaagagatcagagtcattatccttacaaagtcattgaaatcactcctcctcctaaatctctcggcattcgttgccttcctcatgtgagtctcaaatctttctcaatgctcaactacacttcataagcatttcattacagattccaagtgagaatgagaagcttttttgatttgcagaaccttcaatgtggagagaacgtgatgatcgaagggcaaacgtacacaatctctgctgtga

SEQ ID NO: 43569 - DNA, 504 bp, Arabidopsis thaliana columbia
tgtaatactcttaaagtgacaaaataagtgtaatcttactcaagaaaacatatatacttgcatggtacgtcacaacaaggacttgatccatatctaatacacaaaatcgagtaaaaatcattcttcatcaccgcgatttccattgacacgggctcccgaaaccatttcggattcggacattactctctcgtacttaacagaacgagaagggagaatcctaaaccgtccaaaggataaagcttgtgaaagcttgtcatagtcccatctctgctgaacaaacacaatgacagcaagtagaatcgcggtaacaggtatggcgatatctccaaacttagagaagaagtcgaaattcggattaacaaactcatgttcttctccaatgaagttaggatcaggaacagagccaacgatgtagtcatatgcatgcgggaaaagtctgaccagtgtgatccgaagtaatatagcttccttagtgactgccgggaatcaatctgccacatagca

SEQ ID NO: 43570 - DNA, 739 bp, Arabidopsis thaliana columbia
taattaattcaaattagcaaatgcatctcttagtttggtaacggcaattgttatagtatttaaactgaaatcataaatgaaccaaaagcttagacctctcaactaaattttgcaaagagcagaaataaactctttctaaaaagcatttgtgttttttaaccaaaagcaaaaccaccgtcgtcgatgaccaggatacggaggtctccgtgtctactactcctcattatctggttcatgtgtattgccggttcggttcaggtggttcaatctcaaaaccaaaccggagccactactcatcccgacgaaggtttgtctttaatctaacacttacaaagagttcaatcaccaataatcaattggattgtatagattatagtcttatactagttattcggatccaaattgattagaaacaaaaaatacaccatgaattgtatccacaaattccaaaataataagatacttaccggttagtttctgttaataattgaccggttatattaatttgaccgttgtgattgattgtggatacaacagcgcgagctttgaactcaattttcgcggcttggaagatccaggcgccgagagaatggaacatcagcggcgaactttgctccggcgccgctatcgacgccagtgtactcgacagcaaccctgcctacaatcctctcatcaaatgcgactgtagtttccaaaactccacaatctgccgcatcactaacatgtacgccctttttgt

SEQ ID NO: 43571 - DNA, 1019 bp, Arabidopsis thaliana columbia
gggccagacaacgcgttgattccaaaagtcctacatttcgagcatgaggagacaaacaattgttaattgaacttgtataaaactatcaaacaagaaaaagaaacaaggtttcagaggcttttacatccactgcatccgagtcaaattcccaatagcaggagacagtgagcctgtgagataattttgacctaggttcctgaaagatgtgtgtttttgatgaccattggatcagttaagagtctcaacatatatatacttgtgaatataaaaagtgggtaagtgggttgtatggaactatacagattggtgaggtatgttaaggtccagagctctggaggtataggtcctacaacatctatcgcataaacctttctgagacaacaacaaacaaaattgagactcagtgggagaattcgtcgaacatatggagtgcataaaaagtgggaaagaggtgtaacatgttatttatgcggcagattgtggagttttggaaactacagtcgcatttgatgagaggattgtaggcatggtttgagtcgagtacactggcgtcgatggcgacgccggagcaaagttcgccgctgatgttccattccctcggcgcccgaatcttccaagccgcgaagatggagttcaaacgtcgcgctgtttttatccaacataattcacaacggtcaaattattattagcaccccttaatctattacgcttaactaaacaactagtattaattaattgaaactatatattaactgaactaagaaactcattctattgacaagatgcattttatttgttttttcgttagtggggtttattacaaagaagaagctagctattacaaactacaaatccagtcgataattggtgactaaacttttgtcaagtgttgaaaagacagaccatcgtcgggatgagtagtgggtctggttcggttttgggctcgaaccatcacgtgaaccaaaccggaacaacacaagaaccaaacggttaggagcagaaacagagatctacgtagc

SEQ ID NO: 43572 - DNA, 513 bp, Arabidopsis thaliana columbia
tcatataatgcatatgtacttacaggagacattgttgtaagacttgagatgtacctgaaacagtgacaaaaacaaaaccaagtagtatctgagtcaaaaactttcgattttaacaagatattaaaaacttcaacccacactcacagttgttctagtcactggtacaaaagagtacatatactaagatcatatgtgacattatgtgtgtagtgtagtaaatgtaatgttgatgatctccatgacaagatagctattatttcaaccagggattacaaatggagattgacgtatttaataatagacaacgaatcaccaaaattcggattgatacatacatgcattaatcacataactaaatcttatcggagaatcacataactaagcacagatgagaacgcaaacaaatgattcaagactcaaataggcagcaatggatctcgataatcataatccaaaggatcaccggaataaaagatcggagaagaagtaatggattggaggattcaaatgtga

SEQ ID NO: 43573 - DNA, 734 bp, Arabidopsis thaliana columbia
tgtgttttcgaacagtacagtttttgaatatatgactctgtaggaagaatctttgaggttttaatacaatgttcttttcaaaatgtggttcatgtttctatgtttttgtttttgtctagcaatcatctccttactaaattgaattcgataaactatagccactatgaatataatcaaatgaaatttgtgacataagaatttggacgtaacgagtttgaatatctatctagataagttattaaattcgtgaccaaagagtttggtcgtaacaagtttgaattttttaggacataatattattattggctaacaagattacgactaacgagtaaataatcattccttcggtccttcctctaaaatgccgttggtgatcgtttataaataggggaaataggaaaagggaagaaagtagacgtggcaaatagcgaaacaatgattgagctataacaaaggcgaaacttgagcggcactaattgaaaatcactccttgtttttttgaagaaaaagtaagatgtagggctgagaattcgtctatgtgatccaacggttttaaaatgatccttgttccttcctctcctatttatctgaaggacgaagtcccacgctgcacataaccggggcacttaacgtatagatcataaacaaagaagaagaaaaaaaataagaaaagaagaagaagatgtcgtggcaaacttacgttgatgagcatttgatgtgtgatgttggcgatg

SEQ ID NO: 43574 - DNA, 488 bp, Arabidopsis thaliana columbia
tgataaccaagcccaacagttggaaaaaatcaataaaaggtaacaaaatagaaaaccaataaacaaatatcaattctagaaaaatatcgatctttctctgcaagtacttgtactagtcgtcgttactgtcaaataatctacaaagcagtgaccaaaaccaccatttccgcacatagctaagacctttaatggtttcctctctctctctatctctacctggctttgtaatttgtttaccgactacaatggtcaaaatttctctactcctataaaaatgggtcgccttgtttttgatcaacggatttgattcatctttctttttacctttcttcctgctttcgtattcaatttgtagttgaccagttcaaaagtctctataccagaaaaaaaaatcgttttttattatattataagacttttcccctgaaattgttgttcctctgtttcgagcgttcgttatgagtactgtggagagtagcaaccgaaga

SEQ ID NO: 43575 - DNA, 818 bp, Arabidopsis thaliana columbia
cggacttttatattagtaatggacatgtcaagggagaagagtcaggcaaaacgatcatacaagtcacaagagataaagatggttcaagatgagttcgatctacttctctttattttcagatcaacagttttgtaactattttttatttatttttcagtaattttgctagctaaatattaaatgatgtgttcacgttacgtctatatctcaattaataacattactttctgcttttcaattatcgaatagattgaatccaaatttttttatgacgaaataaattactataatggtatgcatcatgagtgtactattgtattcttgcatgtgatttttgatcaacatggtgtttttgtcattactatcaaaagacttccatcgctgcgatattggattgtcagaactcggaaaaaaacaaattatgtcgtagctcaattccacgaaaaagtctaaaacaataattagcagctctatatagataatcgaaggcaaaggtaattgtttataattttgcaaaagcacgacatataggataacgtgcactcttcaaaagctatttagcaatgcaatcacggtggaatttgtgcatgtaatctcttagcctaacataaccaaaacctatggtgacatcttctagacagattggggaaacttcttcttcgtctttccctaaactccccttgttcttctccaccatgcacagccctctctaacttccatgaaattccaagacgtggagatacattttggcccctgaatcttctcagctttatacgtacacctccatcgtaaattattgcggagcggtaaacggtgaa

SEQ ID NO: 43576 - DNA, 818 bp, Arabidopsis thaliana columbia
cgaaagatgaaacgatgtttgtttatgaacctcgttataagtgtaacggtcacggaccaaaacgacatcataatagtacatttcccatcactccatatatcaactcgtgccaagcaactacttaccctctttcaaacttactaaatatactggtatacattagatgtcgataatctctatcatgcagggactgttttgatccttaaaacgtgagatttgttttcaaatatatcacctcaagcttaccaaaaataatgtagacaaatcaaggataagcaaatgtatatttaaccgaattcaaatccgcatatcacatgttttattaaaaaaattgtatatccattgaaagttctaagcgaatctaaggccaaagatcaaaacacgcatgtacggatctccactcttaactccttctaaactactgtagacgttcaagacgaaaaaatatctatatagaaatttaaatagttaatttcaaggttttttttttgttgataaaatttaattttaaggttctatatgaaacctaggataaaatcatttttcaacaatttaaagtgtaatgtggcggaaatgacagtaacatagttacaaaacatagtctaatattgttggaccaaagacacaactatataacaaccattacataatatacggtagttgaaaacattaacacaaccggtaattaatacacaacagtataataaagttaacctcaatttaaatatcttatgtcttcttcggttgtacttaaaaaccatttgccaactctccgtcagtattcgctgacgacatgtaactcacgacgagagacgtct

SEQ ID NO: 43577 - DNA, 576 bp, Arabidopsis thaliana columbia
tgtggtttatacgagttcctattcgtccacgtctcctaattttccttttcttaaagaaaataaatgcattaaaacctcctcctagaacttcaactaatgttgtttgtcaacataccagcaaagaacctcaattaatgttgtttgtaagtcaaatttaaatatgggataaatgaaaattgggccatagccattacttatctgaataaaaaggcccaatactagtattgctcgtgagaccacgtgaatggtgcttccggccggtaattcgccacgtcttaacctctcccgccacgagatagttagttatataccaatataccctcacattattacaggaacatattacaagatctggagggggtataatggtaaatctaaatgggagtaaaagtgtttttatccgcgtaaataattaaaccggtcatcgacctaaccggctttagtttgtgtccgctgcgtcgtatcaaacccaaaaagaaacaaaactgtttgattcgtactctcttccttttgtcgggtcgtgagatttttactgaaaatgagttcacgaggagcagaagaaaaagggacccagaa

SEQ ID NO: 43578 - DNA, 493 bp, Arabidopsis thaliana columbia
gtagtcacagtgctttaaaatggaaagaagattgaggtaacttgagagtattgcataactacatgttccagatgcaacagaggagacacttgtataaaaaaggttatagaactaaaaagtaccttgtcatcctcaaaaaccacggtggatggaatctctttgctgatgatcttgtcaaatctgcagcatattccagcataagctaaataaatgttaacaattgttttaacagaacaaaacaattcaaatcttccaggagatataatagtacaatagttccctaatagaaggaacctaaaatcttgaaattctatctaacagcagagaaaaatctcagtttcactatatataactaaaatctacatataggctatggaaatcaacaaacatagacaaagactaaaagagcttcttctcacaaactctaagtcactacacccaaactaaagtattgcacgttcaatacggagtactcatcaatcgttacagagtt

SEQ ID NO: 43579 - DNA, 426 bp, Arabidopsis thaliana columbia
agaaaaataatgaaataaaaatttgtggggtagggtgttgaattttattaaacaaaccattgtagagtataaaatttgagtaggtattgaattattatgtgaaagagagagaaaatgatgtggaagggaaagaagcttatgtggagggtgttgaatggaaaaaccattgttgatagcctaagtaaatgatgcaataaatttccaacatgtcaatagttagacttctcaggccacctccatgggctaggttctaaagaaaatctcacctatttagaaaaaagaaaaagagaggagagaaacacgtaaaaagaaaagatctcaacaagaaacttgtagaatttgatgagaaaaggtatggatacatgtccttcacttaatggtagattttttgtataaagtaaaattttaaatacatccctaaattga

SEQ ID NO: 43580 - DNA, 602 bp, Arabidopsis thaliana columbia
acataaaaaaaaaagaaaaataatgaaataaaaatggtggggtaggatgttaaattttattaaagaaaccattgtagagtataaaatttgaattggtattgaattattatgtggaagagagaggaaaggatgaggaagagggagaagatgatgtagacgatgttgaatgaaaaaaccattgttgttagtctaataaaaggaacttatcgaggcctttcaaagtgtccaactcagcattctcaaaaatactctttctaatggacacgtcagcatatgggagttatttgtggctctctttcgtttcttttcttttctagaaatttattatgttcactcgagacttacaatgatggtgggattgaaaagcttatcgtgatagtgttgaattcttctcttttcactctgtttcatgttggatcctcttgaatcttctccatcaagctctaagtttgtccctcttttctctcaagttctccgggctcttggtgattttcgtcttacacacaaaggttggtctcttactctttcttgatttgatcagttgcttcctcctttcgcagttgattttgtttttgacaattgtgtcagattattggttgtgt

SEQ ID NO: 43581 - DNA, 289 bp, Arabidopsis thaliana columbia
gtcgactagtagtcactggatttgtaatcatgtgatcatgttcatttgtcatcttagtatctatataataaaacgtattctttatcatacataaaaagcataataatgatggacttcatgacaactctttttataacctctcactaacatttactcttaattaatgatttaatacagtacatttggatagatagtgatggagagaattagtcagaagattaaattatactcggcatgtttaaccaatggttattgtgttgtgatattggatccatatcttggtgtagat

SEQ ID NO: 43582 - DNA, 685 bp, Arabidopsis thaliana columbia
ccctaccaataaaataatcgtatctacttacattatctaaaattctgaaaagcaaataaaatatcatataaaacataagaagctttcgtcatctccatagttagtcttttgtaatattaccactctgatccaataaagttttatttcttactaattagtttacacttgagaattttggtttctactaaattttttaaaatttggagttaaaatagtttagttttatttttgggggaaataaaaagagaagctttattccaattttccaaatattccaggtgtaatctaactgtcaaggccataataataaatacataattccacctgacgccaataataaattacatattttccttttttttttatttttttttctaatttatttccaaaattagccgcaaaatcacaaaacctaacagagctcaacactacacactgtttcaaaatcagactactatgctcagctcagccgccaccgccacctccgtgagtgctcgctccggcgatattctctgcggcttgtttcgcaaaaaatccgtcgcgccttttcgttttactcagcctgtgagttctcctctgtgtgtggacgtgttcctttgtgtctttgtttcatgttctgctaaactttttaatattagtggaattttcaatgagcaggtctatcgtacgtcgctgtgtccaagtt

SEQ ID NO: 43583 - DNA, 822 bp, Arabidopsis thaliana columbia
tgtgatttggattgatttcaaccggagaagagttaaccactcgccgaacgacacgtgttcaacacaatcctattcctcctagcaatctcaaagcttgtgtgatctacaagctcttggtttctccattgaagaaaaagctttgacaaaaccagggaaagagacagagagagataatggcggctaaactaatctgttcgtctttaacagtgcattcaatggcaaataagaagccatcaccttctgctgcaacaagaacaataacctcaaagaaggtaaaagttgaaaatcaaaatttatcttcttatatgtcccaaaatctaatctctttgttatgtttggcagagcacagcgactccacaggtgaaactgctgacaagagtcgagcagctcaagcttctgaccaaagccgagaaagcaggacttttgtctttagcagagaaatcaggtttctctctatcgaccatcgagcgtcttggattgctgaccaaagcagaggagttcggcgttttgtctgccgccacaaacccggaaacgcctggaacgttattcactttgagcctcggtttactccttcttggaccggtttttgcatatgtggttcctgaagattacacttgggaagtagtgattcaggttcttgtggctctactctctgttcttggtggctctgctgcttttgctgcttctggttttgtctccaatttgcagaaatctgattagcccgatcgttttttttttgtatcaaatatatttacccggtgtagcaagagacttttctgcatttaagatgaaaactttataatgtatttgatctacattgta

SEQ ID NO: 43584 - DNA, 825 bp, Arabidopsis thaliana columbia
ctgaatgcgtttttgttacttgaatgctgttggaatgagctgaaacaccattatcgccattcttatctgcttcctcaattccgttgccttctttttcttttttctcagcctgatcacctcctgaatccttctcaagaggaaaatcagtttggtctgttccttcaacagcgttgttgcaaacgtttgtgtcacatgagaccatctgagctacttctgtagccgcaacttggacatcagcactctttccacaatgattatcatccttatctttagtcttttcagtctcttccccaacagcatctttgacatcaaccttcttactgtcaacttcatcgccctcctcaatatcacttgctttttgattgtcctcaactactgcttcagctggagccaattttgactcagccagaggtgcatttgttcccacaggggttgaagcaggtgcagtcgtagggaccaactgaattccagcaaatggattggatgctgcaactggagcagcagatggctctttgcgcttaactctgacaattcttctactagccaaaacctcatcactggccttcttgaaagttccactctcaagttcagctgaatcatcatcatcatcaagacctggattatcacgagacagctgcttcaaggcacctctcttttttgaaggttgctgaacgttttccgagtcacccatttgaattgttatgagagaatgtcaacacacttgtcaaatacctaataaaaaaacacagacaaacaaagaaagtccaatgaaacaatacccttcaaagataataacagataaaaatccaatttttgaaacagaga

SEQ ID NO: 43585 - DNA, 475 bp, Arabidopsis thaliana columbia
acaagtatgaagtgctcaacaattaatgaggtaagtaatagaaaaaagttatatctagacctaattgttagtgatctcacaagtcacatgtacaaataaacgagtaattaacggggcaaatatcaaaacgaggcaagtaacgagtcatgtatcaaaaactattatgatacttgacttgtacttgcaagtaataaaataaacctacttgttacctggcttgcttatgacgcgtacttgaattttcaaggccagtacgagccgagtagcgagtaattgcctagtaccgagtacttgtgcctaggcctctatcaacggaaaatgatggactgtcgcaaaaggtggagatttgttggataatggccaaatcctggagtgcctctagataggagagagacttcaagtgtaaacgcaaagagagagactctgatacgctgggaaggctttgtttttcagtgaattaagttagtcttgtgtg

SEQ ID NO: 43586 - DNA, 774 bp, Arabidopsis thaliana columbia
ctgatacgctgggaaggctttgtttttcagtgaattaagttagtcttgtgtgaacggaaatctcactaattttaatacgatgatatcatcatgtctttaaggaacatggtgcagtagataaagaagagagaacaaagaatatgaaggtcaaaatttgcaaatggacaattcatgaatctgtaactgctttacattctatttcactgacctctatctggaaaagtggaattgttccaacatcataacagagccaaactgtcacttttagtcaaaacggaaatatagttgcttggagttgttccaacatcaaagaaatacaaactgccactttacgactgagatttggggatcatgttttcccaagagtttccgctccattctaacatcacagtgattctttatcacacccttttttggacagaaggttcttcactctgctggattgatttctacatcattaagcgcttcactgctttctttaccattttgtctgagaatgttttttctgtgagaccaagttaaaggtttgagtttctcgatcaaactgtgaaaatacaatatataatcaccattaccattcacaggaacatgattcgtggacactcgtttcagaatcgttctgcttctataaacaggagtatccctttgtcataacctgtacaagtaggtgaaatagcaacaaatttggtgaagataatttttaagaatattccacctttctctccacaaacacagagcaatagcaaacacataccagcagactagggatatctc

SEQ ID NO: 43587 - DNA, 530 bp, Arabidopsis thaliana columbia
cattgtttttttatgttttttggctaagaactatattgttctttgttgttaagcaaatgtattacttatcttattatttcttagatatcttttgtcattactatggatttgcctttgtatgccttgttgcgtttggtaaagatcaaactcatactctctggttttgttcagttactgatagaaacaagcaccaattcttgattgaccaaagaaaagtcccgagaaagtagaatgtgttccctttacaacaacctttaaccttctacttcccacagctactttgtatttagactggattacgactctatacattaaaacacttgtctatccagctcagcaccaactcaggagctttctcattgagctcttcatttagaggtctatcaatttgctccttccagtctgcactgagtctcaatgttgttctttatttatcccattctcaatgcaatagtcatgagtacaacaaagccttcaatgccgttagactgtgcacgtcaagagaaggttcacagtcgaacattttgagt

SEQ ID NO: 43588 - DNA, 930 bp, Arabidopsis thaliana columbia
atgttgcctatgtcaatttataaccataaatctaaacccaaattttaatcctcattccaaagcaaaagttctaagccctacaaaaatatgtatttcccaagtttaaaaagaattaatctatacttttacaaatttaaattctgatctcttataatgttcggttcttccttttttatttattaagttagttaaaatttgcagttattttgttgaatgtcgttgtttacgaatttacgaataatacctttatagctaatctacaaaattttgatgactgacaacaccgttaatgtttgtgtttaaattaccctgagcctctcacttgcggtcagaccatgcatgtcgatagtccattacgtttaaggccacaatcaactatagtttgtttatcaatagccaactaagctaacttttaggttcctgccctctccgttcctccggtaccaatcgtttctttgtcccttcgatagtttgaaaacctaccgacggtgagagcaaaatattgatgaatcttccaattttcagtaataggtgtgtcccagggatatataaatggcgaaactacgcgagaacggttccttgttctgcaaacttggcggaacaatgctgctcttgagatcaaccaaaccatatgtttagtccacaacgatctatatgtctaggggtgatcctctaatcgaaaaatgttgtatttgttcgacgatgacgaaggtcagactatgaactgcacagtctgcacttgtcctaaccgcgagaatctctgacatcaatatacttgtgtaactatggcttggttaagatattattttcttgagtcttaatccattcagattaaccagccgccccatgtgaacgatgtagcattagctaaaagccgaagcagccgcttaggttactttagatatcgacagagaaatatatgtggtggag

SEQ ID NO: 43589 - DNA, 1170 bp, Arabidopsis thaliana columbia
atgcctcaagctcgattaatagcttgtgtggtccagtgatcgaggtcggagctcacccggagatgaagctggtgaggcagattggggaagagagtagtagtggtggttttggaggtgtggagatgtgggatgcaactgttgcaggcggtggtggacggtgtaagcaccgtgtggcggtgaaaaagatgactttgacggaggacatggatgttgagtggatgcagggacagcttgagagcttgcggagagcatccatgtggtgtaggaatgtttgtactttccatggggttgtgaagatggatggatctctttgtcttttgatggacaggtgctttgggtctgttcagtctgagatgcaacgcaatgaaggcagacttactttggagcagattctaaggttcctcttttgcttctcttattctttttttttgcctagtatctggcttttactgtgatcgtttctgtgcttaaagtctcaaactttgatagcctgttccctaattagaaattactggactagacccgacttggttttttgtgattgctattagaaatatatattgtaagtgcacagtttttcagattctagtgaaacaagcaactaaaacctggtgtcatttgccaaaagggcaacttgtaagataactttagtttagatgttcttaaaaagctaggcacgaattatagtagttgtcatctctctttgtcattaccagctgcagctacttttcatctgtcaatgcctcaatagacaaacattttttggactagtcctttcctttttagtagtggatccttgaacctacgtttgcaagatatctttgagaaagccctttacattagtatgcttccttctaaagtatatgaccagaaatcatttttcaacgaactgacatatcaaatcatgcaaaaaattgtacgaattgttatacattaatttatcaaaggacgcatcatctaaagatgatccttattttgttgtcctggttctaatattaccttcaattcacttgtttgtatttcctcctattttctgtttttaactgaattgcgtcatttgggactattaaatgtaagcactaatgcgtaaatgagtgttttgcattctcctttcatatcgtgctcatgttgttttaagtttacaacttagaatattccttcagtgaccaa

SEQ ID NO: 43590 - DNA, 729 bp, Arabidopsis thaliana columbia
ccacgtctctagtagttttgtttacaatacaatactcgtatataaacacaaagcaacgaacataaaacaaaatatatatcgaaagagacataacaaattaaagatttgattataaatcagataaaaccaatcctcacattaatccagttaactgaaatccaaatcaacttcaactaaactcttcaattagtccacaaaattacaagaaatgatgacaattaaaaggcaagggagtggtttaaatcaatcgtgttattatattttaatttataaaatattccttttgtgtttgtcttgtaataatctaaccttttatcgcaaaacgtttttaaaagttaggtctcgattgactgcttactttttctactacaaaatatcacaacgatcattttttactaaaacaaaaacaatattttgatgaaaacgaattatcataattcataagtcataaactttcaaaaatttatcaaagagataaagataacatagacataatagagtacaaaactaaactttagtttatgggctaaaaataaatattagcttaggtgatcgtaaatagtattttcttgattaaacagctcgaaaaaatgaagatgtcatttgattgcactcgagtacactgattcgtttaattactgcacatcattgattgattacgttacatgtaccactaatgcggtttgtctggggtttggtctgctttccatgattagtttagaatcctag

SEQ ID NO: 43591 - DNA, 527 bp, Arabidopsis thaliana columbia
tattcttaaatttatagtatatggattagttttaagagtgtggttgggaaatatacgaaagtccaagaatcttattagttcgttcacaattgtatagggatgttgtcactaattttaaccaaattatacctttttatctttttgcctaacatttttttgacgttgccccaaaacgaagcaatgagttgagggttagtggtaaaaataatcaaaaagattatatgcatagatttatgtgaagttaaccaaaaaaaaaactcgacccaaaatacataatcttcaacaagaactatgttttcttcttgcaacaagaactatcactcctgtcatagcatagaccaaacttttttttctcctacactaatatataaagttacagttctttttactgaacggtaaaattaatggttagagttgggagaataacttaggcaaaaaaacaaaaagagagaataactttccatgtgcacccaaaccctttactactgtcttctagcccaacacaaccacaagcgtgcaggcaaaga

SEQ ID NO: 43592 - DNA, 917 bp, Arabidopsis thaliana columbia
gcaggtagttgcggctgcggcagacgcatatgaaattgttcgttttgttgccgccagtacttgcggtaagacgcggcggcaaacacagcattttgcggtgaataattttaatcgccgattaaatccagcatccgcttatccaaaacctgtgattaataataaaattaaaatgacataaatacccttaacacatttaggaaatcacaagagaacctaatacacatcaccatctaaaaccttactcttctctctttaacgcgatttcgatctgaagaagagatgggataacaaagtaagcttggtgattttgaagtaatgggtttagtttttgaagttctcttcttgacccttaagagcttttgaagttctctgtttgaatcgtcttcttcgatttcacttgcggcagcggcgacgaaacgaacatatgcacctgcggcaatggcagcggtagagtttgctaccgccgctgccgcctgcggtgatgaaacgaacagactaattataatcgagtcgagattcttcaaagctatatattgatgacaaagttatttgtaagaaaatagaagaaccccagttgcgactttgaagagctattcatctagcgaacggacaccgtatgaagaaaattgcatcgaaaactaaaagataacactaatgtgtacaattgtcccacaaaatatacaacccaatatgtaaacttatttatccctccaagaccttgtagtcttggtgttatcaagacaagctatgttatatcgataagaagagattctagtttgcgaagaaagtgagcggattttttattattattatccatgaatcaacaaatacaatgaagacttgagaccaatacactaggatattggactaacgtagcaccaactagtgatccatatcaagtttcaaactagactcaa

SEQ ID NO: 43593 - DNA, 585 bp, Arabidopsis thaliana columbia
aagaaacacaatagataggagaaggaagagaggacagattcgccatgtctcccaaattgtttaagcagctgtcttaatgttttctgctttttatatatgttctgtttttcgtcttcttcttctcaaaacgctgtcgtttcttctcttctgttacttttcagaacgacgacgttttcgattgagtgggataagctttgtttggtttgtgatgagaactgaaaatgacacatgagagtcaaagttggacaaaagtcgcaacacattaagcttaaaggaccacaaacacaaagcagcagcttatgataactacaaaagataaattctcaggaattgtttgatacgattttgagtatgtgtgagagagagcaaatcagattctggtcaaaagaaaagactcaaacaaatcagtctcatagtttcttcctttgtcatcatcataatgttaaaggaagcaaaataatcatagaaactcacaattaaaagttaatatatacatcatcaacataacgaacacataatctcaaactgtagagatatttttcatcaattttcacaccatatacatgtctatattataaaagtgta

SEQ ID NO: 43594 - DNA, 586 bp, Arabidopsis thaliana
gtagagagaatatataactatgcaatgaatcatgataatgcaacacactcttaaaccccaaaatatacaagggagaacaaccgcaccttttcagtagtttggtggaccgttggggtacattccgccatgaggaactcttggcacaggggacgttccaacagcctgatgatgctgtccaggatacccagcagatgatgaaagaccgtaatgcccactctcgggataaccaccaccaccaggcatcgaacttggtggcattctatactgcccacttccagtaccaggcccaccatacccaccgccaagtccaccgtagacgccagtaccacctggacctccatatccaccatagtgtccaccatacccagcagaaccaacacccattgaggagtgtgtggaattcatgtgatgcgctggtggtcctccagagtacccaccataagcactgataccaccagctgcaccataaggtcctgcaggacgcaccattcccattccctcaccatgaacgtgtccatgaccagaaccaccatcttgagcttgtggcattccaggcttccctcctttcttaccatcaacagccaac

SEQ ID NO: 43595 - DNA, 656 bp, Arabidopsis thaliana
atttttgtttaggcatgagacggttactgttttgacggtctccggtggatggatcgaggtaggagagagtggagtctgggagcttgtctccgacggaaatggaggcggtgacgggtgtcgtagcgaaggatctggtggcggcggaggcggaattggtgcggcggttgcggaatttgagagagagattaggagcgagagagcgtgtgaaggagagcggcgcgctgaaggatacggtgggggaaagtaacggcttagcgacggagataacggtggcggaggaggacatgaatctagaaacggagagagaagtcgccattgatgctgtttaggtgaagagtgtgtgacttgaggtttgttttggattgagtagagaaagatgaaaggctatgtcattattgggcctacattgttttcaccgcctgatccttagtgggcctaaattgtattattcaccgcattctttaatatctacatatttgcttttaaatagggttgatgcaaaaaatggtggacacaatgagattggagggaagaggaaaagagcgtgaaatcggaaagctttttcaaaataatttggaatttcctaacgccgttattgggccttaatgggcctacattgttttcaccgccttgttcctaaggctttgatatttata

SEQ ID NO: 43596 - DNA, 877 bp, Arabidopsis thaliana columbia
tcaaaaacaaatatctttccttagatattcttgttaattaattataaaatatttacaaaatcactcgtgaaagttatataaaggcaaattgttttctacgcttttttatattattgattagatccttttttcttcggatattgaaattaaagaccaaaatattcgaatttgcgtcattattggattttcctttgttgtttttcacaccaataataggcaattttacttatttagcaaatcaccaaattaattagataagctgacaatagaaattagaagtaaatggcttacaggcaaataacaactcataaatatgacgattttagaatagttaatctgttgcataaatatcaattttcaagtgaaaaaatattactatatgtcttgcttctaagtttattatatgaatcaacggttcaaacaaaaaaaaatctatcaggaaggttttttagcatctaactatagacacaattcgttgataggtttaacaatagatgaaattgttcaaattatctttagacaaattttaaaaatgtaaggatcttaaaatagctattaccggtttaccatgtttagttcacaaataatatggatgcatatgtcggttgtttagtttagtttagttcgatgtaatttgtttgcttacaaaatataattggacaaaaatcttaaatctgtttcggaatggtttgtttttttcaccggtttaccaaattcacttttgcttcggtataaatgaattaagattttgaagctactgttataccatacttgtagtcattaatgtgtgtacatattggggaaattaagctgaataaattagtttttgtaaagtttaagtcgaaaataaataaattgatcagctttattagaattt

SEQ ID NO: 43597 - DNA, 1414 bp, Arabidopsis thaliana columbia
cgattaaaaatagtaacacactgaccctacgtggaaacaagaaatatattaaaaaaactcatatgattcgtctctataaaagatccaactctcacaaatcaaacaaatcacatttccactctccttgaatctgatttctccacaaaaaaactacatcgatcatcgataatagatcgtactacaatactatattctcaaaacgatggtgtttccggcgtgtgtacagtgcggaacaagacaaaacccctgtcggtgcaaagtggttggaccaactttagggttcgtggcttttctgataaccggaatcatcgagtggccagttggtgcggtggtgtatatctttaaacacgccaagggtcgtcgtataatgggtcatccggccagaaaagtttatcccaaagtctctcgatctattcccatttgactttcttgtcattaattataatcatgctttgtatttgcttgacaaataatgattccactttttagatatatgtgatcacataaggtatctaagtccagaattagtatccgttataatgaccaaataatgttatgtaaaattgatactttgtttcttgtcttttcaatttgatttacttgatgtgtaccttttgttttgttttgtaatatacttgtgcaagctaataaagtttcatgaaagatattcttatgattgagaaaagtattagctgcatcgtaaaaccctaaatctttgaatcaaagctatccaatccattgtataacgagtaagattggtacggatgaattatttttagaacacgagaatgtttggatttttgttctaacgaaacagaactgagaatcgcgggagaaaccaatcaaattccatgtttgacctttgtttttacctttttaccgcggtaagtattgaatagtaaaaaaagtttgcttcataaaataggattcgatcaaaaaagccgttaaaagagaaaaggatgttcgcgcgaagactctcctctctattctctatcgtaaccaaaaggtttatcaattgatctgaaaattccataaaacagcaccaatagttcctaattacgaagctgatgtagtttctctgttttaattgtagatcacaaagtcgcttgctttcgtgtccgacaacttctgctcaaaattgggtatttgctgagtttcgtcagactatacaaggtttcatttttctccaacatgttttgatcttttaagcctctatgatatctccgagcctgttcgtatattggtgtctttagtttttttggttcggattagtccaagtagtagaccaggtgttcgtggaaatgccgcagagagtttatttgttcatgactcttttaaagtttagttttttttggaattgagtacacacttggtgggaaggtgatattgcttaaaagtagagtccaatatatgt

SEQ ID NO: 43598 - DNA, 669 bp, Arabidopsis thaliana columbia
tgaatgcccccaaggaattctttttgtttcagagaactgtttacatctggtaattatttaatttcagattttcactgaccattttgttgctctttggacaaagatgcaaattccatcgatcaatcgttaatgttttgatatggtttacttgaaaaatagttaccaacaaacaactgaatttgctaattgctttcatttgtgttttcgtagtcgtatacattatagacagttgtgggaatgcgttggagctattatttgggtccggctatgatagcctgatgtatatgcttattttgtaggtggagatggtgcacagcaaacggcgtaatgcgcaaaagtttcagcttggaggcaccccgcgaaaggttatctaccacagtgaaagcaaattattgattgtgatgagaactgatctgtatgatacatgtacgtctgatatatgctgtgtagaccgctcagtgggtcagtgttatcacctacaagctcaaacctggagagactggaaagtcaatggagcttgtacgtgtgggaaatgaacatgtccttgtggttgggacgagtttgtcttctggtcatgctatactacccagtggtgaagctgaaaggtttgaaatctgttttttgccgacttttaattgacgatggagtgaagtggagctgatgtaagcg

SEQ ID NO: 43599 - DNA, 644 bp, Arabidopsis thaliana
acgactccaaggcaaacgagtacaccgatgaggatgttgcagatgatgtttacgagacaacctccgcaacaaaggagacagctggagaaacaaccacagataccgcaacctacgtcggagccgcgtcggcatgactgtagtaagttttcaccggtggcttgattggtggaccgtaactggcgccgtttaatccgttcgccatggcttcgagaatgtcgtagagagaaggaggagagatgtagattggcacggcaacgaattatgtgaagaggtagagtccgatatatagagtagatatatacaaataatatgtgtgatttttgatcttatcaaacaaacactaaaaagtaataatataaagcttaatgcaaaaattggaaaacaaaaaaagcttaatgcaaatacaagtaggattttaacagtgtaaacaattttggaagatttttatatatagttgtttgttatacaaaatcgaattgtttcaaatgtagaaattcgattggaactttatgatattggactattgggccgaacatgaatacatgtatacccaaacatatttttatcgtttaccaaaaacccattaaatgatattacgtgattggtggtatgtcggggggatatgctgtgctctgagattacga

SEQ ID NO: 43600 - DNA, 480 bp, Arabidopsis thaliana columbia
tataagaagggtacttacattcatcgattggggacacatatttatgaagagattgattataactcctcagaattaaatatttacttgccctcaaaggtaggggaatttaaatattagctttccctcaaaggtagggctctcttctcgacctttctaactttctatgcttaactgcatttctttgaaaattttgcacgttgtaatgtaatagtaataatgtctttgcactgctcttacctacttttggcttctagcttcttatgatatttttgtattgatggacttacagtaaccaccaaattgtatcagtcttatcatcaccaatcaatcatcacagagttgcaagttcgtccacgaaactttggaatcattcacctaagttttaaacttattaacgcttttggtatatccagatttccaagcaacaaacgattcagattgtcaaaagaattgtgttaggaagacgccacattgttgatg

SEQ ID NO: 43601 - DNA, 790 bp, Arabidopsis thaliana columbia
caacaataattaatttgtaataatagaactgaaaaagatggagcatataaaatctaaatggtacccacagaacaaatggaaatggagcagaagacaaaaacaaaacacccccaagtcccccccgacgactcaaaatcttatccatattattatacattactgtggagtatatgaactttatgaattaggagaaaaactaaatggacgtagttaatagagatatacaatgccaagttgcttttatatagtatgcatgtaggtcatcctttgtcccattattattcaacttgatatcccatcccttcgatttaatctccctaacaatcccctaattataaattgttttgaataaacatcataaaaactgttcctcttccttaaggatctttttctaactcagttatatacttatataagatttcctaaaaataaaggggaatttttgtttatttaaacttgtgttaattatgggaacaagtgattttttagtgtattttgggtattcctctttaaacactaactaaagtaaagtaaagaagacaagttaatgataagaaatagggcgaattttccattaatgagtattaatgagtagagtaatatacattttgcattctttaagcaatagcctaaaattccataaaccgcaaaactcgcaagaaaggaaaaaaacaaaacaaaaattaataactaaaaagccctaaattttcagataatgaaaaaaaaaaaaaaaaaaatcataaacggcgctaatgattcgtagaagcaagccgttgcggtacgttagcac

SEQ ID NO: 43602 - DNA, 489 bp, Arabidopsis thaliana columbia
atgagcagagacagagaaatgaaccggttccggattcaataaagtactctgtaaccatctgttagttctcgttagcaacattgatgtcagggaactcaatcctcgtgtaatctactgtttcagagacttgagggtcaagcaacacgtactctgaagaaatcgaagtggtgttaatcttgggattagatgaagaagtagaagaagggttaacaatggaaagcgtgagttcacggtaccagcaggggaatggaagagatcagtggaggagagactgtagtcttgagttacactgtcttgacctatgatgtctgagattgggacaagagcgaaaccaagaagctgatcttccatgtaatgtctggctctgctcatcatccagatctcacatttgagaactgcaggcttggcatcgatctgagttacatcgatcataagcttctggttgaattcagggtttttgcagctctaatgaatgatctggtggagatg

SEQ ID NO: 43603 - DNA, 175 bp, Arabidopsis thaliana columbia
ttttttcaggaatacaaaaacaattttggcctctcttgttcttcatctctctttccagaataaaaatccaatcttttaggacactcttaatattcaaaattgaatctctaaaggtttatcatcatcttccctagctctcaactaactattgcttctcttcttctttccctctcga

SEQ ID NO: 43604 - DNA, 432 bp, Arabidopsis thaliana columbia
catagttgcgtattgtgttgcgtaggtgtcgcatttacatgaactaatcaaaatatagtggagaatggagattatctttggcatctaacatgtgttagaggaaaagctaagttattaattattgtatatcatatacgattatgatgtcattatataaaaagagtcgaaagtctaggctttataccagtagtactgctgagatttttaaaataatagtaaaagagatcgaggagtaatagtttgacgtgacttgatgatcacaattgcaacgtccgtatagatagatatctttcttttattgataacaaatgagttaatgccacaaaactgcaaaagtagcgtgaagggacggcaataataatgtgaatgttgatgaatccacccccgggaccattccacgataagttcagagtcgtgcccaaattataatgt

SEQ ID NO: 43605 - DNA, 485 bp, Arabidopsis thaliana columbia
ccgattcaaacatctctttgatagaactcagggacagaggtaagatttctcggtatccagtatcagggtcaattccaaacacaacctttgttatgttcaattcatctgacggctcaacagccaggatagttacctattgtttcattagagccaagttagatcagaagagaaacgagatgacaaaacgaatcagaaacaataatttaaaagttaagaaaaagatgaaaacatcatactttgatggaaatgtagctcatctcttgaaagatgtcattctgaagctgcaatgtattttcattaagaaaagaagccgatctattgatgctaaaactggccactatagcatgacctgcatcaaaatgtgagaaacaattaacaaggaacgaatatcctaacagtgatcgataaccatatccatgaccctaaaacctataaatcagagtattgatcatccattttccctgagttaaaacttgtaagaagat

SEQ ID NO: 43606 - DNA, 577 bp, Arabidopsis thaliana columbia
tgcagtaaggatcaatgacacaaggaaataataattttaagacgtttaaaaggatataagtttagaaaatgtatttataagctgaaacacctacgagcaacattaagctttacacgctcacgccttgcttcaagttcaatcatttcctgaaccaataacaaacaccaatatcaaaggccaagcatagccagtctgtatgcaatgaaaaacttccatggtaagaacactatgctgaccacaaataattctggttaaaaaggagtttatcttacctcaggagtaggagccctttttcgctgcccattcagccaacaaatccattcaactacaacattgatcaaacaaaaatgtaactagattcgtgtatacatgccatatatcttatagatgtgcttatttcagatctgacatcactcaagtaaatgaatatatggtcgtatataacaacccattttatgttttaaagaagagttaccaggaatagaggttgggtcccctctcgtctaaacttgacccatctgttctccttcactggatagtagaaagaagcacatcagatatatactctacaaatgga

SEQ ID NO: 43607 - DNA, 521 bp, Arabidopsis thaliana columbia
catttctggcaaagtttacaaagtcgcatctgaagaggaacacagtaacagaaaacacaaaatctaaagtcagaaatttacagaaacaaacactcatttctcaaaccagtaatttaacatcttcatccaaagatgctgacaacattatcgcagcatcagatacgatatgatctaaaaggtaagagcctaggaaactaaaattggattcactgtgtataaactataaaggaccagaccaatttctagagacatggcatacgagctaattgttcttagaaattacttacttaggacaagcccaatctgcactgtaaagaggtcgatcacgttgagaagactcatcgttccgcgatttaaaagccacacggtgagaaggctcatcattcctcgatttaaaagccacacgttgagaaggatcatcattcctcgatttaaaagcacacgctgagaaggctcatcattcctcgacttaaaagctctctctttcgaaggcaaagaagattcctttgaagaaggttttg

SEQ ID NO: 43608 - DNA, 501 bp, Arabidopsis thaliana columbia
ctgtgttgatacttgttacaattgagtctttactcccactatatgtatctatgaaataagattgctttccaccgtagattgatcttcttatagacaaagtgatcaaacatagtataggtgaggtgaggtaggaaagatatgtgtgagaccttatcttgttgtagctgactttgaattttctttattctctaatgtattgataagtgtggaagaaacatttttttgataatcgaaacaaagtgatagagtactagagaatcatcattatccaaaccaaagcttatacatctctctaaacctttctagttctaacaagctcttttcttgctccacagtcattttttctctttggactagacttagactacttattgtatatacttacgataagattgctttggttgacttgttacttatcaaagtgttataattctctactttttgtaagcaaggttgctttccaaatgaagtgacttgtgatactctctcatttgttgatag

SEQ ID NO: 43609 - DNA, 471 bp, Arabidopsis thaliana columbia
tgatgaggaaggatcaactttaatcttttactttataagtagggaacacatataagtgaatctttgggtcgtgtcatgtgaataaagtctaagctgttctgtaacccagcagtgatatcccataattcttttggttcaagacaaaattcttaattcttaaaccttaccattttcatacatatagatcttagatcattttactaagctttgatttttgatctttccgatattcgtcttgcataccgtaatcctataaacattttaaacaacttttctcccaataataacatgaaagaaacatcagttctgtttgatcatgtatatatgtatttgtaccatgagtataaaaatatgtttaaaagagagggtagaaagatgattggtggtttagttttgtgggggacgaggcagagagttgtcgagaaagacaggtggcaatgattacctcttgtctgccgtgttataaacaac

SEQ ID NO: 43610 - DNA, 345 bp, Arabidopsis thaliana columbia
ctcaagacctggaccaaagatgtaatcatggaaattctcaggcatacgattacctgtatccgaagatgtatgcgcgatcacgatctcaaagtgcgtaccgctagatcgtgtagtctggagatgattctgtagagacggtaacgggtcaaacgcgtctgactgaggatgctgctgagtggaactagcctgtggttgcatctaaggaccgatttagctcaagaagtccatgccggatggagcggcagggaatgagcgaatatgagcgggacaagtgtggagaaaggatcggccatggtggtaaaggaatcagatgagttagggttgaagttgagggattgattaggg

SEQ ID NO: 43611 - DNA, 593 bp, Arabidopsis thaliana columbia
gttggatcatgggtttgtgtgatagactggtgggggataagaacccacaggccacaacagtaggaaatgggggaagcccatcaaaagagcttctagtagtttttgactttggaactttccaataaactagattcagtacacctaaaagtgaaatcttcttttgtcctcaccttttcacacaacaagaatcaataatatcaatatgttgctcttaagtaacggagttgtgtgctattttagtttttttggtatccaaaagttttggttatttgagtatgtaaattgtgtttggtttcaatatgaacacagaacttccccaatactttttaaatcctataattcagtcatattttgctcatttctatctcttattataaaccacaagtagtcccaacatcaacctggagaaactcaaaagatctttcgcatcattcattattatatcttggaatttaattttttctatcccttgaagaaaatgcggacgttcatactaggaggctaggagcggaaatcaattcctcaaccctataggctatatatagtttatatacaacaaactgaaacatgtggttgatgattttttagcagag

SEQ ID NO: 43612 - DNA, 378 bp, Arabidopsis thaliana columbia
tattttgacctaacccaaatcatcgttgagtcgaaagactaagaagttcaaactaatatatgaaactagagtagagacgcaacatagatctatatggcaaccaaatctttcgacttcaatcgataagacgtataacaataatatattgttttacaaaaaaaaaaaaaaaaaaaacaataatatttgaatttgacatgttctcaaacatgcatgcatgtgatttgattttaaaactatgcattttagatgaaacgtattaacctaattaaactgcaatataaggagatacgtttaccacccattgtgaaattcagatattcaaatctagatggaatctaatatatatacacctattaagtagttaagtactggttaaag

SEQ ID NO: 43613 - DNA, 455 bp, Arabidopsis thaliana columbia
actaataaaaaaactcatgcagattttgtgtataactgttctaagagacctctatatgatttaaatggttaaagctttggtgagccatttactaagagatggggatcaagatcatgcaagtaccatcataacctgatcaatgcttattgcaataaattcaagataaatagtgcttgtttagaaagaaaaacctttataaagttaaaacgtgaacagtagtatgtttcctccacaaaaccatcaaacccacattcaccagttcaatgtttcatagaagtagtacaagatatgaaatggctcaaaaatgtaataagaactacgatagaaaataaaacataaatcatactcaaaagcaaacactcaagatcttcctctgcctcatttcctaagcacactctttctcttcggcttcaatccacaccagattcgtctttcgctaacattgttgtcttttt

SEQ ID NO: 43614 - DNA, 507 bp, Arabidopsis thaliana columbia
caccatcttttgtttttctttctattcatttttttttttttttcattccttcattatgtgcttctaacacaatttttttaataacaccatttttgtttggtaatatttatattccgaaaatgtgatgaaaaaacaaaaacagtttcatcatttttacagataatttttcgcttttgcattttacagtattagagattatttattattttgtcatgacatttcaaaaaatgatgtcatgacgtagatgcgcgtcacttgttcgtgggcctatatattaactttattacactgaacgaaattgggcctagactcaccaaaacaatgggctcaaatagtagtcttgttctgactttaccagttaaaatagagtaaaacagttgatttcaacaaccggttaaaatatcaactgtttgaagttccggaaaacagttaaaatcatccaaccggaatatctaaccacgttcaataaccatctctcacttactcacactcgcagacatcaacttc

SEQ ID NO: 43615 - DNA, 215 bp, Arabidopsis thaliana columbia
ctgcactgggggcggggagtctgatgggagacgcgcgcggccgatgaggaggcggcggcccgggagagggagcgggagagggactgggcgcgggaggcgggaggcggggggacagagggaggcgccgccgccgccgccgcccgcccctttccgctggggagcagctgctgcagcaggagcagagcaggagacgcgtaccgccgtcgccgccgccg

SEQ ID NO: 43616 - DNA, 291 bp, Arabidopsis thaliana columbia
ctctagtaacggccgccacgtgtgctctaaatgaaattctctgctgccctttgatatcctaggtaatgatttcctccctgctctgcaactcacagaagtcggacaaggccacacacctgaagcaatgcattctgtgtttggcgatctctctcacagagaccacctagagaggttctgcgtttgcttgagggccagctagcactggagcatgcctctgctaagtctgaaggatcataaaacacaccctactggatcattggctgagatacgcggatctcggcgggtctgagc

SEQ ID NO: 43617 - DNA, 543 bp, Arabidopsis thaliana columbia
gggtaccgagcactatttaatttagtctatttcataacgtatacaatacattcttttcttattttttttcctttagaaagaccaattcatagctactgccaaatgctgactactattcaaccttcattgctatgatatgactatcgataatatgataatagaattaacgaaaaatatgtcacaatattttgctatgactacattacaatattttctacaactagtaatagaaaattctaacaaacacagattataattttgtatattcgaaacaatctaccaatcaattcacgatataaacatatgcattgtcaaagtgatatgaatcaaacatttttactggtatggaagaaattacaacacatatttatgtcgtcgacagtaatgaaagaaacataggagtttgtcgcttgtacattatcgttgcaacatctttaaacaaaggataagttagaaaaggaaacagatgcaaccaaaatagaacctaatagagacccgagtaaaaggaaggccggcgaaagaaactcccaacagttgataaat

SEQ ID NO: 43618 - DNA, 866 bp, Arabidopsis thaliana columbia
ttccagtaatgtaacgtaaagttccagtttctttacctctgcttgaatcccattatttctccaacacagagatctgagagcttcagttagtttatcgccatcttcttctagacgagtcagtataccatctgatgcacaagcaataacatcaggttgtgctttcctgacgtcttccacttccacttcagtctgttcaaaagcaaaaatacacaaccaaccaaatgcatgagctaaaacttccatagagccttttaaagagtatatattaaaaagggagaggctttatcgtaacctgatgcccctgtgccgtgatgagctggattcttattatctccagcttgtagtactgtatagcatttctcgaattttcaacatgcaatatctcagattcattctcaccaatgccttcaaatatctcttctgagttttctctctccttgtttttgtcagtgcctgtagatatacaaccagagatatgtttttggatatctgagtgatcttccacaatgacaggactcaagagcccttggatagcaaggccagcggacggctgatccatccaatttacaggatcagttgaagcaacctaaatttcaataaagaaactaagttttatagtcttcacatggtggatatttgataaatcacaaatcaatttttggactgcaagtaacctcggccatcctcctggcaaaatacataggatggcaatatcgcatcgtttccaagtttgcccagtctccaagtgattcatcagagtctgagacatagttacctcgtcatctccatcttctagaacagcaacccattcctggagtcaagaacacagtatattgtgaagcatgctaagcataagacaggttttt

SEQ ID NO: 43619 - DNA, 500 bp, Arabidopsis thaliana columbia
tctcgtctctccactattaatcctaatgtcaaaggaatcttcttctgatttgatgaaaaatacttatttaggtgtcaagattacaagagcagctgcaagtgaaagagatctccgagcagcactggaggttggtttgagcatgtcttctggacaattcagttcacatggtgtagattcaaaagtaagtatacattttaaggaaatggtatctttctttataacaattagctcgtaaaaaatacttacaatccaagtatttgaagacaagggctgagcttgaggaaattgctcttgctgaggctgatgtggccaggctgtagcagaaagttgcagaacttcaccatcagcttaaccagcaacgtcagactcattttggttccttctcagatgcacgtgatactcatcagtatctccagaatcacaatcctcaaaagtgagttgtatcacgatccctgtttcctcacactgaggagcttgtagtccaagttacattttgtgat

SEQ ID NO: 43620 - DNA, 636 bp, Arabidopsis thaliana columbia
  unsure (1)..(636): unsure at all n locations
gcactacgagagggaatattagtgttaacctaatcacgttatctatcaagcatgtgcttataactttgataacacctacatatcttttacagcgatggatgtctatctatcgaatttgtacgctttgaatatgtaaatatatacacactttttatataatgtgtgaatatatatggaaactaaaattaagataatagaggaagagccgtacagaaatggaagaaagataagtgaaaaagagagaataattaaaaggagaagattcaatatcatgcggcaaagtttctaaacgattttggagtgtctatgagtcatccctctttgtgctctaatgtaaacttcccaatcattacccacactcactttatctctacatagaatagaaatactccctatttatacatatataaacatcctaaacactgtatataaggatgtgtatcgtaagaaaaagaaaagggggcattattgatcattaaaggtatggtgtataagaagcaatgtaaagttttgtttttcccatgcgtgatctcacaaatacgtacgtcgtcttctttaattgttaaatngggtgggttaaatatctcatttgtcccacacgacatatgcacaagaaatacgaaagtaaacagaaaa

SEQ ID NO: 43621 - DNA, 543 bp, Arabidopsis thaliana columbia
gttgttatgaaatctttacatttgtaaatcatgcttactagaatctataatttggtgttattcaactaagattttaaatactttcattaacatccaatgttatgaaactccgaaaaaatttcatttcaaatggctcaaaatagatttttaaaaataatttcaaatttcaaatctaaactttacagaattgattttaatttcatgatacacccccgaaaacgccaacagttggcatgataaatacaaatcggtttaccgaaaaagaaacaaatccaaatgctagtgtgtacattggcatggaattgtccttgtttttggttgttaaagaattgcattgttaaattacagattgtatggaattatagtcttgtggtgacccaaagatactcggatctttctttcacttgtgtcgctgaaaactgaaaagaacaaataataataaaacgcaaagcaaagggcgtttcttggaagcatgagttcgcaaaaatggtgattaggcaaagcaacggcgctcaaagctttttcaacactaatctgtttgat

SEQ ID NO: 43622 - DNA, 474 bp, Arabidopsis thaliana columbia
gaagatccccttagtcttgtggtgaagcaggttctctatgcttcattcagctttcctctgtatcttggaagagaaaaatactagaggccgggaacgggaatcacgttatggattttttggtctctgacaataaaaagtagaaaatccaaactcttgttattgttatcccacaggaggaaatccgttcttgttattttcatcattggattctatttccgtgtaaaagtaactttttcccctaaaaacaagcttctctattttgtaaacaaaaaaataaagaaacagaggaaggagacgagagggagaaacagagcaacatatgagatctgtttcctaatgaataaaatgcatgagagagagggaccgagactgagactgaagtgtggcggtgagatcatacggagcgtaaaaaaataaccagaaaaagatagatgttccttttctgtgttttcttggatccaagtaaatttttga

SEQ ID NO: 43623 - DNA, 319 bp, Arabidopsis thaliana columbia
cttgaggattgtatatgtatatataacctttgttgtataaatgtcatcactatattggttgttctctataaagggatttgaaaacaaagtaaaaaagatttaatctaagataagattttttttttcttaaactatatagaaatttacagtaagaaattaaataattatgaaaaagtataagaaaatatgaagagattccacatttccattattcatcactgctgatacgatttactttctcaatttaccagtcataaagcaaaaacccagaaagaaagaagtcacaaggtagtcgctacacggcatatatgatcagaga

SEQ ID NO: 43624 - DNA, 543 bp, Arabidopsis thaliana columbia
tcaatcgaaaggagaagttaccgtcagcatctcgaggaggattagtaccaccagaaatctttccctgagtagcagatggaggaaacgtttgtagatttgagtctgcatttacaatgtatccctcaatcaaatcacagaacaatatataacacacacaattggctaaatcttatcgttattcaaattttataaaccttagattgaaaattccttcaacgcactaaatacaaaatgtctctaagctcttcctagttccgttctatcaccgattcaaaactaatacattcttacgagaatacgaaaatgtttacctgcgaatttgacggtgacatgtccaggatctggaacagcctacgatggataatggaaactagatctgatcagattgagataagaaacgagaatcgacaatgcaatccaatggacaagtgtaaagagaaggatcacagaaacatatgaacgaatcagataacgaaagagcttacgggtacagatccagaaactttctggtgatcgatgttcgtgtagcttccccggacatca

SEQ ID NO: 43625 - DNA, 512 bp, Arabidopsis thaliana columbia
ctttttaatttatttattaatcaattttgtttttaaaaaatatatatgtttgaataaaaaagaaaaaaacaacacacacctgacagctctctttcccttttcccgttctttgtcgtcctttgtttcgtctttcattcattctcctttgtgttttctctttttggagattttaacttcagtttttgtctaattagggttttaatttaaattggagggaaattttagatgcagtgacgtagtttttgggtaaattttcgtcggattctgaattgtctccggcgacatggcttctaatctccccatgagccctcaattggagcagatccatggcgaaatccgtgaccatttccgagccctcgcgtatgttttacatgttatcctcttgttcaattttctaactatctctgtcgtggttacgaaacactgtgatatatatttaagggttttggaattttttgattatgtgtgctcaataggatttatgcgtgttttgcttaatgctgatgataaga

SEQ ID NO: 43626 - DNA, 883 bp, Arabidopsis thaliana columbia
atgatcgaaagtttgacaaaaaagagtgttgtttctatatgattttcaacttttaactatgtaaaattttctattcgaatcttcaacatcgacttaagtaaatattaaacacaaatgatctccaacttgtttattaaatatactgttaacaactatgtgacaatgtttataatactctcagtctatgatctcgccaaggaatggttttgtaaccgaatcccctgaacgcattaatttcaagaccatgactgcaaatagataaatttaacgcatacaaaataaaataaaaatattatactactaattaagtactaaaataaagaatatatagccagtaagattcaacttgttatgaaatgagaagtaacattaactaattacaagataggatattaaacctcgtgtgatatggaagaaaataaacttttgactaatttacatatgcaaaagttgtagtaacctgaaaaaaaaaaagaattctaaaaacaaaggtataccttgtaggaaatttcgtattatatagttagaataaagaatgtactaaatggaagaaaaaaatatatatatgaatctagccgagactatcaatggccaacaccgggactaggaacggatcggagataccgatcaacggtggagagatgtcgtgatcggagctttccggcgaagacggccgcgtgaccctttttgctcggtgtcgagttgggaatttcccctttggtagagcacttaacgtactagttttggtcacatgaggcatgtgactcttctcttcctctctcaccgtcaagttttcttgtttcttcacctccaacagttttcttgaagataccagcgaaggcaaggctgacacgatgacggcaaagactatgaagagccagat

SEQ ID NO: 43627 - DNA, 437 bp, Arabidopsis thaliana columbia
tctagtagatgccttattattctctttgtttattacctcttataaacacttttcaattgtttgattcgtttgcaatctcaaatctagttacatctcaattttcgaatgccttttgtaatgtttatgaaaaagatacctacaactaattttgttggtcaatgtataatatccagatggtggtattatggaccattttcaactaaatgatcctaaaccttgggtcaaatgtccccctaaccatattttgtatccgtgccatcatcatagattcaacataaaattgttcactttatatcgatgcatacaatttagtacatattaaacaattaaaaatcgtaatccggtaataacaagtatcaatatgatatttacgacttacacgacattattaatgtatgtcattgtctagacatcaaccaacttgtcaacaaactctt

SEQ ID NO: 43628 - DNA, 241 bp, Arabidopsis thaliana columbia
ccccaacgctggatttgaaactgaatcgtagtattgaaatctggctgaagatttgtgtttaattttttcgaatttttgtggaattttagggtgttgagtactctaatggagtcggatctagaagatccatgttggatatcaaatcggatccgcttaagccacggcttgattcagagtgtgagacaagctgatgatcatcggtcattagcatgagcttatgcttcttacgcgagaaagctta

SEQ ID NO: 43629 - DNA, 355 bp, Arabidopsis thaliana columbia
ttcatggcggaatttgattcatagtacgtttaagtttagggtaattttttttttttggttttttttttttgccgaatcctaaaattttcagataatgaagctcaaagcttgttttcggtttgattcgaatgtagatttcgattttctattctttgatttcatcttggatttgtgtagtcttgaatcaagttttgagatttattcgtttgatcatcaatttcaatctctcatgatcatttgctcagctaaaaaatggatcaagagtgtccctttgctgtcgaaagcataatccggtaatgccctttcctgagaaacatcgacatgcctactcaatttgtccttctcgtccttgagt

SEQ ID NO: 43630 - DNA, 961 bp, Arabidopsis thaliana columbia
aatgcgagccatctcattccctggaacggctcctgattgggcctccgatgttaatgaggatcgttggattgatcagcttcgaagattgagaaccacttctcaataagctttctccaatctcgatagttgttttcgtttaagatctttctcaatgttgttcaatgtgacttcttttaaacattcaatataaaaaccagagaatttcaccactctttaagtaacactaaccagtgtttttgctatacaaaacctttacttgatgagtatagtatgttgtatctgatgattcacacacatatatacatagatacgtacatagagttcaaagtatggcctcgctcaactgcatctggaccttgtctgaaagactgaaaccttctgatgctttattatgtgtatgatgacaaatacggtgataaagtttgaatcttgaacatgagagtctggttcttttttttaaatgtaatctgcaacctgaagttcatgaagtctgtcacggttgctccttattactctagctttgtcccctcttatctccagaacctgaagaaacaattccagtttcagaatctctgtgtggacttatgtaagaaagacatgaaacgcgacgagtcaagaaccaatattgctagatacctctggtctagagtcaagaacaccactggacattcctacatcaactctccatatgccgcaaccatattcactatcaacaacaaaaactcatgtttcaagattgtcgtgaagtttctctattacaagttttggggttgagtttgataaatgtaccagttaacccctgataactggggagtatgccgaccaccatcgctttggacctacagcttcaagagtgtcgtgaagaattttatttacctgataagaaaaagaagtcaggaaacacattaaaccaagctgatgatgatatctgtcttagcagttttgagattttggtgattaa

SEQ ID NO: 43631 - DNA, 578 bp, Arabidopsis thaliana columbia
ataatgttcaatgaagaaccacaaaatgtaaagtgtctgtgatctattattcattcttgtaagtttttctctccacaattcacattttctagaatcaaacctcaaattagatgttaaaacattaaacctccaaactggttctctgcctccggtagtcaccagtatcagatgcgctcctccggtgacggcaatgcctttccgattttcctttagtaaaagccctgggccaatttgggatttggccaattattgaatataacattataaactttaaaaaacaaaacattaaaccaccaaacgaaattttaatttatttatttaagaatcatactttgttttactttattttcaaaatcatgctgacaaaaaaaaaacgtacagtaaaatacactactgatttacgatttttttttctaaataaattatttacaaatggtattgtgaattgttttgtcaattacgaaaatatagggtcgcttattgcaacatatgaaacgtataggaactaaattaaaaaatacaaataaaggtcttctccttcccgtctagatgtagaaatccctaaacttgctactgtt

SEQ ID NO: 43632 - DNA, 440 bp, Arabidopsis thaliana columbia
caactatacttcctatgcattagaactcaaggtaactaattgatatcctataaaacatatggccaaagcaattaatgagctaagaggttgctgtaatggtatttgtcaacctgcataaaacagaaaagcgcggaagatttggagaatgagaagttaggacataacatagatgtttctacgttgatcaagtcgatagaagatctatctacggctgcaaaacatatatccctagagaaagaggtaatgacactagtttacatttgacaaagtgacaagtatagtgactatattgaaagtagtcttgaatgtactgtgcaggcaattaaaggagctcttaaagtgagagagcttaaatgacagattaatgatggcagaacgagctttaacagaccgagatggactctctgaaaagaccatggtacaagcatttgatatacgga

SEQ ID NO: 43633 - DNA, 567 bp, Arabidopsis thaliana columbia
agtcgactctacccattacaacgtattatcccctcaaagcgaaaaacttgtactttccattgaattcaagccctgagaccggacactgaaactgtgcactagtcgtatcttgcgatgaaccatcagaaccagcaacaggcgtaactgtaatattcaccatatctttcaaacccttaatgtacgagaattgtttaggcaacctcttagacaacaaagcgtgcaccaaaacttctttattgaacaaattcccaaggagatcaatcacgcacggctcagccaaaggctcgttagacaaagcacaattcaaccatttggagagcctctgctcattaggatcaaccttgtcaggtttcttctccgcgtacatattgagatagcaatcgcgagactcggctcccgttgccccaccatctcctccacctccacggaggcgagggaaaagagtgagcatggatacagaaggaagcttcgatacttggatccgtgtagaccattcagaagcttcccatctagagtaatcgagcaagccgaaaacgatatacgctgcgacgattcgagtaaggaagt

SEQ ID NO: 43634 - DNA, 513 bp, Arabidopsis thaliana columbia
gtcgactctacacctctgccatatggagactgagacatagtggcaaaaaatccatgcacaaaagctttaactacattatctcaaattaaaaacaggattcaaacaacaacaaaagttgaacaaaaagagtaaaagaccatgggaaaatgtattattttcgtcaattcttatctccttattttatctactaacattctataaatacacacttagacatataagcttatagaaaccaaaaaccatactcaagactcattatgactagctctatgaagaaaatgattcttatcattttcatcacaaccatggttttatctccgacaagttttatctcttgtctcgcaggtaagtaaactgcttagttaactgatttaatttgagaatttacctatcaatttagagttttttttatgtatctctattcgcatatgaagatgttcatgctactgaaagtcccacgaaccagcaggcaagaacattgacaaacctcatcactaaataatcagaacatta

SEQ ID NO: 43635 - DNA, 512 bp, Arabidopsis thaliana columbia
acacaaaaatcatagatgtgttcttggctcttacacaaacaaaataaggaaaaaaaacgagtcccaacattttcaagaactttatcaccatgccacacaaaaattcgtaccaacaattagtttggccaattttaatggcctccgttacattttgaattgcgtccatcacttcatcccacttacaatactttgtccccttaaatcattacaatatttttgtaaccaaataactaaatctttaaccggactgccaagtgccaagtgatctcaaaatcaacaaaaatttgcattttcttactttttttttttttgaacgacattgtattttcttacttaatctgaagttatagataactaataaagtgtatatcaaagtttttttcaatgtttaaaaagacgcgaacacatctaactggaagtgtgcctcttgtcttacggatgtccttctagtagaacatctataaaaatctgaaaatctttcggaaaaacaaaaaaaaaaacttacaaattgt

SEQ ID NO: 43636 - DNA, 465 bp, Arabidopsis thaliana columbia
gatacattgcttatctttttgatgtataacttgttggcttttgcaaagtcaggctacggaccttcctaagagttaatgtatcaaattctttgccaagattgtatttaccggagtttaaacttcgcaaaatgcggaacatttttgagtttgaaaggattttgtatgatgccaacatatattatggtatagattatgctaaaaaagatagatttctgttactttggcaaataatgacaatgattgtgagttgaggaatcaaagtctcagtaatacgacaccgtttgagtcaaaacgtttctgtccaattccagtctggtcccgggattaataaaatagacaggccttcccaggtccatttagtcacatggatgagtcagagactaaaatatctaacagtgatctgatgtgataagggtgcacatatcgctcgttgtgattcacgagatgtaatctaccagcgtacga

SEQ ID NO: 43637 - DNA, 1528 bp, Arabidopsis thaliana columbia
caaacaataaagaagggcctctcacggcaaatcccacctgacgtggtcacactcccaccccatttcacattggctctaattgttgtttggtgacatgagctggtttgcgacatctctttcgccgtggacctggattagtcaaatctattcaaagaaaatgtacattttacaacttccttgaaatttcaagaaaatattgctttcaaacgatctaactattttcagaaatatacaaaaaatctgtttactttctagaaaaattcacaaacaaaaaaattatagtttagttttgtattcaaactgaccattgtggttgtataataacaaaattaagagcgtcgttaactatttaaagaagaacaaaaacaaaaagtcttaaatgattctacatgtgaccatttatttgagaattaattttaagatatgttcataagacgaattatattatattttgtaggggttttcttttttaacaaaataatgtttctatttggtttttattttatttttattttgtatactcgaaagtgtaaataatactgtaaaatagaaaatgataatttctattaactttagatagaaaacaaaattctaaagcccaaaattgtcgtgtgtatgtatttgaaaaaattagttggtaaatttttcttttcatatatatgataccaacatgggtggattaggaaatgaagcgaaaattctagatacttttaagaaatttgagtttaattatataaaatgtggaaactaattaagatcttcgtcgtatataatgaacaagcatcaactggaatgatttaagggaccggagatttaaagtacatatatacattcttttattgatatcaatataagttagtacaaaatgctgagtataattggatatgaaaatgaatatgtctaataatcagctcttgacttcttagaaaacaatgcccacccttttctcatgcctctttagccattgtataggacattcgttttcgaccggctccaaaatcccatcttctagcgcaatcgagtctcatgccgcaagtttcctcgcggcactatggatttcgatcgaagccattttatttgtgatcccggatttatcagtagtcttaacgacatgatgccatgtcgatgttgggctttcttgatgggcctgatttctcatgagctttggtcaaacatttatagtttatgagttatacgcatacgttatcagtctcaagaaatcgagtttcagtttcatatcaagacaaaatcacatgacgtacgtacgagagtaacaagtctttcaatcgaatctcaacggatccataacaccgtatactgacatagaggataaaataacatgttatttattagaccataatcagaactacgaaaaacgacattatccataatcaaaaactcatttctatatatcgtagcgatagataatctcacacttaaaacacatgaacgaaaaaccaacacacacaataaagaccgtccattaaaacgatctagtgcattacatcaaagatgtcgtcgtggggtt

SEQ ID NO: 43638 - DNA, 463 bp, Arabidopsis thaliana columbia
tcccccgtgtgaatacatcgggataaaattaccgacaacaaaaaattaaaaacaaattcatggatgattataagaattgtggaacgaattttcaattgtcagagattatattagaaaactgtaacaaataaaaagtgagcaagaatcgtggacacatggttacatgtgagatacttctacctaaagatcccattcctcttaaccagaatcttttcctctttctctaatcatatcaaaagctcccttaaccatctctctatagctgcatatatatatataagcaaaatctgttctcttcactagattacaaaaccagtcaccaaaaaaataaaaacttgtatttttgttttctgtgatctctctaatggagcaacagcaacaacaacaactaccttctactactactagacccaagcccaagctactaaaccggctcaatacctacgtcggttcgagccgggtt

SEQ ID NO: 43639 - DNA, 547 bp, Arabidopsis thaliana columbia
caagttgataataatataaacatttggacatatataaaaataaatataacactagacaaattatattgtaggacaaattttacacatgaggccctaaaaactttttatattaggtggcctaaaacaaatgtttcggcttttttatgaacgggccgggcttggattcggccatattttgagttcatgccttttaatatggcaagaaaaaggttagaaactagactaattgtagattgtaagtttgtaaccgtaatgagatactgcaaatgggtaaaaatcgtattattccataaaccacaaatggagaagtcaaagtttggcaaatatcgcaacaaaaaggttgatatatcacatgcatattatgtagctacaccgacatatcaaagttctcctatcaaattttaaaaaacataaatcaccaaccctactcacacccaccaatgcagcccatcattcttcccaaatctataaacacaacacaataatacgacagtgacaattttagcttttaaagaataacgttttcatgtgactggataaaacgacg

SEQ ID NO: 43640 - DNA, 440 bp, Arabidopsis thaliana columbia
ttgcttttctgttttcttgattactaggttaatatatgggaagagagaagagtctttggatcccgttcaaagagtcttaaagatgtaatgctctcagaagaagctccaccaccacttgatgtcagtaaaaagcgatttcggggatctaaatctgcaaaacgagattcaaaatctaccaaaacggtaacaatttttccctgtgtctctaattaaaccgtagttatttgttcaggggttttgcctgagtctgaattttttggttcattatctcctcacttgtcttgtttaataccagaaattatcaagtggaggtgtgtccgagaagatagtatctgcattcaatttggttcgtgcagagaactcaaatgcagagacagagatgaacgaatgcaagtcctgcggtagacgtatcagtaagactggagaagatgttgaagatg

SEQ ID NO: 43641 - DNA, 179 bp, Arabidopsis thaliana columbia
gtttagtgttagaataagtgttttgtcaccccccccccccccaaaaaaaaaaagacgtttcacaacatgcgagtacatttcctccatcataattgcgaatcgataattagtatagtcctaattggagacctaagccaggtgtatgcttttaacaactctgtccactattaatcgttggc

SEQ ID NO: 43642 - DNA, 307 bp, Arabidopsis thaliana columbia
ggaaacctaatatacttcgcaacttgattgttttgttgtttgatgatgaagctgaggaagggtcccatgaactgctgcgatccattaagacaaagagctcagaaaaatctccactcacaaatcttttgcaaacgctcccctgtcttatccatcagtacctgtgtggtgaggactctagtgcaaatactcttctctctctcgctcagagacacacactcacatgatcatatcttttctctaacacgtgtgtgttacactcactgacgcagtttgcttgcttgggaatctgcaaagccatcaatgatga

SEQ ID NO: 43643 - DNA, 549 bp, Arabidopsis thaliana columbia
ctactttcataatttaacataaactatgctatttttgactaaaccttaagtgtttacatactacgaggatcctaaccaaaaaggaattcataaagtgtgatctctgaataataaaaagaaaactataaatatatggggtaaatagcttacttggtgagatttcttgaaataaaattggaccaagatcatgaattcgtgtttcgacgggttatagaactttaaattattacataaccaaccaaaaactgaaaaaggttactttagttattacaacaaaacaatcgacgatcaagtaaccccaaacgtggtgtatatcattaaattcttgattaaccactagacaagaggttttcgattttgatttcagtataattgcatatattgaacccaaagaagcaaaccacaaacgaaacaaattgcatataagaaagttcaggaaaaaaaatagtgaagttttttcttccaaatatcacggcgcaagtaatgcaaagtattaacatcaccccaaatggattcaagtcaagttgcattttcttacatacaattgga

SEQ ID NO: 43644 - DNA, 602 bp, Arabidopsis thaliana columbia
actgcatatagtttggatgtaataaataattcaacattaataaaaggttaaaataaaaagaggtagaagaagtactcatgagtactagtccccgacttcatcatgatgatgatgatcaacatcatccaccattattcactgtagatacaattatgcatagtgagagcccaacttgtgttataaaccatcttcatttaatcctctcctccttagtctaccctcttccccatgttccccactctatcctttttctcatcataattttctaagaaaaatttgaactttaatcttgacatatactagtggcagcatgaacagagactaaaggaaagaaacaaagatcgataagagaaaacgaagatagttttcattcattagtcttttcttttaatcgaatatagcatttatacagatcaaatacagagatgaatataagattccggttagaaccagaagagatgaatgtgatgatgccattttaaatgaatattcacactctaacgtgctctgaaactcatgttttatggcttcatcagctttgctttgacatattccaaaactccttctacgtcaaccgtccaagcaactgatatcggtgaata

SEQ ID NO: 43645 - DNA, 584 bp, Arabidopsis thaliana columbia
ctttgctatgggcttcaacataccatgctggagagtaccttgaccctgtggcagttgctgagtcaaaagccagaagaagaagagccaaaaaaatggatagtattgaggacgaaaaagcgaaacctctgaaggtgggaaggctaagaatactcaacagactgatgttggatcaacaaaaaacacccctgtattgttaagtcccaagcaaatggctgtagaaggatttaaggctcaaagtgaaatggttattgacaatctcgataggctcattaccgcatgggaagaaaggaaagagtctgttattgttgaaggtgtccatttaagcctcaactttgtggtaagactcaatttgttctctttaacacatttcattttgaaagttgtaattctaacttctaacttgttttcagatgggactgatgaaaaagcatccttctatagttcctttcatggtatacatcgcaaacgaggagaaacatttggaacgatttgcagttagagctaagtacatgaccctggacccagagaaaaacaagtatgtaaaatatatacgtaacatcagaccaatacaggattacttgtgt

SEQ ID NO: 43646 - DNA, 491 bp, Arabidopsis thaliana columbia
ctcttagaatcatttgcaactagagacaaggagaggatcgacgcagctattctcaaatatacatcctcggaatcttgaagaacattcgacaaaaccgcactctttgggttacctttcccaaatcattgaatatgatgtaacttatattgaacaacacagcatcatccttcttcttgtaagatgtcatactgaataagacagatgcaacattttgatctctttcttttgtttgtttgcctttatgtcttcataacccacatacttatagtatatatgtgcaaaatctgcagtgacagcttactagttttggttacttgataagtatttttggtccccgcaagatctttaaaccagattgcaacttgtctcatatggtatgatgatcaattaagaaactatctcattcggatatagtcaacctaattttattagtcactataattattgataatttaccttaataacatggttaattactagtaaaccctgaa

SEQ ID NO: 43647 - DNA, 558 bp, Arabidopsis thaliana columbia
atgggtggtcgaacctgaccgtattcttggatctattcaactgtagcatcagtccaccttccttacctcatctttcctaactttttaatacctttttaatttgctaaaaacatcactactatttatatttgatctctaattactgtttcaactctgaatattccgtaatccttatattaatatgtccaaaaatatataatttctggactttcccttgagatgggaatatgaaagaattgcatcatttacctaatcatatgaacacaaatagatattggaaaaaatgtggttttatttttcatgttttgttcgattatctttatctttatcccaaaaaaaaaaaaatcattcgattatatctaaaattcaaaatagattacagaaatataatttattagcaaaacggcatgtttaaagcgtttgaagttattaaatcattagtaagagtatataagaatgtaattagtggaaatacatagtaagtatcattggtttttgcccatatggtgagcaattttttattttaagaagggaaaatcaatttgtacatagatttat

SEQ ID NO: 43648 - DNA, 510 bp, Arabidopsis thaliana columbia
ataattctcatgattttatcgaagatgtcaaagggacattctcatgaatcatgattttatatgcttcaaatcgtatgcatgaccaacactgtgtacaatctttagatatttctttgttcatcagttcatccaaacacgaaagatcacactactagcccataatactttaaacctgaacaaaactttataaccggtttaaatatggtaaaaactattttcaccgtacaaagaaggaaggcacacgtgcgatgactctcagcaatcatgcaacagctcagatctcgaacgctaccgaatccccaaaaatcagagataaaggcaaaaaaaacagaaaacaaataaaggatctgcaataacactcttcacgtcctcccgccctttttttcagggcgccaaaaaaaaaaaaaaaactgttatcacaacacgctcgtactgaaaaaacatttttcctttattttctttttaatacaataataaagtgttttaaaaaagacagaacccgagaaacga

SEQ ID NO: 43649 - DNA, 473 bp, Arabidopsis thaliana columbia
tcgtttcacacattgtaattgacataaattttaatatcttttaaagcaaagcataagtaaaattatatagagtatttcttcaacacatttccggacgatatcaccacgaaaaatatcctatatcacctatgtgtcatgactcatgaccataaggaaggaaaaatgtatttttatgatcaaacggttttcactttttttattattcattctagaaaaaaattataatcgttttctttcattcctacgatacaataattcataacgatcttttagaatttttgttttgttttctgtgtgtatgggtaaatatctttcatacgtagacagatacataacaattaaagctggtgaagtaataattgtgaagagacagagaaattgaaaaaagagagtttgtttttcgtctaagtaaataccgatgatgccctcacctttctaattccctcctttgtccctttccattttcatgttta

SEQ ID NO: 43650 - DNA, 504 bp, Arabidopsis thaliana columbia
ttgtttgaacaaaactaatgacatttgcttctcacttcacaaccaatcaggtttttttctttattgagacaaaaaaaaaacaatttaacagagaagagaagagaatccaattgggtcacgttgaatgggaaactgggctttcttctatcccaaccttttttgtttttgaggcccaataagattcgatgaaaagggttctgatattacattgagcaccttatacaaacaccagctccagaacccaaattcactactgaattaactttgctctgcaactgtctgatgaatcacgtatttcatgggtagaactaaaacaagatacagatttttattgaagagtgtatggtcatttactatacaaataattgtctctgtttcgtagtgactaaatgaacaagttgtggaaaaaaatggggtcttcaatgattcttgcttcttctaagaaaatggtcagaccaagttgcgaaaaaatggggactcaaggtaccatgttacgtcctggag

SEQ ID NO: 43651 - DNA, 279 bp, Arabidopsis thaliana columbia
tgcatgcacattattcacttttgtcttttgcaatttttgttattgtaaaaaaaggaaaaacaaatgtaaaagagagagagaccagaaaggtctaactaaacctaaagagtcaatgaaatgtgtttctttcttgtgggattaatcaattcactctttaacacttctttataccattgaagaaattagatgaaagagtcacgagttgcttaccaaatccctcacaagaattgagaactgataaaccaaattgagaagattaaatatcacgtctccttttga

SEQ ID NO: 43652 - DNA, 471 bp, Arabidopsis thaliana columbia
ggagataagttggttgattacacacgtgtcacttagacagagcgagtagactttgatgccggtaaaagatattttagattatctagctcgctaggccacgttggcggatatttgcactttttctttttttaaaaagaaaaaaaactaggctctacgaattttccggtcaccttctccgatctctgatccgatatttttccacatgttgttgagctttaaaggatttgaaaccgttatgaaagttatgaaaacgaagagtgtgtgaaacatgacgaaggaagttatggtgagcgattacggtgacgacgacggagaagacgccggcgcggcgatgaatataggattccggaatgtggaaattggtttacccacggtgatgatttgactccgttatctcaatatctagtctcgtcgattctcgcgttacgtttcagcatgatcccagaacgatgccgtacaattcacgacgtc

SEQ ID NO: 43653 - DNA, 421 bp, Arabidopsis thaliana columbia
cttacacatattatattacactaaaatgtcaataatcgcgaatgtttgcggcagttgagatgaacaaattagattagttttaatttataattcacaaactatatttataaattataatgagagtacaataaaaataattgaaattatcgtaactaaatataaacggtttttacatataagtaaagttggtttacggcagtttataattcacacaaaaaataaagcgaactaaattgctaactaatttgtccattctaacaatatcaccagtcaaacttaatatttgataggttttgacaatctaatacaaaccgtgaataatcaagagtaatctaaatttatcttatattaagactgcaagttttgtggattaagtcagcatattcgttctatatttttataacgatttatgaagaaaatt

SEQ ID NO: 43654 - DNA, 429 bp, Arabidopsis thaliana columbia
aaattcaccggatcaataatgacatttgtcagttttacctcatagtcgtatcgagtgtcttacttacttgttatccaaatgttgagggatgtgtgttttaccattccgattccttttggaaaccctagagtactgtttctcaaaccatgaggtgtgcataccagagtaatcagacccatcactccatatctgggaaaccaaattacaaaaattgcatcaagattgaaagcttcttagttcgtacattgacaaaagaaatgtttcattacgacaagacgataacagagacttgacattacgccaaataagtgttgtgcaaaagcattcgcattacgacgcacatctagcatagccgttctagcttccaaaccttttgcttagagattttgaagtctgtcaggagatgatgtcaaatcaaaacgagactta

SEQ ID NO: 43655 - DNA, 489 bp, Arabidopsis thaliana columbia
caaatatttcaaatcacatcatcaaagtttgatatatagtttccaattacgaccatttggagaatttttacggacctgcttatcaaaaggatgtcggaaatcatcagcatcgagatctttgaacaagagaggaggtacagctctgcaaatcggaaccctaaccctaaatcttccaactttctccgcaccgaaaccgatataactcactgaacgacgaccagagctaaatcccactttcttcggtagtctatatcccaaactacgagacaattcgccgctctgattgtaacagagggacaaaaccggagctgagactgaaaccgccatgagagaagagaggtgcgtaagttaagagttgagtgctattgtacgccggtgaagaagagaagatatagaatgatataaatttgggttctctgcggttgcgtttcggagacgacaagcgtttgccgtccacaaccgtagtttaatggtttagcatttgacgcg

SEQ ID NO: 43656 - DNA, 516 bp, Arabidopsis thaliana columbia
tcgaaaatctattttacggtataagttttggtctatttttttttattatccagtctgaaagtttgataataacagtttgaaaaatatttttttctattatcctaagagtccgaaaaatataaagatgattttcattgattctagcgaccattacctttttcgaggtggcaaacaaaaaataaaaaattgacaaatttttcatttttgtaaggcaaattgtaaataaattcaaattcttttaagaaattaaataagtaactttataatattttgatccacagtttgtttagtagactaacaaaccaactatataaataaaatcatcgtttcttgaatcccataaacccaaaattgtaaataaaacaaaatgcttttaggatactaaataagtaactttttaatatttttgatccacgatttgtgtagtagacaaacaaggcaactatataagtaacatcatcgtttcttcaatcccataacccaaaaattctctcacagaaaaccaaaaaaaaaatg

SEQ ID NO: 43657 - DNA, 565 bp, Arabidopsis thaliana columbia
tggtcctcccaaagaacacacaggcgatatgtttccacctaagaagaacctctcaggtacacaagaagctctgctcttgtatccgcttccccatggaaatgtgattcccccagctataccaaagttcagagcagcacgataaaacccgagtggaacagcatatcgaaggtcgatttcctgcaaaaggacaagaaaccctcaacatgatgtatggcaaacataaaagaaccacatatgttataaaagggctaaccaatcttttcattcactgctacaataagtaaagagtgtcagatgtacttcggaagttatggataaatggtgcaaaagcataaacgaggaactaggtgccatggaagttttctgagtaatatatttgtgctacaactttccacactgtaatatataggtttatgtaaattctgacataagaatgaagaatccaaacctggcgcaaaaagcggagagttcgactatcaggtgcaagaccacgtatttgagaagtcgagatgaaagagtaactcgtgttgccctcaagatgagttctctggtcaatttgaagtgt

SEQ ID NO: 43658 - DNA, 335 bp, Arabidopsis thaliana columbia
ttttaaagttaaaatgaattgtaacaaatctcacctctgctttccctaatcgagcacccgtttgtgggttaaccgcaacagagccaatgacaatgagatccactttaatttgctcatcaaggccaatcgctcttccatatttggctactcctacagaagtgcaagcctccatgatcgtttcgggttgcaacaaatcagattctagtacagagaagaatcctgttcttagactcggttgaggagtcaacagcttcttttcagcgacatttacacaagacaatgagtaaaatccgggctcatgattagacttgctaacatcatcagcagaggagaga

SEQ ID NO: 43659 - DNA, 562 bp, Arabidopsis thaliana columbia
aaaatgattacaacacatacttttaaaatattccgttgcctatgattttgttttgtgttgtggtactcaactttggatttggatctgtgatgtaggcctgcagcttttatttcaaataatatatatatatttcatctccgaaggaaactaagtaatcgaaatggtgtattcaattcaatatttcacttatcatgtaaattgagaaactaaggtaagactgtaagagaatgctcatacccttctgcactacctccaaatagacgaggctctactgaaaaaatcggaataatgtgaaataacaagttgctgctttggacgccatatctcaatttgctatatctacaaattaacgataccaaagtgctagtaggggctaaatgcagaaatttaagccattcaccattacggatagaacatgaaattctcatttaagctatgctacttgaatatgttctcgttaagaattgtttcacctagtgcaagatccgcggtcatgctcaattaagtgctaaaagttagactagtagacgaaatttgaatccgatatatatattaccttggt

SEQ ID NO: 43660 - DNA, 569 bp, Arabidopsis thaliana columbia
taagattacttagttttatggtttccctgttttcgttgcttgtcagtaaagaagaccctttcacttgtgttaagattaatattagcaccaacacctaagattatttttgtcatcatgcctatattccttcgcctaacaataatataaaccatgtatgatgtagtgggattgccaaaatatgtgaagtaaacattgtacaagcacctcgcgcgactaacataggggtctttcaggataaccctaacaacctacatcgggttgttttggagggagactttgagggtgtaaggttagtatctgttaggaattctagttaatccttttgttcgcactagctataaacaacctgttctcaactacattggtttgatttttgttttggagtagaaatatacttgcaaaggctgcagctggaggcggtggaagctctgtgcgatctctattagaggcgcaaaacgctgatggtcaatcggctcttcacttagcttgcagacgtggcagtgctgaacttgtggaggctatactggagtatggggaggctaatgtagatatccgtggacaagatgggg

SEQ ID NO: 43661 - DNA, 547 bp, Arabidopsis thaliana columbia
agtaacgtcgtgctctaaagctttagatatgaaccaaccataatccaaactcctgaaaatgtttcgatccaactccaaccttggaaggcaaaattttcctttcccaaaatgcaagaaagcggaacccgactcacgtcacggtaaggttaaatgacaataacatcaccttcagcatctgcggggtcggagacatcatatcaccgtactttcccactgtcattaacattgagtcgtcgtccagatcaatagcactgtcgtcgtgattaggggcgtgaaaggacgttaagttttcggaaatatcagtaggtttttcatcatccatgcgactgggatttgtttcgactcccatccgtgacctctccaatgatgcgccatcttgcgcatttgacgtagatgactcgttaccaacaacttttggggaatttctgaggacgagtcctcccgggccggactggtcagagtccaggcctgctttctgcaaagtgcttggtgtgtaatgcatgaatccaccttctctgcctgccataacatcatctcatggaaaaag

SEQ ID NO: 43662 - DNA, 490 bp, Arabidopsis thaliana columbia
gaagacttcacacttcttttctcttctttcctgttttgctttgctaagttgtttccaggaaagaagaaagaagaagttgtggagtcttttgatgaagatagtgacagtgattactatatttaccctagtccattcgatattgaagagaattccaacagtgaggaatacaatcaaatcttcattgttatatgttaccctagtcctaatacatactatatttatataatggtagtaccatacttaccattaccctgagtgagtttcaacgatgattgaaattgaattaaggcatcccacaattaattagattattaatgtcaaagacaaaaattgtgtaggcactaagaataagataacaatcaacaaattgtgtttttttttctcctcaccctgaaatgttcaaaactcaagatgaacgaaaaaaacaaagatgtaacaaaactgaaccaaatcttccaagtatgtgatattaactcaaaacttatataag

SEQ ID NO: 43663 - DNA, 867 bp, Arabidopsis thaliana columbia
taagagaaatatttattaattttttttattgacttatctttatctttaaataaataatattttctaaaaacatgattttaaaatacgttacattaatattttttaaatagggcaccatatactgattacggatattctcccaaaactgtaatttcaaaagattgaactatccaactcgatcaaccaaatgtttcgtctaggaaaacagaataaaaaaaaatacagtcgtgaaaatcttaatctaactgttttattttcacacatttacgtttatcgtttaatttgtacttcaaaaaaattgcaatcttatgttattcaatatagataaaatagaaatgtcataaatcaaagagacgtgtatttaatctagtattttaaatgatttgtataaaatttataaatcttatgttattcaatcatgaagtttaaaagctttaatgaaatctagtgttattgaattaaagatttaaaaatctactttaaaatccaatagtttgtggttcttattaattttgaaggatttgagaggatttgagaagactactttagtctaaaatatagaaatccaaatcctacagttttagatgaaatttgaaaagattttacaataaatcacatcaacttccctaaactcatacaaaaactcactaaaactcaaatcattcaaaacgtaagatccaatacactttattaaaaaatatcaattatagaactagcaaaattgggatgaaatctagaatgttatattattgaatgtacctttaaagatttacttatttgatatttgcataagtttttgtttttttgggtaaaggaagctttcattaatctaaatcctcataagaggtggattcatacaaattaagc

SEQ ID NO: 43664 - DNA, 573 bp, Arabidopsis thaliana columbia
tgcttatagcttttagttttagtagctagtctatccatgacaaaattcatcaatgagaatattcattaggatccttctgcttccgtaaatgcacgagaatacacacgtataaatagtttcttcttaggaaaaatactactatatagcaaaacatatacatttatatcttcaaaataaaattacgagattgataaaactctaaatattattctgtcttaagactatttgacccaattactcttaaaatatattagtggttggtctgatatagaatatatcttgtcaacatttatcctctttaattatcaaaaaaaaaaaacagttctccttattttggttctttcccttgaaagtgaatttcgtggtactgaaaaataatttgaatgtcataaaatattagttatataactctttctccaagataaaaacaaaataatttttcgcaaaaaacatttaaaaatctaaccaagttgttggatcgttttcatgagcattaattaattaaataaatccgcgaagaaaggagaaaaaaaatcccaccaagccatcaaacgtgttacggagatgggtgat

SEQ ID NO: 43665 - DNA, 586 bp, Arabidopsis thaliana columbia
tacgcatgcatttatagcaacttgtattatatccaaatccttggatttctttgcacaatagtttgaacttggttcacgtcacggtatgagtttctcatagacgctattaacatcaatcctcaaaatacataaaagaaacattggtcaaatattaaacataaatgggatttcaaccgtcaattaatcattaatcttatttgaatgcttaagaattattaagagttgtaaaatataagccgactagattatgatcagagaggttgatttattattataattactaattaaatcatggggtcagcaggaggcaggagccgcacaccaaaaaccttaagagtctatttttcttcattcaagagttttactgaatttacgaacacgctggtctggtccggtcacaacatactacttttaccgcagaacccagaccagagccccatctggtcccagtttgatgaaattgatcgtaaactacaaacatttgtataaaaagcaaagataagtcaaaagaatgacacctaaaaccccctcaggtagtatttctctgcaacctgtacttgtgagaatcattatacaaatgattttg

SEQ ID NO: 43666 - DNA, 558 bp, Arabidopsis thaliana columbia
cgcataaaagaaaactgtgaaaccaatcaaacacttaacaactttcactaatttttccgaaaggttctgtaaatgtctgggcgaaaagaacaaaaagagtttggataaaaccacaacgtaacttacttgaggaaagtacaagaaagaaacaaaaacacataagcgaccagtgatgttaggagctcgagtgtccatgtaggctgaatgagaaacgtcggaatcatgggaatgattaacgaaccgcagaaccacccggcaactaaagctccaattctgcaatcataagagccaaacaaatcatgaaaaaaacgagtgaccttttaagtttcgtttcagctaattcgataggactagtagtattttacccgattaagcaagctctccccaagctctttgtcttctcattcagaaaatatacgcacgcagccaatgataccgccacctacaagtacaacaaaagatttcagaacccatacatgagacagaagagaaactcaagggccattgtataaagtaacaaacctgaaacgcaggaccgccttctgcagagttcatgat

SEQ ID NO: 43667 - DNA, 557 bp, Arabidopsis thaliana columbia
agcgttactgttatgatccggtactgcgatggaatcctgaagttgaagactacttcactaaagcttatggacccgatcactttgctcgcatttcaaaggctctcacgtacttttctatcattctcatctacttctgaagcaacattgccctcctttaggcgcatttagctggattcgctttgccttattgcttattcattctctaatctcctaaatcgaattattatttaattgcattttccccaatgttagcttctccttcacatgtttcagttgtagtctgccatcgtaactaaattaacaaactttctcacatttttcttgcgtctgctctagttattgttgctacattttgctcgactctatatatattttgtttttgttccatattaggcgcccatcttcatactcctgcattagggtgaacactgttaaaacgacgagtgatgcggttatcgaaaagcttacgaaaattttaaacgactcggaggagggcttgaagctagtacaaccagatggaagtagtcccgtcacaagtgtcagatacctggtttgga

SEQ ID NO: 43668 - DNA, 494 bp, Arabidopsis thaliana columbia
tttctaacaatttgacaaaaaatttattaaacaattggagagagcccatgaggagactctcaccattggagatttccaatggtctaaagtgaaccctctaaacatctagaagctcttatctctttcttcttttttcccttacttctaaccctctaaacccctaaaagttttcgcaacactacagtgaatttagaccaatattcacaacatccaaatatacacatccgcactcttgaaagacatataaatatacaattaaaatatttatataaaagggcgattttctatttggagttaaacagtagaaacagtactcgagttgccaattgcatcttctcaaaccacacttgttatatagtggcatatttaacccattttcagttatgttttgatttttatactatctattatatatctgagaatgaaagtactattaaataatgttggaataccgttatacagctaagcaaatgtaaagacaagcattaatagta

SEQ ID NO: 43669 - DNA, 528 bp, Arabidopsis thaliana columbia
tcattgtaaatgaaatccattaaggtctctgctactttatgacaaggatttttccgttgagttaaaatagaattcaatatgtcgaaatcaggtaaaccttttaccattgtccatgtcttgaatgtggcatcagaatattcgatcttgctattagttccaaatggaagattttatcgttgataactcaagaagtgtcatacattgtttcacccatagcatactcgtcttttctctcaagtattcccgtctttgggtcaaagactgtgcaatgagtgacattgttgaggatgaaaaggatccttcaaataaaaaccaaagtttagcaaagctaatcagtcaaaagttttttgaattattatctcccaattttatccaaagattcctatttttaataccaatacaattcttcatctcgatatatctctttcaactgcagtgttactccgtaatctcctccctgatttcatacatctctgtgcgcacatctaattctgatttcttcataaaatagataaacaatagcatata

SEQ ID NO: 43670 - DNA, 619 bp, Arabidopsis thaliana columbia
cttactataagtttaggttttaactcaaaatgtttcaacaaaataaaatcatatattttttactatcctattaaaaaagagagagggtctgcctaataaagaaatgcaacaaacataagaaaagaccaagtgtgcgttgaagaacgagaaaaaatggtcttggtctcatgcacatcaccacatgttgatcttacgccgtggtcgtccacttgcctcttgtttctgaatttttgtttagttgtccctgctttttcctattttttcctgtaagaaccctaatgtttccatatgtctcatttcttgttttgcataatttaatgggctcaatgaagttaatgggcctaagagtgctacgacccaatagcacttgaagatatgtccttcaaggacttcctaagctctgttcaggtcaacatgactaactttctgcttcacaggtttatggaaattaatcaaacatttggtgttttaatttgaacttttattttctttagcatgaactcatgagacttcttgtgtcaaagaagcgactaattataaacaggggagggcaaacaacagagattcatatttgagaaaaagaaataacgaaaaagcatgagaacatgatgaattagta

SEQ ID NO: 43671 - DNA, 279 bp, Arabidopsis thaliana columbia
gtcacattctgaagttgcaaaagcaactgaagatgcagctcctttggaaaatgtttccgagtgtgagacaccatcagactctacatctcacctagactctctgactgacaccccactatcagacaccgttcaagactcaagtcaggatggtaaagttgattctgaaagttggcagaactaggcaacaggattgccagccactgttgtactagatgaagactggacgatcactgctggactataggtgacacaagaggattcagctttcactagagagaa

SEQ ID NO: 43672 - DNA, 363 bp, Arabidopsis thaliana columbia
ggattgtggagtctcaaatattgagtcctactacaagtgtatgtacaaatttgtataagtatttttatgccgcttattcaatgatatatgtgcatgaactagtggagaggatggaagaagtcgagcggacgagcttttgcatctgcttagacagcttgatcaatatgtttcgtcacccattgattatcaaagaaaaagaggttgtgtggcagttcatgagatgcttctaaagtttcgtaagctttgtgttggtggctaatgtgctcttggttgttcctgggaatgccacctagaaagtatgctgaccgcagtatgcaggggaatttttcaaatcttaccatgtaggaagatacccttcacaat

SEQ ID NO: 43673 - DNA, 371 bp, Arabidopsis thaliana columbia
tctgttgcttgaaatctccctctgaatacacaaaattgcgtttaagttttctcttcgaaagatgaagaaatcattcagacttgaggtggtaaaatcaaaaaatcataaggcattatgtaaccttaatttaccgaattgtaacatgaagcatttcgtcgaacatcttcaatgcattatggtaacagaattatatcaatcgatttctgatattccacaaattctgaattctggaacaaacaaaataatccaatctacggattttgtgtaaagggagacactctctctagatgttccttacatacttatctatcatcacttgtcgaattcccaaatgactcctccatcttctttgacttttttgttgatcaagc

SEQ ID NO: 43674 - DNA, 604 bp, Arabidopsis thaliana columbia
aacaaatcataaaacagacagtgaaacatattttaaagtccagacctttcttaagccacttgtcgattgatcaatacatgaattaagctcagagcaaagaatgaaggcaaagagagaattttagatcactgacggtaaaggaaggagatggaggagaagggcaacgcgagatccatagtgatgaagagcttgcttcagtggcggccaagagtctctactgtccgggcaaaccgggtcaaaatacgcctcaattagtatagtatccgggtcgaaacgatgacccggtgggtaaacgaaaccatcttgcctcaccggcggcactagctgcgcttgtactctcgtctcaacgacgaagacaaggaacaggagaaccgctcgaatcattattctctgactcacactttttctctcttcccagaatcgccggagatgattaaaacagagggacggtgtcggtgagtatacgcaacggctacgattactcggaagctaagcgagacagttacctctcctttcatctctaaccgttgatttcattatggtgacgtggcagaaacacaatctggtaatgggcatatttgtaatgtatagagtttggtattta

SEQ ID NO: 43675 - DNA, 507 bp, Arabidopsis thaliana columbia
aaatttgggtttattagtgcttatagtttctatcatctttaacaaaaaaaaatagtggtagtcagaaccaaacctaagaggactatgtatatgtgttgatattcttacagtaacctctaccaaaatatatccattgtaatgtatatagctaatacaattcgaaatgtcatgtaaaatatttccacatgatgaatcggacaaaagctttttgtttttcatttagaaaaaccataaaatatataatataaaataagaaaacactttaaaaatgaaataaaagcacaagtgatgatgatgagtatcagagagctctttttatgaccaaacacactccttccattaccatttccctctcttccccaaaccccaaaatctcttcctttttttaccgttactgtaaattttccggccagaaacaaaaaattaaaaagagctttcctggattctcgtttagtcaattccacatctctctatctcttctctctcttcttgcttcctctgtttttg

SEQ ID NO: 43676 - DNA, 360 bp, Arabidopsis thaliana columbia
aacaacacatgatttgaaatatcattttttctagtgaaaaaatgttgtcttgcactgctcaaattcaagtagacaattccgattcaatataactaaaaatctcatattttattaaaagtttataaacaatttatgttttgaaagggataaacactttcagctgttcaattgttcataattttctgctacttacattgtttcgtttcctatggaaatgtgtagatttacagggaaaaagtaagaaatgtgcttgagcaagaaaagagtaagaaaatatgtaaaaaatctgcagttgagttgaaaacgaaagaaattcgtactgactaattttgtcttaaatgagagagacccgaatttagc

SEQ ID NO: 43677 - DNA, 499 bp, Arabidopsis thaliana columbia
tgcagcagctaagagacttcttgagataaagccaaaccccacgcatgtttgttcaagatccgtctttggattcactgggagagatgtgaattataaagatattctatgaagatttggctttgattcggacacagctctgtttctgtttgttcctgcttcaccatatctacacaaactgtttccaaaatgagactgaagatttccataaacgtatgatatcatgtcacaccatgaaagaacaaactaaaaaatcttttttagaaatagaaaattacaactaaaatttgacgtttatgttaaaaaaaaatgatcaaatcttaaccctgtatgattcttttccaattacaacctggaaaattataataatttttagcataatatgattacagaaagaaaaaaagatatgggaataataattttcacctctcttcacgttccaaaacagagtataacgccacatgctgcctctattgagctttgacatttttaaagtaaaaaa

SEQ ID NO: 43678 - DNA, 488 bp, Arabidopsis thaliana columbia
caacaatgagctaattaccctaagttttctgtgggttgcaagtacttgaggcggaaccaaggaagaaagttcacataacggccttgtcagggccgaataagttggatgctcaatagacctgcaaaaattcaaacaattagaccactcatctaatatacataaatatattctaccatatacaataccaaatcttatacaaagataccatatgtgtgaatctttaacgcaagttaaaatatcaaggtttggcgctcgagggtgacaccaagatgcaacactgtggcaagctagtttcgggacaggtttaattctacgtagctcctgtagaataaaagtagatatgcatgttaataaatgagatcgggaaaatatgaaaaatccatacatgagatacaccattaccttaaatgtcattgtatcccatatggccaatgtcttgtcagccccaattgtaatcaattgtggagcactccacttacccttgacag

SEQ ID NO: 43679 - DNA, 397 bp, Arabidopsis thaliana columbia
attttcaattagttaatttgagaaggacaactaaccaaaccggctatcagcaaaacctgaacggagttcagcaaaaagtcaacttgcttcacctgcgatcagaattcaaccaatccaaaatttggcaataaaactccatctatacaacaacaaaaccataggtccatatcaataatttatttcgtttaaataacaatgtgaaatattcgcaaacgcaatgatcaaacaagattcattcacactgcttaacaacggctgaggtaagtctcgtgaacaagttgtgcggttaagagatctacggtacccgaaccgacggacttaaacactgttaagtctgttgaactctttctcacttctttgtcacctttgatcaactccaccaaattcccacaaatgt

SEQ ID NO: 43680 - DNA, 276 bp, Arabidopsis thaliana columbia
tagcttctgttcaatgtgaagaaccgcagatctatagaccgaaagaatctccccaattccattagcaatggctctacggtacacgctaggcttcttctctctactctgcttcgacaattcatcagcccgttccaacggatgcacactggtcacagacctaatccagctcaaattgcgagacttcttcgcaaaccggtcgagttctcgatagtagaaccctaacttgatcaacctttcgatcaagtccctgcaaggaagcgcatcagagtcactaga

SEQ ID NO: 43681 - DNA, 382 bp, Arabidopsis thaliana columbia
gagatgctcaacttatgttaggttctacaagtatcaaaagaatagtagagataaactctaaaatgtgaataaagttcattctcaacagagatcaagaccagagagagaagacgatataaataagggccaaattaaaagttaaataaacaattatcaaattccaacctgagaccacccatctgttcagacatccatccagcaatgttcaacattgcatccatcctcgccgcagcaattccatgaccacttcccctcaatcggttctgcatagaatgtgaagtgatgtttatactactacattcaagttccacttatcatgctaagacagaatagaaaacccctactacatacctccatccgtgctctgctttgagagacaaac

SEQ ID NO: 43682 - DNA, 573 bp, Arabidopsis thaliana columbia
gcttctccgattcgaaaaacttacttatggtgttgttggttatccaaaacaagttggtttatactttctaagcaattagaagttacataattatttgtcgtattaactatagtaacagttcttgttttggttcatacaaaacatgtggatgtcaaaacagtaaatatgactactaataaaaaaaaactaatacttttttaacagaggaaaataccatgtattaaaaatgttatttctttgataaagtgtatgaaagatgttgcatagtcacacagacgtagcagtagtcaagaatccattaaattgataatatacctttggtaatcatggttttattgaaaaggtgacaaagaatacatatgttaacattaccagcaaggatttgaatttgagttgttggaactttaatacatagttgagtaaagaagaggcttacacaatggaatctatcgtgttaactacttagctttgcttcaatctcaattttcagtaactacgtaactcttcagatgcaaacaaaaaaatctctgttcagtgtttaatattagttaacttttcatccaaataaatata

SEQ ID NO: 43683 - DNA, 533 bp, Arabidopsis thaliana columbia
gtagatttaactgaattccactctacgactggaaataaatttgattatcactagcaaaagggactaatatcatgttaaatttatgaatttctaactcaaaattttcaagttttcttcggtttgtgtatatatcaaaactaattctaagaaaacctagtcgagccgaggacatggaacaatgagagatgtccaattaaagatcgaattgacatttcaagggtcgtccaatgcccattagagtctacgaattactatttcaaggcccatttgctttcatattgtaaattactcccttcatttgagattacagtaaatgtggttttggagttgttcacattaagaaaccaagacagatactgaaacacagaaaaccaaacacatgatctaaaatgtgaatgtggttcagggtttcctctgccgtagactcttctcatggagtttagagagacaatacaaacacacaacttattatagctaaacaagtttttattttaacatagaagagaaaacgtgagtttgtattggtggttgtg

SEQ ID NO: 43684 - DNA, 509 bp, Arabidopsis thaliana columbia
ccaaccttccaatacgttattagtacttacaagaaaggtgtagtagaaatttgccagtcggataagatcatgtcattcattcgacaaattcattgaccaagaccaagaccataagaaaaaaataattccaccaactcttgtttttttttgtcaaaacgtgaaccaccaactctttacttggtcaaaaggttatttggactttttaaaaactccaaagtagtataggataaacgaaaatttccaggttcaccaacctagacgtttgtctcctctcctgtctatatattcactcatgcaaggccaccagacctcattcttccacaatggattcttcatcttcagtaaaaatcgtctcgaaaagcttcgtgaaaccaaaaccttaccagaagaatcaaagcaaccatactatttatctccatgggactacgcaatgctctctgttcagtacatccaaaaaggtcttctctttcacaagccaccacttgactccattgacactcttcttgaga

SEQ ID NO: 43685 - DNA, 386 bp, Arabidopsis thaliana columbia
atgatgaatccctcagagcgatgcagccgcgagattgccagtcacacttgctctcgctagcttatggctccgtagaaactatgctgataccgtcctggtaaaatctaaaaaccgtacattttctcattcttatgttaaaatagttggatgcagtctaacagatcaaaataacaagaggaaattgttttttttttactgataggtgagagttgtggattcattaccagaagtgtatccgaaggtagagacttggatagagaatgtggtgtttgaagaaggtaatgcaacaatacttacactctttgtctgtctccacacaattctctatctccgggaaagacaacgtagacaagtcgtcgttgttgccgatccagtggctgctgacg

SEQ ID NO: 43686 - DNA, 563 bp, Arabidopsis thaliana columbia
  unsure (1)..(563): unsure at all n locations
ctgttattcattacaatattgccaacatctaagaagattcaaaatttcacatcacaataaactggtttcgttaacgttatattatataattcattgtaaattttatttgtagaactataacaaaaactagcaaggaacataacatctacataaatgttcttccccaaagtcatcacactcgcaactactaggcttagcggctacacctcctntcttaacaaagtcgtttatgcatgttttgcttccgttgctgccgcatcctcccaaaaatatatccttccggccgcattggtccattggcttcaacacagcttccacttctgttattttatatcaaccaaaagaattgttaaatattaaagatcttagtcattgatcatgcaagaagattataattagaccatggtatacaaaccattgtttatgaaaagaacatacaatttcgcagttgatagaaattgaggttttttttttaagattttccctttaacattgcccaaaatgaaagacaaaagaacacaagaaaccaacaataaagtagcagatctcatgattcttgttgt

SEQ ID NO: 43687 - DNA, 480 bp, Arabidopsis thaliana columbia
gttgaggcatgagatttatttgttgtaacctaattattatttgctttttggttatactacgaggtatgagttggtgtaggtaggaaacgagatggtctttgtattatcgtctacatgtttttctctctgttttattattgcatttagttgaagggaataaacatcgtgaacaatttacttcacatttgaagcagttcatgcatcatataaataaacaagataaaaacagtgatcgactctcttctccgacatttgatctagacatccatttttatcctaatcgtttctgtatagcgagaattttgcagaaacctgcagtcgtacgatagataataccaaaaatagtacattctcaactagactgtacatctaaaatattatctatcatttttacaaatcacattgaatgacagatacagctatctctctgtagtgatacacatgagggaaaacagattaactgatataatgggaatttgt

SEQ ID NO: 43688 - DNA, 432 bp, Arabidopsis thaliana columbia
ttcctgtgtataatattttacattgtagcatcctttggtagtgtagatgttgagaaaactaatattaattggtaaattatatatttcgaaaaacaaaattcaggtaaatagatttggaggaaacatatgaagttaaaatgttatggataaaaacagaataaacaaattattgtagacgtaatccaaaatagtataaaataaataattttgcagtaacgtaagattgcattcgaccacacgcatctatatcactgcgtttttagctgcagctttcgatagtaggtcctacatcctattcggatctgacgtggatccttgatcacactctctactttagggactcaaacactctcacatttacgagaattgccactaccacgtccctcagtgggaagggtactttcgtaaaaccaaaaaaaccactttccggtt

SEQ ID NO: 43689 - DNA, 557 bp, Arabidopsis thaliana columbia
tcatttgttggtatgtatattgcgatcatcatttgtcatgtcattgtcatatgattcggattaaagttgccctttacctatacaaatttaattaacctcgaaggttagttgaatatcttttggtaagggagaaacactcacacacagtattaaattcaaaagtaacgttttaaagatattcaactaaaattttcatattcttactgcaacttttcctattaatcacattgtatataaactgaacttttcatatttatatacttgttatatatttgaccacattgttgattctatctcagagattgagatttgagagtttggctctatcggtgaacgaacacaatcaacaggacgatttaccgaacagtccaccaaaaatgatagacgtaccaaactaaccaaccctatggtcaaatcataaaacagattaaatgattattaggtttaactttttattaatggggataattttgggttcgaacaagagagcaaaaaagataaacctgtaaaactgctaaagaaaaaagaagattctgttggatatggtgaagaagaga

SEQ ID NO: 43690 - DNA, 576 bp, Arabidopsis thaliana columbia
ggagctgaagatgaatggattagcgtagttgtggcccatgatgaccccacagccgaacaccgagttcttggttggttcaagaagttgggaaattctcccagctgaccctggatctttgccagtgaagatgaatccttgtattcagattttaaactgacctcagaatcaacagatgggagattctgatgttttgatccaatacaagcatcaagatgtgatgcttcagcctgatttgttgcatcccattccatatctgcaaggacaagtgagttcaagtaagattattagctcaacaaaccaaccgtaactatgcctgtgtacactaaaattgagccacggagaaaatatatgacagtggtcaaactcaaagcgaagtaatttgagtatattaccttgagatgtgccaatgagagattgggactttctctggacatccagattgctttctagactagtaacagcagattttccaaaatccatctgtctatctgatggattgaaatgctctgaaactgtaggttgcgtaatggacgcagattctccagcaacagaagtgatggctaagttgttagtagt

SEQ ID NO: 43691 - DNA, 578 bp, Arabidopsis thaliana columbia
acctctaaatttgtaacattttgaaacaaacggctcgtgctctaggaaacggtagtcatgatatccatcttcaaactcgttctctctattcaacaaacatacagtttatgcccatttcactaaatcaagaatattcaattatgtaaaccaaagaaaaaaaggacacgatttatatatatgtacgtacccaaagacatggtggataaagtgtttctcggctaacctcttgcctatttcaacagcctgcataataaccgaaaatataaatctaattacttgatatttgaatatggtgccaaaaaataaaaactaaattaaccaaaaataaatagaattaattggtcaatcaaattatccattggaaagaaaatcttttaagatttgaattaatctaataatattaatttgagacaaacgtggtcaacgtctacgtaaagttaacataggtgcgtaacacaggatcataagttttgaatatcacacgtaccttcttcctcccggaatccaagtaatccatgagaatctcgagcatctcggcgccggagaaacagttcttaacaatcttcatcttcatcaaa

SEQ ID NO: 43692 - DNA, 501 bp, Arabidopsis thaliana columbia
gtgaaccactatggcccctatactaatacttagttcttaaattttatttgaaaactctctcttttacgttgaatagtagaactagaaaaaaatctatcatttgttaaatattttcttactacattggaatacaccattataaaattcttgtgaaaatgatatgtgtatctttttaagaaaaaaattcatatatagacctaaatatccatgtctattaccatagtcatagttttacaaaataatatttttgtttagacaaattgagaaatattggatcatctcatatacctcaattgtcacacagctcttaccatcccaattcctaacagaataatatgtgaaatctcatgttttagtcaccacacggtcaaaatataaactttcttttccgggggttcacattatcgtaatgcatatgaaatgagactatattgttgtgtaattgcttgtgaaccggtagatattgcatcgaattcatgacccgttggatattcactcatg

SEQ ID NO: 43693 - DNA, 472 bp, Arabidopsis thaliana columbia
tgcaaactcagcactactcaagttatggttttgacatggataaacacgtacagtgccaatgactggtcacaaaatatgcaccactttacctaggcatcattagtcaataatcacaaatcatagcctctagggccagtctggatgtcctcaaaagtcacaaatataaccaccaatcagcaaggtttagatatccaaaagtcacaaacatttaagtatcaaagttcaagaaatataaccaccaatcaggaagcccaatagagtggctggacataaaccagaaaacaatgtaggagaaaatacaacatattattgaagactcactaatctgaccaacaaaactcatttgccgagtatgtctatatttaaaagtacataaatatatcctagtctaatcattcattatagaaaccaaagcacattcaggtcaagtgcagataggtcaaagcagctatacattcatcattccagagat

SEQ ID NO: 43694 - DNA, 494 bp, Arabidopsis thaliana columbia
aggaaggaatcctggatttgaaagaagacgatctgagattggatgaattagctccagagactggtctcatggatcctctaaccgcaccatttctcgaagaagccatagccattttctaatcaatagtcttctctatgcaaaaaagagaagaacaaattcgaacgaagcaggacagagtggtgttgtatggtgtctcaattttgtttcgacaattattgggtgatattttattcttttaacatttagtgtgtttttcatgtgtagacaacaaacagtgatggaggaggaggaggttggcgggcccacacgcgtttagtatttgaatgaagacagagacagtcgttgcgttacaacgggtcccattttgtcaaaagagagtaccgcatttaccttttacccctatgcaggttggtgctgactgcgcagtgtggttcggccctactagccagaggtagtggccgcgataattgcgccgaacgggtcggcgtagtgga

SEQ ID NO: 43695 - DNA, 576 bp, Arabidopsis thaliana columbia
cctaacaaaaccggtttatcatagaaacggtcaacacaccaaaaatagttgaccaacaactacccaagtgatatccctttaaaaggagtcgcatatgtgttaccaagttccatcatcaacctaataacacacaacactaaatctctttcccaaaaaaagattaagaagtcaacgatggagaatctcagaaatggagaagataacggttctttgatcccatttacgttctttgatcaatcttcagtgacgattcctctcttgaagtgttccggtctcgaaagttcatcatcatcatcttcttcttgcgatctttcgtcatcacacagcgaggaagatgagagtatcgatataaaggaggaggaagaagaagaagaagaagatggcatgaccattgaaatcaaagcgagagggaagaacaagactaagcctacgccaagttcaggaaaaggaggcaaacacaattagagttcattcatataccgaggaaattaaacaaataaatgcatttgtataaaatacttagagctataatacagtggagtttttttatagtcatttgtttcgaatatgaattgg

SEQ ID NO: 43696 - DNA, 516 bp, Arabidopsis thaliana columbia
ttattctatctattttttttttacaaaaagatagtaaagaaaactgaaaaacgaatatgatggcaaattcaaactgtttttttctaactttaacgcctcgtactgtctttgagtatgtgtaaatagaatggttgaacaaaatcccaaataaataaattccttttaaaaaaggattattatatagaatgggatttcaataacatacgtaataaaaagcgttttgaacaatgcctataaaagattgagatagttagtcctatacaaggcctataaaagcttgagatagacaaccatgtccatttttacgttctataaaacttattttgtttttaacggtcgataactttactaatcatttatctttaagttgtaaacaattttgctttaacgtttaaactatatcgaattcggaataactctattaactaaatgttaactattattaacaatgcgtttcattcatcaaaatcaattcaagtttggaggtattttcatttaatgagataattatatttt

SEQ ID NO: 43697 - DNA, 202 bp, Arabidopsis thaliana columbia
gttcttcagtgtctggacattaaaatcttgggcatgtagcaccatatgagaggtttaaaaaataaaatttaaaaagagtataggtgagtatttattgtagtcttcactgtctgtgcatatttgtagctgtctttcttgggaaggcttttcacatatttgaaaagagttgggtgttgtgatctaagccatgtcttctttatgg

SEQ ID NO: 43698 - DNA, 529 bp, Arabidopsis thaliana columbia
tttgttacctcgagttgttcttgaaaccgttgttgcgcatcgacctgatgtctcattgcctcagcaaaaggtacattcccgctttgtctacgtgtgttcattaacattatgtcaaactcaagctttacaaatccattatgtcgagagaaggcaaattcatatataatatacctttgatggttatcaaatcttgaatcattggagattcctccttgagaacaattgtcgaaatgcacatatgaacttcctgtgaatacaaaaatcaatcaatctttggtttctcaaatgttatctacattaatattccttaaatacatcatatgtatatatatattatactctactataagctgaattatatataaatcttgaattcttgataataatcatacataccagcattttctttgttttgttctgttctattttgttttttgccttgttgttgagcaagtctatacttctgcatatagaaacacatcataagagagaatataaaccaacaatttgtagacattatacattatta

SEQ ID NO: 43699 - DNA, 603 bp, Arabidopsis thaliana columbia
tgaacttgtgaaatgtcatgagaggttaataaccatttaaacgaacttatgaatagtaacaagacatgaaaagataagaattaatgtacactttatcaccaaaaaaaggaagataagattgtacgaaatcggacgtaataatgtaaggacatggaaatggcatgaccctcgggtgcacgaggcagttccacttcctgacgactctccattttacttggtttacttttatcttatctcttttcctttttaccttgcgaatcaaattgaccttttaacaaattcaattcctaagtgtttttgtacaatatttgtgaattataatgtgtagtgtatgtctatgcttgtttgattttctaacgcttgttggatataagagacaattatcttgaaatctctacagtacttatcacatccaaacacactatataatatattggacaagcgatacactgtcttatacaaaacaaaccaatcacaaacaaatagaaaacaatacatctgtttcgagtcaagtaacgtcctatatattttatatagaaagtataaatatacacacacctagttgaaaaacttgaacaagaacatgttagagggcatacatat

SEQ ID NO: 43700 - DNA, 300 bp, Arabidopsis thaliana columbia
ctcctgtccatttccctttttttaactttgctagtcaactgtgcgtccaggtcagtggatatggagagagagtcgctgctatgttgcagaaagatccagtggctcatgaagaaatgagcaagttaacaagttttagagcgttttctgatatgttggtggcgctcactaataacaatggtgatgggcggataataatctcaaggacgagttcgtctacctctggccaacatggagggtacattaaatatgtcatgctcactggagcgaagtattttcagaggttggcctttcatacatgag

SEQ ID NO: 43701 - DNA, 395 bp, Arabidopsis thaliana columbia
tgcgattaaggaaacaaaatctcctctcacaccaatttgttgaccattcaattagattttgtagaaaacctcaatagcataaaacccatatcttcacacaacactccaaattcataaagttttgttcttagtgaattcttcagaattttccgtttatggtaaatgaaaaaacaaaacagagaagaaagtaacattttgaaaatctcatcactgattctgatttatatcaaaaagggtaagagtttcttttggatttgattcccaattaattttcttcacacacatatttcattaaaaatcgaaactttgattctccaaataatcttttttactcagtgccgtttttttttttttcaattccctccaaatccgggggacggaaaccaggagattta

SEQ ID NO: 43702 - DNA, 579 bp, Arabidopsis thaliana columbia
aaacggttaaggcttagacatggtaagcaagcaaccataaaaaccgtgacaattatcttctcagtattggaattaggcgtcttgttattatgaggagataaacatcttatataggcggaacgattatagtatttaacagccgccacatctttgagactacaatagaggaatagacaaaacagagaaagatgatgatttggatggaaaatgccagaaccaaagagaaagcagagcatcggttatgggaggagaacttggtgactgtcgaggatgaatagctttgcgtggatgatacgtgagataatagctacaaaggccttggagttaggttgtgaagtcgaattaaaaggcgctgattttgtttaagtcatgtgttgtagtacttgcatgcttgaaaaagaatcttgataatgatatgaattgtagaccctaattcataccaatatatgggaggggagctggtaaaatagtcagctttaatactgagtcacggaaataaaagggtacgatttgaatttgtttaaagaggatgatttggtgttagaatctccttcttaaacattttttccttgatttttg

SEQ ID NO: 43703 - DNA, 587 bp, Arabidopsis thaliana columbia
taggtaaaactatgcctttctgacattgtttttcactaaagccaagccttattgagacaaaaggatatgtatttgtaaaataatacgtatataagtgtgcgcctgtgtctgtgcgtgtagaatttttctttttttatatataaatatgaattgtgtctcgagtttcggacgtaatatttcttgtgtgtgtatttacctagctcagaaaacaaaagaaaagagattattactcacaagtcacaactttaaaacagaaaacattttgaattttccacaaaaaaatgaatatatcaactgtggaaaagcgatgtgtaaacacaaaacgcaaatcaataattgatgtgtaagaaagtgattaataattctcgaagtcaagtttcctcatttcttcttttgatcttttctcatacatccggccctatatttggcagagcacatcctaacttctaagtaacatgcagtgtgcagaggtaagttaatgttactttttgtacattaacattatcatagtgtatgcccactggtcctgaatttgagatgctgaagataaagctagttgggatgcatgtaccaagtgtaacgtttga

SEQ ID NO: 43704 - DNA, 544 bp, Arabidopsis thaliana columbia
ggtagctagtaaagttccaattgcatttctttgatgcattaacaaagcattcagatttgaggtctcattcagcgagtaagatccaagacataaagatcttccacaatccgcacctcataagtataaattcaaatacagcaggagggatgtgaaaaaaaaaaggagtctctaggatgtccttaagtagtttatttcccattaatggaagattagttttagtttctagttggttaaagtttcagactttgagttcttattggtcctggagagaaaagaagtgagaaatataaacttattttaaatgttttcttgtaacttataacttcttatttcacacaccgttgacctgattcgttgcaccaactcctaaatttttatattgaaatttttatatatcatcatgcaggacccaacaagcttacaatggctgtccacttgtgtctgtctgttactgaaatttataattgtttttgatcagcaacttgtgttctttcggctgtgagctagtttaaagacacacggcttttttttaaggtcaaattag

SEQ ID NO: 43705 - DNA, 768 bp, Arabidopsis thaliana columbia
tcattaggtaatttctcttgatgggggaaactaaaagaatgagtatcagagtgagattaaagttgttaccatctattgcttcttctgaagttttttcttcaacattttctcgttggcgtttgcttgcagacaagaaccggcgtgcgagtctgaaaatgagtgctgtatcagcttttgggtcttgagacagtactttgattgctgctacttggagccggcggattgatccatatgaaagtcgtgatgagaattcgttatcgagtacaatgctgttaagaattgcatcaaggggctaaacaattagtgacttaatctaaaccattaaaatcagcatgatcaaaaatttaccttgtaacaaattctgaacatgcctctgccacatccgaatctacacatgggagaggtccataggcatatacatataggttagggaatctgcaacgaagctacccgcaaaaagaaaagaactcagaaacgaaagatatgttaaagaaaggcatgtaaccttttattaattaaaaacgtactctaattcccagtaatgaggcgatagacgtcctaaagaatgcccaacaatgcgaatgctgtagccatcacactcacaaccatcaccaatcaatgaggacaagaacccacttgattctgactctgcgtagtcatttgtatattagcgtaaagaagcttgtattgtggcaatttatgaacacatatcacaaaggtacaacatcaagggtcagttatagcttaactcgtacctccagatttggg

SEQ ID NO: 43706 - DNA, 520 bp, Arabidopsis thaliana columbia
ttctcaaatttcccttgaaaaatgatatgtgtctgcaactttctctggctttgtatgtttagagtgatggtaagaagtgtatctatgtttctttggtttggggctggcaatagttctcatgtgttcattgcttataataaaatttgtttcaaattgagtggttcttgcacaaatagaatattcattacaagagtttgttctctgttcgttatgtcatcttttcgacctatataaggacatgtagatgcaagcccttctaaaatttaatttcgtcattgtaccattatttttcctaaacaggtcgagagaggaccaaccgtctatttaagtggtctaagggagaagcattttggtgaactgtttctaaatgcatataatgtaagtgagagttcttctgcaacgcaagcgtcaagttctcaagcagcgtcatcagaattgggtctctctgaagagggtttgaaacatatagctagatacatagagtattttgaatctcgatataatgacatatggcttgtgt

SEQ ID NO: 43707 - DNA, 553 bp, Arabidopsis thaliana columbia
gttcttctaagataaagttctctttcaccaccagttccatcacctggacatggattagaaaataagactggtcatgttatagtcctgaaatatgttatcagaaagaatatgaatcttcttctctcttacagtagctcgagtaatgccggggagacaataatctgcgtgaggagtgagtactcggtctttcttcaccatgaactgcaccaacagagttcctccaccatgttagtttccaaatgctacacagagattcagtacggttctttgagagtaaaaaatgttcaatccgaggatcttacaatgttggttgcattggtttcagacaaaacccatccttgtcaagcatgattgcatcatcgacgttggcattgttgctttcaatctgtgtcattaccaataaaaacatctcacaatgacgtccctaataacacatgatcacggattcaactcgatgacaggcaaaggatggtacctttgcaagtatattattgaggaggttgttgtgatgaatcttggaatctaaattctggaaagaaagtttagaagaaga

SEQ ID NO: 43708 - DNA, 525 bp, Arabidopsis thaliana columbia
catggagtctacatttttacatctattacgggttcatttaggttttacctaattttaactctcaatctactgccactacagtgaatcaactactggcagtaactaaagctttaatcaagtcggctcatagcaacaaacacaactacaaacaaacaaacaaacctgcaacgagacatgtctcatttgagcctacaatgggatatatctatcaatagacagtaaatccacacacacaagaactaatcagaagatatatgagctactcatctcaaaagttacacttacatcacaaaagttcgttttcttcctctataaatcatttatcctacaagatatacttgcaaagtgaatatctgtgcaagacaattatgttccaaaagggaaaaaatcaagagtgaatatatgtgcaacgcaaatcctttctaaccttgactcccaaaagaaaactttagtgttaatgaaaacctaaaggcaagttatctgaacgactatgaacaaaaaagaacatccacagcaacacagatt

SEQ ID NO: 43709 - DNA, 427 bp, Arabidopsis thaliana columbia
cacttcttgttttgataattggttctaaaacccaaatacacagaaaataagagaaccaagtattaatctcgcatatacttgggcttcatggtccttttaaacaacatatgaaagctataataagcccgtttaaaattcggagacatgggccgtactgaaaggtaactcataattactttccaaaacacaacattcgttattggacctaatctcaagagtgacgatccagttaagatgattaaatcaaatcaacaacaacattatctcattagataaaaaagacaagattttggaagaaaacgaatgatttaaaaatcattgcacagaaattattaatgactcaatattctgaccatagtttatacaattcttccatgtgaggcatctctttgaataatctatcgaactccgtcgtcgtccccattcg

SEQ ID NO: 43710 - DNA, 612 bp, Arabidopsis thaliana columbia
  unsure (1)..(612): unsure at all n locations
gtaaagcaagtgttgaacgcactctgtggtcagggatgcctctatggagtttgcgaattgctcatgttgatgtgtgtttggcacaatagatattacattttttctcacacgtaggatttggtaatgacacatcagacgttaagttaactcatcggtccatttatattcctttttagtaacacatgtaaagcattttcctttctcacttatattcttccccgagcaaaacaaagaaaatgaaaaagaaagtttttgagctttaatataagattctagtggcaacattggtcacttctaattaaaaattgcggaatgacttcaaactttaatctcaaaaacatcttccctatatctaaatagcttttaggttgcccatcaatcactttttgtaccaaaccttcccatctttctctcttgtgttgattgggaagatgcgtggtgttgatagcctttgttctcatagttgttgttgaattgcttcagttggaattatctacactatcgctgctatagaagaggatgttgttctatagaagagtattatttttcgttgaaaacaacataacagtctttttagtactanatgtatatattgtctgtatgtgggttgga

SEQ ID NO: 43711 - DNA, 441 bp, Arabidopsis thaliana
gatctgagtttataccgttgcattccccgcgactttcgttttccgatttcccccaaattcgatgcaaatctaagaagagagagaaatagaaaggtgtgtgcgcttcaaccgactcagtgtctctctctctctctctctctctctctctctgttgctatttgaggtttttacctttgcctcgggggctctcgctgtccgaattcttttgtagggatttattgggtagggtttaaccacttttataatgtcttcttctactagcttcgttgtgcattgggtttaattgtttccagtgtagtgactgtcagattcttcgaccaattgcatgcaatctggaggcagtggcggagggcccgctcggaatccggccatgggtccggctggtcggactgcttccacgtcatccgctgcttctccttcttcttcctcttcatctgtgca

SEQ ID NO: 43712 - DNA, 453 bp, Arabidopsis thaliana columbia
agcagctagttacacctatattttaattattgagtactttaacgtcgattgattgattaattaatcgcggaaaccactaatgacactattaagtattaagcaacgaaggtaaacgaaaacgacgacgtatgttacctgaaagactcaagtttaggctcttcttgagcatcatcatcacaacaagtagaagttggaagcttcgagagcgacgagagagacgagagaggaacgttgaaaccttcgagcatggttaagttcgaagcttgagctcctctctttagtgcatctcctgaacgatttagagctggtgttcccaaaaatacgataacggagatttaacggcagcgaacaattcccgttttttctcaaacggaagactcagtaatgactccgagatttcttgaagccgtgacgttaacgccaacggtactccgtgattctctagacggaata

SEQ ID NO: 43713 - DNA, 543 bp, Arabidopsis thaliana columbia
tgatcaaaactaagaaccttcacattggtttcaagcatcaaagagtgtgagacattgctgatgacaccatgtttcttcatacagatttttatcaaatcttcttcataagaacctatcttatccctaacccgcgaatcccgataagaaatttcactcaaatgttgagaaagattcaaactttcagcaatttccaagcttccatgatcaacaagcaccacattcttctcagattctaagttctccacattgccactactacctaacttaaagctatcatcaagttccaaagaagcaacattctctaccctatactcagaatccaaatgattcgtgtcaatcttgctgcaacccgatccaataaccctgattaagaactctgcctcatcatgaacatcgaaaacagtagtcacaccaacattcttaagccctaatctagcgattcgagtagaatttagcgcgtgttttctctcgagactatgctgaagaatagtaatactcacctgattatcaaaacatggagatctcatcttcttgcagagacag

SEQ ID NO: 43714 - DNA, 166 bp, Arabidopsis thaliana columbia
agagaagacataatacatagacacaacatagatagatacagacaacacaaacagaacacatatgagaagacacagatatacagaacacatagagacagcatagcatacaagatataacacaacacagatataacaacacaatagagaacagaggacacaaacagaa

SEQ ID NO: 43715 - DNA, 100 bp, Arabidopsis thaliana columbia
tattgtattattctcaagaagagctccagcaagacttgtgaatccctacctccatttcaaaaaaagaagggaagaagacgcaacagatttaattcataaa

SEQ ID NO: 43716 - DNA, 208 bp, Arabidopsis thaliana columbia
  unsure (1)..(208): unsure at all n locations
gagcaggaagacacatagacacatacaacatatacagacagatacaacacagatacacgaacaatacatatatatacacagacacatacacagaaacgaatatatacacaacacacagacacaacatacaatatacaacacaaantagacagaagacacangagacaaacaacaatagacgaatagaacagaagacaagatagaaaac

SEQ ID NO: 43717 - DNA, 504 bp, Arabidopsis thaliana columbia
tgttacaagtcatgcacatatcaagacctaacatacaatccaatggtaacaattgttaattcacagtttaattaacctttctctttctctcactcacttttccttttcatcaccacaaagcactaattgtgtgaccatcatcttaatgactactatatctctaaacccttaacacacttccttcaacacttttcggtctcttcttataacaaaccccatcataatatatatccaaatctatcatattcctattccctctcttctcaagatcaaaccaaatttctgattcgatggcgaatctgattcgaacagaccatcagcaacatattccaaagaagaggaagagaggggaaagtagagtttttaggctgaagacgttcggagagtctggacatccagctgagatgaacgagttgtcttttcgagataacctcgctaaactacttgagtttggtcactttgagagctccggtctaatgggaagttggtcttttcagctcgaga

SEQ ID NO: 43718 - DNA, 381 bp, Arabidopsis thaliana columbia
cgcgcatcgatgctaattctttcttctggcatctgcagaaaagctgcgtacagagaaccagcagtttcagcaacagcaacaacaacagcaacagcaagcggcactaatccctgtcatgcaggaatgtgttgatgctataagtgaacatcggaggcttcagggcttaatgaaaggagagtgggttaagggcctacttccgcgcagatgtattccagcagattacacagtgcaaagaatccgaggtatcaaacattttaaaaaattccaattccaattttagtcgattagtcatgactcttataactcttggctttttgcagcactcgcggaaggaacttgtgtgaagaactatgagtacaatggaggggcagatactcgtga

SEQ ID NO: 43719 - DNA, 178 bp, Arabidopsis thaliana columbia
ggcagcagacacattagctaaacatgcactaccttcacatacttcttatcatttttctaattttactcctcatgtaatcacagacatactccatcgtgactttgtctctgcagttcaataataagattgatgttgatgaagagaaaaaaactattgacttgcgatataactctgaatt

SEQ ID NO: 43720 - DNA, 505 bp, Arabidopsis thaliana columbia
gaatatttacgttttgtattgggtccaaccctaataaattaagttttattgtagtttcagtggtttgccttggatttttcgtcctttactcgtttttcgatttaaaaaaaatcaataatataaatccaaacataagagaataaatggcaggaatgccactttctccgaaataatgatcagcaatgccacccattccttataattttatttatcttttcttttttttaatcaaaacaggtgtaaatgtctaaataacctttcaaaaatttaaaaactacagatccaaccaaaataatccgacccaagcccaataaaacaaataacctggcccaaaatataaataacattacaattttaatatgtaaaataacagttttatctacatttaaatgttgtattcttaataaataagaaaaacagaattcaaaatttagaagataacaaattatcattaagtatctttgaaatataagtagtagattccaaaaagaatttggctattgag

SEQ ID NO: 43721 - DNA, 631 bp, Arabidopsis thaliana columbia
ccctaccgagctttgaaggttaagaaaaaagtcatcttgaaggagtttagtaaatttggtgaggttgaatctgtgaggatacgctctgtgcctattgttgatgtgagtttcttatagctaaagcctaaagatgaatttaggttgagtttttgtgttcattggtttctgatttcgtttgatttttattgattgatttagtcgaagaggacaaggaaaggagctataatgctgaaacaaatcaatgagaaagcttcaaggtttgtgcttgaaactctatatagtaatcatttgattttgaagtttcagtgatgaaaaagtctaatgtcaatgtttgtggaattgcagtgttcatgcttatgttgtgtttgaaacagagcaatctgctgcagcttctctggcacataacatgtctctggtaatgtaacttttgcgccttttgttctatctggttgatttttaaggagttatgtgtagattggctaatagttttatgttataatcagattgatgggaatcatgtccgcgttgatagagcatgtccgcctcgtaagaacagaaagggcatgatgatctcatttgtatgatctaagaggcagctttatgggtatctcctttcgatgtgaaggtagta

SEQ ID NO: 43722 - DNA, 545 bp, Arabidopsis thaliana columbia
actgtttccttgacaccccttttgagaaatactcagcagcagaggcaagctttggacctaaacagcagaatatagaaaaaaaatagagattagcttcagaacatcagtagcaaatttgctttcaccacaccattgtgcacacaatgagtactaatgaatgaaaaaaggccactcacctcggcaagtaccatctctctcaacttattactaagaagtgacagctcatcggcaacaagcgaaaatgggtcaagctcctcctaggaaaggacaatcttactctttcagcagtcggaaaagaaaagaagttacagcaataaatcaaagttaaaaaaacaatgaccaactcaacaagttcagtgacaaaaagtgagaaaatttaaagttggggtttgacagttttttcttctacaactgaagcaatgtccaacaaaattgaagtatatgtgaaagtttaacaatagaggatgatagtgagctaagtacgaacctcaaccaaggagctactctggtgatagagttgatgactaaatccaccaaaaaccgga

SEQ ID NO: 43723 - DNA, 663 bp, Arabidopsis thaliana
gaattccacaaggcttcactaaatcaattaattcaaatccatacggactttgaaataccataataaaacattagtgataagaatttctcttctttcttctttttaataccaaaattttttgaactaaaacatgtaatcctcccaaatccgaaacatataatattagttttgtagtaaacgtcacaaaccgacgatctttaaacttcgtatagaatctttaccgattaaactaacgatataccagaaagtgtttactaaagactataataaaaaacacatatgattaatgatttaattctatcgtccaaacgctaactcaattcttaatacaacataaaaccaaagattaaaaataacacgaacaaaaaaatccttaaatagaaaaacactatctcaatagatgattctaaaatataaccaaattacagtaacaaagaagcgacgaatacaaatccggctaaagatccagcagcgagagtggcggcgttgttgttatcgacgggagtggatccagtcggaccagcgacaggtgcaccatcaggagtgagagaagttggaggagcgggtggtgaagcggaggagggaagtggtgaccagccggagagaaactggagccgctgtgggagtagcggatggtgttggagttggaagtggtgtgattga

SEQ ID NO: 43724 - DNA, 745 bp, Arabidopsis thaliana columbia
acaaactttgattcttgctccaaccgtttattaaagcacatgacctgtttggatcatcacatatcacactagaatcacaaaaactacaaatttcacagctccgagcacgcaatgattaacagaaatccgacaactacaccaatctcttacagattaaaacacaaagaagagagcttgtgtaagttaaacacgtatggtaaatacattagcagtaagaagataccttggcttctgaaaagtggagcaattgtggacttcacatagagggatggaggagactgttctgctccttacagaacaaaactagcgacgactctgcacataattatcggcataattaaacaaagtctggctctttcgaaccccaaagaagagtggcgatagcaaagatggatcctttgcctctgcaacttctttcgatggtttcctttcctctgcttcccgtttccctttactctgttgacaattagggtcaagttttgatccggcccgggtgatttacagcccacaaggtccaatgggcttcttcgaaaataagtttgcgcgacgttgcaaatgtcacgtgacttttgttcacgcgcacttcacgtgttcttcgttattctgcgaaaccgtccgataaagaaatttctggaataagacaacataaccaatgagaagcatacaggtggaagtaacgtaaaaactcccgctttttcgacacgtgtcaactaggcggaagatacgcaccaccagaaacgcttga

SEQ ID NO: 43725 - DNA, 563 bp, Arabidopsis thaliana columbia
ctgttatctgttcctttggtttaggtaatgcctcctgagtttcagcttcttcgatggctcttggaggggaacatgctacttcttgtgcactcacaaccccaacatcaacatcacgtaactgagattcctcagagaatatattttcagtttcttttggcagagcattttcttcggctggcgtttctgtagagtaaactgcaatatcaggatcaattaagctctcatccgacttctggcttgtaaactcagaaatcttcaatgtgtcacagcttggatcgattcttgttgtttcaagtttgtcttctgcgccattcgtagatgatgccggttgcgatgagctgctagatccagtctctgtattcgtccaaaatggatatagattttccaaactgcgggacacctcgctcttctctcttgaaactctttcctgtccaaactttcctggcaatgagtttcttcttgctttatccttcggactatttaccggctttatcgggaaaaccgggagataaataggcgacaggttttggcattgaagaaggtatggtttgtagagatggggt

SEQ ID NO: 43726 - DNA, 597 bp, Arabidopsis thaliana columbia
tgtctgctattttcaccttttcttaatgattttgagtactctataagctcatcttttgtcatcagaaacatggtagcagccaatgtagctgtctgctttcctttcgctatacttatgctaatgttgtgtctacaaaatgttatatgggatgtttgaattttcctttttttcattcttttacagggtttaggaacgattcagatacttgcagatgctttgccgaatattgttccatatgttctgataaaccatcgagaggtttaaattcttttttcaattttaccagctaagacagttggcgaaatattaattatcttgtttctttgactgataggaactccttcccctgatgatgtgtgcaattgagcggcatccagttagcagtacaagagattccttgactcatacactgttcaacgtgatcaaacgtccagatgaacagcagaggcggattattatggatgtaggttactgtataaactttgaagctttcataacgtataataagactgtttaaggttttgagctgactccttttactgtttatccaggcatgtgttagctatcgaggaatgttggggaatgagacagaacaga

SEQ ID NO: 43727 - DNA, 550 bp, Arabidopsis thaliana columbia
tgattctcatatacaccttttcatcgtcatcaattcttatataattttgaaaaatgattccactagttggtggtatgccaaaaaaacagaactagaagaaaaaattaaaccactttctgttaacgttttacgactattcaactagaagctattcgaccattgaactatctattctgctatattaattcgaagccctactccaaaaaatgttagatgctattgttatattgggttataatataaaatctgctaaaagcaagccataaaattatgtattagagtattaaatgcatgtgctctgagtgaaaaaaaaaaaaggttgagttagagaaacgactccagcttcaatggcgtacgaacggaatttgtttagacaaattaaaatagacaattacttacctcgagagccagcaagctatattgcttgaccagagacttctctgactcttcgtgcgtacgtcatggtttttcacttctcaggtccgaagcccgaaaggtgaacgtgctgttcaagataccttctttctgtttttgtttttttaattgaggg

SEQ ID NO: 43728 - DNA, 502 bp, Arabidopsis thaliana columbia
tctctgaatggctcggcgcttctgaaaacatataataatcaacgtatcagcaaaatgtaaacgaaacagggtttgtgacttctgttcatatgtgaataataaaaccaacagatcttaaacatcctctttatattaatgggaaaatcaataagaagtcttatgtaggcaaagcaacgatgagacaaaaaccggaatatgagagtctaaatttgtgtatccaatagtttcacataaaatgtgttagcaagaagtattctctcacaagaaacaaacaatttattttcttgatgggaacacacgtaggatcaagtaaaagcttcgatcaaatattttagattggaaacgatacaacagatcactgattcaatacaatcgagaatctagaaaacgaagaaaaccacaggtagattcataaaatatttgacgtctatctagatgtatcatcccgatgacgtttatcacattttcaggaaaaaagaggatcagagagaaaatttacgta

SEQ ID NO: 43729 - DNA, 684 bp, Arabidopsis thaliana columbia
caatgtttcacttagaaaaaaaacctataaggaacgacactgatcaagtgtcctggacctaagtgacttctaggtaaaagtagtgaactcatgaacttcttggcccatctgcatcttacccgcctgctggcttccggttcaagtaacgtattgcagcatcctccaccctgcaagagaattctcagtgattgtaagacaagtgatgaaaagcagaacagtagagattattaccatggctgattgaagaactctgatcggccttctttctcagcgtttcgacttgcttctcctgcaacaagcttcagatctttggtctgagattccatcaaggcattggtgaattccaccggtgactggctaaaccctaagaaaaacgcccgtctccttctgtgctcgtggattttccttatggctccgcatatggcttcatcacatgcctcaatctctttgttcttctctggattagcgagcagattggaaagctccgtttggaccggtgctggtatgtcacaagcacatcgtaacatgctgagatggctggattgttcccgaaagcttgatcttgtgtacaagctgaatgggaggcggaggtgataggtgctgagatatcttatgagagagcatagtgaatttcacttctcttcccaaaaacactgtggagagcagcacacagttgaagaaaga

SEQ ID NO: 43730 - DNA, 501 bp, Arabidopsis thaliana columbia
atatattatagagtcgtgatcaaatcatttagagatcaatcgatggatcgaaaaatgatagattctgtaatctacttagccttactaggctttcttcttctcaagtatcattatttgttcaaaaccaaaaaaatatctttagttgtgtcttagctaggtttcgtcaatcgtcaagcctggtttgagaagaatggtcgtgaaaacagcaccaccggtagctatgttgatacgacggctaacaccgtggcttaatcatcgtaactgtttcttgcttctctgttttttcgtctctagtcatttattccaatatcatgtgaatatgaatgttatatgttaagtttttgcgtgccagagatgatgtaattaagatttcttgtcatttttttcttgacactgttaaaggtttcggagccaactgacttatgatcttcaaagttcaaactatgaaacagagccgttgtttaacatcgtcaaagattagggaaaaaaatacagatgatg

SEQ ID NO: 43731 - DNA, 882 bp, Arabidopsis thaliana columbia
gtttagatcttgtatagacttgaaaaagagtgaaacacttacatagtcatggaatgcctgagcaaactcgtccagggtaaatggccaaagaccaagaacgtctgcgaaagtgattaagaatctccacacctacatgttgtcaaccacgttaagaatgttagctggtgactaaaataaagcaaaaactcgtttctatgtatatactgttattgagattcacatcaaagtggaaaaatttaacgacagataagatgggaaaagtcaccataagaagatttgcaacattctcatcagaaccattccacggcttgactgcaaagggctttttcaattttacagatgttgggggaaatattgcctgcttgtctgaaataatataatccatcagatgaatgtaagatacaattcccataaacagctgaaatgaatcagaaaaatagataaaataaaacaaaatgagttattgattcacttctatattcatcgaggttctgtagagtttcaaagtcaagggcgagcattgaaggcaagccttttgttaacgcagcaacctccatgagctctactcgttcatcttcaataagttccatagattcctttgcgatcttacgagcaatggccctctcattagcagctttaagcctggcaacctctttttctttacgcatctcttctttttgtcgcattttctcagcctagtcataataagagatgctaatgagtaaacaacatttcaagtgagttctcaagaaacttaaatgtagcgcatatttcacattaccctgattgtttctttcttcaagaacttctctcttcgctgcaactctcgcatctgctctttaaggtacctctcttcctctctctgtttttcacgtaaaagac

SEQ ID NO: 43732 - DNA, 492 bp, Arabidopsis thaliana columbia
tccccgtaagtactaatggtagttgtattgcaactttctatgaatgacaagtaaatgcattctacgattgtataattctagtttttgaagaccatattttatataatgccaaaggaaagaagtgatacaaatcggagtattcatttttactaactttgagttctctgccacatgcaatgcaatgttcttacaaagtcaataaatggatatgaaataaagacaaatataaacacacacaaaaaacaaacgaaagaatctaattttgtggtgaggaagaaggagaagagagggtagaagtcttgaagagataccaaatccggtgaagttacctcttttgtggttcacatagctcctttgaaaaacagacacttctcatactctgccacgtgtctaactatatcatcaaccacgtcagtttctctgtggatctcttcacgccacatcgtcacgcaacttgatttctttttaaatttatagttttattaagttttt

SEQ ID NO: 43733 - DNA, 563 bp, Arabidopsis thaliana columbia
ttgtgttgatgctacaccatcaacaagacctgaagctcaacaagtgatgacacaacttggagagattagaccggaagagacaacagcaacaacatcagaaccgttgattgatgtccctgaagcttctgcttccacaagtcaatagaaagagtggagaatttttgtagtgtggaaatgttgcagagtagtagttgatttcttttgcaattctttaattcttccaagttgtttttttgttctttgtttgtttcagtgttttgaaccatttcttcatcagtttatgtttgtaaatagtgtctctttcatcaagtagtctctgtcttttgagcacagtgaaaaatttgggttttgaagaaggtactactagaaatgagtttcacatctacagtaaaaatttaggtaagttttaaagcaccatttacaccatatactgaaaaggagaggacattgagaagattcaaacaactaaccaaagtccaacaagaatgaaagtttaggtacctatgtaaagaatgaaaatgctcacacatttgccaaaacataaacacataagagtacaaaga

SEQ ID NO: 43734 - DNA, 559 bp, Arabidopsis thaliana columbia
gtcaactaagctttcaaaattgctttaaatttgtttataattggagtggtgaggatcttatacaaattttaatggttaacataatgtacctcactaatttatatcattttttggaaaaaataatcagagtttttaatgttgacaacgaaacggtgtcagtcattcttgtataattattatctcaaataaaattcaatgtgctcatttaagatagtcactcaagtaagacataaattattaggattttgatgtatcaattcaaattagatgagggctatataatagtgtaatgctcttcgaaatagtactacaagttgtttatatcacattgtctcttagataaagaaaaaacaaaagaaggatgtgaaaacacatagagcttcttgatctataacatcatttccacgtaactagccattgaatatcctcaatgtgacatatctttgcaactgtcttttacattgttcgattgtcatttcattgtttgttatcttcttcatatcaaaacatagttacttatagtaagaaaatcatacatgcatctatagctcggtgacta

SEQ ID NO: 43735 - DNA, 359 bp, Arabidopsis thaliana columbia
atgtataaagtagtatcttacagtgattatattgatatatgaacaagttttagtaaacaatgtaatctttgaccgtgttgacaaaaattgtgaactttagagtataagactacacacaatgatcaaatgattaagcaactaactgcaaagaacaaaccttttgtactggtctataagaagcaactaactgctttgtatcttttacttcgagggggtgcatgcaaacaaagaattggtactggtcttatgaagattgtcacttgtccacattcgaggtaataatgtgtgttgtcacacaaaaggacttgaaaatatgtgactgtaaggtgaagagaacggtctacaatcacgtgtacgta

SEQ ID NO: 43736 - DNA, 215 bp, Arabidopsis thaliana columbia
ctcttccttgtcgccctccttcttgtcgttgtcttggcctttgccaccttccgccggtggccggccttatggaagtagcgccgaagcatgacacattcctcaagggtgtgcttgacgagaccctggtgataggggcacgactccttgagcatcttgtcgaacaagttggcccctccggaagcttccgtgggttcccggtcttggcagcagcgaca

SEQ ID NO: 43737 - DNA, 537 bp, Arabidopsis thaliana columbia
tagaggatgatcccctgactagtactataaaacaaaaacttgcttgcttatatcaatagtaggggggaaatcgtgatacacttttactgaaaatgatctttcttttctttttttgttctttcaatgcaaattttgtaacatgttacattttcgaattcattttttctaaatgtacttctcaaataatattggtactagtagaacattaccagaaaattttaacacgattatcaacacgttttattcgtagttagttaggcttaagcagcacgttgaaaaatacaagtaactaactacgaatacatgatctacgaaaaatgtttgttgaactaaacgaaaagttatcaacatagagttttaaacacattagtagcaagacaatggacaaaacccgtaccgaggcactctagtagtttgcgtgtaataaaaaacacaagacgagaatccactactacgttacaaaagtcttgagatttgtcttttttttcaatcaaatagaacacgattataagcagagagacaagatctaatggtttt

SEQ ID NO: 43738 - DNA, 594 bp, Arabidopsis thaliana columbia
aatccatattgtgattgatggataattattgttatactgttaaaagttaggtttcgtagttagtagcattatcatatagagaatgtggcctttccaccaaaggcaaagtagtatcagctgttggtttgaactccactaagaaattatttataagactctcttgttgttttgtagctttttaaggagattaaaagttcatacgttcatatttttgttgaagcattttctagttttcttttcttcgttcataaatgatcaacttgctattataaaaagaaaagcttgcacactaatcaatttacagtcttgttaattctttttagatatcaactagcatattaataaacgattaaaaaagcttaaccaagatgcatgttacaaatcctaaaaaagaattggacattaaatcagttcccttcaatttatataccaaactccactggactaaatttagatggtgaattagaaacgaagctaaaaaataacattaatattaaataaatgttacaagcaatatgtgaaagtaatcttaaacttctgagattggggtgatcatcatacactatggacaaaataaaactgatcaaaagcaca

SEQ ID NO: 43739 - DNA, 1324 bp, Arabidopsis thaliana
ctgaccctgtatcatcaccatcactttcagactcattctccacaacctcctcgttagcatcttgagcaaccatatcccgcctctcgagatactgtaatcttctcctcatgtcacctaactccctttccatcaaaaacaacctttccttcaaagttaaattctcttcctccagttgagcaatatggctatcctgatcatccactcgggttttccaaaacattgttatactcagaaccaccataattcggataaatcatctcaaaccgactcaaatcatgatccaatctcctctcaacctcaacatgctcctccacatcactctcactcgaccctccttcatcttcatcatcctcctcataaggttccaactcattcccatcagctctgagcctaatcagcactttcatagaggcataaccatcaaccccccactccatcttcgccatatcacccaacacctccctagacggcgagaacattggcgtaggcaacacctgcggtgtcacagggcatggagacaccaactcagcaattccaccagatttcttcgccctgataataaacgaagtcgtgttcctcggcgcataaggaacatatcggttaccatacttcttcttcggataaaacttcctcgtctttaacctattctgagactgcagctcattcaaagtcggcggcttgtaaccaccagcaccaacctgaatactaccagaaccaggaagttgctgagggttatacataggaatcccagagttatgcatcctcctaatttgctgctgctgctgctccatcattggcctcttgtcacttgtaatcttcttccctttccaattgttccgactcattttcgaaccaaagttattaggagcaagattctgctgatactcggaactcaaactctggttaaggttaaagttgcgtggattcatcatcattggctgattgctgttcatcataacctgtggtggctgctgattcattcccataatcggatgagattggcctaataacggactctggttcataatccgtggtacctgtgacggcggcggcggattcatcctctgttgcggtggaggctgaccaatcatctgctgtggaggtggcggattcatcagcttagattgatcgttcatctaggtgacacaaacactaatttcgaaacaaaaaccctaattttcgcaaatctcaaatcaaaagtcgaagcaagtcgatagatagatcaatggacaagagattaatctgagtgctgacgagtggaatttttacaaaacaaaccacagatcaaacaaaaaaaaaattacagacagatcgaacaaaaaag

SEQ ID NO: 43740 - DNA, 577 bp, Arabidopsis thaliana columbia
ggcaatgcaatctctattcaaaaaccgatcacagaggtagctcgtgattttattattggagtgatattagctccgagaaaacttctggttattgttatggctctcatggttgtctgtttgttgtatgtttttctgtgttcctattatcgttttacttgtattgatgaagctttgtatggtttggtataacgcaggctgcaaaagagttcgagtctgagcttaagacagaacccgaagagtctgttgcagaatcatctcaggtagcaacgagtaacaaagaagaggagaaaaaaactgaggtttcttcaagctcaaaggagaatgtatgaagatgagagacttcagtgtttgcttttccttgtagctacaacaattttatgtcatgaagagtttagatcaaatattattgtctggaggaaacaaaatagccttccaatgaaaagtataaattaatttgtgtttgatgaatctagaaggctctttcgagtagaagaagcaaagaacttgcacaaacaaattaactctagttaagaccaaagaccaaagaaatacagagaactcttatgtaaacaaagtg

SEQ ID NO: 43741 - DNA, 520 bp, Arabidopsis thaliana columbia
cccgtcacttaatccatctccatgaggagccataaccttatccctctcttccgattctcggcgatgcgtttgattcccaggaaaaatccgagaatcggaaagaaacggctggaaactccggcgaatgagagatacagtttattcgtttttggaccttttggtctcttttgtgtttccacttaccaataataatataataaaaacaaattatttttttgtgctaatgaccgtaattaattaaatttagctaagtttttgtactaatctggtctccttgtagttttagccaagctcttgtaatcaaattttcaaattcttcaattaacttcagaatatttatttcacacttttaaagataactcaaatgtttcatcatagccattcaagcatcataaacgtaaacaaattttaacgaaattaaaaaacagagtaaacattgcatcccatggtcattagaaaaaaaaaaaaaaaggcatgagtagaatcaccacaccacaagaggaaacccaaactttcaatt

SEQ ID NO: 43742 - DNA, 387 bp, Arabidopsis thaliana columbia
tgagcaaagattctgtcagcaattccgagtctggtgagaaacccaacagggtcaactccagcctcagcgtcgctagtgctctggctctgactcttctttttctgtttctccttacgtggtctctcggcggcgaacgaagtgattttcaacttgatcttcctgtgaaaattgactcctgatgattcgcaggcgccgtttctcggaaacgataagattgtttgggtggaaagagaatctggtttgattagacatggacaccatttttgttggtgctacgaagaagatttgttcatactctcactcacactcaggggtttagtctggttttaagataagagaagtttttgagtcgactcgttataaagaacgacgacgagtgcactcggt

SEQ ID NO: 43743 - DNA, 536 bp, Arabidopsis thaliana columbia
ctgcatctagaggatagcgcaatcctattctccattgcatcatgaggaagggcgacatggtgtgtcgtcagcgtattctcaaagacagtcatacatttcaaaatttgactatcagaaaagactatagctttgcagtagtctccaaaggcctttatgttattaacagaatactctctagcaatagtgagaagctagaatctctaacttgttatgttatttccaatctaaaactctaaaattccaactgaacctgattccatcaaaagatatttcgcaatattcctgatccaagctccactgatagtggctagcagacatatatacattagcgacaaaccaaaccaaatcatctcaagacaaaagccaacacaaaccttgtatgttcgaaacctacattctgatacactcatgtaattccatgctgatttcgaaatattgattccagcggactaaaaattgtcaaacaagtgagaatcgacaaagcataaattcgcaaaccaggggaagactcatcagattcagtcttacaaatttag

SEQ ID NO: 43744 - DNA, 537 bp, Arabidopsis thaliana columbia
ctatttgttttctaaaaataaggttgatacagacgcagcagtaacaaatcacatatgttttcttatactatgtaaaaatgatagtaatgtgacattttataagaaagtaacaagttatcagcatatataattttgttatcagagaatattttggagatcttttagtaaacaaatatatcaagtcttctttttctaaaagtatgaacatcaattgtcaattatgctgcgatttccaaaaaataaaataaaaaaaattttagaaaaacaaaacgaacttgtattttggtcggtcaaccattttggtttgtattacctagacataataaatatcagaatttaaacatttatatatatatatcgctttttagtttcacgataacaaaatgtactacataattagcagtattgtggaaaaataaaaataacacttttcaatattttgagtagtgtgcgtccttaacttgaaattgaatgatcaaggtcttggtttttaaagcttaattctaagaatttattgttataagaaaaagaattaga

SEQ ID NO: 43745 - DNA, 647 bp, Arabidopsis thaliana columbia
  unsure (1)..(647): unsure at all n locations
tttgcacagaacaaaaaactgttaaaactccctgagtctcatgccaagacatataacagacttagagaatggggtttaaagtatcactcatgaaacaaaaacttacagtcgactcattgtaaaccatacgtagattaatatcctcaccaaggcatcattactaagaccacagcatctcattttcaaacaatacaaactttttttcactgagctttcaagatgggttcaaattgaaaaccactccttcacattctaaaccgaatcacatgaccctctccattctaggccttaagctcgactaagtccaagaccacaaaatcactcctcaagatttaaggaaaatgcttgcataatcacaatcatacaaactaggaaaacttcgatcaaacatcaccattgcaattccaaaactagcatattgacagtaaaagatgattacattacctaaacaatttcagatcaggattctcattcatcacaagaataagagatttgaggcatgttaagaaaatatcagaaactgagactanaaattcaccacttttgagttctttgaaatggaacacaattactanaacaccacaattcaagacacntcacatagacacagacagatatacatgagtgaaggtgagaagatttgagat

SEQ ID NO: 43746 - DNA, 527 bp, Arabidopsis thaliana columbia
aaaaaatataaagtccaaagtttacgtgacttataataaagcccacgaacatgtgtcatactctaaatcagcttgtctcaaagtcaaaacaattaccccacgaccaaacaattagcccacagccatgttttaaaacaattaagcccatgttggttttaaaacaattaagcccacgaacatgtgtgacaaactctaagtattcagctttgaactaggtattgcttattgatttgtttgtttaatttcatttgatttaaaattcctatttcaaaagttttttttctccagattatatggagaatatgaagaggaatgaaggaagtggagaagaagataagaagatgcatcatttgagtcttttgctacttttattaaactttttgcttgtattagtatgttttgtaatacttgtgatgtttgatcaacgttttgttactttatcaaacttttaacacgaattataggacaattcaacttttaatatgaatccggatccggatccggataccacggatattctatttttt

SEQ ID NO: 43747 - DNA, 500 bp, Arabidopsis thaliana columbia
tgccgtggcaatgcacatgttgggaccacttttaacacgatatgggaggagaaaagatacaagcggttcctttaagtttgtttttctatatggtaattctaccaaaggccagagtgatgctgtacaggtaagaaatatttttggtaggcttcaatcatatcttcctagatgactaggataattagtttctttaatcaatgctatccacagaagctcattggtcttgagctaaaaactttaagttgtgcataacaacttcttctaaatttctcttaattcaagttcatcttgcttgctcatttgatagtaattttcttatcataaggattatatccatgtgtatactatatgatttaggccgtgctactaaaaaaacacattaaatttggtcagggaaagagtatcctcagacaatttaatgctactgtgtgtgattagtattggttgagattgtatactcaagacataattgtgtgtaataatacatgaatgcaggaggt

SEQ ID NO: 43748 - DNA, 557 bp, Arabidopsis thaliana columbia
cccaaatccgtaaaagtaaaaggtcgtacacagacgcgcatacataagagatatgtggaattctttcgtaaaataaaatcatttccattatcagaaaataataacttcttcaacaacatgttatgggtatctacggatatgtatttatgtgtaccactgtacctagtgaacaattcttctttatacagatcttcaaaatgtactatataccttacaagttgtatatgtcaatcaagtcctagttgttgacaacataaatatcaacttgtggctcccatccttcattggttgaaagattgaagatgtctcaaatctaaataacattttcaaaaaccctatggttataattaaaatatgaatcagcacaaaattataatagcattacagcatcatcgaccagaattaggacaactacgagatatactgtcttaagtaaatttattggttcacaacttcccatagtcaaaaagaaaaccccgaatcctaaaaagttcaaaatacattacgaagagcaatgtaatactattagatatatgtatctaatatgggatttttga

SEQ ID NO: 43749 - DNA, 480 bp, Arabidopsis thaliana columbia
gatcccctagtcataagttcaaaacagacatgaccatctctctaatttacgactactttttcctttttgggctttgaatgaatcacgctttcaaataattgggctgcttctttctttcccattttagaccaatttcaaagacaaaaaataaaactagcaattgctaaccgaaactccggtatcccggttaacccgttgtaggtggggctgacgtgggtgcaatcactttgtcatatcaacacatcacgtgtctccacgtaggatgcagcagaaactatttactacattgactaaaatacccttcaccaccaaacaccaccagcacacgaaactttcatacgtttctttcatggcggattcgtctctcgctgaaactctcttctctctctcgttactccaaccactcctaattattcacatcattattggcatgaaaagttaacttttcctatataacaattattaatggcgacagtagga

SEQ ID NO: 43750 - DNA, 495 bp, Arabidopsis thaliana columbia
tctctgatgacccccacgtggcaattatcggtggaggaatggcgggtttggtctgcgcattgaacctggaagctcgtggcgtccagtccacagttttcgatacggttcgtcaatttagataatttcgaatctgaattaaagtttcttagaatgggttctgtgaaatttgtggtctttgggtgtttttgcctttgtatattcacagttcacttcaaagtcaagttttttgggctcaaatgtggctaattgaatcgaattagtccattttcatggacagagcaatcaagtaatactcttttgtgttgcgttcatgtcctttggaaactttcttttaaccgtgtctagtctgaattagaatttggtagaacgggtgctgtaaaatttgtgattttttggggtgtatttgctgtcgtaatttcacttcaaactccaagctttagtaagaatatcttgtgtcacttctgcaggggatacatgggttaggaggaagacttg

SEQ ID NO: 43751 - DNA, 421 bp, Arabidopsis thaliana columbia
ataaacttaaatgtgggattagtgatgccaatcagttaatttgataatgttattttttggacccactttttttttttgaattttcaagactaaatgattccccgcaagaaggtcagagacgagacaaacaaggtacatcgtccatttggttgaattttaaagacaataccaactttttttttttttgtgtgtatatgaatcaattttcatattcgtttggtacttaacaaaatcaaatcagaccaaaatatatatatttcataattttcttttttaaaagtatagtgtaccaattacccaaacccagaccataaccatactacaatcactagttcaatatatcttaggtaagattcgccttaatctaaagaatcaatttgatccaattttgagttttgaagcatcctagctttgggtatat

SEQ ID NO: 43752 - DNA, 622 bp, Arabidopsis thaliana columbia
  unsure (1)..(622): unsure at all n locations
aaaaatcttaaaccaaaagttactatattttattattattatcagcttcaataactacaacatttaaattttacttgcttttctaaaagatgtctgattttttgccccaaaaacaaatgtctgattttgtacgtcattacgcccacaccgattacgcccaacaattatcatgtgattaaaacagctggaaagtttgtgaagaggaaaagaaaaattatgccaactaaatctaaatcaaaatttcgcatataaatcaattgcattcaaatgatgtgccaacgatttttttttaaacacacatacatgtacactttcaaatgaatatataaaattaagcatttgagtgtcctatactattttcaaaattgcagaaatactgctttagctacataaagaggtaaaaataagggttgttttctttgtcggactgaaactaatttcaagtatttgtaatcttcccagcaagaatattctctaaatttctatttatatcgagcaattattacaagaaccctaagtattcaaatacaagtacatggcaatatgcatgtttcgcagcaaatgacaanacctgagagtgaaaaaatattagaaaacatcatcaaactccgacgatgatgat

SEQ ID NO: 43753 - DNA, 545 bp, Arabidopsis thaliana columbia
caaacggatcgcagctaactcgacctcgtagcacgacctctagatttttgcccggcaggtagccatcttgtgcctcaacacgaccaatctccaatttttagcgcacgcaaccttttccttggcacggcaaagagtagctcgtggacgttgcaacacttccgtcgcacaaccaacaaaaaaataaatataaagagataagggagaaagaagattttacctttggagaagaagcgaaaatgagtataaagtgaggagatagctgatacgtttaccaagaaaaatcatgttagcctaattcactaagttatatgcagccatctcgcctcgaaaaacgtattgaagtcattattctcttgtaaagttccgcaaacctcgaaagatgtgtcaaagtcactattcacccaagaaagctccgtctcatctcgaaaaacatgcccacggcactattcatccgagaaagcctcagctcatctcaaaaaacattcccacggcactatttacctgagcaagctccggctcaccttgaaaaatgtgccactgtacta

SEQ ID NO: 43754 - DNA, 409 bp, Arabidopsis thaliana columbia
attaatttccatttatcgataaatttattttattagttaactcaaataaaatttaatttcgtttttcaaccaatcttgaaaatgattgggttaacacatatttatgtatgttaaatatgtaatttgattttattttcttgtcaaatactttctggaagttaacttgtggattagttttgcttaatgacagagttagtctaggggcaacctgctaatgtggtttagatataactgaaactctgttatttaacttccaaatatattaatttatccctctggaaaataaaacttaaaaaatagcttgaatgtatttggtcaaccaaaattcaaatttgtaccttgtttaagttatccaaaatacatataagtgtatgtatataactataacgaggaatgaccagccgtccgg

SEQ ID NO: 43755 - DNA, 454 bp, Arabidopsis thaliana columbia
tcgatcgatgtggtagattgatgaatttggtaactaagcttgcacaatgacagtatggctggacatagctgcgttgcacaataatctgattagaaaaaacattgttattttggtatttcacgaataacattcgaggtcttaagtgttgaagtagtccgttcccactgaatatgatcaaagcttagctagcttcttcattgcgataatttatggtaacacccctgaccaaattaattaaatagctaatgtttacacaagtcttgtaaatatatctcttgtaatatatttcattttacatatcttgaggtttttcccttttttggcacttaagatttggaattttaagtcgcatgttttgcatagaaaacaaaagttccctaaattttgaaaagatgataaatgatacgaaaatataacaaaaacatccaaaaaaaagttgtatttggaaaactat

SEQ ID NO: 43756 - DNA, 378 bp, Arabidopsis thaliana columbia
atcaagtatatatacgtatatatgtatatgacattgactatacagacataaaaaaaaaaatcgcatacgtgctcggctgggtgcgtaccggcagacatgcaattcattaatgtgcttttacagttatacttatatgaatttctcaataataataaaaaagtagtttcgtattccaagataaccaaacaatgaagctgaactatatgatttaccagaagtaacgaaaagatatacaaccaataaatatataacaacaatgacacaatgtagtttaagcatcatgcaattttttttttaaaaatatcaaatgtgaagaggagagaaaaatgatgagttccaagaaaggtaaaagtgtgagcgcccataagagccatagta

SEQ ID NO: 43757 - DNA, 645 bp, Arabidopsis thaliana columbia
  unsure (1)..(645): unsure at all n locations
cctttcttatggagtaaaagatcaattgacatgtatgtcatcttcttgttgctcaggtatatatatattactcttctctttgtaatcatctaaatgtaaaactcttaaacttcgatttgtgactcgaaatgtctaaatgtgatgttataatatggggaaaataaactcgtaataaaagcatcagaagaaaacagagcatgttgtgatcacaggattcaggagtctgaatttctacatatagtcattatagttaaaaggcaattttcatatcgtctaactaattaatatataattaagattagtttaagcttaatttgaggtggaaagatctgttaagaaaaagagtaaatttgccttgtgatatccagaaaagaacagaggaccaagacatttgaagattccttccaactatcaactgtcttaatctttgaatagtaagcaagtaagtgtcactcactattattaattaacaaaagcaaattggtttcctcactagcgaacaagatatcaataaaagacgagaagaccgagacctgtagttgtcctcactaacgaacaagatatcaagaaaagacgagaagaccgagacctatagactatagttgtcactngttaaccgaagcaaacgtggatgctaggatacta

SEQ ID NO: 43758 - DNA, 304 bp, Arabidopsis thaliana columbia
tcaccgggccaagatctcctcctcatttgcttaattatactacgtgatggtttcagttggtgtccatgatattgtaaaaacaatataatttagaaaatatgtctataccctatagaaaaaaatatcatattttctggtaaaagactataaccttttatgctcagaaataggaactcttgattaccagagaaaaacgggtaaattttatgtttgatgaagttaactaaaagctatacgtatatcacatttacagattattaaccaaaatccgacataatttacttatgttttagaacatgtgaga

SEQ ID NO: 43759 - DNA, 527 bp, Arabidopsis thaliana columbia
ggaagatgatggaagtagatggtacttgttagagatccttagtgctttgacgacgattagagagagcagacgcgttcttgttcattcaggtgggcttaagtttcttgtagaagctgctaaagttgggaacttggcctcaagagagagagcttgtcatgctatcggactgatcggtgttactagacgagctcggcgaatactggttgaagcaggagtgattccagcacttgtggatctgtatcgagatggggatgataaggcaaagcttttagctggtaatgccttagggatcatatctgctcagactgagtacattaggcctgtcactgaagctggttccattcctttgtatgtcgagcttctctcgggacaagatcccatggggaaagatattgcagaggatgtgttctgtatattagctgtagctgaaggtaatgctgttttgatagcggaacaactggtgaggatcttgagagcaggggataacgaagccaagcttgcagcttctgatgtgttatgggatcttg

SEQ ID NO: 43760 - DNA, 585 bp, Arabidopsis thaliana columbia
ggtgttaggatcgatgttctgatcagccattctccccgaaactggagaatccataaccaccatttctgatttctctttctctctcgctcgcttgacagttattttcccgttcactatgctccgtcgagtccgttcccagtataacagacggagatgagagagagttagttctttaatatagagcccagtattgttccattactataaatgtggcccattaaaggcccatactcaaatgcgtggtttttttttctattttaactaggaattagactgctgacgtcattgtattgaatatgatcaatcttacaaaataaataaaaatgtaaactatacatttagaaataatggtaaacttcctaatttaatatatttacatcctataatgatatattcacacgatttacataatctaggtaactaggttagtcattttgttatatatatatgtgtgggcatgcaagtctaatagaggtacatccatacaaaaacacctaaaaagtccattagcgatttagctcaatattgtttcacagttcaagaaagatgggttcttctcaaagctttttagctgtttcacgaagc

SEQ ID NO: 43761 - DNA, 211 bp, Arabidopsis thaliana columbia
aatttataatgtacaattatttgcgccctagctagaacgggataaagtgtgacaacatataaatactattaaagattcgatatttgatgactgtagccgcctgcctagaacggggtgccttgtttgacttgccaacttcaaccacatttctttttgtttacttgaaagttagaaataaatactagagaggaagaaaacagagctttcttct

SEQ ID NO: 43762 - DNA, 621 bp, Arabidopsis thaliana columbia
caatgtgaggctacgattagatgatgccgtgaagagcaatcaaagagatggaagtttagtgattcatcaggaggatgaggaggttcttcagcttggctacaaagacacaaatcaaattaccaaactcgaaggtgaaacttccgcttctgcaagtttgttaaagaacgtagtggataatctacacattgatgatcgttattactgatttcaacattgatcctttgatttaaccaacttacttaatcatcatgtcttgtttatttaggctattatctaatctagctgtgcattattattttttggattttttcggtgttttggtttgggaaaaaaaaaagctactaatataaaaccaaaattttgttcagtttgattgagactgaaatacatttaattaaataacaaaagaaaggttcattgtcgattttattagcaaacaagtcagttgtccagcctttggtatgaagaaaggtggcgattaggtctttgtaccgtttctgattcttctcgaactctgttggctctgtctcggcctcgtggtggcttggtacagtagtgtgtaatccactggagatagagacagaggatttgagaactcatgttgtgttctttgaagatgag

SEQ ID NO: 43763 - DNA, 397 bp, Arabidopsis thaliana columbia
cgggtaccgagctctgggagaaaaattaggtgaccttcatatgaaaaagatagagtagacttttttatttaacactacttggaagactttcttacctactctcactatagacccgattcgtcagaaccgggttttggattcaatttcggataacccctaaattggtacgccaattctcagtcactcggaaaaaaaaaaagacctcacctttgtccacgaatcgcaagtgggtcatagaaaaatcgaagcttttgacggatctcagtcactttagtctctctgcccacgacccttctggtctactaagggttatctccatgtgcccctcttcctggcaactttcaggtattacttggccataagatgtgcaattgagtatgtgcatcagaggtttcct

SEQ ID NO: 43764 - DNA, 430 bp, Arabidopsis thaliana columbia
tttattatatcaaacttataaacagacattactctgttcttgattgtgtgtttgccattcgcatccgcctcatgaaagcaaagcatttggaatgatttgtgttattataacaaatcatatgttattcatatcatatatttttttaagtcttctaatatctaatattattaaaaaaaagaactggaaaaaaacttaaaaatccaatgttatttaagacattttcatttttaatgacttttaaagatttagatatgttcttagttaaaaatacaaatatctaaatcacatggttttaagtgggatttggggagatttttcttggttaactttcttgaattcattgaaaatcatataaaaacacattaaaaatcaaatcatttaaaatatagggttgactcacccctagattttgttccctattaaaatagga

SEQ ID NO: 43765 - DNA, 505 bp, Arabidopsis thaliana columbia
tcgtcttagtaaactagcatacacacttgccatgtctttgatttgttctcactatctcctatacaaaagatgtcacacaaaaacaaagcttgctttgatgcatccaaagatgaaattaaaagggcaatacttaccggcttcttcacggcaacatgaactttgctagcagacccattttgtggcaaataacgcttaaaaaccagctgaattggcttccacggtgtggataccccaatagagccaatctcaccagctcgtgcagccgcagcaccatcgcttgaatcaatgtcatccatgatcagaatcaaaacagtaaaacaacacctaaacccctcaattgaccaaacccaactctctcatcaaccaacacaacacaaaactcgaaatcaacgaatcctaattccttccaaagagctgagaaatcaggaatttgcgatgattagggagacaaacccaattgactcaagtcccataaccccttattctcatccaatcaaaccctcaa

SEQ ID NO: 43766 - DNA, 527 bp, Arabidopsis thaliana columbia
ttgtctatataggctgagatcgctttcgttgatttgggctaattaatattttcacgctttatgttttttcatctaataacttttattacaggggggaggaatcggtttggaagtctcctatctctcggtcatattacaggaaaagcagacagactttatatgagaggcccaggaggacgtggcaaagttgaagtagctgtttctggcgttgtaggtacttttcagttcttatgcttgaatggctctttattttcctgttagaggtcggtgtccctatcttctcgagtgatacagtgcagttagtaatatgccatggaagatagctttaaaaagtaaaaacatagagaatgccctagccaacaaatgtcttaggtcggattgtccaaatagcagcagtatttgagaagtacaatcgcgaaaatttaagagtaggagacttgttgaaatgtatattgaagacgtagtctggattaaaggatgattgtatagaattgcattacgcagatcagagccaagtagttttaggg

SEQ ID NO: 43767 - DNA, 535 bp, Arabidopsis thaliana columbia
caataaacaaaaatcgagttcttgtaagaacttgcgaaggacaatcatcttgtttgagttccaacatctgccttaattagtacagtaattaacagtttcaacatctactttacttagtacagaaattaacaaaaattgagttcttataagaacttgcaagagaatcatcttctttgaatatcaacatctgtcttaattagtcagtaattaacagtttcaacatctgtgtaaagttgttcagtaattaacaaaaattgagttcttgtaagaatttgcaaatgacaatcatcttcattgcgttccaacatctgtcttaattattacagtaattaagaaaaattgtgttcttgtaagaacttgcaaaggacaatcatcttcattgagttccaacatctgtcttaattagtacagtaattgacaaaaattgagttcttgtaagaacttacaaaggaaaaacatcttcattgagttccaacatcagtaaaaacatacaaaaattgaataattttgacaacttgattacaaaaaaattggg

SEQ ID NO: 43768 - DNA, 487 bp, Arabidopsis thaliana columbia
cgttgcgggtcttcttgaaggtatagaaggagatgtgtttaagaatatatgtttccttaatgttactcttagagtgaagaagaattcgaagaaatcaccatgggaatgctcgaatgtgagaggttattcacagtgggtttcgccggaaattacttgtgattctttgaaagagagtatattcccggaacatggatctgattgtttcgggttatcggaaaataatatggagatatcaagtggtttaagtagatcaccatggttactttcttggtaagttactgtgaagttttgaacatcaaaggggaaacacagtttgcttgattctgaagaaacctcttcgattttgaaaaatgatgctttctttcatcttttgttgttttcgtgtaaatttgtgtgcagtgaggaaaataatcagagtggcttaagagtttttgtatttgttttccttgtatgggctttaatgcttttggtgagcggaacaattgta

SEQ ID NO: 43769 - DNA, 420 bp, Arabidopsis thaliana columbia
gtcgcgattcacgtttcccgctactatcaaatttcatctctttctcgctcctacacaaagtagtatcgaccaagagattgattcgcaagcacgggtaaattcctctgccaaatttcgtttccgatttccttgtgtgacctaacaacgatgcctaccaacgccgggacaagtttgtcttcttacaagcatattgtacccatcggaacgacggtgaaatccgagacccttgaatctgacgcatatgagattccgcggaagagaaagatgagatcggattcagcggcggtgtctggtaattcagtctctacgccgaagaaattgacatctcatctgacaagttctgtcttcaatcccggaatgtcagaccaggtgaattgttgatgtgcataagtccaattgtgggactacgtttctttaggg

SEQ ID NO: 43770 - DNA, 514 bp, Arabidopsis thaliana columbia
tgacatgtagaacccgtgcctggatggctttatcctatgcaagtcattttttgaaatccaaaagttatggaactcatttatccaatttaagtcaatttaagtcatttttgaaatccaaaagttgacatgtagaacccgtgcctggatggctttatcaaacctgaattatgaaagcgttaaacttggaactcatttacacaaagtaaggaattaggtaatgaaaaaaggaaagcaaactgtaacgtttaacccatagtaaaggaaatagttaagagttctattcaaagaggaagactaagacaaaattataaaagcgttgaacttagaaacggccaattactcaagcctctgcatccctcctgccttctacaccaatcagtacctcacggttctaggccagttcaagccactcttctttaacctccaatgagtcttctcaagaacttcatatctgaagcctttctcatgaaagtagattaccatctcctgagcaagtgaaatgttctccttgatg

SEQ ID NO: 43771 - DNA, 574 bp, Arabidopsis thaliana columbia
gcaggtcgagaggatccccaacgttatgtatcacaaatttctgcagctcatcaagtaataagagaatttattctgatttctgattagtagttatagattatgctgaaaatgaaaatgcgtgtgatagaaatgttggatacagatacgtggcagtaggtagatatgcattttatccgaatacggaaaaaatggagaatgacgtgtccacttcttaaccgaagagtaaacattatcgtgtcttggctcttaccagtgatagggactagacaacaaatcggattttggtccgcatctatacagaaagtactgaggtgggtttggaatttgtgaataccgctgtccataactaactcttaaccatatcgtcaatttccagcataatctgtgactcgtataggggaatgttccacgtctcgttgctcaaaaaacgaagaaactacacaatttataaggtcgtgtggaccgatcatgtaatataacttattgattaaacattcccaaaaaaaaatttagagtgaaggtgtttgcttcccgttatgttgcagggggagcatttgacacaatttggaaaaaa

SEQ ID NO: 43772 - DNA, 556 bp, Arabidopsis thaliana columbia
gttaaattagtatacctctcagccaacatgacaagaatgtcaatgtagtcaatctaatgacattggaatggaaacatattgctactaaactattggagaatatgaagtaagataccttcaacgcagcagcaccaagagcaaaccaaccatctgggtacagagaatttaaggccattgcagcctccctaaaagtaagaaaaaaaatgagacgtctcacaagtaaatcagcctgaagggccaaattcataaatccagttccgttttagaaaaaaaaagacagatccaaattgttcaacataccacagcatctttgacttctcaaaatcaccgcgattgtatgcgctgcgagcaagagcgcgctgcaagatgaagataattagagcatggactaagagagaagaacataaaagatttttcagttttctgtctcaaactaccttagcacgaactgacttatcatttgaaacttccagggctttttcataacaggaatcatttatagtaacatcaccaagtgaacacctgaaaccaatatttatcacacatttaatttacg

SEQ ID NO: 43773 - DNA, 310 bp, Arabidopsis thaliana columbia
ttcgttataattttctttggaaaataatgtgtgaaaccaagtcattttcgtatagaagaagccagacaaaattagaaaagaaattcaaagacaactagaaacttgacaaaaaatagaagaattgattgactgaggtatagacttagtgcgaagactgaataacaaaggttagcttgcatgactagtaggtaataagatttacgtgactctataggccgagacagaagagctccaccattgattacacgaacacataattgttcgaacgtagattgtaatcatctcgaccatcatcacaatcctgactata

SEQ ID NO: 43774 - DNA, 409 bp, Arabidopsis thaliana columbia
gcctaggtgctaaatgttaacctttcacctccttatttgatagttagttatttaccaatatctaaactcttatttacacaataatataatcaaaatttgagtattcatgacagttatttaactcgtattatacactataatatctatacattggcatgacatatttacttagaaccttaactatatatgtgacactttttgggaattccttctttcacctattcgatataggagtcagaaagtgtcacaagtataacctttttgaaaaatagttgcttgtggacccagcctattttagaactgattgttgtggaccttgtggtcagcgcctcagcggttacaccaactcaccataatctagatggcagtctgcgtatgctcgttggaacactaacgattaccatatata

SEQ ID NO: 43775 - DNA, 420 bp, Arabidopsis thaliana columbia
tggtggtctacacggtacgaagcaaatcagtaactcgtgctaatctaagattatgattcacagggtcaacagtcttttccacccaaggagtctctttgctactcatcttctgcagtttcatataccgaggttgcggtttttctgattcattaccagtagtattgtttatagacttcaagttacttccttggggcacatgagttcaagcaccaaaatcaattatgagtatgctctaatatttttctatgactaaccgtcactaaagcatcatcaagaactaacaatctaattgcatccatcaacattcaacagttaacatcaagtgaaacatgaagatacatgacaaaccacaaaaatacgactcgtgaacctaaatcactaaagaaatctaaacatatccactaatagcaaaataataca

SEQ ID NO: 43776 - DNA, 532 bp, Arabidopsis thaliana columbia
ttctcacggaaacctgaagattcagagcaaagcttgagactttacgcacgaacctgtgctctgataccactgtagggtttttgacaacctctataacacctcaagcttaaaaccaatgtcataaacatcaacgcaggtcacagcaaaacagagcaaagcatatcatagaaaagatgaagtcgaaacagaacagagaaagagaagaaagaagagaggagctgatacatatgcggcccaacacccacctattctatatcaataccaaaggaggagcaaggcccagaagcctgtgaagtgaagtcaagtgggttaagaagagtaaagaaaattccagataagagtcatggtttaattggagttacttaactacagtaaggaataaccatgattaagtaggtggcatcatctcattgcatctcgccataacggtgcacttgcgtgaggaggagatccaaaagtagtataagaagtatgagagggcatagagagagggtatcagaatctggtgaaagtgtacgggggaggggagaga

SEQ ID NO: 43777 - DNA, 418 bp, Arabidopsis thaliana columbia
ccaagtttggaagcatttatttggccaagaatggcttagcatctctgcaaaaccaacacaaagctatattctcttaaaaatcagttcaacaaaagaagaacctgaacacagttggcccaccaccaccactaccacaatctcctcctccaccaccaccacctagtcaccggaaaccaattcatgccctagattaagaaccagaatccttttgagacaagatctatatatacactctacacatttacttatacactttatctagatatagatgtgtgtgtgtataaaggttctttttcattacttgttggtttagtgataaaaaggaggagagttttcagtagggttatggtctcctggtgaaagaagagaccaaaagagaggatggcaacaccgtgtgaggctgctgatgaggtgtgtt

SEQ ID NO: 43778 - DNA, 413 bp, Arabidopsis thaliana columbia
attgttagaccaggagctatttaaaagctcacggttcctaattagtatttttcttttgtatgacacaagaatctgaaaatgaattcagatcactatgcttcatggatggttcaccttggtggagctaggctggtatatatttactctctatataccatattcttgcattgcttatacgggcttaatcaaatactgaactcacagtttctctttaatttgagaatagattacaaatgttgccgataaagtaggagttggagttcacttcaatccgtttgtcaactggaacgacagggtaagaaatttcccaaaactgtagagttgtttaaaacctaatgaacaatctaagtttgttaattatattttcatatgttttcattctgctctatacaaagacggagccctcgggtttt

SEQ ID NO: 43779 - DNA, 463 bp, Arabidopsis thaliana columbia
aatggcaatggcggtgttctgcttaggaaaaattatgtcgatggcaatggattgtgatgtaattatccattgttgtaataaaaattatgtctttcctgccatattatatatttaggaaaaaattatttaagaggcttctgtttatatgtataatacgatattattttttcctaaatataatatggcaggaaggacataattttagaagatttgagcatggcaattgtggtgttctgtttagagtcatcatcactcaacgttgcatattaatacaatattatttcttcatatacatatgtatgtacaataataatagtagaaatatacaatgtaattatatgtttatcacaaacgttaaaaaatttaattttgttgacagacaattaaaaagggatatttaatactaaactcaatccaaagaatcatcaaaatcttcaagacaaagaaaacacaaagaagagga

SEQ ID NO: 43780 - DNA, 396 bp, Arabidopsis thaliana columbia
aaaccaatgaatgagacattcaaaactttaataaccaaacctacctacatgtataaggctcaccttttgatcctcatcgggtttctgcaaattgacaaaacaaagactaaaatccaaaatcaaaaattttaaaaagaattactcatattctacaaatatagagaggtggaaaatcttaacatattactttgcataaaagattctactatattatttgggaagtacattttaaatgtaacctcaatttttgtaattaattacatgaaatgccattagaaaaaattaatcaataacaaaatcttttaatgacgtcattaaggttaccaaaatcatttaacgacaatattcatttcttaattatatggcttatcagatctaaagacgggtcatcaaaga

SEQ ID NO: 43781 - DNA, 419 bp, Arabidopsis thaliana columbia
tcagtgctcgctttctgctttgccctcataaatatcagtgagaattttgtttgtatgtaatcatatggagttggtgacattttcttgttttttttttttttgtaattcatatgcagagctttctgcaatcctggcgatgttgaagcatttacagaggagaggaagcaatcacttttgacaagacgccatgcgaaagggtcagattttgttcgtgctgtgaaggagattatagagagttatgagaagcttaagcagcaagaacgagctagtgatcccaaatctgctgaagaaggcactcttgggagtgctgagaatacaacactgatgcctcaggtcattgaaattccaactgcgacaagtctaacacaaatgaattctgatcctagtcatggtagagatgaatctactctgctaaatga

SEQ ID NO: 43782 - DNA, 511 bp, Arabidopsis thaliana columbia
ctccaggcttcaggcgatcgttacctcttcgacagtctcctgatcagaaggaccgagaacagggccaatccaagaccagcatttcgtggacctctcaaatgttacaagtggcttccaaccctttgcccctaaaggcgaggtttttgaagagaagattttcagaacccctctaatcaaatcctggagcggctcttgtgtctcaaggatacagggatctcccgggtttgacttcacgcagctaacaatttcctggatagtaagggatggcaagttcccatttccctgctgtggcgacttgttatcctctgcctcctcgggcacggaggcaccattttctccagtttcatgttctgcattctctactgccacagatttgctaacatctaatgaatcttcaggacgcaaacttgtcattgccatacgcactgctgatagaagatgtacaatagagaaagagaagccagtgtgaactgttggtgtgatcacacaaatggcttcttctgcggtttgg

SEQ ID NO: 43783 - DNA, 428 bp, Arabidopsis thaliana columbia
ctacgtttgaataaaccattgagtttgaaatctttaatttgtaaataaggatgaaacctgttctgtgtttggttgttctgtgcgtaaacagagttggaaacttgtaattttggtctacttcaatttggtagggtgtttattgttcgaaaacaaacatatgggcacttattgtagagacagcttttttaatcttttactttgaccccaaaaagatttggagaagtcaattttggacagcagactactaaagagtaaagactagtaacaacaaacctgaactcatgccaagttagaattgagatttggagtttcgacaaagcttgagagagatcgatgtcgtcaaagatggtgaagtcttcagaaatcgtcggaaaacttaatctcagggcacaccaagaaggaggctttttcgctgaaactttcagaga

SEQ ID NO: 43784 - DNA, 575 bp, Arabidopsis thaliana columbia
caaagttttgatattgctacttctacatccgcagattgccagagagtttggtctaaatggggacatattcatttcaagttcatgaagctcttggtcaaaacctagccaatcatttggtttcaagatcatgttcacaaaaatccatggaatcagtgatataatgagagcaatatcgatcgtgttttcccaccattggatgatcaaaccttgcagttcaagggtcaagaaccgataaaccacattttatttcctataaacctaacaaattcataggaccctcatggagctgtagaatctaactaattttaataaggtaaaaatctatagataagcatcggagatgaatgtagatataatgtgaggcctgaattacacaaaatcaagtgaaatgtatttagttaactacttaataatcatcatgaatactggatacatgtgtgcattattaaagactagagaaatatattattgacaacttcaattaaaaaacagagaatagttattcaaatgagaatgctttactaaaagtgtgaaagtcaaattgtattattgagaatgcaacaagcacaagatgt

SEQ ID NO: 43785 - DNA, 449 bp, Arabidopsis thaliana columbia
tgtcctctaatatatgatactcctggtggaggtggttctacaaaaatgcacaaaaacaaaaatacagattaaagttcagtaactctcatactcagaaagacaatttagagtgaagtaaaggtttttgatatggtaatccgtatcgaattcggcatagaagcagctaaattctcataactccagcagccaaactgatgatagccattagattaagcaaacagaccaagtacattaagtcttatacttagaatgacaactagattgagcagaaggttcttgatttagtaatctgtgctatattctcataactccagtagccaaactaatactagccattagattaagcaaacaaaccaaagtcttatacttagaaaggcaaatagattgagcagaaggttcttgactccgtaatctgtgttaattttggcaaaactaatcatacattgcga

SEQ ID NO: 43786 - DNA, 618 bp, Arabidopsis thaliana columbia
  unsure (1)..(618): unsure at all n locations
ttgatctaaatccatatatttcaaaaaaaatttgtttacaatgtaaatccatatttgtttgaagtttttacatttttttttaaagagtcgacacgtaggtcagatatgcgcacgtaactgtgtacaaacaaaagacgtccggagtcgtatagatcaaaacgaggccagccaacaactacccttttgcgatggatttggtaacgctgactttcttttccttgtacgtattcatcgaccatcccaaaaatgagattattttttggacgacaaacatattctttctatattgacatatataactgtgacgtcatttttgtttttaattatttgaatcagtaaacccccaaaacagtagttaataaatatgcattgctatacaaatatacaatttgcaagtaaaataaataccatatccgtacgatgacttaattaaaaatatattcacattatttgtttaactaaaattttattactttttccccttgacaagttaatacttcaactgcgttcaacacataaaaataaataaataaatatatatacttcaacatatatcaaacattttagtattaccacccatatcaaagagtaagaanagtagtaattatgatgatagta

SEQ ID NO: 43787 - DNA, 701 bp, Arabidopsis thaliana columbia
ctgtagttgcagactttttcctacttcagattaaggagaatggttttttatttgtaagcaagaagttaaaacagtgaaaatctatgcaggcccagtgaccatttaaagtttgagtatgtttttaaaatttgatggctttgagaatcgatctgaactatccttagatttttggaaaagtgcaaaaaagtgcaaagtgcagcatccttatatcactttatgaacttttcacgtgaggtctcgaatccatcacttaacattaacacatagtataagctatacacttggttgttattacttatttcttcttacagttcttgaagccgagaacatatatggctgatggtttctacaattaggaacgtgatatgactcattttagtaagaagttgtgatttacagctgaggagtctgtgttatcaacttgaattgtagaatctttttgttgtcagggaggcgtgaaagtgtcacatgttcaggttatcgggaagttattggctttgaaccttggcttccctcttagtagttagcaaggtgaaatctgcgttttcacttcttgatgatccatatttcacaaatggggatctgtaccaattagactggttttgtttactaatgcagagaaagaagaatactatagttttaattagcagaacttacaacccatttgcacaacagtagtaatacttcttgaagctaagaat

SEQ ID NO: 43788 - DNA, 574 bp, Arabidopsis thaliana columbia
ctttaccacctctcagaacgagtaacatgagagtataagaaactataaaccaaataacagatctcatgattgaaaagctgataagaattattaattatctctatagttgcagaaaactattgtttgcctctcgaattttttatctttcttatcaacaacactcataataaatatattcgagatatcgtaaaaatagatgcatctttttttagaatttgctttgtaaaattcaacgagccttcttaattaacgagttcgacggatcaactctttcttttttggaaaaattcttctttgtaaatctacttactagtattatatatttgtcacttttttgttttgcgtgtattgtgatgacgcatcacctattcttttcaaaatacacagttctaaccttgataatctaaactcacaaaatccataagaccattaatttacaatgtttaatccattgaaaattaatctatagacaaacgttcaatctttataaaacaaatttatggttttctgggatcaatcctactagcaaggaatagatgaagcagagatgctatgggaacacattcaggttgtg

SEQ ID NO: 43789 - DNA, 488 bp, Arabidopsis thaliana columbia
tgcattcatgaatcattagtgtttcctaagcacagtataccttgtcttctgctgttgcacggtatgcattcttctgcttcttagcatcaggaacatcatcatcaaattctatggttagctctctggtgtcatcaacattattatcatcaaccgtactatcaagactagggattggacagtcttcccagtctgaatcattcatttcatcatcatcaacattaccacatcccctgtcctctagaacgttatcaatcaatcttgcgtcgagcgcttgctttcccttaccgtttacgcctttatcccgctgcaatgatagaagagtattaaataattttacactcccggacaacataggactagataagacaaaaatctccactgtcccaagaaaatctttaggcataggacaaggaaactatttttaacagccattgataattggttagtagtaccacggacttcacaatcttcaaggaaaccttgaaaac

SEQ ID NO: 43790 - DNA, 476 bp, Arabidopsis thaliana columbia
gagaatcaattcgtatgtagagtttgttgtttcttcacagctgaatgtgcaatgcatgtctttctaaaaaaatcttattgcaatttgccaactcagcactgtaatcaatcaattacgaagtcttattatttatgatcaaaatgttttatgtattttaaaaacttcaatcacaattatatttgacagatggaaatatatctctacatgtaaaatttgtgagcagtgttagtttttctgcttaccgaaaattgttaaattaaagcataaattgttttcttcaaacgtgtaaatgatttatggtctcaaaacagagtgccattaatgatgcaattacaattactcgtacaaaaaatatctaattcttataggattgataaaaaaagctctaaaagttttctctgtccagcatgcacaaggtcatgaatcttaaagaacactcttaataatgcccttttgtttctcatagagccttgtgc

SEQ ID NO: 43791 - DNA, 313 bp, Arabidopsis thaliana columbia
tcgacatcagaagaaagacgagaaatttgctacaacccagatcgcaattttgtagatactcaataaaaaaaacggtttctttacaggtccatcttctaccagagaggcgtcacgtttggcgttggtagaggggaagtccctggcggcatctctgagtctctggcgccacacaacgggctcccacggtcgcgaggacatccgccgcacacgtcagccacacaagtagacaggctctcgcagccgctcacatccaggcatacaggtacccatgtgcagcagcatcacgcacaaggcgcacttgtaagagacaaga

SEQ ID NO: 43792 - DNA, 440 bp, Arabidopsis thaliana columbia
  unsure (1)..(440): unsure at all n locations
gttttgaaaattttcatttctgtggagagaggtagtgttggatatgagtgatattagctatgtgggttttgtatgcttttgaattttgaaatgaattgctatgaaaagttgtaacctaagaaaggtagtgttagatggaaattagattagtatgtgagttttgcatgttttagaagcttgaaatgaattgctttgaaagtttatagctttacgctgatataagaggctaatttctaagtagtgttggatagaaataagattagctgctctaatgtttttaaaatgattcatttatgattctaatttgcctaatgaatgtggtactaggtgctaggtaacctagacacttctgtttggttgggtagcttattgttagaaaacaggtcagcaagatttgtntgtctgtntcaggttctagagttagcagagaaatggctcta

SEQ ID NO: 43793 - DNA, 515 bp, Arabidopsis thaliana columbia
ttcttctgagcatagagaataatatagtccaaagtgttaacactccgtagcaaaaaaaaaagtcttcatttatgattattttattaactccatgcactaaatctataatgtacatttacatctaagagatgatagtaactattattgaattattgaaatgcactactataatcttttcacattcgtgaattcaaaaactaaaagtaaggtttcttttactattttttcataacataagaaattcaaattatttccatgcatcgacgtggatcttctagtttcaaatatttgaatgttctttctgcatacagagcgaagaacagggtcgataatgtgtatcaaatcataggctcacatttgtaaattactagaacatggaaccgttcacgtgccttccaaatattttgactccaattttagatcgtactcatacatcaatgccccgctccggtcttgaatcaaagattatggaatcaatgtgctacttcttgtatgaaaaagatgtgcaagagacc

SEQ ID NO: 43794 - DNA, 529 bp, Arabidopsis thaliana columbia
gtagttgagtttatgatgatgcttgaaggagtcagttcatattttgggattggagatttgggtagaagaaaacaattcagaacgttaaggttgagcataaactttgctgatgagtggctagggtgtttttctcaagactgggttggcctttgatatgaccttgggtggttatggctaggttgagcataaactttgcttttggttgaagttggtgtttttagttattgtcagagtaacaagtcaagcaatctgatactgtgcttggcctttgattttacctcagtggattcatgaaactcatttgcattcattcagtctcctaggtgttatgtttcatcttcttgctacatcctgaagattatagcttcctctctgaggttgtgacactgtcttggtaaatacctgttactgggaaaagagtcagactcaggatcttcgtcaatatacattaattgttacttcgttgtacttcgggtcatctctcgagctactctcttagtcattgataagttgctttgtcggaacaaat

SEQ ID NO: 43795 - DNA, 497 bp, Arabidopsis thaliana columbia
tttggatgttaactgttgatgattgtgaaggcattattggaacttcaaaactacttactccttaatccataaactatggttgtgcagtcttttagaagattcaatgcatgatagtccgggagagttataacgcgaagattcgtttttttttgtattttctttgttgcagcaaaccaacactgcagacatgttggaagaagctgtggagtatgtgaaggctcttcaaagccagatccaggtttatctacagatactaattgattagaaacaccaatttatgtttaataaaatatgttaggattttggatttttttgatcattttaattggttttgatgatggattcaggaattgacagagcagcagaagagatgcaaatgcaaacctaaagaagaaccataatgtatcctttaggatttgatatatctgtattttatttttgtactatctaaaaatggtgatgatctgttcgaaaattcgaaacatgatcttatatat

SEQ ID NO: 43796 - DNA, 473 bp, Arabidopsis thaliana columbia
taatttaacattttacgatcaatattaatatggcctttttgaaacttcagtctcggtcgccaaatatcaataaaacgttacctttcctcagaacaatcgactctataattagatagtagcacatttgttatgagattttatcacaaacaacatttgatgccccaacgtacttaactttgacgccatgtgaacgtggattcctgcagcctaaaacagagcacctacttgatctgaataatagatttgttttattaatagtagccttaagacattgatactttttaactcgacagaggattctcgtccccatgcatttctcattaggcatgacccaagagttattctcacaacgagaaagctctcgtgcattccaagtaaactgagaagacgaaagatgaatgttattccaaacaattgatataatatattttaagtttaattgagtaactagcacgactgtacttcaaaattat

SEQ ID NO: 43797 - DNA, 528 bp, Arabidopsis thaliana columbia
tatttctagaaaatcttaatatatatttcaccattgagactttttctaagatataagggaacgtgcaatcctaagagtatactgcacggaataaacggtcggtgatggttgaatagttttgatgctgagcaaacggaaaaactgtggtcagtgctacgtaaatatattaattactatttattctttattatgagttgtcattggtaacgtggaggacctaaaaaaaattcgaagtgactttagccaacgattgaatgtttcatcatgaggtcataacggatttagcttatgtagacttgtagtgattccacatgttgctgaagtgaaaaacccgaatcttcaaacgttttgccaactcggctcccgtgtctgtaacatgtcgcatcaccatctacagcttaccacgtcagcttccacgtctctatcagcttgttttccactagtctgtattctttaatccattctcatatatcatatacttttgttttgttagtagttttatagtctactattgtttaacaagtgata

SEQ ID NO: 43798 - DNA, 484 bp, Arabidopsis thaliana columbia
ctttatgacatccatatctaaaagtaaataaatatagactctgcctacttgattataccagatcacaatcaccaaatcatgatataaaaaataaataaacagaagtttagcataatgactgaatataaatcatgattctaaataaccgactgaatcataagaaattgcgcaattccgtaatcattgttcaattcaaccggttatgtactcatcatcacaatcgtgttaaaacaaaacaaaacaaaatctgtattagaaaaaaatgggggagaaaaagacaagaataatgtatgggatgctcgagagtaatttgagggaaatcacaagtgggctgaagaacttgttgagtttcttttgacatatcaatagactaagaagtcacaagtgggctcaagaacttgtcgaattactttcttttggcatatcaatagactgagaggtcacaagtgggttcaagaactaggaacttgtagacaacttgaag

SEQ ID NO: 43799 - DNA, 501 bp, Arabidopsis thaliana columbia
tgacggttgtgcgaggtgcggtaggcctcggcaccgacggtggcggccacaggagacacgggtggctccggcagttgcgtgaggcgcggttgcgatggcggccacacgaggcgtcggtgactccagcgtccttcaatgaccagcttctccgatccgatggcctcggcggcggcactcccctaggaccgagcgacaacggcgctcccctaggaccgagcgacggctatgctcccgaggcggtcgggcaatcgacgacgacgctcctgaagcggacgaacggtggcgacgcaccctaggcccggtggtgatgacggttgcgcgaggtgtggtaggcctcggcaccgacggtggcagccacaggagatgcgggtggctcaggtggtcgcgtgaggcgcggttgcgatggcggccacacgaggcatcggtggctgcagcgtccttcaatgaccagcttctccgatctggtggcctcggcggcagactcccctaggaccgagtgac

SEQ ID NO: 43800 - DNA, 536 bp, Arabidopsis thaliana columbia
actatttatgtttgttgtatcaaatcaaatcaaatatatatatccaaaacaccaaatgtataacacaccgatctcagcaaagttgaagaccaaaagaagagtaaaatatcaaaaacagagcttttgaatcaagagatgttaactgctttttgcgttttcgtaatccattttcgcttagcgttctctattgcatcctctttcagtttcagcagatcttggaaggactggttaaactgtgactcgatcaggtttagttctgtcttgagatcttctgggtaatcattgtctgaaatggaaagattgtaaatggttgacatcattgagcaagaatccagatacgagctcatcgactctgcatctcgaccagcttccatggcagcatttccgttgtttgctgagtagggaaagtaatagtctgctgatatgtctgacttcattgatcgtcctgcagcttcttcatcttttgagttccagtttgctgatgtcatgcttcatgatcctcatgcgttagacgtggagagtctcggttatgatgc

SEQ ID NO: 43801 - DNA, 522 bp, Arabidopsis thaliana columbia
gactctccccttttatgtttaaccgtaatctctaaacctttcttgagtattattcatctctttcttatggtcttatcaatccacccattgatgagttcctttacaatgcaagagtagatctctagttgggtttagagggctagtcaaaggggggtcgatgatctaatgtttaagtggctataactatggctttgtttaatcgtttatacggttctttctagttgagtttgttctaaatgcatgtatgtcctgcacgccacctagtacatgattttagaaattttatccttggcagaatcttgtgtaattgtaacatcccggttttaggaatatggtgttgcattcggaaaggtataaaagaatttatatgaccacctatgtcacgaaagtacatttatcttttccgttaactgtcctgagagaacttcacagttaagcgtgcttgagctgggaagtctcaagatgggtaactttcgggaagttattgttggaccatacgaataagacaaaacatggggaaag

SEQ ID NO: 43802 - DNA, 583 bp, Arabidopsis thaliana columbia
tctctcttctttgaactttaatcctcttctctattgcatgctttaagctccaaacccaaaacgcaggaaaatctctttgacagtttttggttttagatgggaccaatcaaaacgataaagaagaagaagagagcagagaagaaggttgatcggaacgtattgcttgctgctactgctgctgctacttccgcatccgccgccgctgctcttaataacaacgacgacgacgacgactcatcatctcagtctttggattggtgggatggattctctcgccgtatttatggtatctctttttttttcctacctttcttgttggtggtgatttttgcattggcagagtttttgttttttgaatctaattgttgattctgtttcatggaacttgcaattctgaatgttgatttttatttgggttttctaggtgaaaaagtttcagattgaatttagtaatgtagacaagagatgcctttaatcttactctgtacattggagtattgtttcgatctattgattcgtagttttgggggtttgtgagtcttattcgattctagttgtgtcgtggctacttaagtgactatat

SEQ ID NO: 43803 - DNA, 326 bp, Arabidopsis thaliana columbia
  unsure (1)..(326): unsure at all n locations
nnnnnnnnnnnnnnnnnnnnnnnctaaaggcagtatgactttcaagaacgattcgtcgacgcgtacgcgaacaatgaagtcccgcaaattgactacaacaatcttgaagggtacgactggaacgcagttattgagtgggccaacgcgaatctagatgtcccgaagtcagaccggactccggatcttcctgccacaagggagcaattcgacaatatattcgagctccgcgaggaaccactaggttcattggatgaactataccaaacgacaacggcagtcacccttaatcgcaagaaacagttgatatcgaacatagcgtttgccgc

SEQ ID NO: 43804 - DNA, 1439 bp, Arabidopsis thaliana columbia
  unsure (1)..(1439): unsure at all n locations
acttcatcggacgttgcacctctaaacagatcatggtaaaatatgaataagatatgtgttgacgtcttaaccgtttcaagctataattcttaaactataatctaagaatttcaatggctcagctcccacactgagtaaagccttaactgacccttgcttctcttactcaagactacttatttaattgtccgtaactccacttaattacttgccactagcaaaaaacttttcaagtagtgggacttataaaacaaacatgtcatgatttgtaacaataggaaaagagtactaagcatacaggaaccagaagtaaggcaagatgacagaacgaaacaaaaagtgaccattcttaccaagaggaacattaagacggacaaaggtctcttgctctggctccttacgaagaatgtcagcagcaataggatcaggctgaactccatgtaagtcaccagacacactatgggatcgaatcatacttgaagcagccatagatatttgttcttcattagcatctgcaggctgcaaaaaacatcttacttgtaaacccacctattcaatcacagaacagggattgaaaaagtaatgataaataaagaaactcaccatctcattgtcaccattagcttgcaagtaggaagcatctaaaccctcactattagtcaaattatcatcatcatctgattcttccacactctcaaaagcactagcactagcaacaggggatttcggagatattggtctaacaaagcttccagttttgctgatactactagctccatgtacagaagctctccctgaaaaaaagcaatcacaaactatctatcagcatcatcaaaggattaaaggatcaatttttataatccacaatctaatctgatcaattcaggtttggttctcataccttcagatggcgtatgaagcctagggagaccaggaggaatttcatcgacataaacgtgaccgttgctccgtcctgtatcaccgccgccgccgccgccaccatcggtaaaaggagtggcatctggaagagaagcaggactgcgaccatattggtcattaaccttccttctaacttggctccgcgcctcaccaaggtcggattttgaggctcgtctccatcagggttctctttacgctccttaccacgctcaaggactagattcagtgccttgaaatgcatgaaaaacccagaaacagcaacgaaggaagctccgaatagagccgcgagggcaagttggtaaatattgggttccatgagtgacacaatcaaaatctctgtgtgtgtgctcaggtcagaactcagaagagagagtaagaccacgatttcgttttagtggcgatggtgggaggtcgaggttgagttgttatttataggcccaacgagtgaaacacgccacttgcaaaaaggctgggtctttgatnaaagttgaaacctttat

SEQ ID NO: 43805 - DNA, 571 bp, Arabidopsis thaliana columbia
cgaccatcttcctcgtgcttacaaattgttcttaattttataatatgataaaatatcattttccgtattgtaatgtaatgtccttctgtttcacaataaaattaatttaagattttatttgacaaaaagaaacaattaaggtacaatgatttttttaataactcatgtataaaaagctcatataaataccattttcatacaacttattagaaaagaaatttgtttgtttattgtgataaaaatattaataaatgatataccagaaaatttaatatttttagtgagtgcaatatcgttaattaaacgaaattaaatcacgtacaaaatattaaacatgattaaaaaaggatattaaagactaaatcatattttgaggataatttttttttttttaatatacaacatactcgtgttgcgctctttctatacactaatatcttctcgagtgcgttttgctagaactagaagcctatagaacatgtgaaaaaataaagagttgttcaattgaaaaacctaacaaaaataacataattttttaattttatttttccatgcaggtgggagaggagat

SEQ ID NO: 43806 - DNA, 450 bp, Arabidopsis thaliana columbia
gactctagcccattgtttcgaattttcagatcgattatttgagtttggacgtttggttcataatatcagtttactgggatggaataattttcaacttttaagcggtagtgggtggaaaaacatttgtcagggatcggtttaatctaggattgagcattccacttcgttgttctatactgcaaattaaattcatgataataaaaaactatccataaaccatatactaaaaatattacttttaaaattcatggggcggagaaagtattataaacaaccatcctctctgcaaatttttatttaatgtcaccactactttggatcacttttctaagatcttaagttttctgtttgttgcaattttattacatgtatatgccaatatctcttacacaccaactccaaacaaagcagcggtggtacatgaattaactcctaatccctattaatatt

SEQ ID NO: 43807 - DNA, 542 bp, Arabidopsis thaliana columbia
caaatcagacagctgacacgtcttctcagatttgttggctgaggtttctttattttcatttttttatttttttctcatgttcttgttgtatcatggagaattagtttgtaatgtatttgagaatttttatcgtttatgtaaacgccttctattgccttcagaaaaatctagactagcatcaaaggaagaacttgggaaaaactgtaattctagtcttctagatagacagatacagcatttagagatgataaatttacaatgttcttggaatggtgaacgatgtttaaattcaattcttgcttacatcattgcatgaattctttagattgaacgtacttttcagtcaaagaattagagatgatgagtccatgtcatgacttttgtgatattttgatattttctgtcatcttatattcatacaagtacaaaagtatctcaacatttgcaagtacaacacagacaaaaatttcaaaataaacaacaattcaagacaattaatcgttttgtgtggaactaatcacagatcaagcacaatgagaggt

SEQ ID NO: 43808 - DNA, 429 bp, Arabidopsis thaliana columbia
tgaatgcgtatgtgaacacaattaattagaagatggaagacatgtatccatcgtttacggctaggtattaattttaggtggagaagatgtgaacatgtaagggttttgttgcttctcgctaagaacatcctaattcatgtctctgcttctcagccggctctcgaagattgcccttgggaaacctgcgtccgtaagatcttctcttgttcttattctctctaatggcttctcatcttccgcgctacaaacccatccttgtcgcatcatgactgctcgtccttgtggagaggatctcggaaaacttatgattatggagaatgctactgattgtaaagtcactgttttggaaaagaaggcacccatggcagttggtgtatgtagatgcaattataacggttggatcatctcatggatgtgtagcttctttga

SEQ ID NO: 43809 - DNA, 583 bp, Arabidopsis thaliana columbia
tttgtgctatggttcgattaaaagggaaaaaaattgtaatctaaagatttgtgtaagattactgtctattgtatgaagtatgaactatgaacacaatatatgtacatccaaaaatacgttaaactaactccgctgttttgctacaaaaaccctttcaattttgttctactaaacgtcgttagaatacacaaaagcgaaacagcgtcgtttatttataatgcgctactcacatgacgccgtttcacttttgtgtatacaaacgacgtcgtttaatagaaaaatttttggaagggtttttgttgggaaaaaaagagaagaagggtttttgtactttgtgtcttcttgttccatcatcgtgacacgtcacacctccattcatctccgccgtcctctgtctgttcttagtcgcggctggaaaaaactgtggtgagagagagaagaagaagaagaagaagatgagtaataatactaataatacagagatgaataatctagcgatggaagaagaggatgaaggagagattttccttggtgaatcagatgtcatccgtgaaatcgatgtcgacgaagaaggttttttttt

SEQ ID NO: 43810 - DNA, 524 bp, Arabidopsis thaliana columbia
gaatttgtctctgtatgactttgagcttccagctaaatttgtaaccctaaaaatatttaaaaaaccagatcaacagaaaagacagatgatacagtatggttccaaaattttattactatttttgagttttttttttaaataagtcaatttaaacaaataatcaaattgagttgaattcgctaattaattgtcatattttttttttcacatttctaatcatttttttttttgaaactatacacgtcattgaattcacgggattatatatcaatcagtttccaagtcagaaatgttagcaattttcacgggctagaaaatcagttgatagttttaatttcgaactatttcatacaagatggcgccatgttcagggccttttagcacataagctattattctaagcccaataagttaacccgggtcggatcatttgacttaatcggatcctaattttggtaggaaatttctccggccgtgatttgttggacgcgtcgacgtccgatggggatgagaagtagtggaga

SEQ ID NO: 43811 - DNA, 567 bp, Arabidopsis thaliana columbia
catactggcgcagtagcatcaagataaggaggataagaggactaatatcatcagcgatccttacgcaacagatgacactttgtacaaggaaacaagctcatccaccaatctgaaggttcaaaatcatgagatgattaatgttaaaaaacggataagagagaaagagtttgagttgaagcatctaaaagttactactcacaagtgtttagaggcttaaatcttgggaaacacaggtgagtgtctaatccacgtcaacctcacaactgtctcgagtctctcaagaacctatatggtattagcaggtaatgaaactttcatgttcatcggaaagaataccaaaatgagttgggaaatcgaacatttcttataaactgtgaggattgaaacaagaccataccaacagaactgtttcggcgtcgtctgaatgcatccactgaaagaaaagagggaagatacgtcgaaaatgagcaagtaagaaaagccctagagagttcaagagtggctcaacaaatcttagccaagtgatacgtcgctccttatttcttggttggcgtccaaatgccgagc

SEQ ID NO: 43812 - DNA, 444 bp, Arabidopsis thaliana columbia
gattgaatttgttggaattccagttttgggttcttcaccaagctcagaatttcaaactgtcagaattgtttgaaagagtcaaacttgaactgggattttttttgacttagggttcgtcagatgttggatttgttaatccttgcagagtcgtttaaggggtttacaaaatgctttatttataatcctaaaagctatctactttctgatttttttcccccagttcttggtttgaattctaaagctgtttcctgtgctataacaggtgagtgtttcgcactacattgctcttgctctactggagattgcggttgtgtgttacgagagctagagttgaatttgctttggtcaacacaatggggacttgtggttgctgacttttgtgatttcagttttctacttggatttagatggatgttcttccattgtgcgaaatacacctaactg

SEQ ID NO: 43813 - DNA, 554 bp, Arabidopsis thaliana columbia
agttgagaggatccccttactcgcaaagtttggctgtgctgccgtaaatatccttggatctggcaatggtcgtgccagatgactccaaaagggaggcaccatgaagaaacttaagcgctgcctgaaagtaaacacctgtgctctcgtgattggacacagcattctggcaaaggttactgtcaaatgttaagccaaggaagagacaacatgcgtaaccactgcaacattttccataaaaatgtccaaaccttaagacgatcagccatgtgtttcaagtctgtagcctctttgattgagttggaggcagtctgactcgtggattcctttttgaaagggcttaagccaacatgatccttatgcctacttccattttgcttttggtttcgcgaaccttcatcgtgggtcacactgtgattatcattccgcagtctctgtttctttgtatgtgatatctcagtgtcgtgacccaagacttcaacttgagctggtgaagctgatttatacgttaatagctcagtggtcacttccaatgggttgcttttccacgagaagtg

SEQ ID NO: 43814 - DNA, 612 bp, Arabidopsis thaliana columbia
tataaatatacacactgttagcttcataacagtcacatctcaaatccacaaagctcagaccagcaatggggacagtatctgttgcattgttcttcctcttcctcgtctttctctgcttccccatctcattggactcccagaaactcgatccatcgacgagctcactcaaccaagaagaagcccatggtgctctgttttaagtatctgttgattcacttttgtttatatgaccagagctgttaagcttcattttctcgtttttgttcttcttacagcagagcttacaatcaaagacataaaaggtggagaagatgacaagagcatcgacatcttccgggcggggaaaggaggtcgtggagttacaggcggaaaaggtggaggccggaaagcatctccaaaaaaacgtaatgccgccatggaccaccggccaccgttgttcttctccgctgcctccgttctctttactggttttataatgttttcattaacttctttcaatagttcattaagattctgtagtgcctaaacaaatgtcttaacctgagtgtgacattgtactgaatattgtaaacttcaaattctattgaaacggatacagagtacacttgtata

SEQ ID NO: 43815 - DNA, 555 bp, Arabidopsis thaliana columbia
  unsure (1)..(555): unsure at all n locations
caatttgaaaaatatattttgtacgtttacccgattatatcgaacattagacatcatttggttattttatttatgcgactaggtcttcatatataatgcttagaaattagaataacgttatgttttggtttctgtattagtttttaattattttaaaaattaagtccaatgttctcgatgaattctatttttgtacgcttccaattagatagcaactacaattaatgggttagtaggttaggtcatatgtagcttccgattgatttttgttttctccatcctttgaggtgggtcatatatgtacacacggtacccatataatttgctcgtgcattatgcataattgatcgtttcaagtttccggtataatttgtcgctttcacgagacaccatcgaaacataagtgtgtcacatttcatgccagcgacgtntgcatggcgttgatattacacatattttcgccgcttctgaataatttgtaccctacgaacacattggcactacatatacctaccagacgccgctccacaaaacacattattgtatgcgatgaat

SEQ ID NO: 43816 - DNA, 592 bp, Arabidopsis thaliana columbia
agacagtacaggaaatactaacagtagagattagcattaaaagaaaatattcacgagtaaaagcagaatagaggcactaaagaaatactaacaatagagactcacatcattttgagctgcctactgtcctcaacagcgtcctcacatttggtacaccctatttcattcaaaggtacattttcaccaactatcacatcactttcagttgcggagatgggtagatttggagtacattgagctggttcgacaatagcacattcttcacccagacttccatgcccttctttcagcagcatgtttacagtttttggcatgttctcagtctcctgcttattcaccactaaacaagacgatggagaatgttctatagcttcagattgaacaacctgagccacacaagcatcaattttactgccttcttcattcagatattcacgagaattttccaatgatacacaagcatcttggtcgttgctcctgtcctggccagataattgagaaggtatgcttaatgagcatatctcagaggcattgtttgcagatgaatcacagtattaggatcatggagggtcaattttagcacttgacagta

SEQ ID NO: 43817 - DNA, 611 bp, Arabidopsis thaliana columbia
  unsure (1)..(611): unsure at all n locations
atcaataaaccttattggctaatttcaacctcaaagagtagtaggaacaggtaaggtgaagccaaacagctccttttacagttggaccactagagctgatctggcatacaaagtatgcttattgggctgtcacggcccatccgcaaaatgtcgttggttacgaagcatccacgacatagacggtgccacatgtagaaaagtgtttcggcgatcaagattgtgtccacatcattagcgtctgaactgtccacgtgtctatcaaagctggcgtcaaacattacgttttcgtcgtttgcgcctcctagttcacacgtgcaacgaacgcgtgcgacgtatcaaaattgttaatgttagccatgtataaagaatatctacaaaattaacctcaggaatatttttgttttttcaattgagagaacaaagaaaagactggtgagtgataagcgatgatggccggtgaatcaggtagccgtcctacaacgtggttgattttgagcaaactcctatctactcttcacactattgaaatccaaaatgtcgcacaccataataatgtgaattttggtatggaatttgagggaacagtagatatatgtntctaccagtgaaag

SEQ ID NO: 43818 - DNA, 518 bp, Arabidopsis thaliana columbia
cttatagcaaacattttaagcttgcgaatccctaattttctaagttgctctcgctactactccagtcaagaagaaaaccctagtttatgtctcccgattatgccatatattagatttcctatactccaataaattaagcttgcggaatccttaattaccgatatttctatattctcaccattcctttatttctctgatattttcatcctatataacagagtcatttaacaatgaacacattctatgaattaagagatctgaaaacaaactaataatattcaaagaaggtctgaaaaaacaaattaatatccaaagaagatgaaagcaaaaatagaatgtagatagactaattcataatctggtttactcgagttgcacgtaacttggaacataagagcacgcaagataggaaagtggcgtgtatggagattcccgagatccacttctctacaataacctttctctccgatgatgtaagctatgttgtaactgtattgaaacttctctgccttgttttt

SEQ ID NO: 43819 - DNA, 540 bp, Arabidopsis thaliana columbia
tccgtggttttctactaatgaccacttcgagaagaacctatttgaaaacagtcttcgaaatggagtttggtatttttgacacttgtatcaatccgctaaaaaaaattacttacattcttcttaattaatagattctacaatctctcacgtaaagtttacgctaaccatgaatctctctactagtttcttattgaattacttccctacctatagctgtagacattaggtatctccatgatttcaaccctagaagaatccataacaatattaagtaccttaagtattttgtaaaattttcttgtgattgaaatagatcttaactacttcaaatttttatataagaatatataatatttttgaaattttattcgctatatattatgtttggaaatttgcgaattcgaaattacatattatgtttacacaagatgttgttgtgtctggatggacaaaggaaaatcgcagttgcaggcgcaggcgcgcctaaatcctgacgacattggaactaaaggtgcttaaaaggttgattgaaagtgaaca

SEQ ID NO: 43820 - DNA, 597 bp, Arabidopsis thaliana columbia
  unsure (1)..(597): unsure at all n locations
aaaagtctttccttagtgatgaagtgtttacgggagccacacctaacgacacaaagtctcacacacattaccaaaaagaaagatgaagaatagaaaaatgttgattcaaaaacctaccggaactcaaaagcaacgaaataagcacttgtattctagttacgtatctcaaattatttatttgtctaaggctgtgtcgttaatttccgtatgtgtatttctccacactattgctttatttaccaaaaaaaataattaaaatgtacaggcaagggcggaactatgttgaagattagggtcacaggaccgtagttaaaaaaatattataattataaatctatttccaaaccgttttctaattatgttttactatcatatctatagcattgaaacctacaactttttatactatttatatatttattggaaacgtgaaattttttgacaaacatttaatttagaagataatatttataaaaaaagaaaaaaaaaaagcaaaaccatagcaaaatatagtaatatgtttttcaaaaatgtaataatatagtttagagattgaaaattttaaacatatagataattttaattanatatatatat

SEQ ID NO: 43821 - DNA, 903 bp, Arabidopsis thaliana columbia
aggttgattgtagaggatgcaatgattttagtgttttagatgggtcataaggtcttagcaatgcgatacataaattctctgtttcgtacttcactgaaagattcatgcttctgatagaaaattgtccaattgcagaagatatcacaccttctcctctgcctgatgcagacgaaaacggatatgatactgctacagagtctttgactcccattgctgaagcagcctcttccaagactaacgatgaatcccaaacagaagatatggaaaaagtagaagatgaatctacaaatcccgtgagctcggcaaaaattaacagagacacagtaaaaccaagattcagagcaaccaaggtagcgtttctacctgtaaaaagaccttcatctgcaataacgccaaacaccatagaacaacccccatttgaagaaacaagaaactggcgagaaagacaaaaaggaagaagatggattttataatctactcatccgcggaacacagaaagacagtttgttctagcaaacacaaacatttcaaaactcaagaacataacttgtgttgttcctgtgtattaaaaccaagcggagtcaagccttttgagtcgagtagccaaggatcaaatcacggatctcttcactgttggctctgtcgatagcggttcttccatcagcgtccttgaccgaataatcagcaccggctttgagaagctcctcgatcttaggtctgtcaccttctgtagcggctaacatcaacaagatatcaactgggtgaatgtttaggttaagaagagcttccatctttgaataggatcttctactgcaagcatacccatgtagttgaaatactgcaaaaaacatcacgaacacataaaatttatatttatgtatcataaaagttatattcaatgta

SEQ ID NO: 43822 - DNA, 518 bp, Arabidopsis thaliana
caattcctttttatcacccaatttgcaacagattttggcgatttttaacggaatttttttctttaaggctctcataatacaccattgagctagtgacggacgagtgtttttagagttctttttctaaagatttgtaaaatcaaaacaaacaaaacgtggcccgtcaaggtgttatttaacagctcaaaagtttgacaaagttatagttgatgttggtgtatgattagatattcaaacttattaatgtgtgtgctgtgcacagatctatcattttgttacatcttagttttacaacattttttctctctcaaagctttaaccaacaaaaatggtgcgtattctttcttttacaccaccgcctcctccaccaccaccaccatcgtttagatcaattcctcgtccaccaccaccaccatcttttagatcaattcctcctcggcggcatttcttcaaaaagaaaagcaaaagtctaccaccaccaccaccaccgctaccgccagcacgaccatttggaccga

SEQ ID NO: 43823 - DNA, 546 bp, Arabidopsis thaliana columbia
cgaaacaaagtctacccagaaaaactcgatctgaagtcaaatactcaatgatcttaaacttcgagatccaaaaattcaaacttaaacttaaaaagatatctgataatacttaatatataagttatttttcggatatttagttattttatatatttttgcatatatttaagtaaaaatattttttttggaaacttttcaagtaatttgatagatttgcgtataaaatttttgttttctaaatatttaggtaaacccgaaccaaatcgaactcgatatcaaaatcttaaaatatccaaattaagccgaaaaacctgaatatgaatagctcgatccgaatacacgaaagccaagacctagtttggtatttgaaaactgtaacgataaaatctgttaatttaataaatttcattttttttggtgagtgatagggaacaatgtcccctattttttattcaaactaaaagaaattacaaacgaacatgacgcggaaacgacattccgttccggtcttccaacataaccgaataaacagcatccggacaaaca

SEQ ID NO: 43824 - DNA, 546 bp, Arabidopsis thaliana columbia
cattattttgtacgagtcactaatcattagtctttcatttacaaaaatttgtcaacaacatgtattacaacgtgtttaacagcatgcaataatctaatctagtgaggcagcgatatcagtagtacaaacaaaaaccaaaccaaatcattaatctgcaatagtcaacaacgaggcttctaaggatatacttacaacgtgccgtcttagacctttaagagaaaacatcgtgtcgttttaatttatcgtttaacatcatcaccttctcttctccgttggagaaccactgcaataatcaccggagtggatttcatctttcccccgcctccagtgttctcaataatggcgaaatctctacacttcacaagactaatgtcttcttcagcaagaatgtcaatgacttctcctctcttcttctcctcagtcaaaccatggagaaacatccataaaccctacttggcttctctcttcctctccacaacatctactcgatacccacttcaatacgacatgatcatcaatcgtccacacaatcatctctctctcaaa

SEQ ID NO: 43825 - DNA, 558 bp, Arabidopsis thaliana columbia
tgctacacaaataaaacttgaagcaaagaaagatactaaatgggagaaactacaagagaaaagagcgagaaatagaaactacctggatcagatagcagcgctaagaagaagaaattttggagaattgatcaaagattatagataaaacaaatttacgtttttatatgtgttgagagtataacgatgagactatttctctctgtttcttgtttctctggtttgtttatgatgatgatcgatgatactaaaacgatgagagtacatctatatttttattttcgtttcaaaaagtgattcaaagactgatcaaacaaacaatgtcttttgtctctttagtgaccgaagaaaccttaaaacagacatgagatagagaaagcagtttctttccacctttgtatcatttttacacttttattgctcggcttttcaacacttgtaagcttgtatctctgtcttgcatattttagatcttcttcagcttcgagaaggtcctgactctgagaagtgctttgagctcacttcctaatcctaaagcttgctgaggattgcacactctat

SEQ ID NO: 43826 - DNA, 535 bp, Arabidopsis thaliana columbia
  unsure (1)..(535): unsure at all n locations
ttttcgatcgtattatttgatagatcgtcgccactaaaacgtatataaacatctctgttttttccttgatttatccttccaaatcttatttaatcgtttttaaaaacctaaaatttccaaattataatcaatggaaacaatagcagttcaaaatgcaccggggtanacaagtttcgggtttgagaccattcaagaaccctaaaagaaggagttctcgtggttctctttcaagatccggaggaagtttggctcttcctcttaatccaacgtcgtcttggggatcttctccggcatatccgccgccgcatagttactctcagcctcctcttctccctctaccacgtgtcaacagctcaactgttcctctgcaacgcgtcaacagctctcgaccacgtgtcaacaacaactcttctctcaatcgcgttgctcagacaaaagctatttctgaaacacacatgaagaaagcagagttcatcgaatctgcgagactgactcgaaccggttcagtgccgatccaggcgaaccagttgcgtga

SEQ ID NO: 43827 - DNA, 614 bp, Arabidopsis thaliana columbia
tacaataaacacacaggaacgttataccacaaaattatttatctaagcctgagcgaacatgcagacagaagaaacaaaccagttctgcttcgacttcagccaattcttctgaaccccttgcaacaaatttgatgaagaattgttaccctcctccttctttgaaaccgtcccacaaagacatattatattcttacaggcatatttaagaatcttggacatcaaaaagaactgtagttgtttaagttcttgttccctttgatattactactatccattctcttgacaaaatttagtcatgccaccacgaaataagtctagattttttggttcatgtccgctttaaatcttttaattaagaaattgatttgcaatattgtcaaatgttgattatgtcaagaaaatcttggcatttattcgttgtttttttcttcctcgtttgagaaaaaattcgattctagaaaacgaagtctccttcgaaaggtcaaccaatcagaaattcaaaaagtctagaaatgttgatggtagatactctctggtttcaacatttaggttcagcattaaaaaacccaagacttttggtcatacattaaaagtaaacccagttccaatttagt

SEQ ID NO: 43828 - DNA, 599 bp, Arabidopsis thaliana
tccctggtggagggtatttactgcctccaccggactgagaaggaggagggtaatagtaagagctaccgccaccggagcttggaggagaaggagggggaggacatgcggttgtgggggttgacggtggtggaggagaaggtggcggaggagatgattggacaggactacatggattgtcgcatgaagaacacattgtaccaggaaccaacctcgccttttgatgtcactgtcggtgtcactgacactagcagcataacaacaagtgtagacaaagtgtataaatggtttgtttccattgtcagaaactggatttagaaacttaattttgtgcgaagaatatacagaggaagtagatgagagagcagaggagggagaaagagtaggagtgggaaagaagaagaagaagaagaagaagaagcacgttcagaggaggagtgttcttctttttatcgatggcttttacaaataatttataaataaatattttcagcataaaaaaggtgttttaataaagaaacaattagtaaaagttcggtggagtgtattaagaatttatctgattcttataaaatagagtttactggagattaattattgga

SEQ ID NO: 43829 - DNA, 478 bp, Arabidopsis thaliana columbia
tgcttattcatttcaaaagctgtaattctgaaccataatttataattttacctccctcaaagccaatatatttcgtatttaaactgcttttgggcctagtttgtcacttgtgtgatatgatctcataattttgtcaatactactaaaaatgtaaactgcagcccaaaaaaaaattgtagcccataaatccactttgacgattttctaaattaatatagtacacattggactgaattgattgattaattaagttacaggacaaatgtgtaatatagaataaatagttactgggagagaagaccgagtcactgtaacttggcaggtcttaccaaaaccggccgtgcaacttttcaaacgcgacttccttctccggcaagcaattcaccgcgctgctcagtgattctccgtcactatttccctgattaaccatcttctccggaagaatctataattctggcaaagtaagatgacggaggag

SEQ ID NO: 43830 - DNA, 491 bp, Arabidopsis thaliana columbia
ctctaagctcgaacctgccttcattactacatacctatattataaaaaaattgaatgcaaaattatctatgttccggtaagattagtcaatgagaaatggtaagtcttaataacaaaattttgttttttttcgccaacaatttttttagtttttttgggtaaaagtagaataaagaatcaacaattagaattagccacgaatatatttgggtgtagtgaaagtaagcccgatcgaagaagataggtggggaggggataaggagtgagacacattatgttttgtttcctttgttgttaacaaatactaagacctttgaggtttgacgttttttacctcaaaaaacttcattaccttccgttcgtacgtaccatgatgtgccctgcttaattaacacgtgttccttcaccttttcactgttttctgttgtttatattaacactttggctcgagcaattttatctacaatagtcactattaaaagaagttttga

SEQ ID NO: 43831 - DNA, 425 bp, Arabidopsis thaliana columbia
gaggatcacgatcccctccaaagttgtgatcggctttaagaagcttgcaagacttggagaatctgttgaaaccaagaggtaaacaatggttgaagacgagcttcgaggattcccggaccagctggtggtcaatgaaggctcgtgcggtcgacgcataagagcttttgaaaagttctaaataggatttcgatggaattaatggccaaagggtgaagaaggtttgtgggaaacgccatagataatcacaatgccataaccaaatgaaagatgcgaacgtagattggtgtccatggccaatcgaaagactaccatccatcattgaagtataagggcttgagaaagagttaagttgcacataccaaggccgtttctccagaaatgttcgagagagttgagatgcatcgtcccttatgcttgagacggaa

SEQ ID NO: 43832 - DNA, 478 bp, Arabidopsis thaliana columbia
tgggtgtgatgctaacaataaagatgtttatcctttgtttttattttttatttttttctgttatggtaactttgtaattaatatatacatatctaaacaaattgtatgtcggtagatatatgttttgagaaaaaaatatctatcgtgtagactagtctccatatagaaaaatatctatacgtctgtcgatctaggggcttactttagaacattgaatgaaagacagatgagacttgatgagaaaactcaccatataatataagaagcacaaattctacctaccaaaacaatatagcagggacataaacatacgacgacataaaggtatacttaaatttgcttaagagcgaatgagtctttacatgctcggaggcatcattacgaactctctttagcgtacgaactctctttagcgtacttctagttcgtgtaactacgcacgttactctctctttagcatacttctatttgattaatg

SEQ ID NO: 43833 - DNA, 553 bp, Arabidopsis thaliana columbia
actgattaatgttttatgtgtacggtagatgggctaggtcgtaactacaacaatggaaaagccaacgtggaagagttggagagacttgggtgcaccgtggtccgcggtgttaacatacattccatgacctcagattgtcgcctagctcgatatgacaaaatcatatttcatttcattcgtgcagggtaaggttttggtcgtgagaatgaaagcttatttcatcatgcatgtatattgtgatatagggatggacaaaacatttgaaatctgatccgatatgcgtaggatattaggagtctattaatcatgatctcagtatttgatctataactcaaaatatccgtaccgtacgcatgtttggaaccgctctgatttttgtttagtatttatgcatttggatacgtgagaataacataaagtttggtccattacttattgcaacattttttcctgttaaactctttggtatatagtaatcatcatcatttgtgtgtacaattcacaggaaacaccatgaggtagtgaaagctttatggagagtgcgagagtgttg

SEQ ID NO: 43834 - DNA, 528 bp, Arabidopsis thaliana columbia
tagaggatccccgcattcatatgaaaatgagctacgccgaccgaatccgatcaggaacttgaagaaaccctagaccaaaatcgcgagggagagataaatgaattattatcacttatgccccttattagatttttcttatattattactccagcaccagaattattctttgtttttaatgttcagttatgtggaatatcatatgatatcgttgattaattaatttcttatttttcgtattcaaaatgtctagttataaacgtgacaaaactacgtattttatcacacgagtgatcatctaagagtaaatttattgattacatttaaatacaaaatctaagcaatgatatattagtttgacgtagttaaccacatgttacatcgccatatactaaccttctttagagttaattggcgaatagacaataacgtgaccaatgccgtaattaagtgcaaatcgatgtcattaattaagtgcaacagaaatatttatatggtcgatcagctaatggaagtttctagttatctac

SEQ ID NO: 43835 - DNA, 525 bp, Arabidopsis thaliana columbia
caaggtacatgattctctaattcaacaaattaaatggtatattttgtttttaagtaagtgcgaatagacttacatattttatcatctaaactagtatagttatatatatatatatatatccgcctatagtatagtttcatgttatctgcaattaactaattacgaatttgattcttattatttaaggtcaaaattttatcaagggaagaaccaaaaaatattcatttaatttgtattttcataattcttttatttaaattctacgctattttataagttactctttttgggttggttttaaactagtttcattttcctaatctctacagtttaattgacatctagcttttatcagttaatcttagaagtaccgtttattaacacttttaacaaacaaacaaaaaattgtaacgcttttaagttttaacaacaaataaattatataatttataaggcttatcagaaagaaagagaaaaataatctagagattgaaaaagatccaaacattgtacatgtaataatag

SEQ ID NO: 43836 - DNA, 567 bp, Arabidopsis thaliana columbia
tggagagttatacaagtataggtgatacggaacaaggcacttatagaccaccaatcgctcttgatggggagggaaatacgtcaaaagcttccaatagaccttcagaagcacccgcccgaaaaacagcggggttttgggtttatatctttcagatccttttccaagtaagtgtcttattttcccctaagttatcttgttgagagtgaagactgtacaatgccatctcaaagcttcaaaaggacttacaaagttttctgttgggatagacttgtgcaggtgctgttgtgctaacagatattgtattttgggcgataatctacccgtttactaaaggttacaagctgagttttgtaagttctggctctaataccgtttgagttccattctttagaaagatttggatttctttgatatgatcacttttttttctggcagtctctatactaaaagtcgacaatgaatatatttattccttacatgtgttattttgactgcagctcgatgtttgtatgcattctctcaacgctgtttttcccttggtgacacaagcccaatccttggtaagtt

SEQ ID NO: 43837 - DNA, 614 bp, Arabidopsis thaliana columbia
  unsure (1)..(614): unsure at all n locations
atgcattaacactgttggttttcatttattatagatggattccgccaccgctgcctgcaactaggagcccagagcatggaaaagagtctagaggcacatacgcagcagggaaaagcagggtaatctccttacaatctaacatatcatatcttcttcttttttgcatgtttttggagaagtttgtttattgatagctgataccttatcacttataaataatagtgcacggaagctgagcaaactctaaccgattcccaaagggatgaatttgaggacatgttgcgcgctctaactttagaaaggagtcaaatcagagaagctatggggtttgctttggataacgcagaggcagctggtgaggtaaaatttgttctgccttggataacatacaccctctgttgaatctctcagaaagctcaacatgtgttttgaattcctttcttataaaataatcatccatcaattgtctcatttgcaatggattatatatacacctcatagagtctctaagcaaaataactcattatgtcatgttttcagctacatgtcactggaccanaatctccaatttgttttttttttactaaagatttggttgttcacaggttgtgaag

SEQ ID NO: 43838 - DNA, 749 bp, Arabidopsis thaliana columbia
gaggaaaatcaaaaagtataaagttaaggaccgcaaaattataatcggaatgtaccaattaaaactgctaacaataatccatagtatgtatatctttgactgatatactaaaatataatttcacccttcataaacaaaaatgcatatctatttctttttattttatatatacttttcaattttccatacatgtttattttacacaaatcatattttttaatgattttttaatcacaccttaaaagatcaactaaggaatcgcggtctcgcgggcatatctcttccttcggggtcagcagtgttccaagagaaagcacaggcccatcatagtcttgtgggttgcatcaaaacacgatcactcgacacttgcacaaattcttttttcatccttgtccaacatgaccacacacaaccaatttcatcttctttttttttttttttggttttcgatttaatcttctcagcaaggaatttattcttttacccttaatctgagcctttggaaatcacagtgttggtcaaaatatctatgatcatgtgtttgatatcgacatacatgtaacatgtatgtgactcctgtagttcatttaatatgcaatattttaaaacatatatattttcataggaatgttaacatagacaagtctttttatttcatagtctctgacaataacgcatgcattgtatttgtatcaacaaacgaatattacacaacatgagaattggcgattaaagattttgacctagat

SEQ ID NO: 43839 - DNA, 490 bp, Arabidopsis thaliana columbia
tatggctgtcttctttaatgagtcaaatggctgatgcattttacgggaagtagttgaagcaaccccttataccattattgcacattattattatttccctctctcttttttgtattgtttttaaataaaaaaaaacaatttcagatcggttaggtccttttggaccatgaattttgtaggccataagacaataataaatagaagtccaaaacaaatgaagcagtgaataaactttaccaaaataagatccaaacacgtacgtgcatgcttgaatttgttcataaatgactgaagatttttcatttgattgactaaatattgtttttacttctttgcctttttttcttagataggtattgccaagaaaccgaaagcataggtaatgaacatggaaatccgaaccatcttcatcttatatgatacatactcatttagcaaagtgtaataattcaaggatttagtttttggttgcacaaaaaagctttgtttc

SEQ ID NO: 43840 - DNA, 443 bp, Arabidopsis thaliana columbia
cctgagagaatcgttaaaggaagtaactcacagacaatgtcatggtaaatttactattaaggtattcaaattgtcatgcataaaatgactcatccctacactcgagcggaatgaaaactaaacccaacatattcatattttgggtaaaagtcatcgaatatagataaccataaacaaaactctaagaaatcaaaacattatatgcaaaccaacatatattgtagcgaaattgagattgtttctcataatacccaccaggcaccagctcatttgattttcaggtccagaatagatctgatgcatacatcggaaatgccatgatcgaaccaatgaagtaaggctttttaacactactttcaaaggtagaggcaaaaagcccattttttagcgacatgatagcatgaactcttcccccagatgtaaacatttcctgcctaacagat

SEQ ID NO: 43841 - DNA, 955 bp, Arabidopsis thaliana columbia
ctccatgttatcttcagtactctgcttctctcaaatgtgagtcatgctcctgatctcaccctttgtgattgtttcttcgaggataggatttgacatgttatcttcagtactgtcaagttccataacgaattagcattgattagatctcatctatttcattatgcttcctcaaggtgattagattagtgggttgaatcccatgtcagtgattcgatttaggtcccatcaattgataacgtcgggtttgattcctgattgtttatgtgtttccgttttcattagttatgcctcttagcttgaccccttgatttcttatcaggtcttgaagaatttggatcagacaagagtaaatgccaggatcattttgatgtgtacaaggaatgcaagaagaaagaggttgttgttgtgaatgaatatttaggcttttggcgtttccaacttctttgctgctttacctatgtgttattttgtttctcagagggaagctcgactggaacgcaataagacacggtcgttgttctcgtgaatgcagatcctcgaataccaatgatgtctcagaacatcacctagctagtagtatcctgttgtttcatttgcaatggctgtgtttgtatgatctatctaagtaaacaagtggaaagtgtttgttaatgttactttttactccccattggtgaatcatggtgtatacctgttaaactttgagagcaagtggttatttatttagttagagagttagagcttctccaccaccatattgaataagaagatctttctctcattcttttactttactctggcgtctgaaacagatccagggattccagtagtgaattgggcttaaaaactgttatatgggctttcgaaagtaaaaggttcggtgagctgccaaagaaaagtcagatgcctttaatcgcatttgacgacgattctttacgtgcgccattgactgcat

SEQ ID NO: 43842 - DNA, 540 bp, Arabidopsis thaliana columbia
gttcatgaaagtttcagttaagatatccaaattttagtcctagaagaacgctgagaccagctcttattctgtcttctgtttcgtgttcggtttgcagcgaatcagtcggatcaaacgggtgatcaggatctactgtctcatcttctaaagagccttgtaagccaagctggtgaacatatagggaggaatttagttgggcttctacagggtggaggaggactccaggcttctcaaaatattggaaacttatccgctttgctctcactcgagcaagcccctcgagaggatataaaacatcattcagtgtctgaaacgccttggcaagaagtgtatgccaatagtgctcaagagagagttgccccggataggtccgagaaacaagtcaaagtgaatgattttgatttgaatgacatctacatagactcagatgataccacagatatagagagatcatcacctcctccgacaaatccagctactagttctcttgattatcatcaagactcgcgtcagtctagtccactcaaactagtaggagga

SEQ ID NO: 43843 - DNA, 632 bp, Arabidopsis thaliana columbia
tggaagatagaataagatggatttatctgtacagatgtggtcttcttaatcttgcataataacggcttattgttacacataacataacacataatgaatgggctagtccgtcctcagaccaacatgggggcccatggttcgtttgttgcgtgaattatgtgagtttattagagacagtatcggtaacaatattcatgtcgttaccacgtttccactgtttagtttttataaaacaaaataaaaaagttaagtagcattggttgaaatgacatgataggtcgccaaattaataagagtgatactttagtaaaccactaaccacattaaaacatataatgactatttatataatgaagacacagaggtttggaacatggaaggtttctttgtcgaggaaacatggaagtttcaactgcacaaaagaacaaaacagattaaatctcctaattctatagggacacgtaacaacatagtaatcaaacctttcaattgaaatacgaattattgtaaaacagactaaaagttaatgtaatcatactaactaaaataagataaaacatgttatttgaatttgaatatcgtggatgcgtatttcagtgatttgattaaacgtctcgaaaccggatctccta

SEQ ID NO: 43844 - DNA, 559 bp, Arabidopsis thaliana columbia
cctgctgtgctcatattcatgatagaaatggattgcataagttgttcaatccaacctcagtgtatatataacaaggtaaaaatgaaaacatacaaaattaagttgacctgcacaacctgtccctagcacaacaaacagcttagcactagagtttcccggcctaattgaatcatcacacacaagaagatcgacaacaaaccaagctaatttcatctttttcacaattcctctaaaaatcgagactaaactgatctaaaacactgcatgctcctcttacaatatctatgcaaccagagaaagcttagtactagaattttccagcttaattgaatcatcgtacacaagaagatccacaacaaaccaatctaattaacatctttctttcagaattcctctaaaaatctgagagtaaactgatctaaaacactggatgcttctctaacaatgtctatgcaagcagaaagcatataaatttaccagtttttggcccatagaggcttgaaatgcacagtcaaacatatcttcccactcgatacatctacacacaacaaaaaaaaaa

SEQ ID NO: 43845 - DNA, 365 bp, Arabidopsis thaliana columbia
ggaaaagaagcataagaaggataaagaaaagagagagggtaaagagaaaaagagtaaagatagaagcaaagacaaacagaaggaaagaaaggagaaaaaagacaaacataaagatcagaaagacaacgagaaaggtaaagaaagaggcaaacctttagagcagaagacagctgagctgctgacaaatgccgggcacagagagaatcgtgtaacagatacggtgcagaataatagtcatggagagtcgcagtatgtacaggacctggcaagaaggatcgcacaggacgaagaagcaacaagtagtcagagtgcacaaaggattgatcatcctaaccaaaaccatgtagggataacagagcaagcat

SEQ ID NO: 43846 - DNA, 431 bp, Arabidopsis thaliana columbia
agcaacaacaacttagcttaccatgaaataaatatatggaaacagtgaagatattggaagagctgaaatttggcaaaagctttgaaacattagtataagaaacacacaacaaaagcacaaaaggagaaaaaatcttattaaccagtgcagagtgacacgagccagatgaaggagaggtgcaagtaaggaacgcctcgttgctgttgcttggttcgatcaatgatacagccagggcagtcttcgttcttctccaacaggatggttcttgactcatcatcggccatgatcggaaccactgagtcggactggttgatgataatttaatttttatttcattccaaaattatttaatttgtttttaggataattattttcttcggatgattttaagaaaaaggttattctaaaggcgccaaataaagctgaaatga

SEQ ID NO: 43847 - DNA, 742 bp, Arabidopsis thaliana
tacatcatccaacatttctccatatatctaaaaagcttctcttcatttcttatccttttgcaggagttagttccttgtgtgcttctgtctttcgatgtgagcaaatactcatgtggagaggacgagaatggaagtcgcggtttgagacaatcctctaattccaagcctttctgagaccaacacaacgaacgaacttgatccctcaggtattattattattaactcttgcatactcagaaacctcttacgtgtttccagttttcaaacatcgttctatctgaagttaaggacaaccactgaccaatgctaataatatcaaaagaatgcttctcatataccttttacctgttcttttcttttcagacaaacctagtgaagaacaaactgtggctaatccaagtacaacgatctcaagccccaaaatgatctcgctctggcaacgagcgttggaatcgtcgaaggctgtgattcttgaagagcttgacctcggtccagacgatctattgaagaaggtggaagagttagaaggcacttcactggctgcagaacacacttacacagctatggtcttgtcaaatactgatggtgcagcagaggattacgtggatgaaaaggaccggtccgaagagtattatagtgacatagacgatgactttgatgacgagtgttccgatgatgagtcgctagatccggttggtccagtgggatctttacccgttgacaagatagttaggaagttgag

SEQ ID NO: 43848 - DNA, 754 bp, Arabidopsis thaliana columbia
cgtaaagcagagtttggttttttgggggtgatagtggaaaagttgacagataagtcacccttactgccactctacagaaccgtacatgagattttcacctcatacggctcctcgttcaattctttcgaagtcattgggtccctttcctcgttcgcgaatctcctcccttcttccactccgtcccgaagagtaactaggacaaactcggtcacgttttcatgttccaactgaacactttctatttttgattattctcaaaggataagattattctttttaccaaacatctgcgggtccaatcacacgatcttataataagaacaagagatctttctcaatcaatctctttgcccctcattcttcgagaatcagaaagagactttttcaagtttgaatttgttcatttggaatctgggttcttctacttcattttgatttacttattttttctttattttctctctcttttccttatttgatttcttttttgattttattcccttccatcattcttaagtcccataagtttgatcctatagaatctgacccatttaatcattgagcgaaggggtacgaaataaattcaatcagatttatttttgatcaaaaaacaaaaaaaaaatcactatgtgaaatcttcgtttttttttttctctttctctatcgctttcccataagtacagcacttgttgaatcgatagagaaccttttcttctgtatcgatatgaatccattatgaatcgatattattaca

SEQ ID NO: 43849 - DNA, 942 bp, Arabidopsis thaliana columbia
tgttaggaaatttctggtctcttgattttagtttttattctttctatttattgcagcttggcgtttctgttctaggtcagcatttcgttgaaagagtagagcatgttccgattaagaaacggatatttgtggttagctctccatcaccatcaccatcatcatcaaagaggtcatctgctcaacgtgaaggctcagaacataaggcacagatcaaccatgttttacctgtttcgagattaaaccctaatttggtctcagacgtccgtgatgaaaagcctgattacagtgttcatgacttttctggtatcaagatacttgctgatgctgcttgcagtactgatgtgagtaatgattttgcaccagctgtagaccgtctgcctgctgaagaatttgctgttcagctacaagatacctcaaccatatcaactcatgttgaaggtaacgattcatcagctggaactgctgatgtctcgcatactgcggttgattccggtgatcagagtggccaaggaaagagcaatattgtagcgcctcagaaacatcctctaacaaatttgtgcaatgagttggctgatgagcagagtgtagagcacagcagagtaacctctggagggattatagcacctaaaaaaacctgcattgctctttcaaatgaatcctcaacagaaagaccaaaggataatgtagaagcaagtgaaagtgaacctttagcacctgatagtggagctgtaacggtgtcagagaaattatcagccgatgagccaactgaaaaaaacaatgaaggccttaaagatgttaaatttctctgggatttaaatattccttgtgatgtagaagatgaagcgtctcgaagagatgaagagggagaaatcacagagtctattgcccctaaagggagcgaaccttttgatggaagtaacacagtatggatggggtaattgc

SEQ ID NO: 43850 - DNA, 684 bp, Arabidopsis thaliana columbia
aggatcccccctctgcagaagaagtattcggtttttttcatcagaaaagttcaaaaattggagaaaggcgcacagattctgggcagcttctatttacctttcttcaagcgcgatcgtttcttgagcttcatcgatctcgtcatgttgtgtgactcgtgagtcaaagagtcaactcgttcaacgcctctgatagtccgagaagataaagcggggttcgattcgattctacgggaaatcgaaattctcggtattaactaacactcgattctcgaccggtttggattaaaccggtccgagtcagtccatgaatcgcttgtatttgggatttggtaatattgagtagcttaatatcaacttattaacttttcttcataataaaagttggaagttcataagtgggaatcaaatcctctagttgttcaaaaaacatctcttacaaattataaaaatgtaggaacagtcgaacagataatgaaagacaagagtcagttcctctgtttccttatgtagaaagatttcgcaactaaaccacattgctactaaaataagctgtaatggcttttatttcgcctccaatggagttttcttctatctgaaatcgtgcatagcatgcatatgaaaagtgtcaagaaaagagtttgcaacaaattagctcttctagtgttcattaaataaagtacctca

SEQ ID NO: 43851 - DNA, 607 bp, Arabidopsis thaliana columbia
gatctctgggagcaggatgaaacataaagtttctgcatcagctaatatgttagatcagagctctaactgtatagaagaccaggaagatgggatcttgtctgctgatcgagccaaacagttgaagtcaggttgttctaataacgagattggcaataaggatttagctgatggttcagctctcaattctgatccaattccgggtggatctaggaaagatgaagtgaaattagaatctttgcagaatccatcatccaaccatgatgacagagtcagttctgagaagggaaatttcaaggaaaaatcaagacccgggggtaacaaagagagacaggaaccttcagttgaaggatctacgcgttcaggagagaacaggaaggatggtaagtcaagtaagagctcttcgtccaactcatcagctgtgtctgagagcgagagtgatgattctgaaatggtcgaacatgatgtaagtaatgctgttttgtctcatattagaagaacttaggaacccgtctacttcttcctttgttgcagtatttgtcactgaaataattctcatgcgaaaggggttttttcgctgaataggtaaaggtttgtgatatctgtggag

SEQ ID NO: 43852 - DNA, 539 bp, Arabidopsis thaliana columbia
tcactctcaacaacataaataaacaaaaaaagtttgttttatataaaaaaaatcagtataaataggtaaatgggattactttacacactaaaaagtaccaatttgagttaatactaagattttgggttggacattaatacatcaaagtcaccgattctcatttgaacaacttcacttctccgatcaacgatcaataaacgtaacaatcactccgatgttcctaaaacaccaaaatgataaagcgttactctcgagatgagagaacttagttatgaattgtttttgggtttttagatttttacaaaaaattagtagtcagattagtagtcggaaaatcactctcaacaacataaataaacaaaaaaagtttgttttatataaaaaaaatcagtagtcagattactttacacgcagtcagattagtagtcggaaaatcactctcaacaacatacataaacaaaaaaagtttgttttatataaaaaacatcagtataaataggtaaatgggattactttcacactaaaaagtccaatttgag

SEQ ID NO: 43853 - DNA, 574 bp, Arabidopsis thaliana columbia
gtagtaagctttgtgttcaagatggtttttgtaataacttcgtaagcttaatcaatgaagtttttgttttagtatattctaactagctataaacctacggccaaacaatgcgtaactaagaaaatagtgaaaactcagacctatctaattaaacatagaatatttatgatccaacttgaaagagtaagcataacgaacctgtttatgaagaacatgtaaaagaagcatgaagcgtatgtcactttccaccgagaaggacaagctggtcactgggatataactgaacagcaaacaagaacaagatcactgtcacatcaaagcaaaagagatgctcttactttgattccatgttgaacagtagaaaatcatttctaaccaaacaaagacctgtctgttctacaaagagctgacaaatgtacgaaaatgagtatccataagaagttcatgacgtatgaaaacaccattaagcttttcatgtacagattctcccttagtgatttatcttttcatcatggttcttcaaaccactaagcattaagtaaagattgagaatcttatttgtataatgacgaag

SEQ ID NO: 43854 - DNA, 336 bp, Arabidopsis thaliana columbia
ttaagaatatgttagcaaaagatagacataagtgactcattataggtttaccttgcgcagattcgcatacgtattaatgttaaatcctctatgtttatctcaattatatagtatacggctatacgctagtgtcactaacttagtactacgcataaatcgttcatttgtcagctgctaagtaatccatgcccaaaattgacttaatgcgatatcatatggggacaagagaaccttcgccatgtggtcacactcgggatttgtcgcggagagggatttgtatctaaagactgcggttttggtgggttactagaccacgcattattcgctgaacgcgct

SEQ ID NO: 43855 - DNA, 912 bp, Arabidopsis thaliana columbia
ctcacagtcggctcttgccttattaacgttgactcagtatttcatcaacatcatcacttttaactccatcaataccgtttctctcgtctctttataccagaaaacgttgttttccctaacctctccgattaaccaatttgctcaaattaaacgagagttttgataatagaaatctaaaccctaagaggatagtatttagggaacccaagacatttaattttagatatagatcgaatcaattaaattccaattcatctatatttgcaaaccatattcggtcattattgtaaaccagtttcgatcgttattgtaaaccaagtgttcatattcattgctttgtgtgtctttaaaattctgcaaaagaaggttctgggatttgttttgttggtgtggatgagagacggttatgcaaaggcaaaagaaggattgaactcaagtatcctcttcattgatttaaaaggagaaaatagtctttaatatgtctaaatctataagcatattcaaaagtactacattagacaataccctcaactatattgtaccaatcccataattgatccttgttttctcttcttcattcttctttttcaagggtctgtataatttcttgaatagtgtggacgtggaggtggacatggacgtggacgtgggcatggacgtcttcttttgatccgcatgaacaagacggagttgttgccgatagcactctactaggttcttctactggcgaagaatgcataaattgttttgttagaaatgatgaataagatcatttaaggtacaatgcgtgagtagcaaaaacaacgttgaaattctggagaagatttttaatactaatcatacgatattaagcggtaactgtggtatcaataagtaattaacttattatccagatttaaatcagcatgttgc

SEQ ID NO: 43856 - DNA, 348 bp, Arabidopsis thaliana columbia
ttaatactttcatattgtatacagtacaaaattactacataaactgataaactggttcggtattcaaataaatacatgcctactgtttaatacattacgacatatatattaaattaattaaatatgtaagaaagtgagtggaactttatattctatctatccctctataacttcagacgttaaatacaaaagtgtcgtctttatcatattgactgccaactcaaatgctacatttgaaacaatcaaacagatgagaaataaaaattcaaccaaaatcttcaccgtctttaacagctgatctgatttaatcatcatacaattttgtaccaataagctacagagggacat

SEQ ID NO: 43857 - DNA, 513 bp, Arabidopsis thaliana columbia
tgcttattgtatgaaatgagcaaggagaagaagtctttttggtatccatacttgttccatatacctcgtgactatgatctcttggctacatttgggaatttcgagaagcaagctttacaagttctgtgtttactactactacacttttgtgtattatattgattattgaataggttagatctcatgttattgaattgagatcatgttcaattctattctgttgattacaagtctaaaagatgggatttttttcatgtccttaggttgaagatgctgtatggagaacagaaaaagccacagccaagtgtcagtctgagtggaaagaagctggttcgttaatgaaggagttagagctgaagcctaagtttcggagtttccaagcatggctatgggcttctgcaacggtaagaacacttcactttatcacacgaaagttgctcgagaaatcgatgatggttgattagaaaggtttgtgtaaacttacagctacaaactttacttctgtttgaagat

SEQ ID NO: 43858 - DNA, 691 bp, Arabidopsis thaliana columbia
actgtagtttttcctttttctatagtagcccaataactgggccttgtcttgttatatgggccttgaatctttagctttaaatggggttggatttgaaaccagtattttattcattgcttacgatttaaaatggtaaagccttaactctccaccattattatttgattaaattccaaatgatgtttgaccaaaaaaagaaaacttcaaataacccactctagaaaccaagtcattaaataatgtttcctgtgtaaaattcatggaccaatcgaaatgcagaagaaaatctttacagtaattagaatggccaaccaaagtttgttgtttttgtttttgtttttgtcaacgactcaagatgatatttatttgtgtttacatgaacacccgccaaaaatatgtactaaaatatctatttcaaatatggtattttatggcctaaaatataataacatcacttttttccttttcttaaaactaccaccacaaaacaacaaatcaaattaattaaattcttcatccataaatctatcaaaacttggtaccaaactcgtgagtgacgaagcctcgacgacttacacatatcaacacgtactttatgtggtagttgtctctatccagcggccaagatttcgccacgtcctcacttcctccctccttaaaaccactcgtaacaccatcccccaaattacat

SEQ ID NO: 43859 - DNA, 136 bp, Arabidopsis thaliana columbia
ttgactaccatgatacaccacctaactctaatgatgaagatagaggggagcagtttgtaagattcagaatgggtatacaatgattatcacagttgtgtctcggatgggtattgtaagctactagtagccgatgtga

SEQ ID NO: 43860 - DNA, 590 bp, Arabidopsis thaliana columbia
aaattcttaaggtcaaaggttagactaaaaccgcatcctccaaggtcattaaatacaaattttgtttcccttaatgacaaaaaaaaggattgtaaaacgccgcaaccgccgtttcaatatcctataaaagtctctgttctattcagagtcactctcttcacttacatgttttgctctgcttctctctttatcttcttcttcatcttttgtcactcttttcttctgctctaaactttttcttttcgctgcaaaaaaaaattcccaggaatatttcttaaaagaaatttcatccctaaataagaaaaaagcatctccttctttagtgtcctccttcaccaaactcttgattccataagcatatattaaaaaagctctctgctttcttcaactttcccgggaaaatcttcttgttacaaagcatcaatctcttgttttaccaattttctctctttattccttttttgccctttacttttcctaactttggtctttatatataaacacacgacacaaagaagaacacacataagttaaaactattacaacagttttaaagagagagatttaaaaaatggagacagagaagaaag

SEQ ID NO: 43861 - DNA, 327 bp, Arabidopsis thaliana columbia
gatcatccgatacatgaattttcaaaagaaggcatgattcatcaaagcatgtatattagcattcttaattatatctttgtttcaatcatgatccaaaagatgtgagttgatctattgttgttgtttccacgtatgttcgtctatatccaattttcagtgtattttaataatctgctacatatttaaatttagcctcaaacacacattttaaccatattctccttggcaatttatttattagtcgatagcaatttggttgcaataatcttctgttatacttgaaaacgatctattaacaaatatatccgaaagagtttcaaaacaatc

SEQ ID NO: 43862 - DNA, 568 bp, Arabidopsis thaliana columbia
cgatcaagactgtatccaaaatccagttagttttcatatcatcgttatgcaaattaaaaatccgtgagaaaatcgatttttgggaggaaaaaaaaaaagtaaataagaagggataggaaatgaacctcaatttgttgatgggcttctgagtattatatgggctgaaaatgagatttgcagtccaagcctctttcgtccaccgccatgtccgtcttccccgtgtgcgtgtccgtgactgataaaccaaaagcctccgatcatccgatgaatcatgaaccggagaaacccaaaagtcgccgatcatccgatgaatcatgaaccggataaacccaaaagcctccgatcatccgatgaatcatgaaccagaaaacgcaaaatcttccgatgaaccattgcattgaagacagggtaaacaaaatccggaatcctttgaattcaaacaaaagtagaaaacttccgacgacggagactgagagaagatatcgtaacgccattaacgagagacaaaggaggaagaagaagaatcagagttgaattagaagcgaaggaaccaggaatcgaagaagag

SEQ ID NO: 43863 - DNA, 447 bp, Arabidopsis thaliana columbia
tgagcgatataagcagcctcagctacgcggctatcatcagaaaacaaagcggaaagctccataagatcccctgggctgccgttgaactccattaggtactgcatttgttgaacaaggattactttaagcattcatctaactaaatatgtgaccaaccttgcaacatagatgcacacttacctttataagatctatcgtctggctagcagtttcccgctgagcatctgcactctgacaaaggaagcatgggttaatattggatagaccaccagatagttggttataagcaaggtaaattttacctgcaaatgatctcctatttttgcagcggtctgtccaacacttgaaatacgaccgtccaaccttgcaaagctctcaaacagaccgtccacacccttctctatctagaaagagaattcaattaccatttgaagaaatgatcggggt

SEQ ID NO: 43864 - DNA, 623 bp, Arabidopsis thaliana columbia
cctgtcatgtatgttatatctgttgctcttcgtataatcaaagataagtgaatattaaaacttcgaacaaatcgatttttttgtgttcaattatcatatctaagatatacacatattaccaaattacttattaattaggtttagacagatgtggaaatacacaataatatgttctatcacacacatttcttcacatctctttatacgaaataacattttaagattattaagccggcatcaatatgctttcttgtcatgaattacatagttttaagaaataaaatcaaagaattttgaatatatgtcacacagaacacttccacagtttcttgtataaaatacaaatcatgctaacaaatcttataaaaccaaacagttttatttgtattgctcttccaagtgccacattctctgcttcaagtagttataaattaaaaaagtttggaagtcttgtgttttagtttatagctatttcaatggatagtgaatttaaaacgtattacaaaacctttgatcacaattttactctatttgtataacagagtttataaggattaaaatgatgttgataaagtattagttactgaaaagtaaaatgatgttgaaaaagtagggtaattgtg

SEQ ID NO: 43865 - DNA, 601 bp, Arabidopsis thaliana columbia
tcggtcctacaaaagctggaccgaattggcatgagggttttgttcccaccagaacatcttttattatacacgtatcggtcattcggttggcgagggggaacaacgactttagagggtttggttgcctgttactccatgataataatggtattgtaccaattttttaagtcgtaaccaactaaaatatagtattggattatctactctataatattctgattctcaaaactttctgaatagtaatcaccaatgtcaaggaattgtaatcataaccctcactcaaatgcttaactatgttagtcctgaaattatataatatctccagtacatatatcgattattttacgtaccggtgttattcacgttatcgctatacgttatcaatatcaattatttttgatgatgtcaactaaaatagatatcatcgattttattcaactgatgttggattacataataacttatagctagtatcaactttcttttcttttcaaattagtataaccatagttaactaattataagcacagtagtcttttacgctttaaaccaaacactacatgctttcccttgttgtacttttttgtcagatcaattattt

SEQ ID NO: 43866 - DNA, 520 bp, Arabidopsis thaliana columbia
tttcgaagcggcccaatagcccatacccaaacaaaaaatattaaagaaatactaagattattttttttttgtcccaagagaaatattgtattaatcaagatagtcaaagcttaaagaaaagtccgcgattacagaaacgatttaggaccaaataggccaacagagagtctttcatagaagaagaaactatagtttgactctatcccaaaccacatgtcgatatattaatatacgtgtcagatgagtactctaaagcgaaccgacttcattttcgccgtctgagcaccgatttcggtgaaagaatcaccgtcgatagtctcatagaacatggatctttttgttttttcacgataaaaagcaatcgaggctcatgttaaatatacaacagcttaaggctatgataattaacaacagaatccacttcttttcttcaacatcattctcaaatttctccaaaaatttctgtaaatcaaaacttaaaaaagaacagatcggataagaagcattagaaagcgagatt

SEQ ID NO: 43867 - DNA, 801 bp, Arabidopsis thaliana columbia
tccagtttttcttcatcttcaacttcatttagattctcttcacctgcaaaaacattccattggaacacaaaattcaaatccatcgaaatcccaagagtgacgaaaatgttcaatttcacgcaccagctacagtttctgtgttgatttcattctctgtaacgacaatcggcggtggtagtattcgagcggaggccggagaacagacgcggaggctacttaaaccgatgaacaacacggtcgaggcagagagaccaacgatcctctcatgaaaccgttcgtctcgagaaactcgtgcaatggtgattccccttcctccgtcgcgtcggtttcctccgcagtagaagctcgccggcggtttcacggaaataatcgccgccgtagccatcgatataacgcgatggtgaaacaacggacaacaatggcttctaatctcaaaccggttcaatcaaaccgctgggcttataccgtaatgggccttaaaaatgggcccaatgatttcgaccattgtagagattaggcttagctaaggtctagctggcaataataattgggttttatgaagaaagcgtcggttgacacgtgtgggaggtcaagatcggcacgtgcgagacccacttcgtttcttctcattggtcgtatgctttggagaagaaagcatcttcttcttcttcacacactctctctctctcactctagttttctctctcttcactcttaccataaatcacacaaacaaaataaaaagtcgattccttttttgtattttttatctctccttaagttatatttttttttttttgc

SEQ ID NO: 43868 - DNA, 581 bp, Arabidopsis thaliana columbia
gaaaatgttagtattattaaaaatttgcgtgtgggagtcacgaggcaaagaggaggatataaatatttttagtggagattggtcatagaggagtgtgttggtgtcgtccacgtccctcaatctcatttcttaatctggctccactataagaatcagtgatcaatttcgaatcctctccgttcgttttgttgaagttcagaatctctagtaaattctcattagatttctaaatcataaaagaatatatagttagacacgatgatcaaacccaactaacaatagaatatatttgtttatcaatcatcttctaatcatattcttccaaatgtattggtataattgcttccgttaaccacctcattaagtggtcaaatccaactaataatcatgcatcacttcaaatgccgtagctttcagagtgtggtgttttgtagaatattttctttagacaaaaggacgattctaggaatgccaaagcaacacgcatgaatgataaacccctcgaacccaaatctaatcgagcatttaaaataaaaagaagaaccacatgatccattatggaataaatataaaataatttg

SEQ ID NO: 43869 - DNA, 909 bp, Arabidopsis thaliana columbia
tatcttctcttgatgcttcaggatctgcatcgttacacatttggacaaagacatcggtttatagggattccaattccccgaataaccaaataaagatgatgtgtatcatgcagtaccaaggaagtgaaaccgagaggtattctggataggcgcgtcttctccacgcgtccccaaacacttttctcccaaagcttttttctgcgacaaccctaactccgccgcatcttgcctctctggtgactggttgcgaccagcgccgtgagagggctcacaatgatttagttcacttgtcttgttctctggagcttgaagcggtctttgggttgtgttttgctcttaaacgcggtgagtgggaggagttgatttcagatctgcgcttctctctcggtggaagctcctttgtgtgcttcgatcttgtccttcgatgtctttgggtggaggatccgccgctcgatctactatcaccggcggttttgggctgcttctaaacggattcatcgtttgaggacggtggtgtctcaaaagttgttgcctctatccccgccgttgtaggtcctcttcgtcggtcggagcttgtggcgtaaggagtggtcttcggtgattgtggtgaagctttctcgtcttgatgccttgattgtccttcaccctctttggtcactgtggcctcggctactcttgtcacgcttcttcagataggttttcagagcaatgctttttcgttagtatttttgattgctagcctcgacgttatgacttgacaattggatggtaacttctctgttggtcaattctgctaatggacgacatcagaacttttaggagagtttccgttgtggtgcgtcaagtgtgtggcttcgtcatgggcttctcaatttgtgccctcgtgtagctatgatggttattggcttt

SEQ ID NO: 43870 - DNA, 660 bp, Arabidopsis thaliana columbia
tcgcaaaaataatctacataggatacatcaaactcgcagattaataagggaattcttaagtagattttgtagttttagagacttattcctatttttatttttattttgaatttctagataccaattgattcctctgaacctaaaccagatctacataagaattccacaattttctgcctcaccttcatgacttcatctcccttcaggatggagaggaaaaagctcgagggttacattgtcaatgattttattaaaagtagttgccatagtactactatttttgtttctcctgttctctatctccaagttctcaaatccccagctcctacatgtcctcttgtactcattctcttccactaactcctccttctccaccattggttctctctacacaatcataaaaattatccttaaatatagttgatcaaaaccacaaaactatacaaaatccttaaattcctaccataatgtctagtgacgatgatgttcttgtcttcatagttacactcggattaaagacaccagtggtcgtgaagctgctttggcaacttaggctgatgaggttgtcctcttctgcttctgtctctcgcgggctttgtggttctggaccaatagacacatttttccttcgattttccgtacttacgagttcaatgtgat

SEQ ID NO: 43871 - DNA, 552 bp, Arabidopsis thaliana columbia
tgcacttgtgtttaagcagcaatcattcatatgtgtgtgcctttcaaaatcgttttgttgctttcgagtaagttacttgagatcaggggatatgaactgtattatttcacaatgttatatttttggtttgaatcctccaccaattgtttttgttatttttgagtgttttaactttgtattttgagtgactcaacccttagcttgggagactctctgactgcttcagtcatttttaaatgagtagataaatttcagattatacaaagccaactggtacatgtatcacacaaaactattattttggaagacaaaatgagtaaaatcaacatggttagagaaataaccatatttttttaaaatttatatattcaaacactcgtgcaaatataagatatttaaattttgattgaactataatttaaattggtgtattttgacacgtacgtgaaatagcactttagagaagagagagactaaaactcgtgtggttcaattaatttgtttttcctttggagattcatccttaaattagtgaacacaataattaatagt

SEQ ID NO: 43872 - DNA, 612 bp, Arabidopsis thaliana columbia
  unsure (1)..(612): unsure at all n locations
taccaagctttgagacacgtgcatagtccgtgccagctgtttcttgttttagtatttccgggtcgggtttcaccgtatccggaaatcaaattcatcggagcgcttaatttgagtccacaattaaagtgagaattttcctgaagaagaagaacttttgctttttttctgggtttgcttttttgttgtgtcaatgaaatgggagaaatggagatcgaagaaatcgaagctgttcttgagaaaatctgggatctacatgacaagcttagcgatgagattcacttgatttcgaagtctcactttctcaaatcggttaaaccttcaaatagatcggagaagagaaagaatcctcacggaaattccggcgaagataagcgacctggttatgttttcatcaaaggattcgccgtcgatgataacgactccacgattcaggaggcgaagagtcttaacgcaattcgaaccgctcttgagaaccttgaagaccagctcgagtttttccatgtaagtctcgtgtttcccgattgattttgtggtttcgcttccttgatatgaagcgaaattgggagattagcttggtatctcctttgtnttgtgctaatttttgaagattgt

SEQ ID NO: 43873 - DNA, 540 bp, Arabidopsis thaliana columbia
attactgttgctcacgtctctggtgaagggcagaggcaggaatgccctgtggaaacacattccttgcaattgatcaatcaacctcaagaacagaaaattatgacttggtcttcagaccagattcggggcttcttcgattttcctgttccagatccacaagcagcgagcagcagaactatggtttcatccaaggaagtgctttcaaaatgcgaatggccagactgggcggatcagttgatctctgatgatagtcttgaaccaaattggtcggagcttctaggtgatcctaatgtactcaatctatattcaaaggttcgtttctttcagctaaatatgaatctctacgcttatttcagctaaatatgattcttctattaagactgactctgataatgtcttacagatagaaacacagtcttctgatatagcaaggcaagagatcgtctttagaaatcagcatcaggtggatccatcaatggagccgtttaatgccaaaagcccaccagctagttcaatgacatctaagcaaagaatgcgttg

SEQ ID NO: 43874 - DNA, 502 bp, Arabidopsis thaliana
ttataaggttgtttaagaaagcacaccaagagaatgtcaagcaagaggacttggagaagaagaaagctgcaacggaagatgtatttggtgggcctgaccacaacatagactcagatacttctttagatgattcggaggccaaatcgccttctagaataagacctccgccttctataccaagacccccttcacgtccaaggtatgcatgctgccgaatacctgcagttaatccgcctcctcgcttggtgtgtggcccatatccgctacctcgcttagtgcgtgtaggatccccatcaccaccacctccctcgatgagtggaggagctccaccgccaccacctccacctccaatgcttgttgccagtagaacagctccacctcctcacttgagtcatgtacgttcaatccctttccaaactcgcttggtgatgggcacatctccgctacctcttttagtgcgcgaaggagcccagcaccaacactttcctcgatgagtggagga

SEQ ID NO: 43875 - DNA, 548 bp, Arabidopsis thaliana columbia
ttgcagattataaacgtacccgataaggcatatcgatatctcgaacataaggctgctgctgcaaagctaaagaagatagcaattcatggagaatcaaagaagctggtttattgggaaaaccactttctccattggcctcatcttcttcttgagaagccaattctttcaacttttgctgaatcaacccgagagtgcctacatcaagcagtggccttttcgtaaaggatggtctgggaacgcgttgaactcctcttctctctttggtttctctacagcattggctataatgtctattagaggaaccaagtttcagtgatgaaaatgcagtttcattactacaagcacaagagtattcactatccaatcttcttgacactggactcatagaactacttcctcgtccatgaccactttcacaagctagcctcctcttccgtccaggtgtacttaatcctgatctattacaagactcctcaactctagtatgagattttctctgcagattcacatcagagttttcaaatttaaccggggacttcgagtgatga

SEQ ID NO: 43876 - DNA, 610 bp, Arabidopsis thaliana columbia
gtgttatgtagctaataataataccgggtaatggactgctgcagttactgcaaccctcttgaattttataaggttgtttaagaaagcacacgaagagaatgtcaagcaagcggacgtagagaagaagaaagctcttaaggaagcggaaatggagaaggcaaaaggagtcaacctcacaaagaaaccagttgatgatagctgacgaaaaacttaagtatcaatttgcaaattccgcctcaacctctcaagagaactgagctagtcttgtaagccagcaaagaggcggtggtgctgttcaagtaaacctttccgcaaagcggcattggatgcttagtgcggttaaaaaaacaggctcgggtcctatggggagcggtttcgctggcgggggctatcgaggaaccatcgaaagattaagagacaggtcttttcgccactcacgtttaacatgattgactccacattgatttaattctaacttgtaaattagaattctttcctgttttttattccgtgattagaggaatttttgatagattggaatgttgtataggtttcaggtagagagagtgagagatgtagagcattttgtctatttagtgtgtactttgta

SEQ ID NO: 43877 - DNA, 578 bp, Arabidopsis thaliana columbia
tcctagatatcatagagtagttttttataaaagtacatgatagtaggtgattacattgaagtaagcaatcaacaagagaagggaagaggagtatgtgtagatttaaagcttttttttgcctcgtccacggtccacctcttcctcgtcgccctttgttaccacgactgccttggacagtagtaaaatgcatgccttggacagtagtaaaatgcatgcctcgaagagttctctggattgacactcttataccattttacatattcgtagccttgagtattaagttgacgatccaagtgttattgtcttgtagaaatgaagcacgtcttgtagttgtctttaaacgtaaaccaaaatatgagtttcgggaccacgttgattgttttgagcattgcttagaatcgtgtttgaagaataatcaccacattaacctattctaactcaatacatccacctttaggtgttggatccaaaagtcactaagttttggtcaagacttctaatgccttcaaaacgctttctaagggacacataagagaagatagttactgctagaactttttttttttgaaaaccataag

SEQ ID NO: 43878 - DNA, 214 bp, Arabidopsis thaliana columbia
aaaaacaaaagctaataaggtaaaaggcaaagcctatttggttttctttttgaaccaatttggctgtcctctcattccctctcttctcttctcttctcttccttccttcagtctcgtgagcctaactgtttaagcatttttatatttgaatatcgggcaaaagaagcattacatacatattggtttcagacaggaatgacatcagcgttttgat

SEQ ID NO: 43879 - DNA, 714 bp, Arabidopsis thaliana columbia
tcaattttgagtttgtctctaataaagaatttattcttaactttggtttagtagagtttttggtttttattttagctatatagtaaactttgatttcagagagtttggtacaataatatttttatgaggaaatcacccaagtgaataaagagagtttagatatagtcaagaatattcaataagcattctactttcctaattcacaccaaacaacctaatttgccagagtttttccatttgcacctaaaaccaaaaggtgggcagaaactatggtgagatgatattaattaaaattttaaattggccaaacaaatgatgagaagaataacaaaaggctggtgcttatgatgatgctttaataatgataatgattccttaaccttcactcgttttgagttgtaatatccaatcaagtagacaataatagcttttctttttataaagctgcagatttcaatttttgaagtccctgattctatacatactttttaatgctttttcttcactggatgtggaactcccatttcaatcatttcatttgttcaataatacattacacaaagtttttctttcaaaaatgctttcaattctatacataaatattaaagtgaagaagccatatttgataagcagaaaaatgtatagaattgaaagcctttttgaaaaaaaaaaaaatgtgtaatgtatggatttttgagagtttagatgagttta

SEQ ID NO: 43880 - DNA, 531 bp, Arabidopsis thaliana columbia
  unsure (1)..(531): unsure at all n locations
attttacattatgtgactatttttcaaaaactttattcattttagttcattctgctatcaattatttttttctttcgctattattcagtttaattgacataccagtcagatttagtattattaaaccgatatatatatatatatatatatatatatttgtaatatataaaaaagatagctagtaaagaaaataataatcagaaattagctatcatataaaaattaataaaaatgtttatacatttgatacaacttggtacatcatttttaatctgaacatatccttcaatatttttctaccaaaaaatattgtgtttttaaactatcttctcacacagacacgncgtcnaagtttccgcgngagaacgagagatttgtttaagtcgtcagattctaagaattacagattttcatttcaatagtcatataggcggcctaaatccaatgattgaactattgaagtcactagtaatgaatttgaatttatgtatatcacttgtatgagtgaattttcttgtttttgatattgat

SEQ ID NO: 43881 - DNA, 213 bp, Arabidopsis thaliana columbia
  unsure (1)..(213): unsure at all n locations
nnnnnnnnnnnnnnnnnnnctaaagtgatgatggtgagccgtcttcgtttctgttagttgggttcttacgtttgccttatcgactctcgtgctatctggtgttcatagttgacgatgtctccggctagtgcatgtacctcctgtgattgtgatggcctgtctgccatcaagggggtcacgctctctcctgagtctcagtggtcagggtgctct

SEQ ID NO: 43882 - DNA, 468 bp, Arabidopsis thaliana columbia
  unsure (1)..(468): unsure at all n locations
aatatggttgaattacatgacattcaaatatatatttatatagagaaaacacacagcgcaataaaatattcttttttgcacatttttgttattattataaaatactcatatatatatatatatatatatatatatataaatataataggaccggatcaggcctctgagtagaatcgtattaggcttttgactatgaactttattaagtttaatatttatgtgattagggttaatgtcttctaactaattatatatatgtatgtagttatgtcatcggcgaaccccncncgtcncactaccatcgcgcgtatctcggacattcggacaatacatatattgataaaatgtaaagcgaaagaacttcaaatttaaaatatatgtatacgagagctccccacctccacaacaccaccaccaccacccactaacattaatcacatgaactttaaaacatgcacaataagatag

SEQ ID NO: 43883 - DNA, 393 bp, Arabidopsis thaliana columbia
  unsure (1)..(393): unsure at all n locations
tctagtaacaaccgccagtgtgctctaaagacgttgcatcctagagcaccctattcataaactatttgagacacaagactagcgaagcacagtgcggctagattccctgcgccagagccacatattcaagtttacaaatgagagtaggcccagccataatagacacccatgactgctcatgcctaatgtaagtggatggtgggttatggtgacgcctataccctactcgcagttggaagacattgagagtgtaatgctgttagagntcaatcggatgtgacagtcacactcctgtgcacagacctgtttagatgctcagtacgcattgagatagatcgcgaaaagactttggtctttgaagatggtgtagatacccctggccgctggctccca

SEQ ID NO: 43884 - DNA, 423 bp, Arabidopsis thaliana columbia
cgtcgttcggaccgccttgaatcatggctctatgcaataaaatccagcagcaaagcattcacagtaactgcagagggaaacacagtacaagagactcaacaaaaaactacttcaaagcaagccaaagattggtgtattcaacttacagcttcaaacacttggattttttgcagttgcaccgtttacatgacgagtcgccttctcctgattgttcggacttacgcctgcatgtttcaaatgccaacagattgttagaaaaaagatttaccataaatctgtttctgcaagtttcgggacaaacttgccttttcttcttggggcttattggagtcaagtctactgaagctaaagactttggaaccacttctataatttgtcctgaatctttcccgctttcattttctctcacgatgtcgtgctgcg

SEQ ID NO: 43885 - DNA, 512 bp, Arabidopsis thaliana columbia
caagttatcgtcgacaatttactcgaaatcttcatacaattatttttacatgatttagaggtattctagccttttagtcggttttgatgcaatatttgctatctaaactctactttgcataacatctaataatccaaattttatgaattatccaaatgaaaaaatgaacatgcccattatgtatgtgtaattgtgtatgcaaggccggttcctagagtgtagtggttgacacgaactctttacaatacataatggccatgctcatttcgatttttttaacaatgaatcaattctgacttaaccatttttttccaaataaaaaaatatagcaaatcttgtgaataataactcttgtgtacattttgttaaatatatttattaaaattatcaattaaaagtcctctagtttagaacaaatcttgacactctcacttgtagtaaactctcaagtctcaacgcttcactctcgtcagagtgagctttttatctacacagtgcgaaatggcagtttt

SEQ ID NO: 43886 - DNA, 484 bp, Arabidopsis thaliana columbia
catctaaggcacaacggtcatcttcgaaaaagttggaagaaaacgacgaaacataaacatagcaaggaggtgatgaaagttgcttgtacggagaaagtagcgattctcgcagccctcgatacgtttgacaacgcaagatgatgacatctgtcctctctcgagggttttctcgattaacccactctcttgtctataaatactacaatgttctaccgactccttttagcttcctttgcgttactactctgcttcctctgcttgtgagtttccctttgtaagtgcgattagtgtaacatcttaggtttgtatcacccagttaggattttgtttggctttgttacggtttttgccttccagtgtgtgattagtgagctaatgaggagcttttagtcacgtagctagggcgcgttacggacttttgcttgtgcattttgctttttcagtgatcaatgaggagcccttagataggttttagcgtataata

SEQ ID NO: 43887 - DNA, 477 bp, Arabidopsis thaliana columbia
ctttttccgaccaccaccacgtttcctccgccaaatttttcagatttgtttctgttatattcgccaccggattcttttgtttcgactacgttcacaaaaactaaaccctaaaggatagtgcacatagggaacccaaggagaaaatcaaacgaattgagagtattcatcttctttcctctcattttttctgtcaaattgtgaagtagataaaccaaacttgtctatctaatcgaaaaaatgatataatatatgctaatttacacaaacccaaacccaaaacaaatgcttgaaatccttttcgctaactttctaatggcttatcagtttccaattgagaagcttaaaatctcttcttctttttttctgcaattttgaaagttggtgtattaaccatgaattgagtttgaagagaggaaggagaaactgaatctgacgatagggaggtgccacaataacagagcatacatgacatttgta

SEQ ID NO: 43888 - DNA, 501 bp, Arabidopsis thaliana columbia
gtattccgttttcctattgggttccctatgtactagttcccttaaggtttagtttttgtgaatattagagatgatgaaagtatgaacgtgatggaaacaaaagagaaagaggatgaattcttacaattcgtttgatattctccttgggttccctatgtacaacttagggtttagtttttgacattgtcggagcaaaaaaattcggtggaatagataacagagatgacggaaacttaatgacagagatggatctgaaaaatttcttctcaactccgacctaacgctccgaaaggtattatcgtcaaatttcatctctccaaattccctttttcgatgccacacgccatgtgcttaaaatcaaagttttttttaaaaatgtgcctattttaacaataaacccttttaagaaagaataaaagaccaaccaaggcacttctacggtttgcaagatatgatcaataaccctaaggattgtttgaacacttgaaggtaaaaaagatg

SEQ ID NO: 43889 - DNA, 542 bp, Arabidopsis thaliana columbia
gactctatgtcttttttgaagactagatagttatgtcaaaatcccatgatgagtacataaacaattagacaatgttgtttagatatgactttagttgctcgatttatgcatctcagcagttgtttcttttgtaggctggtgttttaaagtgccaagtggtcactttgattagtttcggggattatctggaacctcgtggagtagtgttcgagcatagataggagctttcttcttcttcttttctctcttcaatctcagagaagttgaggttaatgagttaacaacatcttttaggccatagaattgttttgttttgtgttctcttctttggaaaattgtctcagttcttgtgaaaaccgctattctttggatatgtatttgtatcttgagtttttgtttttggtcagacaaaattttatttggtaaactaagtaagaaaccaacccatgattgtacaatttttgactgtgtagacgttaggcatcgagtgattggttacggtttatgtagtgtgtgtactgaatccataattttaaacattt

SEQ ID NO: 43890 - DNA, 885 bp, Arabidopsis thaliana
caaatagaggagagactgactatagttgaattttgtatctactcatcaaaaattgtttcaaaatttttatataattaaagtatatacaaaactataactaaggtctttttttttagtatgatcaaattaaaattaacgctaaattgtctcagacccacatgttaaaagtttttagcaagtcatgtgatctattattcaacatatgtgtttattttcttcctctagtttctatcatttgacagtattataacccctcgaaattggaaaaaaacaaatcataaaaattacttttgctcgcacacaatcaaaaccgtcccccactcagagtcatagccatttttttttttggttgacagcgaagagccaattgttattatgttaacaattaaaaagcaacaatatagacaaaacgaatatttacataatatatagtaaactaacatgcatatctaaaatatgtgtttatctcgtaataaagattcatctctagatattaaaaaatgtacccaaaaaaaaaggaagataaatataaatgaaagttgataatgattctcatcatggatacgaatcagtttgcttcagctacaactccaaatttgatctctctggtgtaaaagtaatattaggatgatagaatctatgccctcgctggatgtgtcttcaatagtcgttacaggggccatttttaatagtcttgttcaccttatatatcatctctgactcttgcaacaagtatattcaacctcctacggaactagctcttgagacacatcaaaactctcatccctcacttcctcctctgcctgtgcctctgcctctgcctctgcctcagcctcagcctcagcctcagcaagacaatgaaaccggacatctaatgccgcttca

SEQ ID NO: 43891 - DNA, 626 bp, Arabidopsis thaliana
cataaatattgcgattcttcaatatctaagcataataggggaaacaaaagcgtgaccaaaacagacgtaaattataagatagctctcgagatgttgagcaacttgaacagacattcgctctctctctgcatctacacaatggttctttaacttctacttcctgacctcaggtttctcctgatgctgctcgatgactctgtactcttgctttctgattcgccttcttcccctgaaaacctcacaactttacttaacggtatataacaatttctaaaatgtagcttaagttgtgtgagatttttgaaatacatattgaagttttcacataccgccactagtcttttggtttaaggaacgaggattggtcgtaccacattgtgcagaatctggctcttcctccgagtcagatggctcttcctctgagtcagattgctcttcctcggactcagtttcaatcaaattatcgccactagtctttcggtttaaggaacgaggattggtcgtaccacattgtgcagaatctggctccgagtcagattgctcttcctcgggctcagtttcaatcaaattatcgccactagtcttttggtttaaataacgaggaatggccgtacacattgtgcaga

SEQ ID NO: 43892 - DNA, 775 bp, Arabidopsis thaliana columbia
taaaacactcttgaactatctaaactcatatttgacataagaaaaaggcatcaatcatcatgagcattttgaaagaaacaaaaaggtttatggtcgtggcaatgttcatagcatgtgtgttcataagcaacaacatgaacgtagcagttgcaaatgagattggctatccaggaatgggacgcggcgatcgccaaccaggatgtgatcatggcaactgtccacccgatcaaccggcgaatccgtaccatcgaggatgtgaaaaatcaaagagatgtcgtggtccagatccaccagctcttcctcgaaagatgatataatacaacaaaaactaaaaaacagtttcaattataacaatgtaaccaagccccatggataaaaaaaactaatgttttgcgttcgtttagttcaaactattttcttatgtctatttcctaaattatacaaactatgaattcagttattggcttcacaaacatgaaacaccaatgcctaattatgtctgaaccaattctggttactgaaaatatgtttaaaacgtgaatcttgttgtacaatgttactatctgatatacttgtttaaatgtctcataaagtagagtaatgagaagaacaagagatgatgtagatacttccatatattcaatacagttccaatatcaagaaaaaaaccattcttcaacgaggatctagaactgtgttgatacatcattgttaattagaacaaggaatagacctgcttgtggattggtcattcatgtttgagaggcaaacggta

SEQ ID NO: 43893 - DNA, 692 bp, Arabidopsis thaliana columbia
ttgcaagttgtaaaaatatgggaaatgtataagatattataaatcttgtttgatgcctaaactattttggtcccaaattggagcatatcaattggctggaggcatcttcgtattgtttggatttaaaggggagatatataaaatagttatttaaaaaatgggaacagagtatgatgggagtgatgaccaacttaggttaggtaacaagtaaacttcaagaagctcagcttcctttactgtattttgtcatgttttaattatcaatgtagttatgcacaacaataatgctgtttcagtttgactttgtccatataattttaagtagtgcaaacggtgttctaattgcgttcactggtagtaagcgttaatcaaagatagaaatgtggtgaagatagtaaaactgagataatgccaaaaggttataaacagctacaaaaaagtcgatccttccttgatcagccttagtcacgacaaaaacaaaccgaaccatgagggtccaaaacaaaagaaagtctagagactaaagaaagacttacctcatggctttcaactagagtttagagttgagacatagatagagataatgagagttttactatacaagtcaattcaggatttcccttttaccatccggtttttttgtcaccggttccccacgctgccgagccacttggtgaaggcgctactgctcg

SEQ ID NO: 43894 - DNA, 832 bp, Arabidopsis thaliana columbia
cacgagagtaatacagtacatttatacgacattcttgatactcatgcatacaaatttcaggacaaacaggtcagtatgaatttgaattgaagaaattaactgttgcttacgattacgacataagaatctttatgaaatcatcgaggatccataaaccatgtgatctttattgattattaacctatagattgacttaagaatgtacttagcttgtaaaccctaatcttgttataccttaatttattcagcatatcataacgaggaggaggccaagaccagtcaagccacgagccaaagtattttttagttattactcactgaattaaaagtagacctagacaaaaatgactaatatgcccgtgatacgtctcttagttgtgaaaatgaggtccagctgtgaatgttggagggggacaaagcggcgaggggaagagacaaaatcgtgttgtcgtgtaggagaaacgtaacgagataattagttgctaaggttatgtccaatcaaacaatgaagtgggtttaggttacggtcggagtgacttattatatgcatgagatatcgtcgtaatatcgatgtaattatcttcttcttcattttttccaacgtttgataaatttgaaaaagtctttaaactagttagaaacacaaatgaagagtaatagattgagaagtttagttctgaatgggactgcttgttgacaatgattacagtatgtttgtataagtcaatttgagagcaaccgaaagtttttatggttgggtaaactatgcatgaaatatgaaaacgccatttcaaccgcgttttcgaaatgatgatacaaaacaatattaatg

SEQ ID NO: 43895 - DNA, 565 bp, Arabidopsis thaliana columbia
tgtaagtaatacgaatcgagggaagataccaacgattgaagaaaaaaagggggaacatgaagttattgcaagtgagccaaaatatcggaagacgccaactagagaagattttaaattagaaaaggtgaaacatgaggttgctgttggtgagggcgaacgtacggagacaacacatattaaagagactaattcagatccaaagagtaatattcttgcaacagacgaagagaggactgatggtacttcaacagctcgcatcacgaatcaaggtagagaatctttgtttcacagatcccagttttatgatgcgtgaaagtatcttaggagtgttcattattctgaaactggacatactttgtatctcggtgaaactattagttgaaaatctctacctcgtattgctgttattttagtatgattccctcctatttgaaataacatgttgttttatattttttcccctagcttgcaattatgcgaaagggaaatgggttgtggacaatcaccgcctttgtatcaggacgcaatgcaacagtggcttgctcaatgtgggcatcaggttgat

SEQ ID NO: 43896 - DNA, 1370 bp, Arabidopsis thaliana columbia
ctcccgaggtagattcacacattcgatgctttgctctgtatcctgtggttcccttgctgtgacatccttagtctatgataacacttcgaggttattttttcttcgatctccagatcaaatgctctgagatggtaaaaacagaacatacaagttgctacatggttgagattaaaggtgaatatattccgccgtggattattagcaatatatgtgcaaatgtgggtgctaatggacaaaactttgaagccaggttcgttgatgcacaatctcttctcttctcttccaaaaccaaaaaactttcagtctttgtttggaaatgctaacattcgatgagtttgattcagctttgtgaccgagccaacctcggttaatttaaacattggtctaccacaagtccctgagaagacagaccctgagtctagagtcatagaaggcacaggagaaacaaacgacaatgcgtcggacattcctggatcagtgatctgtcctcagcttcaatcaggccatctaaagaacttaaagtattgcaacaagtcttacacggtttcgctgtctccttcgtgatctgtctctgttatttttttccaagttttcatcattatgtatgaaatgaatgttataaacgcaatggtaatgttatgagtaatgtggctgaacatatccagaaacacttttgatggcaatgcacaaaaatttggtttgaatctttctcttaaacgcatcatatagtgatttctctttgtcagaccctgttatgacttatgatcttggcttgaggatatgcaagagccaaaaaaagaaaaggagattcttttaacatattcaaccagattctgaatcatccaacatacatatttgattggagtgcagagcaatgtacatttgttttgcactaactacgccaaagaagcctgataaaaaaatggaaatctagacatgtgaactcgttaaacatctccatctcctagttccagatccctcgcctagaatcataagcatccccatattatttgctgacaactcataaacatacctgcaatgcaatttatataattgatttcatcagaaagcagtaataccagccacaatgtgagggaaacagcaaagcgttttgactcgtaaatctgcttacttgttttgtctggctttccttttccacgaaacgaaagacacaatccactgaaacacaagaatgaagggaaagcaaaattcaggcttacacggagtttcagtatgcaacatgtaagagttagataggagagattgttttgatttatttaccttgaagaccgttactacagagaatactttaagagatggcattttgctaacaagggttcgcctgcttgttgcgcggtttctttgttaat

SEQ ID NO: 43897 - DNA, 752 bp, Arabidopsis thaliana columbia
tgattctttgatttgtttactctagtcaggttaatgtgaacaaggtcttgcagctgaatcattgaaatccatgattcagaacggtgaaggagccaggtaaatacactacgcttcttttattttagtgttcagagtggctctatttgaaatgattgcctaaaatttcagctttttattacatgcagctatgattttgcatttgtcgatgctgataagaggatgtatcaggactacttcgaattgcttcttcaacttgtaagatgaataatgctagtctctttccatagttggccaagttagctttagcggttatctctgttgacgcaggtcagagttggtggagtcattgtgatggataatggttctttggcatggacgagtttcggatcctatggtatgcaacttacacaaacacagccatgctcttaaagcttctcgaatgagaggaaagaccataatctcatatcgataaattcaacaggtgaatgatgcgaagaccatcagcattaggaatttcaacaaaaagttaatggatgataaacgtgtaagcattagtatggtaagtttattttctcgattctatcactttgttctcctaagtccacaacacaacaagctcttccaaactctcgcttgagtttatccattttttggcgcgtcaggtaccgatcggcgatggcatgacgatatgctgcaagagatagtcatcaggaaaaaccaattgggtcacagtgaacttgatccaagagaga

SEQ ID NO: 43898 - DNA, 715 bp, Arabidopsis thaliana columbia
atacgtcaagagctcacttattcactcttataaattccatggaagagtatttacctacgtaaaaaagtaaagttggaatataattgaagaaaaatatgttttagtgtcacctagggttgggcaaaaaaccagaaccgattatctaaactggaactgatccgaaaaaatagatctgaaactgaatccgaacccgaaattttaccctattaggtcctaaattcttctacccaaaaaatcaaacccgaacctgagaataccagaatattttattggaaaatctaaattttacccgaaacccaaaattttatccgaaatatatgagtatttacctgaaaattcaggtatcatatccaaaaaagacccaaaaatttatatccgaacgacccgaacccgattggatccaaaccaaaaccgaatcgatattttagatttactctattaggtcctaaacttctctatccaaaagatccgtacatgatcgggttttactctgatcaggtttcacccgaacccaacccgcttacccgaatgtccaccccgaatgctcaccccttgcagccgtcgaaatgtaattagtaaattcaatggataataattgttgataacgaatagactagggaagcgtccttatgtaattttactttcgtattatcgttaaaaaatgtatctaaggctttacttggccatgacacataagaagcagaagaaggagatg

SEQ ID NO: 43899 - DNA, 789 bp, Arabidopsis thaliana columbia
gatacagggattaacaaaaagtgaatttttgttgggttttgtgataccaaattgtgaaaagatgatgatgatacactgatgttaaccgatgaactcataacttgtcactttgtgctttttagtcaaaatctaacctttttttcctgtggagttgtaaccttgatgggttatttattatgtgtttggtgttctttggttataaacaatgtcttttggctttcagtgtctggactatctggagatgcagcaactgctcaaagccaagtctctgtgggaatgggtttgcttgctggttccactgttatgcttctcactgttatctggggaacttgtactgtggttggcaagtgtgatcttcgtgattcaattgctgtaaacaaccaagacaccaaaggctttcacctaaaaggtaacaaggaagtgtcttatacggttacaccttcaggattcttcgtttgtatgggtttttataagggactgatgaatacagtagaatttagtatttgtgctttactatatgcgggttccttattgttgtttactctgtttttgtagattctggtgtaactgttgatatttggaccagctatgctgcaagaataatggctatatcagttattccgttcgtcattgtccagcttccgcagatgttgggctcaacctctggaagacaattgtccgtgttgattgctctaatcctttcagttcttatgttgatctcttactgtgtatatcaggtaacataaaatcttcaggacagaagtttctgaaaaatatttactagacttg

SEQ ID NO: 43900 - DNA, 1162 bp, Arabidopsis thaliana columbia
aagttaccttgccaagacatagacttgcataataagtgtttacaattctacctgtaagtttcaccattttaacctgtcaataatacagtacagcttattaactaagtggcaaccagctataaatgttctaattcgaggtagaagaggcaacatgtgtgttggaaacggatagtttacttcatatccaagtttgtcgacaacagcagacacgaactggaactgatcagggcattcctacaagatagaaagaaaagaaggttaaggggtggaatagaaacagcaatcgtcaaaaaagtgtaaaacatgaagaggggatacctcagtgtggccttgtagtggtacgtctaaaagtttctcaacagcagcatcccctgcaagtgtaagcgatgaaagttagcaacgctaagatacataagaaagagcaacgtgtagaaagaattgaggtgcattaccaacaataacaggaagcaagtagtcaccatcacaggagatcttgagaaaaatagtgggctgcttgaattgacggagaaagccaagtccaatagggagaacaccaaccctggattcactagctctaatagaaaagggaggcaaaggcctagaagtttgccacattgaatcttgccggaaaccatgtcgccgcattttgtaatgcatacttgtctctgttattgttgttaagaaaaaaggagcacaagttgagcaatgaaataaaattgaatgggctaatgctacaatcccttttaatcagcacaaattgaattaagttgaggtgattaaaagggatctatctaggtttgtggcaacaataataaaatggaatcacaaacaaactccataaaggtaaccctaaaaaaggagggaaatcgcaatcagagttgggcaaaagcaacagacgtcacagggtacgagtaaacgtcaccggaaatttgaataaataagagaatagtcacatttatttggaaatgggaaaaggtggacctgcaacgaggacagaggcttggagaaactcgagatcgggatcgccgaggccagatccggaaatagaacttccgtcgcaacaaatatgagagatcttaggacggcgatgagaacgcagcgatttgaggttcaatggggtgcaacagcgaaaggaggagggtgaactggaggaagatgagag

SEQ ID NO: 43901 - DNA, 653 bp, Arabidopsis thaliana columbia
tatgaatccaatattcactgactgtttctctattttcatttcatgttcttaaactttcaactattatagatcatcatacttcccttatcatcaattttgtagaatttttaagtattcagatcgtgttctataatcagatatattctgagtgctgctaatcagaatcattttgctttattgttgacaaaaaaaaaaaagaagaagtaaattaaaactgccgaaagatgattaaaaaatgtctcaaatagttttgggctcaagagagaacatgggcaggtgggtcatgtcacgtgacaacaagggacccgaaaacactcgacccggccgtgcgttttattttgtttcctcacgcgccgacatcttatcattgcctaccacgcgccttcatcattttcgcttcgttgtaatcattatacgcatgatttcaaatgaaataactccttctcattaatgatctaactgtactcgaaattaaaaatagttaaacatagtacattcgaattatatgccgtatataatgaactaataattcatctttctagtaagtatctttcccttcaaactagtagtgtattatgcgttctaaacgaaaacatgaaatatctatttagaagctctatttgaaaatgttaatggatttgaatactcacgac

SEQ ID NO: 43902 - DNA, 952 bp, Arabidopsis thaliana columbia
tttgaaattaacaaaaaaatttgacaaaatcaacatgtttcaagaatcatcctagttgtaataaaacttagaacacataatatatatatatacagacaattgtctagagagactaagtaattaacctttgctttatcttgtagcttagttgcaaacaacaagtattgtttcaaagagtaatcctttgagttcccaagagccacctccattgcctttccttccacattaaagtttaccaaattaaaaacagagccaaaaatcaggattcttcattgctactatctgatgactgaaagagaagtgtacctcgtcggacataaatggtgcaatgtcaggggcgtaacgagcaagaacggcggatgcggtggcagcaccaacgcccttaagcacagtgagctctttcacagccttggagatgtcaggaagcgatttaaaagctttctcagaagcagatttcaccactgaatcgtctagagacgacacgaagtccagcagacgcggccttcgaggaaaggaagattaccattaaacccaaaaaggtaaagtagaattgaggaattaggcaaaaatataagattgtagagacagagagatcaagtaccgccattttccacgagagagcttccatttcatgagttgagaaagctcggaagtagtgaggtaagggttagggtctcggtcgtgaagaagacaagggagtttgatgcggtagaattggtcgagagagacgagttctggtttgttcagtgattcgattcgggaatcgtacgaagacagagcctccttccatactccaacatcggaacacttgaactctagttccattcccgtctattaatttttgagtatgtatgaatgaaccctaatttctgtctgcatcctcttttcttcaattcaacttcataaaacaaagtctattttaaataaagccacgtggcagataacgcatagg

SEQ ID NO: 43903 - DNA, 546 bp, Arabidopsis thaliana columbia
ctagaggatagaggatccccaaatatagtttttccgttatattaatgttgatttttatgtcatcgtgattaatcgaagtaccttcttaaatagggcaacacctgtggcgatgggtccatgcaacctaacaacggaataataaagtttgaaattatgattacagattattataaagtatgtaacttgaatgatttttctccaaaactgaatgaatttaaatggctagtgcgtattttaaaaaaaataaaaaatgtttcaaaggagtgctattgttttcctagagattttatttttattactaggtgatagtaaatatttacatttataattagaaaaaattctttataaaaaaatagaggataacaaaaagctagataaaaaaaaaaagactctcagaaaaacaaacaaaaatggcgattgttaaggcgatttcgctacggttacttcttcgtcatcttctctcgaagattctgacagttttttacgccggagtggggcggttcccttctccatgatcaggcggttgtcataataggatagtgggag

SEQ ID NO: 43904 - DNA, 518 bp, Arabidopsis thaliana columbia
ttaaagaaacatattgactaatttctgtaactgcataatctgatagaccgcgccttgaaaagaggccaaagcctgccatttttagctcaattcggcgatgacctggatcaatcgtcccggcctgcttttatcaactgcataatcaatcaaaattaccgaaatttcatgcataatcacataaatcacttttgcttatcttgtgtcagatttttttatctcctgatggattttaggcaaaaacagtagcatgaaacgtcattaccaattaaggcagtataaaatgctggttttgtcgtcagttcaaggcaggataagggttaacacacctttatgacagtcaggaattgactgtttctctaacgacttcccttttagccttaaagataaaatccattttaatttcagtcatttaataaagaattttgcgctaaagcacatttctgtaccaataagcttgccatttgacctgtatcagctttcccgataagttggaaatccgctggaagctttctggatga

SEQ ID NO: 43905 - DNA, 287 bp, Arabidopsis thaliana columbia
taattgaaggggaaaaggaaaaaaagaagaagagaattgatggatacataaaatactagctagtatttaaagtgatgaggatatcatgtgctcccattggccccatgtcttcatcaaatattttgatgccacaatttggaatattcttttgattagtttatcaatcatttaatcctgaaccgaagttaatttgtatgccgatacaaacaatgttcccaaaagggatttgccggattaatttcgatgacagcgtcggctgaaatagagagtactaacatattgggatt

SEQ ID NO: 43906 - DNA, 611 bp, Arabidopsis thaliana columbia
  unsure (1)..(611): unsure at all n locations
ttttttcaataaaacttttgtgctttttaaagccataaaccataatctacgttcatacaagctctgtatttagatgttgtcttaggatatttttctatatttatgaaccttttgtgcaaaacacaatctcagaattatttattattaaggaagaaaatccaaaatttgttagtttcctaagtaaatgacccttaggatagaatttgttagtatagtttgaattggcttatgataactattgaatgaaagaaactgaatttatgagagaacaaaaatatcctagagaaaatgacaagagataagttaagaagggagagaaaaaaaggacaatagaaggtggggttttcagaggtcaagttttgtgagtcagaagtattcattgttccattattgacaacaaacaattttgttttatgaatcaaaacatcctcaacttttatagttgtgtaatagaaatgttagttaggattatacaacaaaccacttggttttaagcatcaaaacatcttgtgtttggtatgtgtgtgaagaatttgtgagacaaattacagaggagatctnagtatatagttgtactctgtttttgagcatacatagatatagtagaattt

SEQ ID NO: 43907 - DNA, 890 bp, Arabidopsis thaliana columbia
  unsure (1)..(890): unsure at all n locations
ttataattattcacctacttaaagtattattcgaccaaatgaaaaaaaaatagaagaatagaaaacaatactaaatttttttaaaactaataaatcgaaacaatttctttttctcttaaaacatcaattattatgaaatggagggaatgaaattatatagtttggtttagttagctaagggacttactacatgtaaactgataactaggtaaaggtctatcataagttccaaaaacaaagctaattaagatgcttttggttgatattttgtctgctacaagaacaagtgggagtatggaataagggcttgacaaaacaaacatacaacgaatagtttatccaaatctaaatcctcaaactgcaatattgtagttatactacaatacaattgaaaaaaaatgaaaacaagaagaagaattgtttagatattttgggccaaatgaatattattgggaggagacaagaagagaaggaatggtagagagggaaattgccggcaactatcaaaacaggacggcacgcattgcgcccgagggggctcttcattgttgacttcactctcgtttatttttgtctttcttactaaatgatttgtttcttaattaatttgacatgtaaatacattaatttctttttacaatttcatctcgctatacttaaaagtgcataagataagatcgttgtgctcgttattccatacacaagtatcaaaattttttttctttcatctatttcaagtaatttatgataagtagattataaatgaaagaagaatagtgtgattaagtcccnnggtctatanaatagcttttaaagagagatcggagactttatatctattcgctctttagataattgagagaatgaaaataatttcgggtctgaaagta

SEQ ID NO: 43908 - DNA, 875 bp, Arabidopsis thaliana columbia
tcaaaatggttgcaccttgttgcagcattatcagatgcaggaggatgtatctttccacctcctcaagtggaagtgtagtactattagcttcagtggtttcaacaaccaccgccagactccaaactgtctgaaagtgtttcaaccaggccatctcctccattgggtgttggtgttggactgggttttggggccgcatctgtagccggtagaactcagaacgacgacctatctatgaagattgaaacagcatactattctgttggaactcttgtcctttcagattcatcgccacctgctatgtcttctcttcttgttgttagcagagattcaagcgtgcactctcaggctggcagcagttcagggccaagttcaaggagttctcgggctttacgagaagttgtgtcttcccttcctattgaaggccgtatgctttttgtagcagatgtgctcccctctcctgatactgctgctactattcaatcattatattcagaactagaatactgtggtgtcgaagtctccggagaatcttatgaaaaggcatgtggaaaactctgggcgagaagtgatctttcaacccagcatattttgccaaggagaaagattgttgtttttaccaccatgggtatgatggaacttgttttcaataggcctgttgatatcttgagaagacttctggaatccaactctccaaggtcccttctagaagattttttcaccgctttggagtaggcgaacagctgccatgtgcttgatgttagctgcctggataataaattttgaagatttaattagtaacattgttgccgataaagcagctgaggcttttgaggatcgagaattgtaggaatccacaatttgatggcagtacgtga

SEQ ID NO: 43909 - DNA, 393 bp, Arabidopsis thaliana columbia
gatcaccattccattccattgacacatatctaaagctaaatatgctatagataatatattatcaaaaaatgctttaaaataagaatactaataaaatcatatttgttgatactataatccaatttaaacattgtgaaattttcttccatgtttacactatagtgttaggtttcttatagagagtatattgacaaaaaaacagaagataaaaatttgaccgacttaaaaacacatctgccacgtggtttccatatagaaacaacaagtccaaaacatttcttaagcacttcactctctaatttccttctctctatctctcaccatattcgcgattaacaactctcaacttttctctcaaatttctgatcctttgatccaacagttagaagaaga

SEQ ID NO: 43910 - DNA, 408 bp, Arabidopsis thaliana columbia
agatagagagaaggaaattagagagtgtagtgcttaagaaatgtaacggacttgtagagtagatatggaaaccacgtggcagatgtgcttagaagtcggacacatcaagaacaacttctgtatggtccatatactctctataagacgccgaacactatagtggacacatggacgacgatttcacaatgtctaaattgcattatagtatcaacaaactaggatgtgatctagtaaacttatcatagagcaagtttgggtgacatcttatcgatagcagatatagccttagatatgcgacagatatcaatcggacagacaattattttagacttgactagtcatatatggtgagttgtctgatgttgagagatgtatggaaataatcacttaaaagctagtacctgccag

SEQ ID NO: 43911 - DNA, 778 bp, Arabidopsis thaliana columbia
catcaaatagcctcgcatggattaggagtcataggaccataagacaaactcacataagccgtgattattttcacaacttcttgaataatatgatacaatctataatttataatttataatgtttgtttatgaatcaggtttaaaacaatattcggactgttgattaataaaaaattacaaatataagctaagcttgagatcgaaccctcacacattgaaggtagattgccacagagatgaccactataccgccacaagttttgtaagagtaacgcccctaagttgttctaaaccttggcatttatagcctgtagtttttgtttttatagtaaacaaaaagttgtaatgtaaccttacttcatatagctctaacaatatatgagtgttgtgaaatgggaatacttatgggattagattgttaaccatatatataaggtttgagatcattagggtgtgtttacaaaatctatattcttgcaatacctaatgttttcaaaacccacaacattagtgaagaattattgcatgaatctcttagacttgcaaagtagattcttatttagcgttcgtggctttttggttcgacattattggaagcaaccggaaagcaggcagacccagtcagaatagtggtgggtcccacgatgtgtcgaataatatatatctgatcctgaagacaagatcatgaccgtcggtttaaaacacgtaattgggttccaaggctttatgaaaaccctagaagtaaaagggaaaaccgaaaaacagagagatagggttc

SEQ ID NO: 43912 - DNA, 1324 bp, Arabidopsis thaliana columbia
cgtgtggttcctcaggaacatataagattcctcctttttctggattgacaatctgtgtcacaagaattccagcaggttagaaaaccggtatattcaacatatgcgaattaggttctttgttgacagttaatcagtgatttattatcagatgaacgcaagggaatggaaaaggtaatttcagaatatggagggagctactctgctgagctaacaaagagttgtacacatttgatcgctgatatatcctttgaaacaaaatttaaaaatgtgctattcctaggacatatgttgattttgtgtgcgcattcagttgtgctgataaattagcagtattcaaggcttaccaatcgggttctctgaagttacaagatatgtgaatataaccattacgtggttgatatatagatgccttaaattccaagttcctgtgcactaaagtttgaggttgcgttatttggactttaatgaaaaatgattccttgaccttgcatacgctgctgaaggtgacaaatacaaagttgctcgaaaatggggtcacattcaaattgtcacacggaaatggtttcagcagtccatcgataaaaagggtgacgttgggtgcttctgcattttatacattctcttactgatcagtgatcggtatattggctctctataagttaacagattcattcgatactgatatgtcccttgttatgcgcagtttgtctcaatgaagagtcatatcctgttctcggttccatacccttgacaagaggagtgcgagatttgggggttcataatggtctagaaaagtttccttcggctgcaactgcgtccgcggcagattcatatgtttcttgtgctcagtctagagactcagatatagaagcttctgcttcacaaaatgtttttcccacttctatgaatcccagtaccgatgttaaagaaccaggtggaggcccaacggcaaggccgcaagagcaaaacattgatggttgtactgccagggattcagaatccgaagacaatgacttgtacttatcagattgtagaattttcttgcttggttttgaagcttctgaaatgcgtaaacttgctaagttggtccgcagaggtggtggatcccggtatatgctgcttaacgaaagaatgactcatattgttgttggaactccttcagagaggtaaacattgggttcgattttgctctatcagctttttccttttttctcttgtagcattggtcgagttctgttaggtgggtcctctaagcatattctctgtagcataatgatctctacataaaatattcttttgtagtgagaacagagaagcaaggagt

SEQ ID NO: 43913 - DNA, 453 bp, Arabidopsis thaliana columbia
tatcattaaaaaaaaaaatggtgagcaaactatcataaaaatatatgatggcaaaatgtgagccgtcggatgaaaagtgaataggcgaatgagaggacaagtgtaaaaagtcataaggtagacaaggacacagaggaacaagtggcctctgctcttctgcctcaattacaaaattatttttatttttgatgtgcgtggaccgccaatgacgtttaacttcgttttcatctcttcttcttcttcttcttccgtcttctcctccatttttgttggtaaacccagaaagaaataaggaagagaaggggcctttaggggcggatagagagatctacacgtctttctactagatctcggattcattcccagaatcctctttcctcaccggtgattgtcttgatcatatatgttttgttttctccttgcgaattgttgattacatgttgaaatttaggg

SEQ ID NO: 43914 - DNA, 960 bp, Arabidopsis thaliana columbia
tttttcctaaaaatatagttcagtaagaaataaggatctcactccaaacattatgacataatgattggggcttttgttcaaatgggtacatttaagcccaataactagtgagaaggcacatccattatgggtttataaggatgggaactttatggctattgagatgacgtttttgccctcaattttgttgttgacaaaccaaaaaccacttcatcgtcttctccgtagcgtgacagagttcttgctttttcacgcacttgctttatcaacactgaatccacactccatcaacatcaatagtttcatattcatcaatatttttttccttgcctccaacaattcacaaacttttcttccaccaatctaatccaaaatctaatgaatcaaattaaacgagtcttgtttaaaggaatctaaaccctaagtgatagtgcctaagaaaccctaagtgatagacacaaatcggaacaattaatctccaattcatcaacattctaaactaaaggggaaatcacttttcattgaagcttcagaaaagtaatggtctttggtttgtaacatgggagattaaaaggggaaattactttcaaaggatgttcggtttgggttcaaactgcatttttcatttaagctttagaatcagatcggagatacatgaaacgcttggccggagtttcgaacgagaagaaagaaaattataggattgatcgattagcagagatggtgttgttcatctaaggaaatcacaattccaaagccgtgtaaaatctccgccgtgtatgctccatcgagaaacgcaaggagagagaagacacgtacggttgatgaatttaagtagattaaaactggtttaggtgattaaggacaactatgtccttttagtggaataaaaatgcctattccggttaatacattgaaaatgtgtgcttgtacaaaggcataaagaaaagggagtttttg

SEQ ID NO: 43915 - DNA, 953 bp, Arabidopsis thaliana
ttatggcctccctattattaaagcctacaatagattcattagtaatatagtctcctttaaaaggattggtctaaagttttcgaatatcctacccaaatctacaaaatagttttgctaaaaagaattcacatgttatattattggatccaacgtgtatatcggaacataattaaaaaaacaaaatgttctagaggaaggaaaataactaaccataaataagaacgaaaaacaagagatatcaatgaatctagacatatacccaccacccaaagactagtcgcagaaacggctatataaggaacaatcaattaccaaaagaagaagaacaacaacaaaaagtaaagagacacaaaaacaaagaaaagagaaatcatcaaaaaccataaaataaaaagagagaaaatgggaaaaggaggaaactatgtgatggtggcggcttcggaggtagaggagctacgacagaagaacggagagatggagaaagcggtggaggagatgaggaaagagatgttgcagttgtggaggaggacacaggtggctgaggaggctgaggagcatctttgctctcagcttgccgagcttgaagccgaatctttagaccaggctcgtgattaccacactcgcatcatctttctaacaaaccagctctctcgtttctcctccgactctgcctctccctagaatagatatttgtgtaaaggataggttcttagattgttggatcatatatgtatcctcaaattggtttatatcattgccaaatatgtagaggtttttatttttgtctaaatcttgaatttctccttggaaaatttctatataaacaaaaaaaaatcattgttgttactggctcatcttgggattagtcgggcgcttcaacaaaatccaaatatcacgtagtaaatctttaaaaacaatcgatcttgttgaaaataaagcaaaagatattcgat

SEQ ID NO: 43916 - DNA, 548 bp, Arabidopsis thaliana
taaaattagttccaacacttttttgttgttgataattctcttgtgaatctgtgaaatacatttttgtttaccaagattatgatttattcattgctttaaagagagaaaaataacattttgtagagagagatatgtgtttcaaaagacaagactgttatatttacatcttttcaggaaagcgaatttttcaaagaagcaaaacagagagaagtaagaacagagtggttctgctgttctggacatggagccataaaaggtttctagttctcagtaagttctccatcatctgcagaagaaaatggcttgtgtgaaaaacaaataaatcgtcttgtttggtcgatcccacgttcattacaaaacagagttgtaatacgtttcaggttaccttaacaatgtgataagctgtggagacggctaaggatccaggaaaggaatttaacaatgtgatggtgtgaattcagtcaaggcagatcttaactgatcagggtcagcagtgaaaggtgtcgccccatcagaccacacgtctattttaggcccttgatgcaaag

SEQ ID NO: 43917 - DNA, 569 bp, Arabidopsis thaliana columbia
taatagtttacacatattgaaaatttaacactaaaaaatctattaaaaacaaaaatcaaaacaatttacttaaaaatatatttgtgaaaaccttgtgataatcaaaagtattatgtatattttttaaaaataaaatattttatctaaattgttacttaaaaatcaaaaataaagtttaaatattgatataaaatacaaataaaaaaattaagtgttaaaaatttatatgtgtaaaacatattaaacctaaaacacctctgaaagacctcatattatggacgggatgatgtatccaatagtttacgcatattgaaaatttaacactaaaaactctattaaaaacaaaaatcaaaacaatttacttaaaaatatatttgtgaaatctttgtgattagttttaaatcagaaaaataagaagtggaaaacataaaatctttttgttccttttttaaaaatcaaaatcattatctttattaaaaagaaaaagggtagtaaagtaatatacctagaagtctgtgatatctcaggcggcgactcgtgcttgttctgaaacttgaaacccaaacgag

SEQ ID NO: 43918 - DNA, 449 bp, Arabidopsis thaliana columbia
ttaaaattattttataaacccaatataaagtcatatttatttggtagacttttgaatggtttgacatatgtgattttagctcactaatttattagtattgaactctcttacatttattaaaactattttatgttggcaaaaatgttttactctagaatacactatacataagactgatttattcgaagccttctttagatagcctaaatttacacaactgttgttagatgctaaacttttgtataatcttattaatctgaatcaataccgttacagaaccattgggttgtgacgataaaacagacataataagaccattggaaatgtaaatccggctcttggcaaaacaacgggcaatggcaatttacgtaattatctaaactttctctgggtactctcctacttaagagctgacatctttcttagtcatgacacgtggcagctttttt

SEQ ID NO: 43919 - DNA, 628 bp, Arabidopsis thaliana columbia
tagagaaaagaaacatgaagctattcattatcaccgtggtgaccattttgaccatctcaagggtatttgacaaaacaccagccaccactgaagcaagaaagtcgaaaaagatggtcggtcatgagcatttcaatgaatatttggatcctacttttgcagggcatacatttggagtagttaaagaagattttctcgaagtaaaaaagctaaagaaaattggtgatgaaaataatctaaaaaacagatttataaatgagtttgcgcctactaatccagaagatagtctcggtattgggcatccaagagttctaaacaacaaatttacaaatgattttgcgcctactaatccaggagatagtcccggtatcaggcatccaggagttgtgaatgtttaaagatttaaaatatgacataaagaaagctgaagactaaagaaaactggtgatcaacatcatttcaaaaccggttcaatgaatgatttcactactaatcctggagatagtgctgatataaggcataagagaatgatttctaatgtccattacaagaaacaatataacacaaaaaaattatccaaatcaagatatatgacattttgttctatgaaatttatgacattagtattttg

SEQ ID NO: 43920 - DNA, 378 bp, Arabidopsis thaliana columbia
gttattgtctaacctgtagcttgtttacacatgtgtgcttcggtttggttagatcatagaagtagacattcgagtcttcgcttccagcaactgtagtttcaaacaagaagaaacgcggagaaaatgacttgcacttctcaagagacctatgagtctactattaccggaactataggtaaatgaaggattgaaattcaaacctatgtgttctcctttctctagtgataatagcgggcaaaacgatgcttggattctgtgtattcgcggggctaatttgagggagcaacgcaaagtcaaataaccttttatctgaagggcaacactgcatcaccaacacaaagcagaaaaatcgattataaggatctgtaaggaccttga

SEQ ID NO: 43921 - DNA, 358 bp, Arabidopsis thaliana columbia
gctttagagatgattaggtaaactgattcagataaaagtctaaatcaactgacctaaaacttatattccattttcctcacaaatctaagaattaaaatcagcaaacaaacgtcaataaggacatgagcttcattttcttcaatgatctaacgtttttgaaatggccgaaaacgtctttgtactgtttctgtcggtataaaacattatccaaaacgcgagacacaatttcatatattttcttttctttttcccaaagagagccccttctcgttttacaagcacaagccacacaatcatacaaacttcgatttcttcggagatatacgcagaaaataattaaaaagttacgaaaccatct

SEQ ID NO: 43922 - DNA, 549 bp, Arabidopsis thaliana columbia
tcatgaaccgaaccgaaaatctcggttaaccgaaatgattttaaacacttaccgatcggttatactcaattaaccttaaccgatccgatttgtccaaacctcggttcggttcggttcggacaaatcggttcggttcaaattcacaggcccagtatatctccccatcaattttagattttttggcctcaaaaggaaaatttcggtttatgtactatttcagaatacaatctagagtagtggttgagattataaccaaaagaagctatgtattacgatttatatttagtattaggttcatgcaataagaagcagtagagtattggccattgtactcttcctcgtataaatgtatccgaaagtaaaaccaaaaatcactctttattagttataatttagtttaatacatcattgatcactaaatcatctcaagaaaagttcaacttcatgatgcaccagatataactcacaagcagaagaaaaatccaagtcggtttcatcccgaataaatccaaccacgattcattactaataataacatcctggttttac

SEQ ID NO: 43923 - DNA, 568 bp, Arabidopsis thaliana columbia
tacacggttttactgtttggatctcactctcctactcatgggggcacttgcgtactgcttcaagtgttctaaagcctcccgcacttagaagtctctattttaattctcttggaacgactttatgagtatgttataattaaactattttaatcctgaattctggttatggatctgtgtcattttggtcaaactcatcatgtctttttctccgatatccatccattcctaaccttgttactattatctatcagtctttttgataattaatacaaatgttgatatgtagagtacgacgaatcgtaaattgtaataattgtttcgttttgctgtaatttggctctatctttatacattagaagagataatcaaaaaagagataaaaataaagccaaaataaatgtgttttttttgcgctggtcaaagaaaaaaaaagaagtccaaatgacagttatacccctaataacgcaccatgagaactcagacgattaagggtgtaatagtaataacaagaagtgagtctccggtctgaaactaattaaggagacggcaagagaaacaagacatacgt

SEQ ID NO: 43924 - DNA, 311 bp, Arabidopsis thaliana columbia
cgtatactatatttcgagataaatgtatatgaggatattgattagctgtcaaggaacgatgcgattcgttgctaatgaagatcattcagatgcagaactgatgtatgtaaagatcatgcaaagatgatgttctcacgtatctcggaaagggtgcacgcgatattttagttctacgtcactacttgccggtaaaaaatctctagtgtaagatgcccgagtggaagaatagttacgccctaagagtttagttgctgttatctcgaagacaaatacgaatctgtagtaaatgttcatacgtgtatacagttgtg

SEQ ID NO: 43925 - DNA, 553 bp, Arabidopsis thaliana columbia
ggtctgattccacgagttcgagttttgtcgtgtgattgaattcgaattgtcacttaccaacgtcgttaatacactaacactatgattggtctgatcgctggatctgtgaaccaattggaaaatccagttcaagttgttttagcaaaaaccaatctcttctctgaaccgggaaactgtaaaccggtcagtacttgatccataagaaaccctccgagtgatttgaagggtttgagctgtgttgaaaatggttcgtcggctctctctaaacccctctgttttgtcgactgcttcttcacgccgtcgaggaattcttctccaccaacgaatccggcgacgtcttatcaccaccttgtcgaatctttagttgatgttgtttaaaggtgagtccaaattccacgcgccgccttgactttcatgaatgtgtgttttgatacatttcctacatattccgatgttttctagctagatctccaacgatttgctgattgaatttagggttggtacatgatgatctttgactctaactcgcaggttttagctaataagggcatga

SEQ ID NO: 43926 - DNA, 495 bp, Arabidopsis thaliana columbia
caacaaatcaagattaatcacaacaaaatcaaaagggttatgaagattgggaaaagggtttgtaacggtgctaaaaccttggaatgtagccccgagatgctctgtgctttgatatttcaagaactttcgagatttgccgcgctgaaaaaccctttgtgtcgtatcgtcaatgaagcacagtttcgtatagttcacgatgcaaactcggatttgctcaccaaactgacatcgaaaaagagaagaataagaagaaaaatcaggttctttaaattctgcaagaagctaggaggttatagcctagtgattactcatagcgcgattgtcattacattgctgatcatagctcttcacagcatactcggcgttttcgcagctcctgcgttgctcggtctatgttcgttctgtcttttgaggaagaagaaagcgaaaggaagaatgcataagagcaataaagatacaactctagagaagctcgggacacaaatcgacattgca

SEQ ID NO: 43927 - DNA, 559 bp, Arabidopsis thaliana columbia
tggatcgttttctgctacattctgcactcttactctcctctccttcactttcgctatcactctcatcatcgctgctcgaatctccactttcagcggccggaccaatgccggcaatagcagcttcagccgcactgactgcttcaggcgtgttgagatcagcgacaccgagcatcaagtccatctcgataagttcagattcgttacccgttagtgcttcgatattataagcttctgggtttgcctcagactttttgttagcctccgccataacccccaagaagcctttaagtttaccaagaagttggcttttaggaactggagcaatcgttggcttcgatggaggaggagccccatcttcttcttcttcttattcttatccgtacacatcaaaagtgctgaatccatagcagaggaagaagatggattcttgagctccaatttcaggagatctttgcagttttctttccgctccatgatttttctttggtgaaatcagtgagaattatggagaagaagacgaactatgagcttgacctagaaaaagagtttgcgtcggtgg

SEQ ID NO: 43928 - DNA, 511 bp, Arabidopsis thaliana columbia
ttatgttgtaaaagtaatttgcttttgtaaaagaataatattggttatatgtgtaaatactttcttgacaatttgaagtgctagttttggatttatcaacctcctgtttctcagaatatgctgcaataccaaagtgtttttcttttctttcaggttacgattttgatcagacttatgtcatagaagacgaacagccagcaagacagagcaatgacaatagactgaggttaacctcaaaagagcatgacgttctgccaggttttggagctgctaagaattctgactacagtatggagaggtaatgtttcaatgattcacaaacatgaggacattgttaaatcaatgtcatcacacaattgcatgtctaatagagctcttactctcagaattttctgattatggctacttacattcagatagtctaattcatatcattgtgtgttttgtatattatatgagatttaatccccgataacccgaaggattttgtggcccggcataaattttctgg

SEQ ID NO: 43929 - DNA, 439 bp, Arabidopsis thaliana columbia
taaaaaagatgaacttcaaaattgattgaacaagaaaatatggagaaataatttgagaggacgtcttaaaaccttagaagtttcgagcgaattttcgagcgaaatttgatattattttctgtatattaattgatatcacaagtaaaaattaaaacaaccttaccatatgatgcagcgagatatctaatattattatcttttaatttatttattataattatactaaaacactctaagttttagggttttgtgctttattataaatagcctttttaggcctcttattgtattcagttatttgataaattgattaatcgaaagattgaaagaagtttttataaaccactgtaaagagtattcacaaacctaagagcttttgcgaaacgcctgagagaagaactctcaaaccctagatttccgggtattctgagaatcaacg

SEQ ID NO: 43930 - DNA, 929 bp, Arabidopsis thaliana columbia
tattgtcacggagatttttcaagagattcaaattggttctggttctggtgtttcattgtgttattctcccagttttgtcctagttcctttaggttaagattgcaagtctaataattttatcacattttcttgaactttgttcatgtctctgttttcttagtcttaagtcagtttgtctaaaattttcttgatgataaaaatatagacttacgatctccaacattgttgatcaacacactttcactttgaacttaaccaaaaaggtttgtcaccattgagtaaaaatgttacaaaatatatacgtaagtaatgtaagagttgtgaataataaggtgtagttgacatttgatgggccggaaatgtaatacaaaggcccatgggctaaattgacaatttcattaaaaaaatcgatcctcgaaggagaagactctgagaaaaaaaaaacgggaagaagcttgagcttgtcactcactagcttgaggaaaaatgttaacttcatcaatgcctcaaaacctaagccttttcggattttctcctctcaagtcttcttcgttcgctcttattctcagacccttttctctctacccaccaatcttcgcttcttcttctccggctccgagtcgtcgtcctcctcgcaccgccggttaccgtcgcagtggcccttctcctccgagacgcaaatggagtagtttcgaggagcagaagagaaaaggtaggtctccgatggagaaagataaagctattagctttaatcactcttctgattctttcgagtttaataagagaagagctgagggattggataaggtcgataagcctaagaagaatctcaagaggaatactcgcacccttaaccctaccaataccatcgcctatgttcaggtttcaatttcatatctactccaatcttaaactgtgaaagatgatgc

SEQ ID NO: 43931 - DNA, 860 bp, Arabidopsis thaliana columbia
gtcccctcgtggtttatcacttatgcttcaatcaattgtgagtttatctgcctttttctttggtttgtcttatctaatatatttgtatagtttcttattttagtgttggatgtttaggcgaaatggatatacgacatggatccttttgagccattaaagtatgaggaaccattgaagtccctgaaagctagaatagctgagaaaggatccaagtctgtcttttctccgctgatagaggagtatattttgaacaaccctcattgtgttactatagagatgcaggtattttttgtctccgagtttctcattgctgtctaatgtttctataatcttatgcccaaaacacgtttgtcagcctgatccagaaaaagcttctctagaggaagcggaggagaaaagtattctagaaaaagttaaagcaagtatgacagaagaggatcttacagaactagcgcgtgccacagaggagttgagattgaagcaagagactcctgaccctcctgacgcactgaaatgcgttccaagtttaaatttgagtgacattccaaaagaacctatatatgttcccactgaggtgatgattatattagctctctgctgttgttggattccttttaatttctcagcttgatgctgatatggtgctttataggttggagatattaatggcgtgaaggtgttgcggaatgatctctttacaaataatatactctacactgaagtagtctttgatatgggctcagtaaagcatgagcttcttcaactgatacccctcttctggtaacttgttgacttctacatctgatgatttaaccgtaagactttatattctgcttttggttattcacctaatttttcca

SEQ ID NO: 43932 - DNA, 378 bp, Arabidopsis thaliana columbia
tgtgataagaatatcaataacttaaatggatcacatatatagaagcttgttttttttcttttccgaagcttgcctcacaagaccggcactacgaggcaataactccaatggcgacaaaatgcactttttagtttaaacgaatgtaagtgtaagtataatgtaattaagtcctttgagtcaatggttgacctagtgggtatatgttacgttcggactttgatttccaaagaatacaaactattgtagtatactataattaaatcgaaaatatatattaggccgtatggtagagcactagagccttatgtttatcgtgtatggctctatgtagtaaaaaaagttgtacacgtcgtcttgtcgatcgtataagtgtgggat

SEQ ID NO: 43933 - DNA, 589 bp, Arabidopsis thaliana columbia
ctgtggtttagactgcgagaaacggcattggcgagagatgcaccggagtgtttgtagtctctatgaagctatgatgagtagagaagaggagctcaagataaagatcttcactttctcgtgttatgctgagaacctaatggcttggatctttaggcatccataagaagggaatgtggagaagacaatgcagttgctattcccaccaaccttttggactcttacagtgtttttccacagaggcacaatctgaatcatggagagggctagaggacggggattatccacaagatttaccgatacagaatctgaacaacgggcgttccccgggtatgatcctcttgtcagattggtcagactactatgatttactgtgtctaccacggtcaagccttgtttatgacattctctgttaccctttaacactttaccacatattaacatcagtaagcaaccatcccaagaatctgttgctgaaagggaaagaagtgactgtccattacttaggtccagaacgagaactcgactggatcaaagcatttgcagagatcaatcacttgcttaatggtttaggaccgtgcagatcataatg

SEQ ID NO: 43934 - DNA, 537 bp, Arabidopsis thaliana columbia
tgtactttttaagcctgtgtcgtcaatttgtagtcttttgattatctgacatatgatttaaattatcaacttctgcaggcgttaaacaactggggactggtcctacaggtaactgactgacatgtgtttatctccatgatatgttgtgacataaaaatgtgtttttgtaaaaattaagatgctaaaaaacttagaatattccctgggttttgtcattaggaactcagtcaaatcgttcctgctagggagaaggaaaaagttgtcagaactgccattagtaaggtgcttattcgtctgtcgaactaatgtaaacattgcatttgatatgcacgattgattttatactgtcccttgtcgcttgttttaccatacagtttcgggcggcaatcaggttgcaatttgatttccatcgagccatatacaaccttggaaccgttctggtcagtttcaatcttttcacataactctttacatgcaggattgtaattccaatccagttaattaaccactgtggatttgtctcacatttacagtatg

SEQ ID NO: 43935 - DNA, 600 bp, Arabidopsis thaliana columbia
acatcaatgcttataactaagaaaccacagtatccaatcaacattaccacccacaacaactagctaacaagcaagcctaaattttgatccccttgacttgctaccaaagtctagctcagaaaatatcacacagagaaattagatatacataatttgatgatagacaaatgattctgctacacacctttgttactaccagagataaaaatcggatctttagtgaaatctctagaataagtaactgaatccactctctctaaccactcctggcatttctctattcctgacccaactttcaaatcggacgacgacttggtgaaaaaatgggttaacgtatcgaccaaagaagcgttatcgagccgacagaggaacccgatctcgataatgacgacaagagccacgcagattggcaaaaaggtcgagactttacgcttgacagaggaaggagacgaagaagaagaagtagagccattggctactacaggcaattcttcatgggtcaatccaattttaggacctcgaagattggagaaacacccattatcaaagcgacgattttttatcaataatgaatggattttaagaatgtgatttgggttt

SEQ ID NO: 43936 - DNA, 458 bp, Arabidopsis thaliana columbia
ggtaaatcattatgttgttcataagtattagtgataacaagctaaaaatcaaaaactgctaacaagaactatatacaaatttatttatttcttataacaaaatgatgacaaaactgctaacaagaattataggaaaactctactttatgacataattgtaacacttttgttgaatattttcataccattacaacattacaggtcgtgtcctggccatagggtttgtattcgatctttcaatgtatacattgtgagttaaagaatgaggaaaaacagtaaagaaatgttgcgaaaaaaattataccgttcttccaatgataatttctggtaacttgtttggttcatatttttgtaggttgttgagagaagcgatttgttctgttttttgccgggcactagacgaagtgctgctacgcaagaacttcatggtacggtgttggaatactgatcccaggagt

SEQ ID NO: 43937 - DNA, 626 bp, Arabidopsis thaliana columbia
  unsure (1)..(626): unsure at all n locations
agctcggtaccgtgnnnnnnnnnnnnnnnnnnnnnnnnnnnnnnnctaaagcttcctgttcgagttgggctagaacctaactggactcttatcgtccaacatacagattcgacccacgatgactctgcgcggctgagtcaacgatactctactgtatcgcaccgggagggtagctgggcatccagtcacccactgttcaatgacctggagaccagagtgccagccctcacgtcggaaggaggatttcagcgaataaactgtctatctgccttaacatgactgagcttatgatcaacagagggagtcagagaaggtctaggtagatcatggataaaccttcagctggtgaagacgagatgctcctagtaaaccccatcggcagagattaagcaaagaacgtattgacagtaatatgcggaaccatgcgaagcagactccctgcagggtccccgtaggcttcaggagatgctcgcatgtattaatcatgtacctgaagctctattgagaaggagttgggtgactcaatggaacattgttctggtttactatgcagaccgacaacatggacgctgccgagttagagacgtttctcacctgagatatttcccctcagacgagatagtgga

SEQ ID NO: 43938 - DNA, 451 bp, Arabidopsis thaliana columbia
gtaatcattgaagcttataattgaaatctataactacaaagcctagtgcacttacgtccagaaagccaaaataattaggcttcctattaacacatatatttatatgtttcttaagaacttttacgaaattacctgcatgtagttaaaataataaaatctaaactaattgtgagcacaacaataatccgccacgtcttctaaacctcttccattcaaaactcttcactatccgccacgtgtccccttcttcacactctttttatctacctccacctctaaaactttctcaccacattttcccgagaaaacaaaaaaacaaaacttacaccaaaacgatgtctggaggtgtcggtccaacgtacaacgacataaccttacccaaagaagaagaagaagaacatcagacccgatccacctcaacagtatcatccaccggaaaacccgccggatt

SEQ ID NO: 43939 - DNA, 939 bp, Arabidopsis thaliana columbia
tctaaaaagtatacataaatcgtagctaaaagcagtgaaaatagggttatatcactttgaaggcaaaacacttttcttctagtagtctaaacacttgtacgatcaagcacatctttatatcaataatatcaacaataccatcagtggtatataatagcttatgttgttctttgagattctcgcaaagtataatccctcagacgaaccctaaatacaatttcaattgtgtaagttttgacttccagacttaaaatcctataaagtggtacaaccctagaaacttttaaaccctagaaatcagttcatactcactcacccaaaaaaaccattgttgattctttacgaatgcaatgctatcacattctaaaaggaaagcctctaggtatataacttctccgggaatcaagtctctctcttccgggtcaaactctagggttggccctagaactaagataaggatctattgcttgcatgagtgagaggtttgatcataactcttacctcagatgagagaggcgtaagccatgctgctagtggcttgacacgccgaatagactccgcctctttaggaggcataatctccaatacaggagaaaaattttcagaggaacgactggtggaagaacaatatttctccgaagaatatgatccggatttggacaaagatgatgatcaggatttggcaaagatgatgatccggattttgacgaagacgatatccaagatttgctttgggaggatgagggtagcgatgagttaggctccttttccaaatcattttcatagttagagtttctacatggggtcctttgcgacgaccaaggtgaaccttgcggtacatgggctcttttttctggtgggtgaatgcagaaggtctctatggtttcaggaaatattttgaatatataaacagtcgcaactaaaaacacttttgggtta

SEQ ID NO: 43940 - DNA, 510 bp, Arabidopsis thaliana columbia
attacacagcaatcaaggttcaagaaggtgagtgctaatttatgtaaaggcggctactaacaactatcaggtagtgaattttctgcactttctgaaattggacaataaagatctactccctatctcgcaattttttaagaagaatttaatgacagatggcaaagaaacagattgaaaaacaagcatggaataagtgaaaaggaactctacagcaggtaagcaataatgtgcaatcactatttcatattatcttctcagaatcagagagatattcagaagcccttaactatgatcagcattgtgacaaaaataaaaacgcagctataatgtattactacggaaagaagaattctgaaaaaaaattgagttaacggaactctgattagttttacctgaaatctcgaattcgacgtccttggacttcaaatactccaagagcaccatttactagtgcaaatgcaaaactctctacagtattctcttgcgatcatctgagccactgatgctgaa

SEQ ID NO: 43941 - DNA, 455 bp, Arabidopsis thaliana columbia
aggaaaatactgaatcctcttaagactcaccagatcaaatacagagaatgtattgtcattaaatagcacagctacacgccctctgctgcgatctccagcaacaacaggagaaaatttgatcctccgtattccatctctgtgactattaaatgcagatgactgtcctgttgttacatcccaccatcttatgtatcctgatctatctcccataacctgaaaagagagagcaaaatatgatctctcataaaaataagagacagaactggaaggtaaaaagaaacgaaccacatgaggcaagcgatatgccatggctgtaaccaatccatctgagggaacgaatgaagtagatggccatttaggtctagaaatagaggcgggatcgtctatacgtcagtgaatataggaagaagattacacagcaatcaaggttcaagaaggtgagtgctaatttatgt

SEQ ID NO: 43942 - DNA, 435 bp, Arabidopsis thaliana columbia
gattttaatatagcttatgctaattatgtgatcaatgcaaacaaaagttgacaataataaaatgaagtcaaatatgatagattcctactataaatatagactcgtgaataatactcgaatcagtctctgaggttttgctggaaaagaaaaaccgaagagctcaaaacagagtgcgtttgtttctgggaatcttcaagcctctcacttgcgaagacgaagcttactcgtaaggtgattatcttcttcttcttcttcttttcaattcctttttcgttcatctgaaatgtgaaatcatgtgacgtgacgattaggttaacgatcgaatttcttaatttcgtatatgattatcttctagtttcttgatcagcacatcttgttgttttctttcaatcgagactgattctagatgttcttaaggatcttgttcgatgaact

SEQ ID NO: 43943 - DNA, 569 bp, Arabidopsis thaliana columbia
gctattaacaaccattgaattttctgtaagtttagggttctaacttctctgtaaacgtcaaagggtctacaagttctgcatctttcattcacttgcacatgtctgtgtctaaatttaatagtaatactattgtataagtgactcatacctaaatccacatggtcaagtattttcaggagaggtttctaatccacatgttgtgagtagacaagattggttacaacttagggaccccttatgatcatcacatataaaacaaagacaaagacagacgcatgtcttatgtctggtgtggtttctcttaagtgaatctaaactctaatagtttctccttatatatatcatgcaacaagcctattggattcttcatcaaccacaacttgcattcaaagagttacgttatacaacacaatttgcacatctcttcctctttccaatcttaaacagcttttccctaaatataatgatgaacacaaagaagctcttgaagatggccaagaaatggcaacagagagctgccttaagaaggaaaagaatctcttttcatagatcaactgatactactagca

SEQ ID NO: 43944 - DNA, 441 bp, Arabidopsis thaliana columbia
ttattgactgcaaaagtagaaatgtagtaaataagtgcaaaaagttttcgtaaataagtttctcaactttcgtatcatttatgaataagttcaaaaggtaaaaccaagttagataagtcttcacactatttctcttacttcacgtttctgtcaaaaatgcttaaaataacaatgagtcaagtagattctgccgagtgattgggcacctatatcgaattagcggtaacattatttatttatttctggaattagcccatttcatgggatgattttttaaaacattagatttctttctttttccctggtgtttttcttcgatactgattgggcaccttattatcgaattagcggtacattagcaatataagcatttttcttgtggatacaaatataatggttaagagtaaaatatatgagatcccatggtctgatctgacccaa

SEQ ID NO: 43945 - DNA, 428 bp, Arabidopsis thaliana columbia
aaaggtatttatggaacatagacatcttttttgagtttctgatatttgatttatgtatctgccgctgtaattctggaatattatttatattcaactccaaacgcaaatggagaagtactaagtcagagaaatatatctgttcccatcgttacagatttcatttgaagagaagaaagaagaactggtttgagatggtaaatctcttgatcgattttcaaaggttataatttatttatcgttagtgaggctagcaggtttgtttacttattgctcatattactttcttaggtgagcattccagcgtggtttactgtggataccgacttggatgcctatctgtacatttggagactccacaatgcttctctgctgaaatgtattcagcagaccttaaagtttccgggcgacctgaagatgataaggtagat

SEQ ID NO: 43946 - DNA, 448 bp, Arabidopsis thaliana columbia
aatacatcatatttttctttaatctattttttattgtaataaataaatattcacacaatatattattatattatttcatttttattaaaacattattatttttcgttgtgctttttaaatttttatattgagttatatacattatgcgtaaattttatgtttggaagatataataaatatttactataaatgtgtttaatgtaaatatcaaaacatcaaattttactgtaatatatatatatatatggtcacccaatattggatacattactatattaatataactcacgcaacgcgtgagatatgcttctagtttcttaatacaatcgggtggcccttcatatagagcttggtacacgagcatgcgctaacgaagatgcgggcatcacagtttatgtatacttatcccatgagttatataataaacttgtatcaaatccagagttga

SEQ ID NO: 43947 - DNA, 511 bp, Arabidopsis thaliana columbia
tgaccattcccaaattttaatgtgttctttaactggtcacccggtccaatggttcgcatgccatatttttgttgtcgccatatatttttattcttttcggatagtataatgttgcaactatgtaaacgttgttgttttactccgatcagcagactaattggcacttattctatatgtttgaatttgcacgtaccattgcgaacctatgggcatggaacataattaggatttaaagattgaaagacttaacaaaaacaattgtgcacgtctataccaacaaaataaaaaaaccattttgcacacatcaaatggcaaaacataactcaattttaccgagaattagattgagtttcggcccaagatcaccaagttatattaaaagaccatattttgaatttattcaattttatttatttataccaatggtttagagatttctgtaattttaactttaaaactagaaaatggaaatacgtattgagaattattttagattaaaatgggggtagga

SEQ ID NO: 43948 - DNA, 267 bp, Arabidopsis thaliana columbia
gacttgctggaaacagggagaacaatgctcaaggaactcagtaacgaattcgaagaacgcttgatcatgtgagtttggagagattctataatgtttctgtatgtagcatgaatgagatgtatatacactcgcatgtgtaacactgttcacatttatgaaacaggatacacgaggaaccagtttagaagtcgcatgacgcagactaggagttgcgtttgcttgatgcatcagacgaggagactactacccacctacaccacgctcgca

SEQ ID NO: 43949 - DNA, 549 bp, Arabidopsis thaliana columbia
ccttccgacgagaagagcttcttgatccattttcagtctctttctcttgaaggtttttttactcttggtggttttgataatatatgccttatgttatgacgttgttcccatgtcgcgatcagattagcgatcagaaaaatcattttaacgatatctaattgaaaacaaaagtaagtatcctacctaacctaaacaaggtccatggaaatatttttaaagttttattataaggaataagaaattaaagttttgttctcctttttcgtttgtttgcggcatgaatcttatagaaaagaactaagatatatgctttctccacgaaaatcataattttatttatttatccaacattcataggctcatttacgaataaagacttgagagaacaacgacacaataacagatttcttttcaaaatcatgtttactatttgttcgttgaataaaactggttactaaagactaattatgggtcggataatttattaatgggcctatttaaacttataggcccatgtaaataaagtagaaaacaggctacatcttgagt

SEQ ID NO: 43950 - DNA, 550 bp, Arabidopsis thaliana columbia
cccctattcaagcaattctcgtgaatacctgacgattctaaattggttggcgacaaaaacacacacaaaaaaacacacactataaaacggaattaagtgtctaattttgagtatgtattcttgagaaaatttctctaaatagtttggagattgaggtttttgtactgtctgctacggttaccaaactgtagaaactattgtgtatcaataattaaatttggatttttaaggacaattgtaaaagcttataactaggtgatggattgagttgtggtaaagtcaaattgttcgagaggtcgtaaacagtgagaagcaatttaaggaagatgataattattcatttgtgatggtttctttgagttatggtcttatggataatgtccatggatgtgaagaccaccaacattgtattagataaaaaaaaactaccacgtgaaaagtagttgattttgggttctcatgacttctcacaaactcacgtttccatagcattgcatggcaatttacaatgtgttgccctcccttagtactaccaatactaccatatgaa

SEQ ID NO: 43951 - DNA, 315 bp, Arabidopsis thaliana columbia
tacaatacaatcaaattggtcgatgggataattggtgtatattagatacagaaaatctaaggggttttaagcagtgtctccaaaaagttagcactattaaacacacatcgatattatcatcaaaagagctcaagagacgctaatacaaaaaccttttttcgaccgaataattagaaggttgtataaaggctttatacacgtagacgatcgttatgatctatgaatattttatctttctttagatgtgttacatacagtcatacgtgaacttctgactacatgagagttacctgtttggatcggataaatgaccaa

SEQ ID NO: 43952 - DNA, 130 bp, Arabidopsis thaliana columbia
tattcgattgaatttgtttattcgtgtctatgtttttactcaatcccctgtttccggttctgttcgattcttctctgtctctgtttggtgtttcgtcattttgcctaaagccacatgcaacagtgattaa

SEQ ID NO: 43953 - DNA, 848 bp, Arabidopsis thaliana columbia
cccgttgtttgtgtgtgtgacaacaattgattatagtatttttatacatgaattttatgaaggacagtttggtcatttttgtcggctaagtgccaaatttggcagaagcgtttttttgcatgcaaacagaattcagtcgacgctagaaatatttttcaccttcgtttgtttttcaaatttcgacattatcttagccttagaaaccttatcttgttctcgataaggtttgaacatcgtgatataaatatgtacatttcaaagctttataaaacaaaatcagaagtgtcaaagcttttaccaaacaaattaataatgtcaacgaaggggctattaaaagctggtttcgtcaaagtttgacttttgaatctgcaacctcaccgacgacaccgacaccaagacgtaacgtacgtatccgattctataaatgggactcaaatctctaaaggtgagcatacaaatacatcagaagactacataaatatatacaagagtgaagaaaaatgtcgaccgaatgtcctagtaagtttttgtatttgtattgtatagttcataattaaagttttatatgtttgtaaatagttagctaatgttcaattagatatggattcaaggcacttaaaattgtaattcaatagctataacatatatgattacattttctaaagtctgttagaaggttaattatgttacatatggtcaatccaaggtgatgtatctagttctattgtcttcatttactcaaatatgagcttcgtgatctccaagatcccaaacgtaaatgattgaccgatctagcgtaacgtgatctcagggaagaactcgtggccggagcttacgggaacaaatgg

SEQ ID NO: 43954 - DNA, 101 bp, Arabidopsis thaliana columbia
tattgaagattaattcatcattccatctcctaccttagaaacaattttattctttcctggattccatctcagcccctggcacatggtaggcattcaaggag

SEQ ID NO: 43955 - DNA, 530 bp, Arabidopsis thaliana columbia
attctgtatatcaaaataattttatttattgaaaaagaattgatggaaaaatcttacgaaataaagacttaatattgtttttaatgcatcattatcaaaatacaagtctactttcacagaattaattaccaaagtatcctctgtctataatctccaacacaaaataattaatttttggggaaaaataattgatggaaaatcttatgaaatgaagacataattattttgtatttattgcatcactataaaaataaaaatctttgttgcatcattaaaagtgttgttggcatggctcttgcatgagttaagttagttaattcaaagattacctctatctataagttatttatttttgtttcctaaaattatgaatttttaagtaaatttgacaaatatacatatgtataataataaatatagttggtttattagattataatttcttaaaaaataaaaaaataactttatatgcatagattcctttgcaaattataactttatttactccctttaaaattagggacatgata

SEQ ID NO: 43956 - DNA, 528 bp, Arabidopsis thaliana columbia
tagcagacgcagtacaatcatgccttttccaacccgtaccatttataacaattttcattcccttttttccctttttgtgtgtttttgcattggatttccttcttaattttatatagataatttacatattcggtaaagcatactaacgcaaagttaaaatcttgtgtgacagatagacaggtacgactgaaaaggaaaaaataaaagtagatctttggagaagagggaatgtgagtgaataccaattttgccctccaaacatggtatatatgataaatataaaggtgaagagaaaaggccgaaaagaaaaaaagctcaaaaccctagccgtaataataaggtccaaaacagacgcaagagaagagtttagcctctctctctctctctctctctctctctattgagaatctctttcgatcaaaaagaaagatgcagagccgaacaaaatcagctcatcatccccaaagcccattaacctcgtctcgtctccttcatctctctttcttttgtttttcaaaagttccgtta

SEQ ID NO: 43957 - DNA, 624 bp, Arabidopsis thaliana columbia
tcctcaatacaagaaatacgcgagagatattaataagcctttggatctaggcacatgcaattgtggccttatgtgggagatatactacataatttcatgtacctcaactaatgaagattataggcaagagccattgttttgatagtacccatcgatcgaaataaaaagtaccctacatacggaatttattttacttgaaagagcaatgagtgatacgaaattacaaaacaaaggtctttctttggtatgcccaaaaagggtagaggttgccaaatggtcatagatgatagttaactataaccatttgaatatgttattcggggctttgcggcctagtggtaaggagacgggcttgggaagctaatacgttccaagttcgatctacctgatgcgcgaaactccaaacacatttttttggataggaaccatctatgggatccatctcctcaaaagttagactggacccctccataggactcgaatctactttgaattaaaaaaaatgattatgttagatgaaataataaacaatagattattgcatgtatgatatcttataaaatagactaaatctataggtaaagagatatattttaagaagtttttttaaaattattcatatat

SEQ ID NO: 43958 - DNA, 340 bp, Arabidopsis thaliana columbia
gagattgtttaacaattatgcatacagataacaaacaagacaaagccattgactttaatatatatgaataaatctgttatgatactgatcaaatgtagtcagaaacactttcaaatggacttagctcactagatctatcgagagatcgacggaaattttcagatccaataatgaaagtccgaatagctacacattcagtttcagactatatggatccaaaatcgaaccaagacgagactcatccatcaagcatccaagtaacagcgaatcgggagagacgaacaaaggtcgcacatttagagacagaggtccggacgatgcaagcactacaaggacaaga

SEQ ID NO: 43959 - DNA, 396 bp, Arabidopsis thaliana columbia
tgtgctctaaaggaagatgctgttactgtcagtatcgtggacctctgcattgtagaggggggaatacttcatcgccaagcttcacctgctcagagtggctttgtttctcgtgcaaatccgacgaagaggatacagaagagcgcaccgaagacctcgaatactccgaccagaatgtaggcgatgcatcggacaagtctgagtccgaggcgcttctgctcctgctggtgctcctgccgctgctactagccccgggtctttcgtccgcaaacgctggatcttctagagcagttgaaatcgtctgatcgttctcgtaggagcgcccctgcagactcacataactcggggtggtacgtggacacctgaagctccatgctacattgcccggaatcttatacc

SEQ ID NO: 43960 - DNA, 359 bp, Arabidopsis thaliana columbia
tttatcatacaaagaggtgtgaggctatcatacttgtatcaatagccagggtgagaccgaagaagacgtacaacgtactaacactattcagtatccacgcatgtgtcgggaatatatgaatagattctggtagcatatagcgtttatcatagcatggtcatcataggtaagctgcaagtccttaatgtatctagaatgtctacgagtatagaatatacatgtagtattccgatttgatacgtggctgaactgacatcttatggtgttatatcacgttaaagctaagtgactagcgaattatatgtacgatatgataataatacttcgtggtgaattttgagattttgttaataaatgtt

SEQ ID NO: 43961 - DNA, 530 bp, Arabidopsis thaliana columbia
gtagttgttgaggtggcacgtgaggtcggcgttgatggccttttggctggagttttagactttctggttggcgtgggaggtctactcgttgatcttgagctactagaggacgatggtcttctgattccagaaacagaggaggaactgtgtaacgacgtcgtttggtgctcggactcttctttgctatagttctctaactgcacataaaaaaaaagcaaaaaacacagagatgagcaagagtgtgacgtatatgcagacacttaaaaacaaagagattgacgagattagaccacgagatatactgagtccgtacccgagatataagagtcatcaggttatcatcgggtgcgttgaggtggttcgttaggtttctactcggtgagcctggtggcgtgaccagcctgaacaataagaacaatcaataaagatcgatggcaacaattgtataaatcgattatgttgaaacattggcaaaaggtccaattttgaaaaatatatctttgagatatgtacaccaataaaagtgattg

SEQ ID NO: 43962 - DNA, 915 bp, Arabidopsis thaliana columbia
gggagcaacggctcgaacatataccacaatctctctaaaaagcacatttgcagtcatctttcactcatttgcattcgtccaaaacaccgcaaaaaaaaaatattcactcatcggcaacaaagagagaaaagatgcctcctcggtctgtcccacaagccaagatgcaaaggtatttcgaaatcatgttcttcttcttcttcttctctggtttgaactctctctttcgttacttttccaaaaatcggtgttttttttctaatttcttagcatcctctgatttagtctctctgtttactgtgtgtttctctaactttactctttttgtttagttttttcaaaatgatatagtattccagtttctcttcactcatttttgcaatcatgttcgttttctacttttttctacatgttcatgtttgtttctgatacagctttattcttcctctgatttcgttagttcttccaaaaacctgcttttttctagattcttagcatcctctgatttagtagtcttctccgtttgttttcaggatccagaacgtctaccttgcactacatgttctcttaatcaacgccattgtcatttcgttggtgttcacggcaatagctgccggtagggatgacaacgaaacaatttccgagtccaactccaacaactcaacaaccgctgctcctcctcctcacagaaacatgcccgaccggatatcggtttgttccgcttcgggatacttttcgtagtatatctcatggtgaaatcctaccaactttctcttgatgacatctggtatcgtttcaagaagttcttagatgaaatttcattgtggcttggagttgtgtccttgttgttctctgctccttacactacagtgttacaatctcattgcagtccttcagtcatattggcgatagtgggaa

SEQ ID NO: 43963 - DNA, 509 bp, Arabidopsis thaliana columbia
ttctctacgactggtgacctctctctctcagtatcatcttccagtcccaccatttttttgtaactaaaatcttgttcaccttcaaagaaacaattataaatatcaaatcaaaggtggaagaaaaataaaccttgcattgttgacataaatatgaagcttcaacgaagctaaagatttgatctttaacagtatcaaacccaactcatcacattcaattccagtccttatcatctaaaccacgatgcacacaaatatgcaaaaagatctcacctttgggatgtaaaccctagaaattaaactaaaagaaacgattaagcagaagaatgcatatgtcattgagagtaaacacgaacagattaaacaccaaggtccgatacttagggtttaacgattacttaccacaaaacctgaaaagaggaacttgactctgtagcgacgaaacctctggagccgctagagaagaaatcgagtggctaaagaagaatgatatgtttgagtagacataagag

SEQ ID NO: 43964 - DNA, 800 bp, Arabidopsis thaliana columbia
tattttggatttatcatataggtttagtaatattgtgagtcagaaaattggcatggtcaagctgcctgcatatatatcactacaaatgactaaaaagtaacaagtagtagcatcatccaatataacttcatctaaatgacacacatgatcttacctccaaaagatggtaacacatcatataatacgtgtaaacgactatgtgttataatgttatctatccatgaaattctgagttctgactttgacgtatttaaccgttaaatattttcttattgttggcaggcaatagtttacataatcagttgaatttcgttcgataatgattacgatatgaagagacttttccgacttttactccataacttatacataagatctgaatcataaggtctatatataaagaatgtttcatggtacatattgaacaatttggttggctcctatgatttgctataaatttaaagtctcattgcatatatatattttttggttattagtaagaaattacgaatatatacagggatatactaaacgacgccgcttcagcattcatttggaagcaaagcaaatttgaccttttcaataattcgtattcacataagagtgaacttcgtccttcttcaccatcgccactctgctccgttctacatttagaagagactgaccaaaatctcccattaatggcgttactccgatcaaaactccatctttctcgaaccctttccttcatctctcctcttctacccaaaaccttctccacctcggcaacttctctactcagtgaccatgaaaacgacgaa

SEQ ID NO: 43965 - DNA, 1126 bp, Arabidopsis thaliana columbia
tgcaggtttgtgtcgtttcatttctttgctaagaaggaatatagaagaaaaataaacagaataataaaagtctctttgtggcagattttctcgtggaagcgatggactactcaatgtcgaagatgtgaagaaatggaaaatgatagatgatggttttatgaaatatggtttactaagttgtggtgaagaatgcttgtaattatgctatgaacgactacaagattgatgagccaacatctcgttgcttctcaatcactatgttttcttaatgttcacaactttgcttgtgtcaaaataaagtcacatcattacaaacatctaaatcgcatcttagcatcacatgacatcacttctaaatcgtgttgtcgaccatgagtcatcgggtgtgttcgtctttttttctttcatttggatgcaatatcttgcatgttgtttctatttgctaaatcagtaagcgagtttggttgcaaaataagttgtataaataacttgaatttttgtgcaaaaagattgatccgatgctgcatacaacgaatgctgaagaatcatgtgacatacatctgagcctttagtttccatagcccattaaaaagcttgggagtttgagttaaagggacctaaataagtccaataactcaaaatgcctttctagatcttttcttttgaaggagcaatatttcatacctctgttgcttggaaagtgtagtgatcccattaccaagaaattagttgtggatgtttccgatcaaagcattgactgctggagactgacccgtcggaactggctaagacattaaattatactagaaacagaccaatgttccatttcccatgaattgttgtccacagcttttataacattctcccccaaaccaataatagttcacacaactccacaaaagagtacaaaaacagaagacgatgcaaattagaaagaaaaagaaatctcctagtctcatcaaagcgtttcaatatgtcataccaaatcctaagatcaaacaaggggataacaaaatgtacaccattatattcacaatgggaaaatacgaagcactcacactattgttaaatcattttccttcctcctatcatactctgctgcgtctgagaccagacaagttttgag

SEQ ID NO: 43966 - DNA, 560 bp, Arabidopsis thaliana columbia
gcagctttagattttctaaagttgctcaggtaagtgacttgagtcactactgctaaaggttaaatccatggttgtgcagattcacttagaaagaaggaaaattgaatcaaggtgaagtgttgttgtttatgattctgattcaattttagtggtttggttggtttaatcaagctaagggaattggaccaggcggttatctccggttttgggattgctgagtaaaccgaaagatgatgactcagagagaagcctttaactgcagtggagggtaacaactcaagtttgtttcaacgtcattatcacattcgtctttcttctgttattcttgtatctagagagagcgagattccgccattgttgtaagctcaagtttgagtataactcttcctttgatctagtgaatttaccggatagattcggctccggacgtaggttagatcacacagatctagttgaaccgggttaacaaatcgagtcttgtgttcttcttctttacttgttcgattgtgttctagagctgagttttgtgagagttgagagattgttacaaagcttgtgag

SEQ ID NO: 43967 - DNA, 321 bp, Arabidopsis thaliana columbia
tgagctttagggtcatttattactgttttgccatgaatactgtttcaactataaacggaatctctttcacatgtatctctgttggctcgtgagcatcattttgaatctgttctctggtgactagtactatcatattcatatgcaatctttttctttttgcatgctcgaataaagaatcaggcaccgagaatgaagaacaaaagggcggaatgcatcctggaattgtggtactgattggagtactctggttaggtgtatttgcggtgggactcttggtatgttacaagtattggagaaagtagaaacggcaactagagcagg

SEQ ID NO: 43968 - DNA, 494 bp, Arabidopsis thaliana columbia
gttgtattaattacggaaaacaaattagcattcattcttttgagaatacgacatcataaagttttaccgtttcggtgaaaataaataattaatcactacttaaaagaataaaaataattatgcaacaatttttctattttcttccaaattaatatggtgttaaatgatatggttataatcacaaatagagaaaaagaaaaacaaatacttgattaacacaaaagcaaagtatagaacccaacaacccaaccataagaacaaggaacaaatccactctttacaaacatatatacgtaagcaaacacaaatagttattctctgtaatcgtggagtaggtctcaagcaatctcgtcttccctctaaagggatttaagaacaaatcaatggaaattcaaaaacaagataaccgggatgggcgaccaaatcttttctctttttcatgttcatctttctctttggtctcgcggcgttcttcctatgcctttcggccgagt

SEQ ID NO: 43969 - DNA, 542 bp, Arabidopsis thaliana columbia
aattgaaatcactacaaatattcatggcatgcatagatttagacaattacttgaaacatcgaacaactaatttctcaatctagctaaagaaattgaaaactgaaattgaagggaagagaaatcaaacactaacggtaaaggaatgaggtgaagaacaagagcaacgcgagatccatagtgatcaatcgctagctttagcggctcccaagcgtctctacaatccggacaaaccgggtcaatatacgcctcgataagtatcgtatcccggtcgattttccgacccggtggatacaaaaatccatcacgcctcgccggaggtatcagctgcgcttgtacgactgttccgacgaagaagacaacgaacactaacgccgttcgaatcatcatcgctctctctgtatcaatcaaattttcttaagaaaacagattataaaactcggagaaggtagaatcaacgtccaagatttctcgaagacataatcaacgactaagattgctcagaagctgagtgagacccagtccttcatcttcagccgttgagg

SEQ ID NO: 43970 - DNA, 586 bp, Arabidopsis thaliana columbia
acgttctggagacctttccctgcaccaaaatgtaaggaaaaacataactgagttaattggattgtgtctgtgaagaaaaggttcctgttgcatgatgataaatatacaatagtgggatcgtgtaccacaatttggtcacatactcttttggtctttcatagatgcaaaagtttaaaagatacataacatgtcctcacaatatacaacacaaacctgaagcggacgcagtcgtaacccagcagcaacagcgttatgaaactctggccaggtctttaattcttggatattccttatgtttggatctagattaacctgtcagaaaaatatgcaatcttaactataagagtgtctaaaacggtgaaagaataaaaaaattctttgggaaagaacaaatgtaggcaaaaatattcattatttatgtcttgaaatagctgcttcatgcaaattgtaacttccatcttcacagtaataacaaaatccattgcaataacgctatttcatttaaattagagtaaataacatgtttcaaatttgtaatgatcccctaataaccataccacaattttcatcaatgcattttgtgaga

SEQ ID NO: 43971 - DNA, 525 bp, Arabidopsis thaliana columbia
cccacaagttttagtgcaacgttttcaattgacttggattaacttaacaaatactattactacttcagttagtgtatatatatatttattgacatatgtaaaagaaccaaaattgagttttttttttctttttggtaaaacgcgttgatagagagatttttatttctcaaagaaactgattaagatttttctttaaagttaagaaaagcagtttccataataataattttcatatacaagtaagtaagtaagtaagtaatagtattacattattatctattttaaatgaatgaatctctctctcaaagaaactgacgagacattgaaaactcccatctaccttttctctttctctctctctccctcccaaagtcgaacctgcaatccctaaatccccaatttgagaccatctccagttcgtcatcgtacgacgactctctctctctctctcctcttctctgtatagtcgaattatattacaaggttcgttgcgtctctctctccctctctttctctcgttagggt

SEQ ID NO: 43972 - DNA, 438 bp, Arabidopsis thaliana columbia
ttttagctttatctttccaattcataatcataatcttttcgaataattgcttccggctcttggaaacttttagatcattggataatggctattcaaaaatcggttgataacctaaacgttctcaaacttattaaaaccatgaaattatactgaaaataataatactataattacgaatctacccttagcaagttatataagaacatcattctcctttctctcttcgacatcgacattcctcttcctcgcttctctctctctctctctctcaccggaaaactcactcggacttacatttccgacgtcaaacttctccaaaccgaatcggtaatggcgaaaggaggaaacaaagtgatgaagctgaaatgagttttgaagaaactcaattcattcaacaccaagcctaaccagccaccagctcaaaccaatcacagccga

SEQ ID NO: 43973 - DNA, 584 bp, Arabidopsis thaliana columbia
cataagctgctcctggctgcaacatcaagaaccaaaatacgggtgccggttttagataatttaggcttgtaagatcttatttcatacccataagtaactttggcgcgagttaataagttaatacctggcaagcagaaagagtttcacaaccgcaaagtaccggtccattcattctatccagaatttcgaaaacgccgcctccatcacttctctgcaatattatggtttgttagctagatctcgtaaaaacagtcatattatagttatatgattgattcagtaccatgtagaagttaacagcaagaaagtttggcattctattccctcctgacttgagacaagtcccaaccatctcagcaagtggagctgagtgctccttgcaagcgtctttctcaaccggatatgtcgggaagtaattcatcaagaatagcgaagaactttttgaatttaaaggttgagactcttttctgttaggacaagaacctcgcttcactccgggatccccagctttagacaatcataagaaaatggcaagagaaggttattctcagagacaattttcattaaagatataaactgtgtgt

SEQ ID NO: 43974 - DNA, 439 bp, Arabidopsis thaliana columbia
ttggcgtaatttctgctatgtagacaggtacctgcttggtaaataagcaaaaattacagatcagaaaacaaacttacaaagatgatattaaataataataataataagttaattaccacatagctcgtcaagccgaaacctatccctgaaatgattcttccgaagttcagcaacactacttcctattgtattccaaaacataacataaatttaattattgggtttataataaccataaattaattggtttgtttattttctaagaaataatgtttgaatgaaaaaaaaaacatgtttatgaatagaaaataactagtagtaccttagcaaaagcgatggagagccaaccagtgatgcataggaaatcggagacccacattgtctattatatcataaatagcaaaaatattattataagcatcatatatacgaaaattat

SEQ ID NO: 43975 - DNA, 501 bp, Arabidopsis thaliana columbia
tctatgatcctataagattgcaataaagctatatatatatatatatattcatatagtatatatgatctaatctcttgttaattactatataaattaggtaaaggttaccgtagaaaattacgtgcaacaatgttgaaatgcttacataagtcgaatagtccgtgctgtttttgttctttatagaattatagtcaagaacggcgaattattaagttgtttctgattataaaataaataggttgttgtgaaatcgggggaaaaagaataatgaatacttgttaaatattggtcccctaataaatgttatttattttggttataagaaaaaaaaggaatgtgttgtggagaagagagcgcgagtggaacttgttgctacccaattgtcgccacacttcccacacgtcccctcttgtatcttttttttacttttcaccacttcctttgtcctctgtttttttcccacattttctacttcatcaatctattccttttgtttttttg

SEQ ID NO: 43976 - DNA, 643 bp, Arabidopsis thaliana columbia
taagagttttaatatacaaaaataaaaattaattttgatacatgtaagaatagaattataatattatctaaaactaaataagttagttggtaagcggatataacaatatgaacaacattttaaatatagtgtgcaaatcgttacaaattatatttgaaatgttcgaaaaaactgtttatttctccacgaaaactatcacatcatgccaacacccaataatttgggtttatagatttagaactattaactcggagaaatttagatacataatttttgtttcagggagaaatagatttataacttttgtttcggagataaatagatcgaggttatactttgggctctatctggcatgatgcgatagttcttgttttgggaaatataacgtttttccgaaatggttccatgaaaattagttataacaaatttagatgtgaaacaaataaactattaggaaaatattaatagagtagctacttcttttagatgttctcgctaatatcttggtgttacgttgagaaattaattttccttttttaatactgacttttgtatacattggtctatagattgtgactaataagtaataaaaatacattgtatgaaaatttacactagaaccatcttttttatatataaatat

SEQ ID NO: 43977 - DNA, 429 bp, Arabidopsis thaliana columbia
gggtaatccccacttaaatgttactatactctctaagaataaagaaatacacctaccaacatccaaacacaataaatatgaaattaactctagtggcctaatcatcactttggtagatctaaagccacaaaagatctttctttaaatcacaaagcatatctcacaatttcgaacatgataaacaatcttcaatgacagatgatacaagcaaacacgcgcgtacacgacaaagctacaatgcaaaaccctaaaagcctaaaacccaaattgtcgcagtcttaagcgataatcatcgagtatcaacaaaaactaaacaaaggcaatgctaacaaaacgactaccaaatctaaagacgatgatgctacgagaaaattaacggaaaagtaaatgcagcaagcagcactgtcaatgaaacgccggctggtctgc

SEQ ID NO: 43978 - DNA, 503 bp, Arabidopsis thaliana columbia
aatcattgcaagatacttgaaacgctcaagtacatgaccatgtgtacgtatacaatgcatctttaattagtttctttcttattattaataggaatcttaaacacagtttgatccgagattaattaatcagaaaatatatggatatcaaaaaatgaaagccactcacctatttgggctctctcgctgtattatggtccatgaggccgtatttaagacagcaacaacaaaagttgtagacagaattatatttaaaaggcaacaacaaaagtacgtatacgttgttaccaccaaactttggaggctcgctaataataaccacactacccatttgttacacaccctttattttcaaccatatcatctcaccttcgttaaatgtcccacaattagctcagtattttactatatacatacacacacattccctccacaggatcaaacaaacacacgagctttctcctctacaacaaaataaaataaaattaatggcttcttcacttatc

SEQ ID NO: 43979 - DNA, 323 bp, Arabidopsis thaliana columbia
taacgattagaaacaagaaataaaacatttacaaagttaagacatatacatccattttgtaccactgcagattatcactatcgtcacaaatttttagaatatatttttgatttgtattatgcttcaacgttactgttaggaaacgacgacaatacttcattataaaaaataaaaaatttataagaaacacacagattgttcagtgagcgatatgatggttggccaaacaaacaatctaagagatttcatttcataactcaataacgaacgagatattgttataagcgaattttttccaacaaaatatctttatacataattaa

SEQ ID NO: 43980 - DNA, 292 bp, Arabidopsis thaliana columbia
taaaattaaagacatcatttataatttattttaaaacattttaactagtagaaaaacaatctaccaaatgcaaatgatcaattttttggaaatgcaaatgatcaatttgttggaaatgcaaatgatcaatctaccaaatgcaaatgatcaatgtaagttccttctactactattcatctactatcatcaaatacttaaaaaccgattataactcaaataatataaacatatacaagtaaacacatctccctatagtctgtttactctcagtaaaacactttcaaagttagtt

SEQ ID NO: 43981 - DNA, 493 bp, Arabidopsis thaliana columbia
gtgcctaattgataaaatccaataatacgtaacccacaaatctcgaaccaaactataccaaagaatacccaaaattaatatcagatttgaggcacgtgagatacgcctgctaagatacacacagctcgaaatctgagtccttctcttctgtttcgccatcggaaagttcttaccttcgatttcaatttcttgctttcttcacagttcgtcacgatcggagcttgttgtcagatctcaaatgcccaaactcctccatttagttatcatcccggtagcatctaagtagcttgaaatccctaatatcggagttgctctctcccagaaaatctcgagaggttcaagtaacgaaaatggctttggtggcggctttagaggcggatcttcgcgctctctccgatgaagtgggcggaggctatccgccgtgaaagacggagccgagcacgtaatcactacggtcaggatttctcacagtaatgtacaagtgtgttgttcg

SEQ ID NO: 43982 - DNA, 508 bp, Arabidopsis thaliana columbia
atataatgcagagaggtacagaaaccccaacttacatctttcaatgtataaagtatctcctttagagatgatggttcaactgcatcatgagatataagcttctgcaagcaggaaagtcctataacactaagctttgtattcctgactccacacgccatcagaaatatccgaagaatgtcttcattgcttgaaagatcactggcactcgatgacgaccgaagctgaaaaagcaagaatgactccacatttaacaattcaattcaccagaaacattccaacaaagattccaacaatgtaaatgctatccattctccaagctcactgagttcaacaattcaattttagagtctaaagtggaaaattataatgcgaattaactaaaacaaacaccaatttgaatctcaatgattacagtgaattcaagctcgaacaacacacttgtacattactgtggagaaatcctaacctttaggattgcgtgctcggctccgtctttcacggcgggata

SEQ ID NO: 43983 - DNA, 641 bp, Arabidopsis thaliana columbia
tagtaacgcgcgtgagtgtgctctaaagcttcaacgaacaggtattagcaccggtgttacttgctttcccacccgaaaatgctatttacacagagataaccagttaacggccgatgaacagttttcaaaggctcatggctcccctaccaaattctctgttgaccccccatcctcaccaacctgcacagtgatatccgtcttgacagtgactcctccaacgccatctcgagcatcgcgatctttccctctcaccatctcgtcggatccaaacgacgtaggcccagaacttcctttctttaatccaaaaacagtcataacaaccgacccatgattctgcctatgacggtgcccatccaagtcaaaatccaaaccacggccgcgtgtgtgcgagtattgattcgagtggctattactgggataatccacctcgacgcgtggggtttgtcgaacacaacgcggacgaagagccggattatcggaccgcaggtatgcgaggaggatgctgtaattctcaatcctggaaagccaatcacaattagcggcgaaaataacgcctagatcggctatagaggagggttagactcactttcccatagcacaaacggtatgatgttgctacagcgtaattgctagttatcaga

SEQ ID NO: 43984 - DNA, 530 bp, Arabidopsis thaliana columbia
gtggaggtgggcatcgagtttggtgatggtggtttaggtatcggggacttgatttcttcaggggagtgaagaagaggagagagagatggaagaatggagatggcggatcgaagtaaagaatggatttttgatagttctcatcgatttcgccattgaagcagcttctttcgatcgttgaagaaagtttctcagttggttctctgtgcaaagagagagatatgtgagattcagttacagagacttctgatattcttgttttcccgggaaaataagaagccaagtacgaagtctaacgaaccgagaaacttcaaattgccccctggttttatatcttcttatgaataaggaccgtaatttaattttattataagtttagccccgaatcggtgattagatgtttagaataaaagagttacatttaacatcacgtttacaaattgtgactttatgttgcgaaccagttgtcgtttcggttaaggcttgccaggttcgtatgttcattagcttagctctgtataaagaaagagact

SEQ ID NO: 43985 - DNA, 309 bp, Arabidopsis thaliana columbia
tttgaaaattataaactaatatgagaaattatagattatcttattataaaattataacacttttagctggttgtttttggttcataaaaactataagttggttttgatgttataatagtccacagtgaagcatatatgattcagagtcgtttcatcagaataacggggtatttgagattatgtctacgtcagtacattgatagactacaatgctgattactgttggaaccaaagctcgggctcagcggcctgagtgtgttactccaccgagataaagtgtgcggtctttagctgtataaggacggggtg

SEQ ID NO: 43986 - DNA, 590 bp, Arabidopsis thaliana columbia
gatctttgtgattgagcaatctgttgagctaagtttagatcatgcttttccgtctgtcccattgcacgatgatactgtctcttcgagcccctggcttcctcaagtttagccataattggagttggcagagaagagttttgaggtaacgctttcttgcacccattaccattggatatctcatgagaaagtatgtacttatttccttgatggatatcttgctgtaaagaatcgtatgcaggagccctgcttctctggcatgtacctgtagtcccattcaaaatcctggaaacagattccacatgtagatatgttgtaggaacttgtgactgagaatgaggtcgaagcccaggcgatgacatgctggtagctaccatctgattcaagtgagtaaaaccttttggagttgcaggttgctggtcaatcaaaggtacgcaaggctgctggcctcttattaatgatccaggttgctggttttttatcagtagtccatgttgttgccctccggttgacataacaagttgatgcatgtctgtaggtgaccatatagctgatttccagcaggtaaacaagtctggtgattcaaaaatata

SEQ ID NO: 43987 - DNA, 434 bp, Arabidopsis thaliana columbia
gacaaacagagccggccgagagtttcacaatgttacaagtgagagaaaattaaaaactggccacataatttttacctatttaattattttgttgttaaagagaatatgtttaagctattttcaaggttcaaattcatgtaaaggtgacaaaacccctgaggttttaagcactagactgcaagaacttttttttgtaacattggccaaagaaaaccatatactactattagcggccgcaagccttgcttttgccggtttggtcttttggccggcaaaattagacatttgtaagatgaaatgaactgatataatctgaggttagagaaacttttggtatatagtttttttttcaacttatttaactggagtttaggcttaacaagttcccacataaaagcggaattagaattctaataagatacgaaaatacacga

SEQ ID NO: 43988 - DNA, 394 bp, Arabidopsis thaliana columbia
ggtacgaggagttggagaagaggtaacaaaccttagcgtgtgttcatcagaaaagttgcagaaccgaacaatcttaagagctctctcatgaccatagaaagattgggggaatcattttagtgtggttccattaggctagtccaagattgtgctttgatagctctagttccgcatctcagaacatctgtcaaaccggtataaatgatggaagacaggagatcagagtagtgatccaggtcgagatgttcagtgataatgagttagagtgatgatgagaactagaacgagagacagagagatacgagagcttacagactccgacaagtgatatgtcatggccagaacgtgtcgaggctagatgtgagtgtggtttggggcactgcacctatgattg

SEQ ID NO: 43989 - DNA, 556 bp, Arabidopsis thaliana columbia
tgtggaactttcttaaagtaaaatctatgattgattacttgtagtttaactaaaaagtgtgtgtaatcaaccgagacataaaattttcttgccaaaacagatactaatagttttctcgttaagctaattcatcatctagataagtatttttctttattccctatctctatttgactacttttatatcgttcgtaaaaggaatttgactatttacaacacatttgaactggaacttttaagaacattctcaaattgtttttgtttttgccatctagttcggtggacttataccattgcgtttgaccaactggccaaattgaatcaattccctccaagctgtaatcaatccacaatattaagttacatacaaatacggtttccttgattatggcttactgctataataagtagggcaagctatggttatggaacggacaaagacgtgaagacaaaaagagtttggttcataattatgactttttttggggggaaatgaatgttttgggacccaattataccttcttcacacgcgaattgtggactgtgttaagtagat

SEQ ID NO: 43990 - DNA, 638 bp, Arabidopsis thaliana columbia
actaaattttggaaattttgtttacgttaaatttgatcattggttatgcattaaaagctgaaacagttatttagaaggaaaagtagttaacgttcccaaaaagttctaaataaaactagattccaaatgataatgaaaacgtcgcatctactatatgtttggttttaagtttttgttttgacaaaaaatcatatgtttttggattcttctatgcaaacgaaatataaaaaattcatgattcaaatacaaaatacatataaaaataataattcaaattatcgaacattttttccatctcccggatttaattcacacattttggcttcaattaaaatccaagaaaaagaaacaaaatgacttataaaagacagaaactagtaacttagatggatgggttaagacttaagagttaagactatctcactttcgaaaaatgatttatttagctgaggtgcggagtggagtggaccttgtgatccttttccctacacgaaagttttttcgtgaccagttaatgtgtactttgtacacgtttcttctcatatatatgattgacaagggggcattaatttgtgagcctgaaggtagtagtcgtgatcgatgagtgcatgaccatagttttatgtgacttaagatga

SEQ ID NO: 43991 - DNA, 457 bp, Arabidopsis thaliana columbia
  unsure (1)..(457): unsure at all n locations
caatgaatctntttttcctgcttgcttctctctttgcttgcgttttctcaaaggttcgaagaaaacgaagaaccacgcttttgcttttttcccaagacttaatctaaaaagcgagatttccttctttcgattcttttttctcaatctggttttcagtcttcggattcaatggcgtctggatcttcgggtcgggtcaactcaggatccaaaggtttcgattttggctccgatgatatcctttgctcttatgatgactacaccaaccaagactcctctaatggtcctcactccgatcctgcgatcgctgcttccaactccaacaaggttaaccacactgatttacccttttcttccttttttttaggttcgggtattttgctcgatcggcgatttttgtttgatttttgggaatctagagttttgatttgtggtttgctcagagatacgtgtaaaacaa

SEQ ID NO: 43992 - DNA, 482 bp, Arabidopsis thaliana columbia
ctatagagcccacaataaacgtggccttaacttaggcccaatatgttgttatgatgggccgtaaacattggccactaaggctgtttaaaacaaaaaaaaaaactgatcgagttttgagttttctgtttggtttagattattgttatatggttctaaaagtattgttttggaaaatactgtaaccaacaactggattatattagaattttaactgagacaaaatagaatttttacagtgttggttggattcgtagagcagtgaaggtgtcaggacgccaaaaaaagatacaaaaaacaaaggaataaaaaaatcaaacatatgatttttcaggtggatctcttctgtgtttacttttttatttttattattattcaaaattgacagataaaaatgtatacttcaaatgtcattggatccgatttcacgattgttttgtctgttttgtcacaccaaaaatcctgatatataatttggaattgat

SEQ ID NO: 43993 - DNA, 713 bp, Arabidopsis thaliana columbia
gattttcagttctcttgctttgctctcgctgcaaaagtaaataatttcgaataaaaatccgatgacgataatatgagcaagaactgattcttactctccgatcactgtcattagaagattatgatggttttctgcagcttcaacaagagaattctcagtggcctctcccatgtacacaatgtaaggctgtaaataaagagaaacagaggaaaagggtgagagattcagttgtctcaccagacaaaacacaaaaacactattcactcttacgttattacctttctctcgacgttttcatcttccgtggctgctataaccgcgttgttaacaaggcaaaaacagagcataaacaaccgtacacgctgattcgaaaccatattttggattttgagatttgcttgtctgagaagaaaatctacactctagtgttaataaacaaagtggacaatacttaaataaccactatctttctaactgtttcgtaaggctaagtattagttagaagtctgagagtcctttggcttgttattaggatcatgttcaacctaattttccggttcattagttacttgatttatttatatttagctttagttaattatttttctgaaactaaatagggttttcatgagtaatagacatgaaccagttaagagattttatcagtcacacaatctttcaccacacaaacacaaatgacatgcgagatactg

SEQ ID NO: 43994 - DNA, 1226 bp, Arabidopsis thaliana columbia
tgaacataaatttctttctccatatgaacaaaatttagagctgtgatagataatgcaaacaaagaagataaggatttgatagagcagtggtcaaaacttgaacttcaaaattaagcaatgaccaattgggtaataaattgagatcatccataacaactactttattctcacaatgcagatgagagcaattcaatttcaaagtaaatgccccaaaattattggatctcaagaatccggaagattccaaaaaaattaaaattattgtacctgaaaccctaacccctctttgccctttctttctccgccgctggaactcgcgtcaggaacttgcaaccgccatagcccagcggcgagtttcctaacagagacaggccgtgcgattttcctccgatccttgcggcgagtagtctctgacctcgcaacctggtgattatcatcctcgtaatcatcgtcttctacaacgccgcttctctctttattccgatcctccaccttccatttcaataaaggagtctccggccggcttcgtctgccaccagaaggaccggatcttcgctgacgagtcaaactcgggttcctagctcgacgtttagtgacagtagtagctctttgaatagctctgagatctggaccgtgagagaagagattcttatccgactcaaaggccggtaatgtcgccgtcgaatacggctttccggtgactttcatcacgtaatcaccgccataaacaaaacgtgaagaaccgaccaaaaatctcggagaaaccccaaaagagctcgagaatcacagacgaaaatgcgtgcctcagagatagagggagagagatagctttgagttcgtgaagccaaaaaatcgctttgttgtgagagtcttgtgactgaaacgagagagagagagagatgagtatatgaatacgtatatttgtaaaacccatgtgtattggtcaacggtataagaccaagacgacgtcgtatcattagagagtggatgtgtacgcgcgtagtagcgcgtggggagcgtttccctaaactacatggggagggagagagctctctagcttggtggtgcgtgttgtttgcagagagacgttgggaatatatgattaaagaatgtattttaaaaacaaaaatgtttcaataaattattggtgtacgtgttttttttttgttaattaaaagattgtagcatgtaggatatcaaaagagtggaatggatattgtattgtc

SEQ ID NO: 43995 - DNA, 480 bp, Arabidopsis thaliana columbia
ctctcatctgtgagtctctttggtacacgtagagataactacagctaaccaaacaagacttgtaaagcgaaatgtgggctcgataatactgtcatagttctcccatatttttttatttcttcttctcacaacatattctccgactttcaagttgtgactcgtgggattattttaatctttacaggctttattttctttacatttattaataatttttaaaattcaaacttgtatacgatcaaacttgaaaggtatcagtgatggaaactataattaattgactacatagatcattcatatagaattatgatcatgcattatgtgaacttcaatccgagtgacatatcaatggttctaacacaaactactataggttaaaactgaattaatatatttatatataggttccacttttaatcatcttttgtgcatgattttggcttggtacagtcggtttaattagactgaacatcaatattt

SEQ ID NO: 43996 - DNA, 555 bp, Arabidopsis thaliana columbia
tgaagacgagaaaccacggctttgtacgcgatctcgcaagcggagaaaacggctttgtcctgagtatctgtagcgtttgggagaagatagtcttggatttgagaaaccgtctccgtagcaaacgtcagagctctttttgtcatcacttccgttatggtcgctatatttgcgtgcggcgagtgtagctgtgacgtgacaatcaattcacactcattgaagttcactgtttggttgcagattctgtcgattatagactttgttggtttgtctggattcacagttgaggaaaaaggcaaatgtgaaatcaagatcatcacaagactagtgatgatcagattcatattcatatagtgagccatttcggtgtgtgatgtaaatgctttacgaagacgtacaaaagcatataaatttatactcagattactataccaaatcgaaaccattaattatgtatatgtatcttaaaggaaataaaaggagcaaattttgtaagctaaatcgaaatcaataactatgtatatatacttcaaggaaataaaaggagcaaagtttgta

SEQ ID NO: 43997 - DNA, 571 bp, Arabidopsis thaliana columbia
tggccttatctccaatacaagccttgctgcataatcttgtgcaaatatattaaacacctgtttttcacacatccatgttgatgcctcaagtgctttgggcatccactggcttcacttcattaccctttttctcccattcttccaacaccggagtcactgatctaaccgatattttagtccccatctggtcatcagtttctctgccttctccaccattcctttttcacgataagcagacactaacataattggcattcgaacatcgaactcaagacgcgagcactgccactcattagtatatctcctctgctccgttgatatcatcaagcttcaagagagaaccaatcaaagcgtgaaacccttcattgtccttctcttttgtgctcttgtacaagtcccatatacggtacacatcatccctctcccctgcttcaccataaagccttatgagtccttcataggactttggatcattcaattcctctgttcaacgaagcatctctctcgcctttcccttagaaccattattcagataagcctttgccaagtcaagcattgtgacccactcaag

SEQ ID NO: 43998 - DNA, 264 bp, Arabidopsis thaliana columbia
tattataatagtgatactatgataggactatgatgactacatcattgatatgaaagaatatcttaatagcagacaatataacatatggtagtgtagatcgtccaagttggagcagtaaattagtatattaaatcgcatataatgagtaacgtcatccatgtgaaagccgctcattgaaatctgtcgtcacatatggttatttgaatcgtccatgtcgcggggacttgcgactgtcgattagagtactagatgggatatgctgat

SEQ ID NO: 43999 - DNA, 432 bp, Arabidopsis thaliana columbia
gaacaaataaaaaaaaaaagttagctatgaaaaaagtaaaaagtacttttaggactattagagaatttaagtatgattgagaaaattagacttcaaaaaaaaaaaaattgttccacaacctaattctcttttttctcatgccttttgaattaaaaagaatcctttttcacacaccaaaaagaaaacaaaaatgcatgatggtccactagcttttctttctcaaccctatcaaaagaaggtcacgggaaaacacctttatatatgtaacattttttcaaatggataaatcgcatagaatgctatcattattgaaaatagcaccatctacttcattccaaaatttccaacggaaatggactttggttataaaaaaaagtttctagtttcaaaaaagctctaattttctgttaagcaaaaagacagaaaatatca

SEQ ID NO: 44000 - DNA, 569 bp, Arabidopsis thaliana columbia
ggttttgttgcaagtaaataagtaagtcaaggaagaaagtaaatcaagcaaatgaaaggaataagagaaccattgggtattcaagagatcacaatggattcaatgattaagtcaaaggataacacagttaggtttgtttatttccaaattctctcacatacaaaactcattcatttttgactaaccctatggtgtataggcttagagtcggctaatctccccacattctgttacccaactatcgaaggcaacgttacatagatcaaagcattaagttcaagttcgattctagcccataaggccctataaatcaactaccacaggttgtagcacaatattcattcgtgagttagattaaagagtattacacaagattctgccaagcataaaactcctaagatcatgttctaggtgggtgtacgagcataaattcattaaggacaaactcaactagaaaaaagacagtataaacaataaaaaaaaaacatagttaacgccacttcaacattagatcatcacccccctttgactagccctttaaacgcgactagagatctactcttgcatgg

SEQ ID NO: 44001 - DNA, 578 bp, Arabidopsis thaliana columbia
aggctaaagttttatttttggtacttattgctcattttaagactacaaaattgaaagccttatgtgtgaatttgtcatgtctctgtgtgctcattattgtcctctcattaagctatttaacttgagcatccggattttgatagtttattgtactgtgtaggtattacatgcttgctattcaaaagtttccccatcagtagaagtggatgatcctcagcttgtagcatggtctgtctctgttgcagagctattagatttggatcctaaagagtgagtttgattctctatggtcagactaaagtcttaagtgtttggtgcagaagataattgggttttcacggtcttagacagatatagcaagtattcgttataattgataccgttgtttccaattcaccttcatggttacattcttatgtttctcaaaagaagttgtttcatttctgtctttataatattgtgaaactcaagttttaagagtgttttatctttatatctgctgccatttcgaaactcttttttgtctttctgcttttgacttatggcaaaaattcttttttaacttcagatttgaaagg

SEQ ID NO: 44002 - DNA, 357 bp, Arabidopsis thaliana columbia
gggagattggttatataggttgttaaattcattagcaggggaaatgtgataaggaaagactcattacgtggtcaagatagtgccgctagcgaaaccgttgtaactacaagtagtaagtttacaaccggagctactctgctgcgaagtaatgttaccaagcatgaagttgctgtttctacatctcatactggaacaagagactgatatagaagcaggctcacaatacatactgcatcacaccaatgctaaatatcagcaaatcatccaaaattcgactaacaaaactcaatcgcttaataccttcggcttccgagaacacagctgcattgtacacagtggcctgcagtgagagcatag

SEQ ID NO: 44003 - DNA, 605 bp, Arabidopsis thaliana columbia
cggttgattcggaggtggaggataagctatctgcagttattctactagatccgcttgattcacttaatccggttttgttcagcttgatacgctttctcccttcagagacaaagacaaaaaaaaaacacatactataacgtttctcccacaaatgcataaactcaaataatgaaaagttgaatggaaacattaaacagataaatttggaaagtgtgccatataccttttatctgctttttatccatcactcattcatgaccattgtttttgggatacacacacctccaaattatttgtatttagaaaatattgaaaaaagtgttacttttaacacagttttcgtggctgctataatttcacgtgttattttctatatacttaattaagataatgaaggagtaatacagagtcagaccctaatttagcagcagtctacaaaacatatatcgattagattaagataatgaagcagtaacgcagaaccatgccctaattaagcagcagataatgaatacgacttccgcatgttagttagtcatgaccgttagattaatgttcaattgtccatgtttgttggtgtggtatatatggtacatataatatac

SEQ ID NO: 44004 - DNA, 300 bp, Arabidopsis thaliana columbia
caccatggtattgaataacaacaaattctacataacattttatgatactaaaactcttttgaaatcataaaccaaaaagttgactcatgactttatcatttatattctaaaaattaagaaactttatatcattttaaggtagattttcagtgattacaataaatacaccataaaaaattaataaaattgactcatgactttaaacatcaccacatcttgatcttgtgatgaaacgcgttatttacaaggacttaattacctatcatgaaaattcaaaagaacgttatcgtggaaatatga

SEQ ID NO: 44005 - DNA, 332 bp, Arabidopsis thaliana columbia
gggtaccgactgccatgggtgcacacatgccacatatttcatctgttgtaaccttcgtattaaatcttgcatattacgagacaacaaaaagaagtaaaactattataagcaccaataaaaaattgttcttgacgtatgtaaccatttttttttcaatattcgagaacttatgtgagattattatagggtgaaaacatatcttcaaatttaaaaactaacagattttgtttatttttgctgtaaatgatgcagattatgtaccatgaaaaaatgatttgaatttaaattaaaaaatatgactatgattctcctatctttgtttgatttttttt

SEQ ID NO: 44006 - DNA, 597 bp, Arabidopsis thaliana columbia
tgaacagagaagaaaacagagcaattgcaagtgcttctgcttctctgtaattacacaaccaagtgattcatcatccatgttctctttattctagaaaaccttaaacgacttgattactttttggatttttttatatatatagaagcctttgtctcttgaatacaagaaaaggccattacaagaaaagacaactacttcttctgcattcatcgcttttgcagtccattcatatatacaatcaaaactggaagacctcatgaaattttttcttattaatgactattagcgatgtttatgaatttcccccctccataaacatatgatgtgattcacattcaaaaacaaaatgcaaaatacgatttgaatataaaacaagaaatgaatgtgcacgacggattctgcaccttattggcatagtttaaggcaaatccagaaaggcttgtctccttggagttgatggtacaacaccatgatattagtatattacagttcatgacacaactacaagagcctcataaatacttgaaacaaatcaaattttgcagtgtaggaggcagacaatatctaatacattgatgtatcccgagtggtactaat

SEQ ID NO: 44007 - DNA, 303 bp, Arabidopsis thaliana columbia
aatcattacacatgtccacgtgggaagcccgtcacttattttggtccgttccaagatttgattgattcttataatttattatttgctatccgtgcaatctgtattaataataacatatgctacgcttttgaacactacaacatagggatacgcacggaaaggtgtgtgacatattagaatttcagaataacagctgttcacatgcatgcagagattatatttataaacagagatcataaaggcatacataatctaagtagcatttatgagaactaaggtgatcggtcgaacactgaattggat

SEQ ID NO: 44008 - DNA, 529 bp, Arabidopsis thaliana columbia
tcttgacatcactagcctagatacaagtgaatttggagagaccttgcttagacattcctatagtttgttactatctggtatcccattcgctgatagtcatcccttcttaaaattctgagaacatatttaggttgtcagaattgcataacctgttattcctaacgccctcttaatttgtctggtggctatgtcaagtaaacatgcacaagtatacactttaaatatagacgatgattgggctgtcatcgtagaatcatctatatgctgaagggtttactaatgaacttatcggaatcttatattcttacataaatgcttgatcgtggtacttcgttacctgcttgattatctgaagtgaagcatcagtgagttgaaactatttggaagctgtctagccttggaaacaagcttttgtgatgtcactctttgctctaaatagatatctgttgtgatgctcatatcttgatctaataatattagactaaagtcttacgttcagcatccaaggtggatccattgcatcctgact

SEQ ID NO: 44009 - DNA, 503 bp, Arabidopsis thaliana columbia
tcgataacgattatcaatcatcataaataaaaaaagttagtttagacgatcatgaagagagaaaaaacagaattattggtactatctcttaatttcccaactctgtaggtacactcattaatcattatggagaatgtcatagtcatggtacataatgaatgtgcatggtgcttatggtacagatgttcttaacttcttatcctggctggcaaacgccagatcatctcaactggaggatcatgttttgttcgtaacagttagtaactaaccaaattagtgacaatcatgagggattattaaaaacagacattgatctatttttgattagaaaacattactgataaaactacaaaaatagctggaatggagcattcaaaactctgtccaaagtccaaacggttaaattatcactgacccaatccaataattagatttatttagtaagtatgattactacgaagataacattaacaaaattttatgttattgtcaatttgtcatca

SEQ ID NO: 44010 - DNA, 535 bp, Arabidopsis thaliana columbia
caattatataataattatcaatacgttttatgttaataattctatcttcagtaattggatatttttcttaatgtttaaaaagttttatgtgatggactaggaaatgcattaaaatttcatcacaaaaatatcattttgtcttctttccttcggcattgctacaaaaggttatttttcaaatgtaggtgattctttctttgtaagttgatatatttttaatgtctaaaatatccggctaaattggtgaaaaacaaaaccggttaaattatcccaaataaagaaaaaaaactaatttctagaatatatcttttcgacatcttcagacttcaatagtcaccaacggtctggcaaacttcacatacacttcctccaaaaaataagatacatgtacaatatttctttgaaggaaaagatttattggatatgtacatcaaaggaatggaggtatctatatctggtgagaaaaaaaaattgtagcatatatcaactaatatagctatattactttatttagaacatacaatttaagttaatt

SEQ ID NO: 44011 - DNA, 208 bp, Arabidopsis thaliana columbia
ttcaaatcacttaacgtcctaattaattatgcgttgatgtattttaaattttaaatttgttaattcaacaataaatggggatgtgtctttcatcaagtggttaagtccatttgaatccgtttttcctactaaagttgaattctattaaatcacgtcacattgcacagtatacattaattataaatcgaccttctcaaagtatatatgt

SEQ ID NO: 44012 - DNA, 523 bp, Arabidopsis thaliana columbia
gtataatttcgtaataaaccaaaatatataaacttaaattttgtatgaatatctaagtgctagcttgtttggaattatgtttttttctacactaaatacattttttcaaatattcttctctatatcaagattagaaaataaatttaaaatcaaaattttctttttatatatccaatatatgcattttgtattattttaagttgagaaggacaaattaattcttgatagtattagtttagattttcttaattaattaataaatagaagaaatatggaatcggttcaagacactcatacaaatgaaatcgagttaaaccaaaacactaaactaacaccaatatgtcgagccacattttcatatttgacctaagaaattattcaagaattctatcgtgtatcattcatgtctataaaaatattagaatctaaatggtaagcattagaggaattaaaactgagtgaaaaatattgatgatatggaaaaaagatgaatgatgaataatgaaaatgtgatattgtagct

SEQ ID NO: 44013 - DNA, 472 bp, Arabidopsis thaliana columbia
tgacacgtgagtcatctaaacttaataacaaggaggacacccttctgggagaaaaagagaatgttgaaaaggttagagactgaagaaaattatttctgttgccagaatgttatagattctcagctatttctggcgtaaataacttcctacttggtgttgacagattgttcacagtatagaagatttaaagaaatccgtaaaggagagagccgctgctgtgaagaagtctgaggaaggagcggcagacctaaaacaaagattccaggaactctccaccacattggaagagtgtgaaaaggaacaccaggtagtaccactaaaaaagtatctctattccatgccaaataatatccattcgttttatgttaattggctttatgtcctttgattattagggcgtactagctggtaagagtagtggagatgaagagaaatgcctagaagatcaactacgggatgcaaagattgctgt

SEQ ID NO: 44014 - DNA, 614 bp, Arabidopsis thaliana columbia
atagaaaccaataagcaatcgaaattactgtagcacacagtttcaagaagatcaaattcattaacgttttctgatttactctaggtatacgtagttgtgagataaataaaggaacgagaaatcacctcgtcttccatggctgatctgatcaatgaattggagaaattacagaagcagagaagaaatcagcgtcgagtggggaaatcaggatatgacactcatatctctccggttcgaccgtttactacaacagaaccgaagtagcccattttattgggctttaatgggcccaaaattaagtcttttaatttgtttatgtgattttagattgaaatctgattcaccattttattttttaaaatcaatgtcaatatgtctttagtattaaatataaaattgacctacgagcatccacatcgcacaaaaaattgatagatctttagtattagatataacaaaagttaataaaaaacgagaataaagaagtaagacccgtgtctattgtgtccttggaaagacacattttacctattcgagaggcaacgtggcagcatcagcttaaattattaataaattatacttaaagacattttaaaaacatgaccgatgtggat

SEQ ID NO: 44015 - DNA, 597 bp, Arabidopsis thaliana columbia
gttacaaagagatggttcataattttttaagaacatcataaattacacatataatccatagtagaattttaaacacagaaagatataaacatgtctctcacctcgtctttcatgtaactattccacagattatcagtgtatgtgtcatcagctgaagcttcttctaagccagcaaagatgtcgttttccccatgcaataaatatgaacaaaagatccttttcatattctgcaaaaggaaaaggacattcaggaaggttaggacttaggatctagagaaactattttgggaacaaatgcaaaaacctcttatgagttacgaaaggatgagaagatataatcctatccaataatttatcaattacgcaataatggaacaactaaggaatacatatggatccatccatattggtcccgtaccattgtaccgaatattgaaagtggcaacgacgatcgatcgcgtgatatgggccatatggcatgtgtgagtgtgaatatactccgatcatcttatgatgaaaataacatctagcttggtccacagaccacagtccgacggtccacacacacatcatatataccaaaccaaccaaattatt

SEQ ID NO: 44016 - DNA, 561 bp, Arabidopsis thaliana columbia
tatatctaattcagttgattttggttattcaagggctacatttctgcagtctatgcctcaaatttaagaacataaatcaaagcaaagaaactttcttcaaagattaaaacgcaaaaattgtaataaaccttagccaagattcgacaaggcaaacccaaacgagcaacacatgttaaagcattcccagtgttaccacctccttggacctgaaaaatgaaccatagaaatgaaaatctccagaaccattcgatatcaaattaaagtcaacgaagaattaacaataaatgatatagtcatcgaccttgaagcttgtgcctcggatcttttgatcgggaattggaaaagacgccactgtgactaagtaatctagacaaagttgaccacaaccgagctgcaatttgcagagaatctaatcagtttttatcagttcatgagaagaaacgagagaaatagatacgcacgacgattggttggccgggaatcgcttcgtcggagcaagatgacatgatcggagctccggctatgtgctaaaattcgtagtggcagagagagggaggggag

SEQ ID NO: 44017 - DNA, 513 bp, Arabidopsis thaliana columbia
tcctccagaaggttgagtgaatcagggctatttatgtcaatgcccttttggagtattgggagcagtatgctatagcaaatgggagactgataaccaagtgcaatcacaaaatttcgcagtgcacaagaagctggatctgcagaaggctttcaccagaagattcctcccaaacctgttcttaagtcaaccacatagatagtcagctataaattgcggaccaagaaaagaaaaaacaaaaaaacaaatccacaaagaaagctagtataccttctggaagaattgcaccaacttttgtgcgtacggaatgacttcgctaacatggccaataagagtagaaatcaaattcagaatttgaacctgagaatagttagatgttgtatgagtcatcgaaggaagtataatggcaagaatggagtgctataatgaatttgaggcagctacatcaagtaccttcgaatcaaactcttgaactacctcgaccattttgaaacatgaacccaacagattggaaga

SEQ ID NO: 44018 - DNA, 562 bp, Arabidopsis thaliana columbia
gattgaagtgacattttatagtatgatgtctctttgtgagctctctcttcattcagctacttcaatcagagacagccgcatgtgtgaagaaggaacacgtaagcttaacagacttctggaacaaacctcacatggccacagcagacaggtctggaggttaatattcggataagagttttctgacttttcatgtcgtctaatacttccaacaatgatcctcaataaagatgaaagcaaagagaaagattctaccaggacatgatcaagacctcaatccataattgcattctctgatgaagataatgatatccattcaatactgagttgaagaaaacaagaaagagacagagaagctcaacaattgcaaaatgaataaataaatgcaaactgtttatgaacaatcctacaacatctttcagttccatcaacaaagcctacaaaatcgatcttacgtacctgcagcacgtagaacagaggaatggacattattcgcagagagagtagagttttatccagagaggttgactggaaagacttcacacagtagatgactcttggttgt

SEQ ID NO: 44019 - DNA, 538 bp, Arabidopsis thaliana columbia
ggcaaccgatatgttacaaagtttgttcatgggaaaaaaaactaaagttttgttcatggacattatgtaaaagtaatcgataaaaaagcgaaatctatgaaaagtaattacaatttcatacgaatcacacactaaatctaccatacttaaagcaataacagcaaaaaacacgtgaaaaaaatcttatccccatgtttttttaacaaaaggaaaagaaaaggaaaacctttctttttttttacattcaaagaaaagtaaaaccttacacgaatggttatttactttttttttttttgtgtcaaataaacctttggtaactttatagtaagtttttttgtaactttttatgagagtttgttgcatagccgaaaattttgacttactcgccggaatatacctaacgaaaatggaaagattcatagttatccacaaacataaaatgcccaaaataaccttgcacgtcattctcatcataagaaaatggtaaaaatatgactatatgaggttaaaaaagcaaaaacagacaacagaagaagag

SEQ ID NO: 44020 - DNA, 481 bp, Arabidopsis thaliana columbia
tagaggataactaaatctatagacataaaactagttttccctataattatctcttactttttttttttttttttatgttcatcatgttactcttgttgcacaccattcaaatccctttatatgcccaaataacttgctattaaagatttgaatcaagtcttaacccgaaccgataatcacaagtgtatggtttagttgttcttgcagtgatatgtatagcgagttcaaattccacaaagaaccaggccattaattactaaacataataagctaaggcgatatatttttatggttttttgctaatagacaaacaagataataagcaagaaagcaataaactaataataatagatgcgcacatgatatgaacagttaataaagaaaccattggatcatggttatgcaatcgattaggatagatcaacaactgatctatgatacaaaaacatatagtattaagcttatattcctaggaaaatgg

SEQ ID NO: 44021 - DNA, 456 bp, Arabidopsis thaliana columbia
tgaattgaatcaacaaaatacataattaaataactctacaattatagagaaatttgaattcattcaaattaggtcgtttcctaggatgcaatatattcctctccttaaaaaaactgttatagttgtgttttgcgcctctaaacgtccatattatgttgtagatcatcttgacaaatcctaaaaccttataaccctctttgatccttacaatactttattttccatcctaagaactgtcgaatcatcggaggacaatgtcttatcatcccacggtcaattacttgaccgatgttgatgtatgatatctctccgcttcttataactacaatatgttttcttggatggatttggacctgaggactcaggatgtcaatagtagcaataatcttgtgccatcttagatatattagggctgaaaagtcatcgatttatcgcgccaaaatgaagcctaaaatg

SEQ ID NO: 44022 - DNA, 356 bp, Arabidopsis thaliana columbia
accgtgtaaaaacgattagatgtttgttaattcgatttcctaatctaaatttttgaaaaagacagaataaaaagtatttccgttagtggtgatgatgctccccatatattaatcgtcgactccaccacataaattattttaaaaagttaaataaaaaaagctaaaaactcacacaatctctccataaatagaacctaggcgtgtgttctccacacttcacctatattctctaccttcttatttcagcacaaaccaaaaacataaagacagaaagccaacccaaaagactttaccatggaatcacacaacgtgagcaacagcttgaacctagacatggagatggatcaagaaaaggc

SEQ ID NO: 44023 - DNA, 356 bp, Arabidopsis thaliana columbia
tagggtttctttttgttcgtgttccatcggttaatctaataccagattgagttccattggtacttttgttgttcctttcggagataatacgattcatgatcgatcatattttcaaggaatgatctttgctattcttaggattcatattatttgatcaatgcgtttcttatattcattttcaccattcaggatcatctaccaatccataagtttcattagggttcacattgagacttgagctagagaaaacatgtttttgtagctgcttgagaatttgttcttgtgtgaaacaattggttccttgtgtttgatttattgcagataggatcaaagcaaacgaggtttcaatttagagt

SEQ ID NO: 44024 - DNA, 459 bp, Arabidopsis thaliana columbia
  unsure (1)..(459): unsure at all n locations
gaaatttaacttcagaaatggcaccgtggagccttctcgaaacattgatgatagtagtagtagcagcttggtggatttatatgcattcgaacagtcgaggcatgggaatttcgctgatatcgataagaagatagtggaaactggtgaagatatcgttttctttggcaataagagtacttcatggtctggaaattctagtaaagggaactccgggtcgaaaataaaggaaccaaatgagattcatcggcttgttgaaaactctggaaagcatgacagctataagggtagcattcttttaagatctgaagatgtcgtagatacctcagcgaactggagagagtgttctgttaagactgtttttcaatcttcgagaggggatgcgtcaaacangttcaatctggttagcagctcggacaagagagagggaaagaagaaggctagcattagtgatgtgagggt

SEQ ID NO: 44025 - DNA, 521 bp, Arabidopsis thaliana columbia
tttttcattccgtttacacacaacagttgtttctacatttatacataagaaagaaccgttggatgttagtgttctcaagggtattggttttttgatccaacggttgatatttagtgtagtagattgctaaatcgggagaacattctcagatgatcacacctcattggtttattgatttacctgtttttatacacacgtaaagttgaatttggggagataagcaaaaagaaaaatatcaatagtttgggtaatatcacaagtgtgatgtccttatctttgatttattgatttaagaacacaactttaatataaatgataagaagagactttctcggatattttatttgttcgagttagtggaacatttcacaatcagataacttaaatatacaatcattttttggcttattgtatgttaggttctagttatctatgtgtgttctttatggaattacaaaataaattaggattatacatttataataggagatttgaaatttcgacgataatatatatgatta

SEQ ID NO: 44026 - DNA, 552 bp, Arabidopsis thaliana columbia
aagactttgtgtcacagtaactagtggtttttttgttaattaatacattagcataacgcaaaattaaagtattttttttggaaaaactagaaataatgaaaaaaattaaagaatatgaaaaggtccacaattacatttttaaaaaacgtaacgtatagcaaattttggatagaaacaaaaaaaaagagaaagtgattaactacaagaaaatctatatttccttaatatgattttaggatgaacaagaggatctttttttaaaagctagaagatatagatttgaagaaatagccaaaagaaaaatctctctctattgataggaagaagaaaaacagggtgtctctctttctcaacatagattggatcaccagttttttttttctctctttagatttcatttctttttttttttccagtaatcaaattaaactttgcctcttcagcccaaaaaccctgagatttttgggagaatctgtgtgacactcatttcttctttctaggtaaatcccaattactttttcggttaagcttaaaagtcgatttttcttgaaa

SEQ ID NO: 44027 - DNA, 523 bp, Arabidopsis thaliana columbia
tattagtggttttttttggaaattgctttggaataatgcaagtggagattttgatagagaatcggattcaagcgttggaagtggaaagaaaatattgttttttagatttgcgatttaatttggaaattgaatgatttgaaacgcctgagttttgcggatctatcaaacggtcatcttctttttgttgtcggtttctatttaaataccatatttatcctttaccttttaggcgtgtgtgggtttagcttcaggggtaaaacaggtatattgtgaaaaattagtcaacggtgtagagtaagcaagcgcgtatgagagtgtttaagctttcacctttcagtattccttacgctccttgatgtttgtctttacagttttcaacttttcattgtatcacacaagttcacaactttgttcatatcaagattcaagttcacacatctataaaaattgattagaaagaccaaaaacaaaaaaaactaagacgtggctctatacgatttacatgtggtacgcgtgttagacg

SEQ ID NO: 44028 - DNA, 510 bp, Arabidopsis thaliana columbia
caaaaactctataaccattaaacaggaaataagttctcgtcataacttcttttcatgtcataataatatttaagcatgcaatagagagagtattccagaacatcacttggttccttcaggtaattaatcatacaataactgaagaaaattgttattgtagaaaataaagaagaaatgggcaaaccttgagcaatctgtgcccgttttctttctttagttgagtctccataagccttagaaacaaaggtaaaattagcaaaccatgattatcacaaggaaatgattacatgaaaaacgccactctttgtgcataacatgaacaatgactaggagacaatacacctcaaaagactaatcagatagaaaagtcaaatccatcaacatgtaaaagagctagtaacatgtaaagatacttttgtactcagaaatacgagcatgtgttatactttgagaccctcatctagaaacaacttcatgtttaaccgctcaatggttctacttaagactttg

SEQ ID NO: 44029 - DNA, 573 bp, Arabidopsis thaliana columbia
atcccgaatcaaatgggacttaccaaagtttgtatcaacctcgttcaccagttattgttttgcagacctcaaccaaaagttaacatgaacgaggtcaatacctctcaaaagctgattaattgatagcatcactcatagtaaggtagagattaatgttcaagaaaacgttaggcgttaattgggcggtaacccaatgcaacgcttcatccggtcctaaacagttttaggcggttaaagcgtttatagtataaaatattataaatatgttattatatgtagaaatcatttaaaacatgaatcagcaccccaccctcttacatttacaaaacaaaaaatagataaaacgtacattagttcatatcaaacaacatttgagcattaaactatatatatgaagacaaaatttagcaaatttgaatttgagtaattaagatttggaaaacaatattagaacgaagcatatataatcttaggcggtcgaaactgtcgtttaggcgtcatgtgaaacctaacattcgatctctcggttttacgtccgcgggtgtctctagaataatttgagatgagtttata

SEQ ID NO: 44030 - DNA, 557 bp, Arabidopsis thaliana columbia
cacctctcgccgccggtaaccatctccgcaaactccgttacgagctcaccgatgaactcggtttattcgggaagatgatgatcgaaatgctaccagaagatctggttttcactgccttcgtaccgtcggaaaaatcattcagccgagatctagggctgaaattaaacactagccgtccaattaaatcccacgaagaagacgacgacggagataacacatacgccgtcgtatcgaggatcatgagtttcgcggtggttccttacaaagtagaagaagtagacatagggaacgacgaaacggcgtcgtatgagtcgttgagtggtttcacacttcagatttggagaaaaagaaatggtggtggattagtcgttaatggcgttgagactgagaagatgggattaaagagaggtaaaatcatcgtacatataatgaatggtgttgtaatggattctgatttcgcacaatctattgcttcttctactcctaaagacgaagatgatgatcatagagaagaagaagaagaagaagattattgttttgactaacagaaaattatt

SEQ ID NO: 44031 - DNA, 559 bp, Arabidopsis thaliana columbia
agacaaaccaaaccgaatcaaaccgttaattaagattgaaatctaagtgtcttttctcactttttcagctctcggaaatagtgtacattttatgcagaaccaagattactcgtccaggaaatagacaaatccattgatagaagtcgaatctgttttgcgtaactatgtgggattctttgatagtctcatgaaatcaaagagatctcagaggctaagagtaagatagtccactcgagtaaaaatggggggaacaagcagagattctcaaactatattagccaggtgaagagaaccaacagatattattagaaattccacttgggattgttcgtgttacatcacattcatcgactcagtcattatattctacaagagtacaaggtaaacataaaaaggatcctttgggctcttatagctcattcttgacctttgcatccccatttggtaacacactttgcgattgcgccaaccgtttcgcttcctgaatatgaccaaaactgtttaatcccttgacttactataatatattaatgaagatgtcaatactagtcgaagttac

SEQ ID NO: 44032 - DNA, 492 bp, Arabidopsis thaliana columbia
taaacaaaactaaatcgatgaccaatactacagtctgtttattgcataaagttgtttatattcctatgcatgcatttattatctcttgggtaacggcttggaatcatctcccaagttcccaactcgtgatagattaaggaattggggcatgaatattcttgaaatttttgtctcctctgtaatgcacctgaatccaagaaccacttgttttctgaatgtacctacaacaaagacacatggggcatcttcttttgctcaattcagcccgcctacaatctttgaagattgatgtttccatgggacctcaaagaagtagtggatgaggtttctaaagaaagaaatcgtataaccaagtgttttgtggtccattggtttgttcgagtggatagaggattcgctatgtgggtcaaggctacgaatctatttcttgactatagacgccttaaatacaacatacaagtattgaggattagtttgggttcactccgggat

SEQ ID NO: 44033 - DNA, 405 bp, Arabidopsis thaliana columbia
tatttagttaactttgttctatgaaatttaaagtaattctttttgtcttatgacatttaaaagtttatcactaaattataagctatttgatctaccttaattaatttttgaattacttgattttttttgtcacataattaattttatatttataaagagtatataaataacatatgatttggatactattggtggattattttgaggattttcaattgtacacctctagaaatacaaataaaataaaaatacattttggtcgtagattgtacaagcattgatttttcgatacaaattttgtcatcaatatcttcaagattttccggcggagagtccccgagacatgccgtttaccatgtgaggtgacacatcttaacacgcgtttcaagattctagcccttggat

SEQ ID NO: 44034 - DNA, 515 bp, Arabidopsis thaliana columbia
ctctcaaaaggagaagaatgaaactgagcatcacgtcgacgacgcttaacacaactttcagaaggttgttgttgactctcatcatcaagcttcctcctcactcctttaaccgcctgttcctcaaccaaagaaagcgggaaaatccgaccactagctcgacacaaagagttatgattatcatacaaaatcctttggttgcagttcttgtcacaaacatgagtcaacccagttagtttgcaacggtacatattcccacacacattctcattctcgcatttccaatcacatttgtgattgggtccttcgtgacccaatatagcagataagtaaataacattagcagagccaacaaccacatgagattttccaaatacctccattgtttcaaagttactcaaagcttcaaactttcttcactcactgcataacccaagaaaacccgaattaaaaaaacgaaattgatccactattagagataatttttcctaatcaggcataaatttcaatcaaacaga

SEQ ID NO: 44035 - DNA, 352 bp, Arabidopsis thaliana columbia
tgttcgattaaatgtctgacattgtgtttaacttttgatttatgactcatttatgctttgtgatttaggattacctgaaaatattttaaggtttgtttagagaattggtacaatgtagtcttagatatgcatacctggaattcatcactttcataactacacgagagattgccctgagaatcagtcaagacccatgagtctacataagggacccatttgagaatcagtcagaaggatcaataatgattctggtctaatcgccggaactgacaacggtatcaacagtaaccatagatcatcaatctacgaattactaagggcgatacactgcgataaagtacgaattaggtgt

SEQ ID NO: 44036 - DNA, 524 bp, Arabidopsis thaliana columbia
aatcctcaagcttgtgtccaggacaaggcgactgagtatttccgtcctggaattccttttccggaactcggtaaagtttatgcagctgagcatcagtttcgctatttgcagccaccgttccaagcctgattgtctagatatgatcagcagtcttgtggaaaacaagtttcatgtttgaatgggcgatctagcaacggtgctgctccagagggggcactcaagtcttctcggaaaagatttatagtattcgatcagtcgggagagcagactcgtttgttacaatgtggatttcctctgcggtttccttcttctatggatgcagagcgagggaacattctcggtgccctacacccagagaaagggtttagtaaagatcatgccattcaagaaaagatattgcaacatgaagatcatgaaaatggcgaagaagactcggaaatgcacgaagacactgaggaaatcacgcgttactgtattctgatgatgacgataatgatgattgggaaagtgatgatgaagtaatg

SEQ ID NO: 44037 - DNA, 236 bp, Arabidopsis thaliana columbia
caaaggtcaacttaattggaaattattaaagagaaaattgttagaaaaacaagagtggtttggtcggattgaaatgtttgatacatcattcacaaaacaacaattctaatgacacaaaatattcgactgccaattgtgtatacatatagactggactatttgaaccaatatgcttgatatcaaatatatgattaattaaccaatttaaatagcctagccattgtcacatgatatat

SEQ ID NO: 44038 - DNA, 558 bp, Arabidopsis thaliana columbia
tgaaacataatctaatcctatgttaggtcataacaatggagctaaagattcaactaattgtgactttctctataacaggagagtagtattattattcacctttacttttgtcatcttaaataacgcagtaaacctcacaggctggatggagaacttttcaccattgtccaaggcaaagagaaatgatggatcaagaagctcactgttgaactcgacaatggatgataaaagggtttagttcctcattagttaacagtgaagggggtaaatatatcaaaaaccgtgtaattaggtaccttgctgaccaactcttgtaatatgtgaatatagactccgagagccttgaaacaaatatatcaaaaccatggtccacctacagaaagaagacaggagacaagaaacgatagtattgttcaaggaaccttttcattcaagaagacctataggattatacctgttgagatcagaattgaaatctaattacctcagcttcaatttcatcatagaggaactctgcctcagaacaaccagagcttgttgagctgagtcattataaat

SEQ ID NO: 44039 - DNA, 395 bp, Arabidopsis thaliana columbia
ttatataaataaactattagtaacattatttgctttttatttatttatctacagtatttttggaatgccttttcttagaaaatatcatatgatctttgtttatgacaccaccaacgaagacgacgtgaatgaccaagatggtgtggacgatgtgaacgatgaggaagacatggaaagactcgttcactcatggacattatgatgcagcgtatcacaattatatcttttactttaagctttgttttatttttgtaagaactaactaagcttttatttttttctttggtaatgggaactaattaagcttttaagacctttcatgagtgtgtaatatttaaccgctagtttttgcgtttgcaattttatgcatttgacgctaatcacataaattgttt

SEQ ID NO: 44040 - DNA, 589 bp, Arabidopsis thaliana columbia
tgaaaaatggagaaacaaaaatccaatttcaacctaactgtagatcatacagagaggatataacaagaaccccaataaggattctactcgcaaaggagatcataacaacagaaaatttgaatgtagccttccgagtcaactaagttcactataaatgctaccggaaccacaaatttacagtcctactactaaaatcagcgtctaagaacgaaacctggccgcgcaatgtcatggtcaagacgcttcccttacgaacacgctgccatggataagcaaataacatccgaaacttcacaacaaaaatctcccacgcgttcctattctcatactccatttctccggtcggatagtcctcatcttttttcccagaaactccatccagcagctgttcctgtttctctttctccatctccgccgaggaagcaggtgaatcgtcgaaggctcgagccgagaatctccgattgtacggagaatgaagacgaggtccgatatgggaaaattggggattccgaggagaggtcttctgtataaagccgctgcggagaccagtgatctactactactgctgctaaacctaggtattacatga

SEQ ID NO: 44041 - DNA, 578 bp, Arabidopsis thaliana columbia
tccccagacgaaaatcggaaaatgtataattctcactacatctatctcacacagtttagatgttttgaatcaaatcacactataaaatagaataaatcattaagcttaacccgtgaaagatgaaacaaaattacttcttcttattgttatttatattctcaaacttagaaaactcattttattattaccgtatataaaattcgaccactcatgccaaacacacattaatctctaataatcagaagaaaatgaaatttttgtagatcattcattttttttgtagttggagaaaactaaaactcaaaaacaatgttgttaaatatgcatgtgggatagtctgcaatctcataatttataaagacaatctctgaaagttaaaagatttcctctgccatgaagaatcctaaacccacactgaaagccatgtaattgagacgagtcacatgtcaatatatatatatatgtcagtttagtaaattctgagaaattcaaattgaaaagccaaaaatatgtacacttatcaatgaatgtggaaactaaatgggcggtgtgtggtggtgggaggtgtacactttgtt

SEQ ID NO: 44042 - DNA, 520 bp, Arabidopsis thaliana columbia
tctcctacctcgagacatactaaattcgaaagaatagaatcacgtgaatggagcgtgatttggaagacttatacgcgtgtctccccatgaccacgaccccacagttttgttgtcacgaattatccacataaccacttgtccttatcacgttcttttaatcacaaacccaaaactgatgactttgtgggttctactttggtaagataattcagcttcaaccatagagaaaaagagctaaaccaatatgaaaggagttagtgattttgaccaagagatgcttcggagagtttttgactttcttttttccatgtcagcccattattacctatgagacttattatgttccacgccgcatctgattacaccacagacgcaccaaacccccaaacctaatccgccacgaaaacgcctctcgacccataaaagaggcaaccctcattataagctattataaataacgccagacataacttctctcattgacccaactacccctaaaacacactgcgtgaacgggggt

SEQ ID NO: 44043 - DNA, 579 bp, Arabidopsis thaliana columbia
ccttgtgatcttaatagactcatttatcacctgatatgaaacaccatattcgtttaatagtatatgttagatataaccatgaaatcaataagaatagagtaaatgactatgggcaatagtatcttgtcgcaaaagcaaataaaattactgaaacatcttctttctcgtcttctctctcattttccacccttactccactacaaaaagagtcatttaccaaaaaaatctgacacatagttagtttctttattatgatgtcaaatttggctattgcttaatattaccctttgtttaaactactatatatatcatgattgatggacataaaactcaaaactaattgattatgagtaaattgatatattaatgtgtgatttttgtgaccatatatatgattatggcacaaactcaccattttgggtgaaatgtcttctacttctacattcaacattcaaataattaaatcgatcacaattcaaataatactaaacggaatcaaatttttaaaattgtcggaatgattgaaaatctttgatcccggatccatgaacacgagaatccaaaatccgaagagaactg

SEQ ID NO: 44044 - DNA, 481 bp, Arabidopsis thaliana columbia
taattacaattagataacagtattgcggtagaaagtagcaaaacattttgtcgtttcaaaatttatatctataacaaaagtactgaaatttctataaatttttgtgaaccattactatgaatttgtagcaaacgatatacatgtgcagttgtttaaaaaaactgatgatacgaattgagacaagtctttttaattatgtggcaaaatattggtaaaattatcggaaaatgtcatgaagtttgtaaaaaaatcagatattttactgtccaagtccaaggtatctattttgtgtagtttcaaactaaaaactcattattaatctgttttccagttccaagattattcatttaagttgttttttaattttatatatattcacgatagtctcaaacctttcaaattcatttcaaaaataaaattgaaaatcatttgctttttttttttttttgtgcaaatgaaaatcatctgctatgcagtgttt

SEQ ID NO: 44045 - DNA, 567 bp, Arabidopsis thaliana columbia
ttcgcagtgtacaatatgataaaagagcaaaagatgaagattatttctagatttgttttctcaggttcctgcatagcgatagagttttaactaaaacttcagatcagcatattttagtaggttctttagtgcaaagcctgacttttcttataagaaattgctttaacgtgttcagttgaaggcatacgtaaagagttcattgtttggtcagtgttactgcttttgtttggtgcttccattttttctttcttcatttatacaatgttgaaaactactgcctcctaacaatatagaaatttattaatatttgactatctgatttgataataaatgtgcttccttgatgcatgtgctatgatttgcaagacactaaatattttttactccatttcacagggatcattgtgtatgagtatgagctgaaaattggatggggtaaagtagtttttctgccatcacaagcactaccagctccacctcctgggcatatggcaatccggagtaaggaggtctgtggcagttagttgctcctttgagattcattttatccctgaatgtgactgttgc

SEQ ID NO: 44046 - DNA, 635 bp, Arabidopsis thaliana columbia
ctacgtcaacatgtgtggtgtgtaaaggtcacgaaatttacttctaggttccttttaagataacaattgatacccatctcaaacacaccaaaaaaaaaactatcggtttaatatatgattgttgtgccaaaattatatatatatatatatatatatgattgttttatcggtttacaatgaaggtgaatagaagcgatcgtagccggtcttataaaatccaggctgaataggaaaaaaaaattgggccttttttaaaagtaaactttacttttattaattattttgttaattatgggagattcataatttttatttactcccacatcgccctccgggaattcttgctaattatgttttttttggctaattttggatattttgttaatttggggtctattttactaattatgaaaactttggttaattatagagcctagaaaattcattaaaaaaaaaacactaacaaatctacataaaatgagcctcaaaatttgagagctaatacctgtgtttcatagaattatgtcaaaggttaagcttggaagcgataagagagaatgtgattgacttacaacgattgtatgagcattagttattacttattagttataattgatgataacaggcaaagaata

SEQ ID NO: 44047 - DNA, 607 bp, Arabidopsis thaliana columbia
tttctgaaagaaagtgtgaaacacaacatattgagacttctcagaattaatatgcatatcctgaataacatgtacactataagccaaaagctatgttggaataatagtagtaaccatgatcatgaaacagcctcctctcactgttcgttcttatgaggtcggttaaagctttttttacaacagaagagagtctttgaactgttattacaacgaggtgttgtcgtcggggagaaacaggtatctgaaacgagaatcgaaggggagtattccgcagttccgtgaagcgagaaggctttgtcttctctgagagatgcattgctccacaaaagcagcttgatgtggaggaaggtaccttgatatccagacccccaagttcgaatcctccaccaaactcttggcataacaatggagcattttgggtagtaagagcttccctttgctgctcagcctaccgatgcttgtatgaagtcctttgtgcttctacatctcttcctcactcctttcgcagagtagatcctcactgcaagacctcttcgtgttaagaaatgactgtttatgacttttggaacgcagattgttacttagtaagttccgcagtgaagagtca

SEQ ID NO: 44048 - DNA, 399 bp, Arabidopsis thaliana columbia
tggtggttactagctaactattaagtaacccctacattgtatcttttctttatgttctcttaaggatcttggcccccctctatttctgatgtatgactatgtttttatgcgtgcgctctcctttatgacgttgtgactaaactgctcatattgtaccatctttcggtcctaagcatgcttatcgatattacgtgtttcagcatgtaatgtagatagctttgactaactgctaacattgttgctgcttgagcatagagtacgtatgtgtcagataactgactctgcctttgatgcgttacattactcgtgtattgtctgtgttatctgcataaccgtatccaccggcgtgttatcagataatatcatagtgagcttagcatttagtacgtgtgtgttaga

SEQ ID NO: 44049 - DNA, 551 bp, Arabidopsis thaliana columbia
ctttttgttatatgtggttggttagttgcagtcactgagaagtatatagatcttacaatgatcgagtcactttttttattagaactgtttatcattgcaagttcccataatttttctgacaaaatataacaacaaagcgtatcaactatagagcatggagataccgcaaacggttttctttagttcattatcatacagtaatagctacgataagttcatacacaactctcagggaattatttcttactttaaatagttatctaactcttattctattatcctctgagacaatattaaatccagatgattcatcactagaccagcatcttgatctaattatgcatttgcagcctgctggagacacttttgtctatacttctggataaatgtcaccaacgtatcatgaggcacttcgacttcttttatcacacttagatcttgcaggcgctctatccagttgtataaagtcggagtgttcactggaccaattatgtctacaccgattgcttcacgatgagctttgtagcctccgagagtagcaatgatggtga

SEQ ID NO: 44050 - DNA, 585 bp, Arabidopsis thaliana columbia
gaagaatatgattgcctcttagttcactgatcatatagaagcatataaagaaaaatcaagttgctttggtctagtggtaaaggagagaaaagcttctgccacctggatttgagtattattggccaccggagttcgaatataaacctttacgatcacctgagttataaaaaaaacacacacacaaggaaaaatgtatgaaaaaacaataatcactgagaaatgcatttaaaacttttacaaacaactgattcgatttattaaattaattttgtttcttacaatgttttggaataaaataatccttacaataattcgatttattaaagacaaaaaaaactagaatcaaagctaacatgatagagagaacttgcttcgagggatagccgagagaaatcccgatgaggccaaagatcatccgtactagtggcaaattaccatagattggtcaaaacaattattagtcaaaatagcaataagtttgactcttttggtttgatatgactagcaaaaaagatattagtcaaaatagcaacacattttttagtatttgaccaaatcagtatatatatagctatatttataagt

SEQ ID NO: 44051 - DNA, 631 bp, Arabidopsis thaliana columbia
gatagaagtggggaatcgtggtccagctttggcttttataatgtcaacaagctcaaaaagggggcttcactatttttattttcttccaaaaagaaacttctatattaagcaagtgtttctctccttttttatttaattttctcgagtgggctgctaaatttggaactaatcaatcgtgctgggggcaagatatgttttgccatgaagatctctctctttttggtttataaaagtcatactttttgttgtcaatttgaacaaaggaccaacggtgggatctgatcatgtttgatgtttctgacaaaaaattatattcgaaatagatttgattttgcctttctttctcatttcttatgttattgctaacgatcggttcaaatttatttcatttcacatcccccatgcgcaagagatatgcaatcatgcgattgagtataatctattttcccgttttcataatatttaattagaacaggctcacaaaagagctattgagtctcttttttttttttttgttaccatgatctttcaaaaaatctatgcatctatcaaaatcgaatataagttttgccaatgaaaacaacaatttaaaatacatgtataatttataacccacttggtgatattatat

SEQ ID NO: 44052 - DNA, 555 bp, Arabidopsis thaliana columbia
tagataattaattttgtagaattatatgttatgttatctaatttaatattgatatgttatctaacggcgctctctaagggttattttttgccctactcacatcgtttgatttctcttcgccggagtgtttttcctactatcggaatccgattctctcaaagactttcgatggtggttactctctgcttatccgtttctatggcagttatcgtatcccatccctttcggagggtaactacccatacaaattgccatggatccaactttacgttggaacttgttttttgacgaaatggttttgaccattgttacagtggattttcaggtgaagatcatcagaatgaccacttcttaggcacgataaaaccgttgctgtgagcactacgtgatggtgtattcaaatgtcaaaaacgaagtttgtttgaatgaaagtctaaagtgactaccttggaaagcttgaaatttgactaagggtcaaatgtaacactttgaaaattaaaaagagaaaccaaaccgcacacatttgtctaaccatgttgtgtcgggccaaatggt

SEQ ID NO: 44053 - DNA, 519 bp, Arabidopsis thaliana columbia
aactgacaaatactggccaagacctctcaaaatatacgaatgtgcagatacaatcctcaactcttttgttaactcctctgattatatatatactatatagtgttgttaggtcctaaaactgcagcaagcttatatctgaactagggtttaacatatggtaaccgtagaagtgttttcatttattaaataattaccgcagaaattttactcacatgaataaaaaaggggtataatttcctgaaacaattaataataaagactgtacctgaagtggcaagctagctccagaccattccgtgaggtttgtctgtatcaaatatttcaacgagaatcaaaatggcaactatcaatgccgcatggaacagatgtgtacacagcaaatcgatcgaacaaccaattacaaagatcctcatagagtaggtataagcatgcatacaaaataggctaaaactcagacataccttgtatttaagggtaacaagcgagcttgagggaaatcatttgaaagccactcgctcg

SEQ ID NO: 44054 - DNA, 564 bp, Arabidopsis thaliana columbia
tcttctcaaggttttaaggtggtgtatctctctatctatattgcaaatttgttttgtaataaaagttcgaaagacattacatgttaactctttcttttggccattgacttaagtcggtgataaaaaatactctagctaggcacatttgttatgattaaagaaaatgatagggttgaaaaatatgataggatcgaatgtacaatttcaaaaaggaacacttgctcagtactcattaattgccttgaagaaaattgtagcatcctagatggagaaatgaggaatcgtattagaaattcaaaactagtgtatgatgaataaggcctcaaccaattctcattaatgctctttttcgctcctataaatagatttagcaaaatagtaaggtgagtaacaattgcactggacaaagaacaacactttgataaataagagtagaaagaaaaaatggggaaagtttctaagcgatcatggtttgtgggtttgatgcttgtggtgccactattggagttgcggaatgtagaagacttgagaaggagactttgggaggtggtggtctggaggagg

SEQ ID NO: 44055 - DNA, 565 bp, Arabidopsis thaliana columbia
  unsure (1)..(565): unsure at all n locations
tgtccttaacagattggttaaatttgaattttacttcaattaaccaagtattttgctttagttcagttatcacttatcagttaactaaattatatgttgtttataaccagattataccacaattataccgttttttaccaaatttaaactagtttccatcgataacctagccaaaattaaactacccgaatctaaccgaagaaccaaaattattcaaatataatttaaaaatcggattagaaaataatcaaatattcggttaaattacattttggggataaaatttattttttagttatatatttttgatctatataagagagtggatggatataaaccacaaatatatgtacctacaataatgaatccaacaaaaggtagttacaatccacatgaggtaggtaccattaaaagaaaactacaaaatcttctatttttgttacgagggtaaatagaaatcaanagatgtgtagacccaagaaactgtcataactaaacttttaacgttggtccactaccggagcaaaccggtagaaaccggaaacagaatagctgttgtgagatg

SEQ ID NO: 44056 - DNA, 466 bp, Arabidopsis thaliana columbia
atctttagaaagctgctgatgttactctggtctttgtgagcttttttttggtttggtcaagattttgcgtatctaaaagatatatgttttaatcacgtttctgaagattcttattatagccactctctttttctttctggtgggtcttatttaacggtggtgtatctatttattcctggattatgcgctctcagtgaatctcctgaggtgggaaatctaatcaatttggctttgtgtgtgttacttttctttttgtaggggactttcaattttctttttttaccttgttgggaaacttagatctgttttcggattccccttctttactcgctttagctctgttttagcatctctcacattgcttccacgtgataaatttagtaatttgttattgttctatgcttagatagtttccaaagtgatcgttctacattgtatcaaatacaactttggacaaattaatgac

SEQ ID NO: 44057 - DNA, 441 bp, Arabidopsis thaliana columbia
ataccccaaaaacatggataaaagtcttagaataaggggagtggacttagcacatggacgaatgacgatcataatcaatttcttggaacattttgtttaataataactcgctatttggattccaacgaccaacactatggacaaataacatcaaaacaatgttaaaatatatacatacaaaaactatgattgagatatatttttctcttgtatacatcatgacatgatatatttacgtcgaaattttcttttaacatgatatggtgataaaattattcattaagatgattagtttgtgcagaaaaaatacaaacgatggaactattaaagtagaatgaaactgatagtaggatgatgcaagaatcggatccgatcatactaatatcaaatagatatttgattttactttagcataacgataataagattaggcacatgttg

SEQ ID NO: 44058 - DNA, 215 bp, Arabidopsis thaliana columbia
gattaaagctctggacagtggatacagcacacggagtaatcgttaggctaattaggttgtgatgtaggagataggtgtcgacggcatgacattggtacccctttcattatatggtatggtatctgaatcagcagcatctcgttgttgtgtcatctcattaccatcgctgtttacatgatgatgaaagctattagagttgtgttggcaatgacgct

SEQ ID NO: 44059 - DNA, 344 bp, Arabidopsis thaliana columbia
gagtctttgttggcgaattggggccaaaatataaatttgagttgagtactcattgtagaatggtttataaatatttcgggtatggttatgatatggttcacctcttcatccctatctccccctaattgtggttagatagatgcatttaagaaaacatatttaaatgaaagtataagaagatgcatttcacacatctgtcacttttctaaattttgcttgaagacaagccggacttgatgtaaaacagtttttttccgaatcattttccataatattcaacccccaaaagactaagaagattagcagaactcacgacattcttttgataaacgaattattgatgg

SEQ ID NO: 44060 - DNA, 594 bp, Arabidopsis thaliana columbia
cccgagatgctagtaatagtatccgcatgtatatgaattatcaattatgaagagagagggaccattcaaatttgaaggagacgagagagagagagagagagtggtcacaattggagaaagaagaggtcgttacgttggattttacgttgcctccatgcacttccttctcctcttatctcgtggtcctctccctctctcctcattattattttatgccattgttctctcaatcccaacaatacgtttttatacggtaatatatgcatggtaaacacacaatttcattactcatttttcaccatatataaccggctggtatttttaagtataagttatgtttataaattataagtgtatatatactcgtgaggttgtcctctttataatcaattggtcgtcgtttgcgactttgctttgaacgcttccaatttccatatgatcatttgatatggaaatttgttgtgttatgttttataaaaaaactttatataagcaatcaagttctaaatcgaccaatggttagagaaaatataggtaatttatttgcgttaatagagctagagtgtacttagcaccctagatacatatgaaaag

SEQ ID NO: 44061 - DNA, 455 bp, Arabidopsis thaliana columbia
aagttaaaatttggacgtttcccaaaagaattttttttgggacaaaacaaataagtgagagaaatttagactttattttttttcctttaaatcacaatatcaaaatcttacaccattaagttgtgaatgactcaatataacatataatctagttgtttgtattagtgtcgtcattgtgttacaatgcagatttcaaactcgagtccttgagttacaatgcagatttcaaactcaaaatagtaaaggttgtacaaaaaaactcgcacaacaaccgatgcattagactagtggtttaagtgcaaagattggatccatgtgtttcttacaagtgcaaacgttagatccatgtggtttaagtgtagtccatgtgctccctagggaaagtgttgaactaatgtataaaaaaaaaaaaaagtctgaactaatggttttattgcagggatcttagaccaatg

SEQ ID NO: 44062 - DNA, 500 bp, Arabidopsis thaliana columbia
gggacaattatatttcgatctgtgttgggatgcattatttggatgcaattgcacaatatattgtttgtttaaccaattcacactaatatatcaacataaaaagatattttataccaattacatttagaatggtcttactaattcatttctgtgaaatcttcattttacttttaataaatagacaaatcacgagtttatagacgtgaatttgtacgaaactcttaaaaacgtacatgatagtttcttagatatgccccttggtctaaaagtgtcacacatatttgcgaatagaatacttgtgagttgagagcaatggtttgataattattatatatttctactctacaacaaatactgccaaatagaacagcaagaaatgttatcaaattcaaatgtatgttacgtttaggtaagagtgaatctcagttgagacacgtttatatgattgtgtatatatctatatagatataaaatggataacaacgagaagtacaagatgg

SEQ ID NO: 44063 - DNA, 609 bp, Arabidopsis thaliana columbia
  unsure (1)..(609): unsure at all n locations
tgaaaaacgtttatatgattgtgtaaatatctatatagatataaaatggataaaaacgagaagtacaagatggttccaacttccaatcaaatcaaagtatcttactaactattttaaatttaattaaattataaaatattagttagggtttcgtgcgtagagagttgagataatgagatttgagaacattctataaggcatgattcatgcatttacaaattggtacttgttgtactacatctttacttattcttagctaatatatactttatctccgcattaaaaaaatatcatattacactatccatgtcttttattggctaaattgggctctccatatcaatattatggaaagagcaggtgtgtcgaacacatactaaagactttgttcggacctcaaatctaagtcatgcatgtgataggtacattgcatattttgtttttggaatcgaaagttgcaagtaaacgcataaatttccaccatgctaatctaagtttcataggataaatcaaacaaagaaggatgaatctagcactacttttggttcaaaatatttggaatcaatagaatcttantaatatgggtagagtgacttttgagattgatat

SEQ ID NO: 44064 - DNA, 514 bp, Arabidopsis thaliana columbia
ccattaatggtgatcaccccttgcgagcaagaacggaaagggcgatgaggaatgtggcactgtgtctttttccattaagctccagcgctccaagtatcaacacctgattctcggatctcactctactctttcttcttcattgctcacctccctaaccatgctaagcactttgtattcatcatgaacaggatcgtgtccaacatagaacacattgttatcattattgcctttcataacgggtaattccacaacctgtcttgtgttgaggttacaaattcgtactcttctccaatttctgtacagagctcacgaagcggccaccctctattgtcggaatggtcagatcttggccgattacagagaccgatgtgtccgagtgatcatgattcgaagatgtgtgcaacgcatactcgctatgtttttcgctctccacaaaataggtgagataacgacttcgtggtgagggtttaaggaatcagttggtcatatctgataagaatctcgatcaacagtt

SEQ ID NO: 44065 - DNA, 320 bp, Arabidopsis thaliana columbia
tgctaattgctactatgaactggtttcacttttagttaagtggttatggaaatttcaatctggttagatgatggttggtagaagatattgcatgaatggtttgaaaatgtcaatatgagctcaagagttttattaagtagttttgtttggctgatgctacaggctcaaaggcacagtgactataggctgaagattacaacaaattatcaggtgtgaatcctttcttgagctttcttgtgttctgtattgctctgctccagtcatttgttagtagtttgaagtgtttttctactgcagccaccttcacaaggagttgatac

SEQ ID NO: 44066 - DNA, 465 bp, Arabidopsis thaliana columbia
ccccgcgccttcaatatgataatgttgtccacctaataattaaataaaccatttaccatataattgaacattagagatttgtgtgtgtgtgtgtgtgagtcacacaaattggtaacaatagatacaaaggttttaagagcaccaagaagagtttgacacagagtaggaccagtacttagtgctttttaagagtgtggattgacaagaataatgtcgtgaaagaagaagaagtgatctctgactctgactctaagtcctttcttttgcacattctggagtatccaaagttatcagcgtactgagacataaactcatcattgaactttttgaaactgtccataatctctggcatttcttcttctgctggcagaattgttgtccttaaatgacacacctgaaacaaacagacaaacaaaaatgagcttgctgcaagaataacatgaaactgtaaaacgcagagggttt

SEQ ID NO: 44067 - DNA, 568 bp, Arabidopsis thaliana columbia
ggtcagttcttggtaaacctgagcatcggcccgccatcttggaacatgctccttgttaaccctttggtgacaacaccggctgcactagacaacatacccaacttggtagttttcttcagccctcctgtgtccatgtcaagcaattctcttgacaaaactgtctcttgtatgtccatttcctggaccctcttttcagcctctgttgtagatgaaacacccactttcagcagaccagattctctccttaatgtgtttcctgcaaaactgaacacacattgttgaaagtttacctttaaaactgatcctgctgcaaactttgagctgtagcatcctcttaacatagactcttcttgtttcttgaaaaccagacttgattctatcaaatccttaaagtctctcacccaaacaactcgcttataagccccagtccatctgttgcgttcaccttctttgtagacacaaaatctacttcttgaaacatatatttgcagcttattgagctgcctgcagtcgtgaaactccgacacgtcaaaactcgtttttgatcagcaccaactgcaacttttga

SEQ ID NO: 44068 - DNA, 465 bp, Arabidopsis thaliana columbia
tggctttcttgttccttgggatttggattctgcgttgatagcttctagttctacagacaaaaatcatcttacagctggttacatacataatatggttaatgcttttctgtttttgttcaatttaagaaaatctttagatgattcttttgggaagataatgtcatctaaatcacattacttaagacgcaggtgtgcctagctctgacaaaatgttgttcatatcctcaaaatgtggccaactcgtcttgcttctctcatcagccttgctctcctgcacaaaaatgtattacatcaaatcttggttgctaacttaagagcttttgatcttgtaatcatgaacttcaaatctacggctacagattcatatgttcagagacgaacctcgtatttctgaataagtgatgcccagagagatttgcattgtcccgggcttcgattgattccttcagctgatagatttgaaga

SEQ ID NO: 44069 - DNA, 602 bp, Arabidopsis thaliana columbia
taggtcctccactttttggtcattattacttctcgaagctcaccaagatcttgaatttgccgacctctcaaggtacttctctcctcccaatttccacaatctcctttaaatctcgattagcaatcgagtcaactgttaaattacgtttctttgttcttctgtttccttcaattttgttagcacagtaccaaaaactgccattcttctttcgtgtttcttaagtgcgttttgattcacgccgatgtcggaatcgttgaagaatattcccgaatttgaaattagaatttccgtaattagatcaattttatttacgaaatcaatgtttaaattctccaaattgttagtgttcttcgtctttgtttgttgaaatttatcaatcctcatagctaaaaacaatgttttgcagaccaaatcatgtggttagatccttatctgagaaatcttttatttgttgtagtaaaatatctcgtttacactttcacctattcacacaaaacattcatgatttgggtttagattcttgatggtaaaagcatacagacaagagcatgtttacaagcatccgtgggagcgggtgagtgctcttcatggaggaagttgca

SEQ ID NO: 44070 - DNA, 606 bp, Arabidopsis thaliana columbia
ggaatacactcgagaagatgatccgtgatgctatgcaccagtaagagattttctctgtaaaagaattgcattttaatatcttttaaatgtttagtgttgtttaatcttgtttgtttgtgtgtttgtaggagtgttgtgtataaagaacaagtgaggttaaaccaggctgcgagtagtgcgcttatggcaagattagaggcgcaaaaagcgatttgtgatggttcagagaaagaacttcacaagaagtttaaagaaagagaggagctggagaatctagtgaagcctgagttagagaaagcaaggaaaagatcaagacttttgctgaatgatgaagatgacttgttgctagacgatagagacaggaacttatctctgtatcttccaggaacaagtgaagagacgtcgtcacataaggagttaagggtacattttgaagaagagcatacagcagcagcttctgaggctgaaattaagaagcattgtgaaatagaggaggaggaagaggaacagaagactccagaggtatctgagaagtctcttgttgcgttggaagatgataaaccggttgaagaaagccagatgtagaagaggggaagagaagcacag

SEQ ID NO: 44071 - DNA, 586 bp, Arabidopsis thaliana columbia
cttataattataatttttttaatatagctaaagaccctctccttttatatgcaatggagatgctccttcatcattagtatattttgttttgaattcaagatttctaaatatagaatttcctaaaataaatacatggtaaactcgtgggggttattgacttgatttgatacaaaaaatgagaggatatagttgtgatcgcatttgattaatttaggctgatgagcaatatgtatgcaatatgcatggatggtgtagaagcgaagacaactatcaccatacttaagattaaaatcaccacaattttaatataatttaacaatatgattttatgcataattaattggacttaattattactaagacattatcagtttgcaaccatccaatttcatgtagaacaagaagtctttagattaaccctcacaaaagactttccgtttttcggggttttttcttgactaaacaaataatcttggagacattaatgatgttatgagtcatgtgaccaatacagttatttagacatcaaagttatctgcaaattcattagagacgaacggtaatagtccacatgacaataagaatg

SEQ ID NO: 44072 - DNA, 577 bp, Arabidopsis thaliana columbia
cattcccttagaccgataaggaactgctcatcaccacgaaaaatgtccaggttttcatactgaccaagcaaatcatctacgtgaacagtcccaaaattttcaacgttaaggccctcctcggcttcattctcagtatcctcaatggcttcagtatcctcaatggcaaggttctcttcgtcgtatactagatgacatacaaccatttcttcaaaagatatcgagtttctttggtactcgtactggtaccacccggtcttgagatcatccttggtgaaaagaccaatttttccttaaaccctatgacttcattccccttgcagattggatgattactctcctaacttatcccaagtacccaagaaggtatcgtttgaccaatcattctttacggaatctgcattcactttagttattatatgtattcccttgtacataaaaaatgactcacctacgtactgcaacatcatctgcataagagtgttattgaccccaacaacaggataagagtgttattgagcagaatacggtgaggcttgagaagagatgctcttgtccacaacatggaacaacgaatgag

SEQ ID NO: 44073 - DNA, 487 bp, Arabidopsis thaliana columbia
tcccggtaatataaagaagtttgctgatttattattagcataacattgagaggacgtgtagtaacatcacagcaggaagaaatagaggacgtgcagtgtccaacacaacattttgctcgtcccatttcctatcatgtttacccacagattcggacaagacgaagctgaggaccggcattttaaggtttgaatctttttcggtgatcggaaatggttctactttcagatatgttttgtggcaaaatcactatgccgcttaaactgtgcaaatatgttcatccacataatattccaaaacccgctgtttctgcaatagtatcggcagagaggaaactgaggatcccaatttgaagttaatcaagaaaggttctgctttgagatctcttcctcagaaaaatcattctgcaatgtgttttgtttctcatatttaccagttttcatctttgcttatataactctcacgagtcaaagaatctgtactgtagtt

SEQ ID NO: 44074 - DNA, 523 bp, Arabidopsis thaliana columbia
tcaaattttgaaagaaacataagaagtagttaaaagcagagacatgtatttgttaaaaacgaagaagaagattctctttttcttttctaggtaaaaaggaaaagttgagagcgaaacgaagaagcgagccaaaacaaaaaaacaacgaaaagtagagaaagtggatgtggcaacggctctccgaagcaaaaaggcgttgggaagatattgatatatgaacttttgttttgaatttccgaaccttatgctgtagcagctagctcttattcgttggcttgagactacatgttgatttttcttttttttttctttttaatgcagtaattaaaatggcaaaaaataagaggcaatttcataaaggtagcattgttttttaatctgcaaatatgactattttttagatgttaaagttaccaaaacatttatcaaaaaaaaaaaaacagtatacacaagctaacgataaaatcaaccagtgtcagttctggtctactctatgattagaaaatattaaattttaaagata

SEQ ID NO: 44075 - DNA, 570 bp, Arabidopsis thaliana columbia
tgatagaaataaataggttgtcttgtaggagtaaaagaaaaaataaaaagtgtacgcaaatataagaaatgaatgttctctttattataataagtttctccctaaattcagatttagagggatggggtctaacacaatttcagttttttttgctcatctcatatgttaataagttaaagccttaagactagctcatcttctatatatagtaaattcatatgagttactatttttgcattctgtcataaaaagaagatcattatcttttgtgaggatacgtagtgttataagcaataacacatcaatattttctcttataatctagttgtatatcctctagattattaattatataatagactccacaacaagttatctacacgagtttctaccatttgagattgtataacgtaatatttacttggagatatgattaataatcggaaaaatcatccaacaaagataagtacaaatgtattgatttttcttcttctttgccatcatttatttgataaagtgagatgaatatctcatagtaaaagatactgcacatcagcacatctttagata

SEQ ID NO: 44076 - DNA, 453 bp, Arabidopsis thaliana columbia
acatacaagagtattaaccatattttctttaaatgcacatacaatagcttatctctgcctagcttcatttcgtaaaccaagagcaaacattatcggatggctccatacctgttctcaataaatcatggtcataatcaagctcattttcctagcctccggttactagattttgtatggaacgcaacatccatttccatccaggcccggtccaacaatgttttttgcaagggacaagatatagttgttattgttcaagaacctgactcttatgcacaagtttcctcttatcagaattcgccatttaaaccaacttcagtttctttttatatccatttactagaaaagtgtttgaacaattaacagattgatacatagtaataactaataagagaatcagagatccagatgaatttagtcatctataagaaagaagagatttcatgtcattatata

SEQ ID NO: 44077 - DNA, 555 bp, Arabidopsis thaliana columbia
aagtagacgaaaatatgagttatgcacatatttaatgaaagattctgaccagaccaaaatgaattaagctacaaacctagttggtatataatcttgatccattagagaagcacaaaaaagggtattaagccaaaaaagaatcaaggaagatccatttttgtccacaacaaagactgaatttaattttgttgatttctctctcttacatgcactttagaatttaaatttcatctcttttgatgatttgcatgttaaacaattattatggatgaaactgttgtatttactccatataataaggttcattccatgaataaaaaataagcctttttgatatctttgttatttttaagagtgaaatttcatttcttgtcaatggtgtgtaatattagtaggtctggttaatggtgtgtaaaatcggttgatcaatgcatgatccgactttgtgcgtcatatccagggggttttgtagagagtgattttcattttcagcagtgaattcgtttttgtgtgtcattgatcataggattttagtaaattaatcctaatacacta

SEQ ID NO: 44078 - DNA, 619 bp, Arabidopsis thaliana columbia
tggtaatagacattttgaaacatccttaaaatgttatattcttgttctcacattttcatctatatttttcaaagatttaattatgttgtattgttttgctttaggtgagtaccatcttgatcttatagtcgagaacggtgctgtaccggtgattgtcccacgagtggctggtgttcacaagttactagagagcttcaagcccatccatggagttctactctgtgaaggagaagacatcgacccttctctttacgagtccgaaatatcgtccctttcacctcaagaactcgacgagattcggaaaacacacgcaagtgatacagctatcgacaaagaaaaagactctattgagtttgccctcgcaaagctctgccttgaacaaaacattccttacttagggatttgtagaggttcacaggtaaagtatcctctccgctgaaaaaggaacataaattttttaaaaaaagttttgccacttaaagagtgtatagtggccaaatagttttcaacgcgaaggactcaatctttggctttgccaagtgggtgagttcttaattctaggacacacggttgattacggtgttatgaacttgtaggttttgaatgtcttgtggtggaa

SEQ ID NO: 44079 - DNA, 613 bp, Arabidopsis thaliana columbia
tactgactttagctgattgaagcaatgtacctggagaactttggggccttgaagatgagaacacctgcgtaactcggtcgggtccgggagggatttacctccgattaacttaatatccatgttaagcagctccgcctccactgactccacgatggcgcctgttttattgccgccgccgatcaaggaagagatttcagtgaccagggatttcaagtattcgacgtctctgaagcaccagccccgactagttagggcatttatcacgacggtgtgggtgtggtcgccggcggaggagcttgatgttcccaccattgcgttgatgctcttgtcgcgctaaaccaattggggaagacgagattttaatttggagaattgattttgttatggtcaatatcgagttaaactaattactattcactaatgatactttttgcataaaatcgttttgatcaataaagaagaacatttttaacagaaaaactagaaaagtaattcgaaaaagtcctataaaaaaggtatttctcggtttcgttttagtgggcctaatggccatatgtaacacgaagatttctgacagtacgacttctaaagtactttgctttcattgttgaat

SEQ ID NO: 44080 - DNA, 527 bp, Arabidopsis thaliana
gtgctctaaagaatcagtgcgcggcgataacggccttcagcatgcccttgagcttggtcgctgcgctgggcggaggcgtaggttcacgtctgcgatggtgacggcgccgacgttcatgctcgtctcctcgggatcggggagcctcgtcttgacactcatcccggcgctcacgctcgtcacgacgccgttcccggcggtcaggacggcgttcttctcgctcagagtgctcgactcctcgcgcttcggcaatcgcctcggagtgtcttcgagctctgcgtacttctgccctagcaggatcctcttccctgcggcgagaaccactcgaccgctcggtggtatgtcctacttccattcgagaggggtcctcttccttacgacgagatccgcttgacctctctgtgtggcctcgtgcttccagccgagcgaagtcttcttctctgcggcgggaaccactagaccgctccatggagggccgtcttcagaggggtgacgatggctgtgaccatgagaatgatggctcgtggatg

SEQ ID NO: 44081 - DNA, 593 bp, Arabidopsis thaliana columbia
tccaaagtgaccaaacatcaaacggaaaattgataaatttgtaatcaaattttggtaagagggagagaggtacttaccatagaagagatgaggaggacaagaggggagagaggttggggaaggtaagtgatgagcattgtcttcatggagttgctgaaacatgaagccatgttgaggaaaggccatctccaatctcagtccttcttgattattattgatattgttcctttcctcctcatacatatacatatatataattaatatgtatgtatacacaccctcaaagcccacaaatgatcaactcttattatgaattctgagcagatcaactttcgtagcttagatcaagaacttgtttagatatcaatatcacaagatcgttgaagttttctgaaggaaaattagtgagaagagaagaagaaggagaagaaggaagagatcagttcatgggaggtttgtataggacccaccctttataccatttaagcttttagggcatatgctgatttttcttttgattcaatttgtataggacacttgggaaattaaaattgagattaaatagcacatggattatggatacgtacatacat

SEQ ID NO: 44082 - DNA, 362 bp, Arabidopsis thaliana columbia
cccccgtacatacattcaaaataaatgagttatctttaaaataattaaaaaaaaaaaaagacaaaaaggtatggtttgttgtatctttaattttttttaatttcaggttctgcatcaattagccataaaatgtatttcagtttagttattattgtagtgaccgactcatgccagagacttcaatttggtatatgagatgtgtatgatgcatctaagtaccagatatatcatttctatagatttgtgggagatctagaagtagtgggtggcaaggcaagtgtataagatatgattacagctgataagcataccgtggtacacgagatatgattgtcatgatcgactcaaggcttgacatgttt

SEQ ID NO: 44083 - DNA, 593 bp, Arabidopsis thaliana columbia
gttgttaaaagtaaaatatttcgcattagaaaggttaacaaaaacaataaaaaaggcatatcttcatatcattgttatattatattttttggtttaaaatatttaaatcctctgtcagaaaccagagagaggcgtattaaggtttctgcgttttgttaaattgatcttgagctctaaaggctgtctaatgcagtgttttatttaattagcctttataagatttaggcaaatatacataaacaactaagtaaatatatacttcctctgtttgaaaatatattagcatatctcaataaatattgaaataaatattattccttgcatgtgtgagtcatttacttattcttaaaatttgagttacataacaaaaaaaaggaagcttcgtagcagttttcgttcgtcgttggaataaatatatggagacttagcaattaatggtgccctcacgcggttctactaaaccgacctcctttttgcttcccttacctatatatacatatatctctatcttcacttcatattaatctcacctctacatacgattttcattaaacacttttcaaaaacaaatcataatctgttcgaagatgagc

SEQ ID NO: 44084 - DNA, 437 bp, Arabidopsis thaliana columbia
aactttcaaaactaaatcctaaaccgtaaaaataaactctaaatcctaacaacaaattctaaactcaaaagtttaaattataaaccttgaaaaattaattttggtgtttgtaataaatttggaacaaaatttttgttgtagtattttcgaaaaaataaactcattaaaatatttttggaaaagagataaaacatagtttagtggtattttataaaacagattttaaaacatttaagagcctttgagttaaactcaaaacgacgttgttaagcttattcgactaatggagttctctacctcaaaacgtccggcgacgacagcgacggcggcggagtctgtacatttccgtcttctctgtccggcaacaagaactggtgcaataatcggataaggcggctcagtcattcgacacctccaatctgtaaccggttcaaaaa

SEQ ID NO: 44085 - DNA, 673 bp, Arabidopsis thaliana columbia
cgggaacatactatacaattttcatgcaaagattatcacttcagagattgaagatgatgaaacttacgagggagatatgaatactggagaggtcaagacagaaggaaccatgttcaagcattttaatggcggcatcagtttcatctaaaagtttcaaactttcactgaaactctggtcaagagaccaaagctttttctgaaaaccaacaatctctgtgtcaatataaaacagagaatcaacggctaaaggagaaaacccaatagaaaaatcaaacctttgtagcttctcggcctaaagaagtacgagcaaaagaagcgacaacatcgcagagcttgtcccattccaacaccctcaagctatcggtttgagatttagactttgaatggcaaacaagagtcggagaagaagacgagattaaactcaactttactctgtttctgtttccgatagagtttcttcttcttatcactagggcactgttgcagaaagctattgataaagtctgcatttttgacctccccgcttttggtttcagagaagaattgtatcaaatccaatttcaatgaaaccaaaatttccctatttcatcatagtttataccttattatctcacaaaacgggacagttagaattaatactttacgatacttggactgaggaaagatgttttag

SEQ ID NO: 44086 - DNA, 598 bp, Arabidopsis thaliana columbia
  unsure (1)..(598): unsure at all n locations
ttcaaaattataaaaaactaatcaacaatattatataaaactctgtgtttaaaataattcatttatttacgttcgatgatattattaaagttaataaagtttgggatcactaatcaaaattcatttccgagtaaaaaacacagacatcacatcactgtaacttttgtaccagcgaaacccacattaatattggggttgtttctctttatggcccaatggctatatcttcgttgtaactaggtcacgtgagccattgacttttcgcccaatatttaagcccatttaaaggcccaatatttaagcaacactcatatacaacatgatgataaaattaaaaccgttgaagtatgtaattaagattgagatgacggtggatgtgtgaaacagctgcttccggtgtgctagtgccccgataggaccaaagctgagaatataattgaatatgtggacggttgagttataattaggagaatctcataaatattattgaaatatcaacgatgaaggaacgcaaatgttgggtgggataatgaagttaagtcgcaatattanagattagacgtactgtttagaagtggacagagaggtggttggaatt

SEQ ID NO: 44087 - DNA, 900 bp, Arabidopsis thaliana columbia
tatcaagatcagggccggctgatggtggtgtgcaagtggagcatttgctcagggtccaatttttttttaactgaaattaagggctaaaatgaaaaagttattagatttaaggcctaacaaataaatttgattaaattagagggccaaaaaataattttgattaatttgtgggtcaaaaaaatattttagtacaagactcaaatatcattgagccggccctgctgacaagtgaattggatccgagaccttagggtgggccgggctatgtagtggcaaactaacgccggcggccgtcttgttggaatttgtcttagctaccagcgtgtcattcttactgttgttggagctaggtgccgtctacttttgttgcttttgatgtttgttgactaattaactaacgaacttatttagtgaattgagtttatgcgttttcttttttccgcaatgatctgataagaataaacaatgccacaaacataactagataatgctcaaactcttatcaagggatttggatcactcactttttaatttatttatcattatcctccaaactaacttacacgtgatgataaacatttgtataatctttggtaattactttttatctaaaatgcgaataaacttttaaaaatgtattcaacaaaccaatcacaaagcattaaagctactaagaaattactaattttattttaaaaagttataaaaccgaataataacgatcactacagtttatttgagtgacaaaaatatatgtctgataacagatcactctatgatttcccacgtgggctgctccgattggcctttagaaatcctaagggacaatttttaatgtgtatttataccaatgagatcaccatttatggtaatatatcatcgcaaagtagtctttacgta

SEQ ID NO: 44088 - DNA, 507 bp, Arabidopsis thaliana columbia
agaggatcgatcccccaacacattcagaggcaatatctgcgactgcgatgcttgtgtcatcgtctaagcctgcaaagtgcaagaataggccaatgttgctaccgaaatctgcaatgtctcttatgcattcctgtggatcaacctcgaacgtaaaagatgcctctgataaaagcgttggctcttttgtgtagttggaactgagacctttcttgttcccaagtgaccgtagcagaaaagctctgcagagacttaaagtgggttctaggaaatcttccatatctttggcattcacgaattccagcagatttccgattctcctcactacattgagctgagagagtagtttactttccatctctggagctgaagccaaggcgagacagagcttgacattgttcacatttgcgcttgataagtcatcgagaagaaactcgaagcattgtgaaacagtattgtgacgcaataagttggagattttgatgtaacaaactcaacgagcatgacaag

SEQ ID NO: 44089 - DNA, 503 bp, Arabidopsis thaliana columbia
tcaatctctttctagtgcataacgttgatccatcatcccgcggatcaggaacgaccaccgactcatcaccaagcggagtccatcttagagagcgaagtcctacgacaatagatctatgtggagtgtaaacaacgatgtcatcttcatcaacttctctagattccatctctctacggtaattttcaagctgactcaaagtttttcagataccatgagtggtaaccacaagatttgcctctagaaaacgctcaatgtctcccaaatttccatcgtcgacttcgccagaatactagactaaatcacgtcctccaaaatcatcaaccggcaacccgtcatttattccacgataagcatcctggttggtcccataaccattcaagtcacaccaaccacagtccatcgtcccaaaccggattctttggctgaaccggcaagctccaacctctaaaccaaaccggttcctcaccgaaccgtagtctcctctcttgctgaaccgaatttct

SEQ ID NO: 44090 - DNA, 573 bp, Arabidopsis thaliana columbia
  unsure (1)..(573): unsure at all n locations
cgtttcaacctcaactaagtcaacaactgtctcactgactctcagcacatgctctccctcatctaccggcttcacctcatcagagaccagtgtggtgaagaagaaaacgcaatactcgaagagaaaaccaacttatgatccctgaatttttcacttttaacccaatagcttgttgttttcactttttaagatcaaaactttcaaagatatctaaaagaacctttttatttcgtatttgttcacgtcgagttaaaatgtgctaaaagaactcttttcattatattaaaaactaattaatacataaaatggctataattataattaactttatatgttgatatataattaactatcctaaatacttataactttctttcgttttacaatcatagctactcttttcttagatgttaatatgatgattgcacgagtttgttgggccgaatccaaactatctatggaggattcgtttgtatccacactgtcaccggcaagaaagaagcacatacattcatgtcctatgactcgagtttggtntcacgttattgctaggctacctgaagagattggtgt

SEQ ID NO: 44091 - DNA, 501 bp, Arabidopsis thaliana columbia
tgtgatatttgtttggaacttggaagacttgtcttcgtagctttgggttgaggtatgtaagataagagacgagtagattgttccagagtttacacgtgtaaggtcactattgtttctacactaatttttgaagtattttttaccctaaaagaccgtcctatcatatgatcctatctataaaaagctccaacaattatgaattttctaatcaccacctttatgtattccttaattttatacattttgtttaatgtacattttatagtttatagaataaataccctagaaaatttacccaacaaaattaataagaaaatcacataatcaaagttattaacaaatttgtattacatgtgtaagattaagaaagtctacttatttatatattggtggtataaattttagctattaaaataagaaaagaattaaaaaaaaatgccacaagtattggataatatttttaccaaaaaaagtattggatattatctaaccatatgttag

SEQ ID NO: 44092 - DNA, 531 bp, Arabidopsis thaliana columbia
ggaacaaaagaggagataaaacctaggagattgcataagagctagcttgataggaccagaatggagctcagcccagcgtaaagtgacgacattgacggaaaagtcgagaccttgagcatagaatcgagcagcttttggtacgtctctgtgaagctgcagaatccacctaaacgacgccgtcgccatctctctctagacgaagacgaacgagtgtaaaataaaacacaatacaaaaaaaagattggccatttgacccaaaaaacaaaaacaaaaacaaaaaaaagattggcccaatacacattattgggcttctttcgggctcacctctaaatggtaccgtgtcgcactctctgcaatataaaccagatatgagatagctattggtttatttgaaaaaaaggaaagagaatttttgggttgttaaggccaaataaaacccataaatcagtggactggattagataatagagtggacaatcctaaattgattgtgtggacaaaagcatgagccgcttggttcagcgatgttgt

SEQ ID NO: 44093 - DNA, 371 bp, Arabidopsis thaliana columbia
  unsure (1)..(371): unsure at all n locations
cacatgacacacgtcatacatcctaatactagtatccacaaacaccgtacggtccgtatcattatctctctcctagaagaccgtatcatatttctcacataatattaattataataggtgaaaatacataaataaatgtcacaataatttacattaaacatagattctttagtgagagngtagtagtagnttagtactatttattactataaaaagagtattactaaacgaaagggaatatatcaagaaattgaaatacaaagtaatgggctgttgttcttgattaaaaaggagaaacagagcactaggatgatatgtatcatgtgtttatataatgtttatatgtttattcgtgtagtttataaatttat

SEQ ID NO: 44094 - DNA, 565 bp, Arabidopsis thaliana columbia
aatatattctcgcaaaattaagcttatatgtgacagctagagctcagcgttgatattgcctccacacttacattatataattctaacgggaattatatacataaactataatcatgattagcacgaaatgtacgaagaaaagtctgaccaattagttttatcctacacgtgaagacttgaagttgatatgtattaccaatatatcatcaaattattgatataataataagttgttgtttggtcgagaaagcgtgcttgcatgctataatgctaattcatatttaaatgctttgttgctttgattcgctaattaacccaaaattttgaaaatgactcaaaacaaacatacagtttttacatatactattctgttgatcgtgcatgcagagataccacagtttttctgaaaacttcaatattccgctgacaaaactaatatttcacagtgttagtttttagttttttactaattaagacactagactaactgagtcctactaataggttttctaatgtatacaacataagagactctagctagagaagagaggacaaacaataaaag

SEQ ID NO: 44095 - DNA, 498 bp, Arabidopsis thaliana columbia
attgcagataaacaattataaaaaaagtatttcttaatgatgtggacgtcttcgcggagggacaacaccctgtttgcaaacgtaagatacaaattaatatttatttacgaactcataaataataagattgttgctgttttgagcgaatgaagaaacaaaacaagagataaaaattatctcttctcttttgaataagacaagaacgaaaataactttttattgaatctgaaacttgttagtaattacatgactatacaatgagtttaataagaaacaaacagatacaacaacacagtgagttgtgtctctgcatacttgtgtttcttgacaaatacataaaaccttaatataattagaaattcaattatgagaaatttgcataaataactaacaaaaacttattatttaagaaagtaacatcaaacacaaaaaaagttgatatgttatgtattttctgtattaatgacaattttgccctctaaactacatacacctttt

SEQ ID NO: 44096 - DNA, 547 bp, Arabidopsis thaliana columbia
cagactgctaagcttacacatatcttgaagaagagtgacaaaaagaagaagaagaggaagaagaagagtaaatatcttgataaatatattttaaaattacgtctgtttattgtaactcttcgtagaagtattactaactaataaatgtgtttctatagtctcttgtttgattatctttttaattattcggttttaacaaaaaaaattatgatcttttcaatttagaagttcatcttatttttatttttaacaataactaaacaaaaattatactcatttatgatggataagaaaaaaattgttaaaattttccataatattctaaacatccgaattcacaataatttttagcgtaaaagaaaacgtaattaaccaaatctaagcaatatagtattttatttaaaatgaatttccttagatttcataacctaatttaattaaaaaaaatcctaagatttcataacctaatttaatttaattttggttgaatgtaagtgaaagacatcaatttagatcataagattggtgtgttgaaatgaaatatttt

SEQ ID NO: 44097 - DNA, 729 bp, Arabidopsis thaliana columbia
ctttttctatgtaaaatgttcattattatatggttgaaaacagagcaaaaaatttaaacttactaatcttaaccaaacatacctcaatcagcctatgaattacatacatgaaatagtcgttcatttaaattttcaaactggaaatttgatacctttctaccaaaacttaatgtcatgtctcctaccaaatttcagattattcctagtatgtttggatgttcgtttgatgtctccacgggactggtcagatatgaaacttaaaaagaaatcttctcgatcaggttgaagacgattataacgcacacacaaaaacgtttaattctatatttcaccattcaacctaaagacattaataccaggaatccctacatatatgaattatagttgctttaaagaggtcatgtcgtaattgttttctcacttttcttttccatgtctgataatctgagcttgtcttagagtgtcacaatctgacctctacaagaaaacagtttatttcctagggaccgattcgttagtaaaccgtcggaaacaagcgtttcagacagatttctgagggatttttgtcgtcggtatgacgtggttggaaattatgatccgtcgaaaagtcctcgcaaatatccgagggatttccaagggattaatatttttgacggatttgtgaggacactatgtccgagagattccaaaggaacaatatttccgagggattctaagggagtaatattc

SEQ ID NO: 44098 - DNA, 533 bp, Arabidopsis thaliana columbia
gtggatgtatttgaatcaatatttataaaattttaaaatattattaatatgctgttttaataggggttacaacttcagttttttaaaaattgtctcatggattcgtggtatagcgttacttaataataattataaactgtaaaatataaatattttataaaaataaaattagcaaattttaatatatattacttttaaaaaataaatcgtcccgcggtatatcgcggattaaaatctagttgtatttatattgtgggaagacctcctcatgtgatgttggatggattggtctaacggaccactaataatatatatatatatataactcgacaagatcaaagtgaaacgggagagtgaaagcaacttgtggcatctttcacacacatcctcaattacattccattccattccaaagggcttggaagacaataagacaaatcatgcatatatatttcatttagatgtccctaatatcctaacaatagtaactaaattcaaacgattcaccactaaaccaagtacatatatttatg

SEQ ID NO: 44099 - DNA, 501 bp, Arabidopsis thaliana columbia
tgggctcagtttcggtaaaccaaacccgtattgcccgttaagcccatagacaaacaattcaagttgactttgactgaagtcaacacttaaagatctgtaggctcgccagcccagtctctatactattttagatcaaagctgaaaattcatctcgtgtcaataaagaaaaattacgaggaagcggatagatttgcttttttacttacgcatcatagaagaaatttgttaaactgctaagtgagttttgagaaacaaaattttaaataatccaaaatggctaattcaatggaccgattatgttaactttgattagtcaatgatcgaaattcaatatttatccaaatgagagcgactcttatctactaggctgctattttctacaaacaaacaaaaacaatcacaattagccgcctctcctcattagtcattatctgtatcgcgatggggaagatacgcaatgcttagttataaacgtccgatcagatgactttgaccagtgac

SEQ ID NO: 44100 - DNA, 467 bp, Arabidopsis thaliana columbia
taattgcaaacatgtcaatgataattaactacgatactacaaaaaaattaaaagcatagctgctaaattcagttgatcgcaccttaagtccatcaacagtttccttgtatccaaattgaacatactctttggtcagattctcttcgggagaatttgatgttggaggatgaaaatcaggcggccctaatctgcaatagagaaaaagtataaatcatctagggaagtaaatcaaaaatggaaaagagtgccaacttcatccattaacaagtactccaaggacttagcctatcggagataaaagaatgaaatcccaagctacaaatctaaaacagcaaaattaaaaatcatctatatagtgtttatcgaatacctaaactagggatatggtgaaagaggaattaccgggaattcagaccgtccttctcacacttcaacttgtagggtgtcacggtggtggtccctgcagt

SEQ ID NO: 44101 - DNA, 476 bp, Arabidopsis thaliana columbia
attatgaataaattaactaatctattgagaatgtaataagttaccttgttcaatactttgagcattttttattttgttcttcagatgaaaaaggtatataacactgaagatcacaagtataaccactagtactgagaagattatatacttttctgtataatatagttaattatttttaaaaacttatatatgtttattgaaattagtactcattaaatcagcttcatcttgagttcgatatctattaattttatttttttgacggggcaggtcgatatttatttaatatctttcttttttttttgaatatgaatatctatttaatatcaagattcataacgtaaacaatgatataatagaattatttaataaaaataacggtcacaataatttacaatacatcacggaaactataacatagattcaactaataaaaccatactaaatatattgacaaatttgaaatgtgaacaaat

SEQ ID NO: 44102 - DNA, 552 bp, Arabidopsis thaliana columbia
caaaagacggtttttttcttagattagcgatataaaagaaatcaattgaaactatgattctgaattacaagtttttggaaaatcaagaacctcaaaaatcagatctaaaagagggttttttcgatttgcacaaaaaaaacaaacataaaatcgaaacgcaatttggaaattaaagagagagaacttttggataaaaattcaaaatcgaagtagtgaatctggaaaaagggagtttcaaaatctaagaaaacgcaaacaaaagtctccccaaatcaaaagaaacacacgaaatcaaaagaatataaaagaacaagcgaagaatcagacaaataaaagaagtaagcatggcgacgagcgagtataaataaccgttgtgaaatagaagaaagacggtggtctctgtgttgggcctaaatgaatatgtaagcccaaatacaagttgtgttgtttttccctcatcgtaatataaggccacatatgtttttttttgtcgtcgaaatattttataaagcccaaacgaaggcccacatatgtttaactgaaagttatgga

SEQ ID NO: 44103 - DNA, 476 bp, Arabidopsis thaliana columbia
tcaagaatggtgccaatcctagtcaccaccttattcctttaaccctccactatcattactacccacacgaagcaaagaatcacccaaaccaatccaaatgatcaagacagtacacagagatcgaaacacaaaaccaaaccaatgtctctgcaaaagtttaagcttctcgaaactcattgcagcaccgtcgcagagagtccgacacgtagtccagtcatccacctccgccgtcgtaaaacgctgcgtttgttactcactcgatcatcagaccgatggagattaccggagatccaaaacaacgtagatgaatcgaagaaaacggataagagaggtaagatccgatctagccggaagcttggagatgctattgtttcgtgcgaacacgcctgacgaaagtcgcggtgtcggcgccggagataaggggacgaagatggagatggagatggagaggcgtgtaccacgttaacggcgttagt

SEQ ID NO: 44104 - DNA, 582 bp, Arabidopsis thaliana columbia
gggacaatttgtgaagagattattacttaataggtaaggaaattttagaacaaaaatggataaaacaagaagataactgtttttggtaatagaacaaaaaaaacagaaaacgattacctgtcattgattactgaccggtgggaaaagtaaaaatgagggattttaatgtcgcccgtttgttataagttcacggagggaaatgatcggaatttagatgggcactttttggataactaggaagacgaatatgatttacgggagaagaattacggattgagaacggatacggaggtttatttcaacacagtcgccaggataatttcacttttaggtcaaagtgacgaataattggtcgtgtcgttttactttaggaaaactgcaaaaaataatattttattcccaaaccatatgaaactaactatgattaactaacttttgaggaatttatgataaaaaaaactttaaaaaatacatactcctcctaaaatgctctattaccaaattaagtttttaaaaagtgttttcttgcctaatattcctaatattaataacgttcgtattttgtataaataaaaacaggaa

SEQ ID NO: 44105 - DNA, 403 bp, Arabidopsis thaliana columbia
gaattgtgtttgctttgcaggtgcacttgataagttccgagagtggcttaactgttagaacaaagttgcactctctgaaaatcaaagatgaactccagcagcagcagtcaggaagtgctcagtatttagcttactcggtcctgaagaacgaagacatacaagaatcattaggaacatgtgattctttcgacaaggagatgcctgtaggacatgcagatgatgaagatgcctacacagatgctttaccagagtttctgtcacctacagaaccaggtactccggatatggatatgattcaatgcagcatgatgatggactccgatgtacatgtgggactcgaggatactgaaggagggttcatgataaagatacatctcaggagaaaattctttgcgatgaggta

SEQ ID NO: 44106 - DNA, 599 bp, Arabidopsis thaliana columbia
ttgtgtcatagttgaagaatagatgacttgagagtctagttctccatcaccaatgtctcatatagcctccatgggagatcaagaaacagagttgtaagtcttttgacgaataagcaaatagagatcgagagatagttagaaatatcaagaatataccaagtagttaagcattcaccatcttagtaacattcaaaagccagtacaaggaagaagatctggtgaaatcagatattcagatgggttaatacggtttattgtgcgaccgtgcagtttgaatttcggtttgttacggtttatagttaaaccaactccaacgataggaaccaaaatattctggtcaagaatttcatctttatttttcttttaagaagagacgaataacaaaaaacaggaaatttaacgacaaactatacaaccgtataacggtattatgttgggccgggccattacaacgtgattcaccacgtggtcaccgtttccaatttcataccttttttcctttattttttaaagatgtctacatcgtaacatcttactggagattgaaatttggctgagttgacaatatatcaatctgtcaatgaattgagttagtacat

SEQ ID NO: 44107 - DNA, 603 bp, Arabidopsis thaliana columbia
tttctttgttcttgttcaaactacgagtagctgctaaattaaatgttggaatctctgttgcttttgcaggaagactgagtaacaaagtcaacaattatacaaattagcaacgaaacttatctcttcgtttaaattagttcaaagaaaacagacctgaattgggatggagacgaagccctgaagaagattcgggtttgtgagccgggctaaggatccgagaacccggaagtgatgatgattcattaactctgaaaatatcgtcgaagaaatcatcagtggtgaaacgacgccggacagatgatgtatcttcgccgaatacaggcttctcgtcttgcggaacagatcgccgacgtcgacgatgacgtcacgacgccggagagcggattcactgaagctatgtcgtgtgacttcgttactagtaactttagagcgtctcttaggaggaccaccaaacacgtcaccaaaatcgatgtccacgtcatcgccaccgggactacgcaacacaggtggtgctgagttggagcctaaaagaacggtttctgagcttggtaatgtctgcatagcacaaagacacagaatttgcaattgctccggagagggaga

SEQ ID NO: 44108 - DNA, 575 bp, Arabidopsis thaliana columbia
  unsure (1)..(575): unsure at all n locations
ccctaaagtctatttgttatcgagagttttgaagattgcaaaccggaatgtgttccaaaaagttgtaatcaagcggcaattaaaaaactctaattaacttaactttaactatttttgatattgttcaaagttatggatttaaggattgataatttcggtttgagtcaactctcccagtaaacaaatgctagcaatataggggcgtttcaagttgcagaaaaacacactaattgtctctaaagtctacagccagaaacacaatctgataggtcccaaaagcaacaaacacacacaaaatccctttttaatggtagtttaaactanctatttgttttgattttctgatcaatatatggaaacaaatgaacgatggaaatggaatcaatcatgattcttacaacttaggggagacggagagatggtgaattgcataaacaactaaaagaaaagcactcattcaaaatcaacgtgaaccaactcaaccttcatgtccgcgttatcccttttggcncacaatctatccatgttatgccattattgctatggataatgttggcatatacagtgaaatttgt

SEQ ID NO: 44109 - DNA, 329 bp, Arabidopsis thaliana columbia
tgaaaatactagtaagttagatggcgaatgtagtatcaggtctctgactttgttttttacctgttggagccattacattggtagaacaagaaactggtactgggcagttaatattggatccattagcttggttgttgtgatatgttgacgtcaagcctcttgtcgcttttgtggctccgagtccgtgtgtgctacttccagcttcagggctaagatcagatattgtaggcatgaagctaggaggcatagctgaagaatcgacagaggcacgagtatgatggatcacttgttgatgagtttgatgcggcgaaaagacttgaggcatagag

SEQ ID NO: 44110 - DNA, 432 bp, Arabidopsis thaliana columbia
ttaagagatgacgatattttcacgtttgacatattcatcgtgacaagagggttgcttgggtttgaggtgttggaaacggtggtcgaattaatggacatggtgattaaaggtttaggataaagatggatatgataccacattagtctattaattaccatgtagaaggttgaaatattgaatgatttattgtaattgcttaaaacacgaaaacgtacatcatttttttttttttacaatatagggaataaacagatttactccaaatataaactgatacacaacaagtcaacaacatgtatatctatgtacacaccgattacaattctgaataatagttttcggaagtttttgctaatataggaatttcggaagtcgtttggtaattaatgcattatggggaaatatgctatatctaatgatatatattggaaa

SEQ ID NO: 44111 - DNA, 383 bp, Arabidopsis thaliana columbia
ctatatagaatccattatcatataccagcgtctatcggtagaagagtgaatcgccgcaaaaatcaaaataatagttcctatatcaatcaaaccatatctagatgaaactgataatagagaataaaaattttgaaaaaaaatggtaaacgatacgagacaagggaagagaatcatacctagttaccaggccgtctaatagaagcagataataatgaaaccctaaagtattatgctagttttcaacgagacacatatgttaggaacgcttttgataataatcggcttgatatggtagggacaatcattgatatctagtgacacacaatttgtgaagagtagagcgcataagctatcggagagatgaaggaggtgaagataggatc

SEQ ID NO: 44112 - DNA, 544 bp, Arabidopsis thaliana columbia
cttaccttttagggcctctaaagtcgttaatgggcctaagtgattgtcttatttataggcttgttgttcgctgctttttggattattctatttgtgcccctttctacttctatcacaaattcatgctctctgcgtcagaaccagttttttaaaaaagtaaatgcagaaatggtaacttaactgcccagttaaaagagtctaagaaatcacgttattaggtattatatggctcaaaaatgtgtattttgtttgaagcacgagcttgttggtccagatatttttgtatgtttccatataaaagcaagctataattagttcaaacaatcacacgttctttgatcattaattttttttaatcacaatgaacattaaggactcttaacatacacgtttttgtaagcaaaatcaaattttatcataataaaataaataaaggttttttttatgtatgaagaaaatgagagcaggcgattttgtcgtccagtaatgttggcaatggcaggggtcacaagtggaaagaagaaacaaagatgcgggaccattt

SEQ ID NO: 44113 - DNA, 519 bp, Arabidopsis thaliana columbia
cgatagatttatctcgaataaaggaagagaaaatgagtcgagggaaaggaaccactacgaagaggcaatgcttgattacataccaagagacgaagaggaagcttccattgcaatgctcatcggaaatctaaacgatcactatcccatccctaacgatctcatggacctcaccactgaccttcagcaccatcaagccacgtcctcatcaatgccacctgaggatcacgcgtacgtgggttcatccgatgatcaggtgagctttaacgactttgagtggtggtgatatggtggtggaagttctcaagttcataaccccctcttatgaaaatagaccttaagatatacaaaagagattagaagataaaaaagttagtatatgtcatcatatctctcattgaagatgagatttatatctataattgtttaatagtgtttttattacatttctatcaatatattacagttttaattaatgaaaacgatcatttatcttcagtataattagtttttaattcaaac

SEQ ID NO: 44114 - DNA, 580 bp, Arabidopsis thaliana columbia
ctcctttataaaacgaaaagtggataactaaagcactaatttcgagtttttttcttttataggcacactatagggtttctaattaatccaaccgattaaaccggatgttttatatacaaaccctaaccgattttccggttcacgggcgttacagaatgaatgaaaatacaaaatcctttataccaaacaataataataaagtgattaaattttgtaaatccaactaaatgtctaataccgtaacaaatatactagaagatcaccaatgacggaaataaattaataaaacatcgtgaattcacacaactaatatcgcgtgtctcactcaccattcgattcattttttaaagcggcattgtgaagtcttcatcaaaatctagaacatcaaatgagtttaagaactgaaaaaatttctacaaatgattgaataaagtctaaaatcccatattttattccaaaatcaagagaatttttaaaaccacacccgtcaggttttagcactaaacccaaaccaaaaaaatgttcgggtcacggttcaaccggtcggaccgggcgtgaaaatactgggttttagagtttt

SEQ ID NO: 44115 - DNA, 588 bp, Arabidopsis thaliana columbia
ctttttgactctgaattaattcatcagaggagtcgatgtttgtctcctttataggagaattttgtgctgagggtctaaagagtaagtctagttcatacgaaggacttcttgtcagatagtcaacatcagagtgttgatttgttgattagtttgagttgaaaagtgtcttattctacatctccacacgtttacttcagagtaaggaagggtaagatatttgaaatatttagcatgatccattagcttctaagttccctattggaaaggaagtctggctgtctcagaaatgactcagcaaaaaagctaatgacttagctattcagagttcataattagtgacacatgtttgactcaggatcatggctaaataaacgtggccgttggttagaatagctaataaggaggttagtggttcaattatgggggtgatagggatcgggaatttcctttttcttgtcttatatatataagtcggttatgttaagtcctatcatctcttagtatccaaattaggcgagagttctttttaatattttgttagtttaatattattttagtcggttctgttatttctctaagtctttatat

SEQ ID NO: 44116 - DNA, 427 bp, Arabidopsis thaliana columbia
atgtggacaagggaggcagagctacagacctatagttatgtaatgtcttgtctggtagggaatttttagtatgaaacattacttccaagggaaccaggccccagtgaaaaccagaatccagtttagatttttaatcattttatcaaaggaaagtcgtgcactccacttctatagcagcaagaaaatttggcacttgatcaggcatgtaaaaaggctgtaagtttgaagatacctttatgcaaatattgaccgccaatgaattggtttcctgcaaaacggagagcctgaatagtacaggataaacatcacctctgtaaactcctccagccgagaaacttttatacgctttcacagtattttaatcatcatgatacctgggaagaaagattggggaacactctcgcttttaagatggcatagtgtatcg

SEQ ID NO: 44117 - DNA, 477 bp, Arabidopsis thaliana columbia
gaaagctgtccagtactgttgaccagccttgcccattctaattagagaatagaaaattatctctccatagtccatactaacagaaccggaaattaccggcgaatgttcggtacatgacatttctaaagtttattcaattttttttcttagtttattcaatcttaacatctattaaataatttaacacgcaattcatgccaacgcgaaactgattttcctatttctcgacacatcgtttttcatccattttcctgacaaccgatacgaaacagagaaaaaagttattttcagcaaggaaaagtttaagggtaaaatcgtcatttggctacttagtctgggacagttaacaaattaaagaatccagagctattgtcgaatttggagatgatgtaacgaagttgcatatatatggcagggtagacgggagttaatacatacgctcgatcttaaaagtacatgtgacaataattgtaagtg

SEQ ID NO: 44118 - DNA, 510 bp, Arabidopsis thaliana columbia
atataagtcgaaaagacaaccgaaatgctatatctgtaagcaatgacccctgctcactaaggagtgagtgagaggtagttgagtgtgaaattgagaaagacacacatagatgacaatgccgatcaggtttacgcaataataataaaaaggcccaacccactaaaatctattagcaaaagcccaatttcagtccatatatgacgaaacgtcaaccgtcacggtttcacgacttgggagaagacggaggcctcttaaatcttaatgctaacagacgaataataatacgccacgtgtataattgaaccgtcaccgccttatcgttaccgctgtcataaacgaatagctattttcgtgctcggaaaaagcagagtaaagctttaaaaaatggtgattttatcggcgagctccactgtgagagctgccttagatacacaacctagacttccctacaaccctaatgcgccgcgaaaagttacgaatatccctaacggtaattcattcttaccgccg

SEQ ID NO: 44119 - DNA, 561 bp, Arabidopsis thaliana columbia
gtgggtcccctgttggcttggtgctggtgtgtgctggtcgtgcgtgtgtcgtggtggtgcggtcacttcttgtttcgaattgttctgttggggaaaaaaagtaatgagacacccatatttaaagatgaccaatggaaggagaaaaaataatacataatttgtaagagtcttcagctttaaatagtactattaattttatattaatttatagtaaagacatcttaatgggagtcaccaatgtggacggtcttaatgagctcgagtcctctgctttggattctactcatggagttatatcattttaacattgggatcaacactcatttttgtcgaatatatatatatgttgtagatggccactacaaaaatatagttagctatattctttgggactgtgaagtgtagcatagtggatatccatgacatgaaaacacctactacttactggttataagttataactatctatatttttgtgtttactttgaagtgtatggtagtagatatacaacatgcaacctattgaatcaaatatcatcaatataggatggggtgatatat

SEQ ID NO: 44120 - DNA, 513 bp, Arabidopsis thaliana columbia
gaggatcccctctaggtcttcatgtaatcaaaggtaatcacatgattcttgatttatattggttaatgttaggatttgaccattgttgttccaatttccaaaaacacagcatttgctccgttgaaaataagaataggaggaacattacaagacatagtgatatatgagacaccagattcgaagcaaccatgtcttccttttaccaaaaactcttcaattctttttggttacacacaaggatgtctacctatgcgtcgatgggacgagctcaatgccttctttcgcaaaaccgggtaccttcaaattctcttctatctgtctctttccttatctacttgtggtttgagtcggagctaaagtcatcttcaaattctcttcttacttttcttctctctgtctcttttcttacttacttgtggtttgaatcagagctaaagatatcttcaaattatcttctttcttttcttctctctgtctctgtccttagctacttgtcgtttgacacagaactaa

SEQ ID NO: 44121 - DNA, 540 bp, Arabidopsis thaliana columbia
gaccccaatcacacatcagcaaaatcaacgatgatgactcactaaaaccaataaatcaacaaagacctcaaaacccagattgatgatcacacaatcacacaatccccaaaatcaattttaacttcaaattaggtaaatcagtgaatttaagacacagttaaacagaattaccctctagagattaaaatccgatcaaattcaattcaattaggtaaagtaataacctttgttggcgttcgaattctcgagcaagaagcggcaggaggagtagcgatctccactacgttgggctccattgaacgatcccaaactcaaagaactaaaaacggaaaacgagataattttccagaagaagaagaagaaatcgatcaaagaaaccttggcgccgtaatatataccaacacacagtgagattgcgcaaaggcttttctctcttaacacttaaaaccaattcctctttctctctattaatcctaaatcttaataaattaaagacctaaattaaaacagtgatgattaatgaaaattttccaatttgtg

SEQ ID NO: 44122 - DNA, 565 bp, Arabidopsis thaliana columbia
tcttttaaagtttaatctcttcatacaaatttattaaattttgcaatcactaaaacacacataaattttagcatgtgctatcagttgagaaatttgtaaaacctacaaaaattatctgagaaaatgaaattgtgattttggatgaatgtttcattctacgtaaaaccatagacgtatatggtatagagaaaaaaatccatttgatgtgttctatattttgtaagttaaacaaaaataatctgtattacaacacctaaatctaaactctaaagctaaaattttaaatcaatccaaaataataaggtataaaccgtaacatctttatttgaattcaactgaacccttcttcgaccttcgagtgctcgacctatcaattaaacctgagctcttcttacttttaccccgccttccaaactctctagttcgtttgatgtcgctcgaagactcgttcatttgattttggtccatgtgacaatctttgggtggatctgatcatagagttcgatcaggatcgacaccaacaatcaccttttgctaattatagccgaaagtaattgattgaatt

SEQ ID NO: 44123 - DNA, 737 bp, Arabidopsis thaliana columbia
gtatcaatttgtattaaaactaaaaaaggttgcaagctttcagccaaagaagtcagcctatgaagaagagaaatggtaaagcacgcaccttttcgacatcggcgatcgagagaagaatccgggggctgattatgaatgaatatatctctcgactcctgggaataaaaaaagatgattgtttagggtttcgcggattgagagtccggcttaattgggaatcccggggtgtacatgcaaatatgataaactgtggggcttatccggagattttatttattcagcaaaaatcaaacccgctgacacaagtagaaggttgtaataaataagacacaagaagggagctgggaaaacgttatccatagagagtataatggccacgaaaatcttcttggcatctcccgttatctccgccaccagaacgccgatcgtcccaaaggcgatagcatcacgtctaggcacctccctggccgccgcgttggccgcgacttccgtgctgactatggttccggtgctgccggcggcaggcgaggggaaccagacgtacaaaatttactacgggacggcggcgagcgcggcgaactacggaggatacggggggaattcagacaggaagacatcggcggagtacgtgtacgatgtgccggaagggtggaaggagaggctggtgtcgaaggtggagaaggggacaaacggaacagacagcgaattctataccggaagaagaagacggagaagga

SEQ ID NO: 44124 - DNA, 505 bp, Arabidopsis thaliana columbia
ataaataattgagtacaaatctataaatttaaacaataaagagtgttattaacaattaatgataagtagtaaaaaaaaaagaatattcttcaataaaaaccgtaattcatttttttcctattttttaaaaaacaaaacaaaataagataaccataggaaatgccactctgttacaactcagcagtctaatgatatttaataaaataccaattttagtggtttatggtcaacaaaaatagtttacaagcttagctagatgtgaatacatactatatactaccaaactagtttatgatttgtatatgaatcaataaaagcgttagagtaattagtatatataaatgtaactgtaattggaccaaagagataaagcatcttgggtttagtaagcttttgagctgatgatgcttatgtgattaatgtgaatataagacttagggaacaatcttgttgttaataacaatacttataacatttaaatgcccttaagtatcgtcataattac

SEQ ID NO: 44125 - DNA, 466 bp, Arabidopsis thaliana columbia
ctctaaatctttttcttcaatcctggtaataccgtttaaaaggacaattacaaatttccagtcactagaaagtttagcagaagtagaaggatttgaatctcagaagtgccttttggaaatctgacttctgattataatataaaactgagttcggttcgcacagagatttgagtagacttacttgcatcatgatatattatattttcttttggacgtcttcagctaatgatttctacactagaaacaaaattgttgactctgtcttacttaaaatcacatagatggagttgaaagtatttacttggacaacattcatattatcttgctctaaatcttctcagggtactgttgtcaagagggaggaagcagatgagccagatgctaagcgtgttaaactagacacagcctctgattcgggagctgcaattgcatcacgaaaaacagagtcatcgacagataagaaagt

SEQ ID NO: 44126 - DNA, 326 bp, Arabidopsis thaliana columbia
tcctagaatgttcaatgatatcattagcttctgctcattgtgtgtataactcttcaagatccttgctgtatcataccacaggatttacaatcctataacttttctaaagggtagcagtggatccactagagtggcaaatatcacaggacacagcaagtaacagcgttgcacgctgagcgtagatgcggttggagcagcagagggtgttctgagggttgcaggcaactggacatgacaagagactttttgtcaaggtaagtgtgtcctttgttaccaacttactatgtacaagataccagttccaacccttggatcatgagtgtatc

SEQ ID NO: 44127 - DNA, 523 bp, Arabidopsis thaliana columbia
attttacattagaccttttttttttggttataataatgattgtaaaagtaaaaggaacttttacatttgtagtgtagtctatagtattaatgtattattattatattgagaggataatttagtttactattaaaagcaagaaactaaaaaaacaacaaggcataaaatgcgacaggtgttgatgaagatttgagttgccatatcttcggagttagtttaaaggttaggccaggttagcgaatcttttcatggcgttgggtcataactgagttgtcaatttttcattggttggaagcaggttagattctttcgttggggacacgtggttagttatgtatggtggaaatggtacgatttggtggagacttaaaaaagacggtacgagacactttcttaaggctcaggcgacatggttgtgagtgacaccaccacttcataagcaactaattgtagatattttcgtatgtattttagttgacaaccatcaagtttaggatctcatagtttagttgcttaaaaaaac

SEQ ID NO: 44128 - DNA, 581 bp, Arabidopsis thaliana columbia
atcaaccaaacacggaagaaactacttcattatctattctctaattctctcaatcagaagaaaaaaaacgattgcaatttcttcttcaatgcgatcatattttgtgaagagacgatatacaagttaaatcaagggaatataaaaaacttatataaaagactctttcgtgttgttcaagctaacatccgagaatcacattttctcttgatttgaaaagaacataatctttgtacccattgccttaatatgttcaatcacgttgctcgattgtagaaatagcctctacaacggagtgaacccaagaactgaaaatccaattcaattatagttctacgaaacatatttagagaacaatgagttatttgattaatgacaaatcatacaaagtctttgcaaatttacatctgaaagtctctaccatccaccacaaacacaaacctactctttctcctcctgtctctcactcgaattcaaaagattgaaagaaaagtaaattacaaacagatagaacttggctcactttccgggaacaaagttggtggcaaaggccaagcgttgttgttgactggatcggcaaatgg

SEQ ID NO: 44129 - DNA, 519 bp, Arabidopsis thaliana columbia
tatcttctattggttggtggaagaacgctgactttctctcatcttcatcaaaatggctacaatcacaaactcatgatgctgcaaacaaaaccaacgacttagcccaacaagtctacacattttgtacataggcaaagttttgatcgactagggagttttaaatataaataaaggagtcgtacctctagaagtaactagggaaatccatcatcccataatcaagagctgcataaacagaaaaagttcacttattattcatacatagacctgctgctgataatttgttctagtggtcaaacatgtaatgcaaagaggaattcatcaaattagcaggtgactaacaagtaaagaaatatggaccaagcgaaaacgaaagaaacaaatgtctgtcgtgtaatgccatagccaagttgcaggaaagatttgatgcatccaaaaaaaaatcaaattttgtctcctgagactatatgtcagaaactaatggttgatgcatccgaaaaatccttccacatatcatgc

SEQ ID NO: 44130 - DNA, 512 bp, Arabidopsis thaliana columbia
cgggaggcagcagtggggaattttccgcaatgggcgaaactagacggagcaatgccgcgtggaggtagaaggcctacgggtcctgaacttcttttcccagagaagaagcaatgacggtatctggggaataagcatcggctaactctgtgccagcagccgcggtaatacagaggatgcaagcgttatccggaatgattgggcgtaaagcgtctgtaggtggctttttaagtccgccgtcaaatcccagggctcaaccctgcacagtcggtggacaaacggtttgagtgatatcatcatgatggctcgtagattggagaatagtcctttttgccgtctgatcaaaaattcacaagtttgaagatttgtcttcccggagaaataccctttttggttcttgatgcttgtctttcaagattgtttctttgacctcccttgtctaaagcataaaactgttttagatttcttcatagaaaatgcgttgacatctctttaacttgatacacaatgtgagg

SEQ ID NO: 44131 - DNA, 582 bp, Arabidopsis thaliana columbia
atacctatactttagtttggattttaataatatttagttctattatttattttaaagacttgtaaatagttgtttttgcaagaaatgtagattatgaatggttttaatctgctaaataacgaaatgatgttgcacttctataagtttttacgaaaaccatgcaattatatatacacaggtggaactattttattttagggttaaattctattgagaaaaatatttgatggtgttatttggaacttttagtgatgggtcataccgtcatatgatgtattattacatggtattttatgtaataaataagtgcatgcttacaagagatgatggtttgtttgtaatgattttgtcaatgatcttatagtaatattcaatagtagaaaatagtaagaagttgcgtttagacatggattaattattcaccgcgtcataatttgtcataaaataacaaataaaaagaaataatgtcatgattctgccttttaacgtgacatgcaatatagacttttgatagaaaactcgaaagtgacttcatacactattcgttacacgcggtttcgatacttccaaaacaacaaaaaa

SEQ ID NO: 44132 - DNA, 466 bp, Arabidopsis thaliana columbia
tgtattatgttagtaccagtcatgtacaagatttcctgagacatgaggctttagggaagaacccttattcgaggaacttcgcccagtaacatacaatgctaatgtcacctgagaatattaagagatatcatggagattacaaatcacaccaccaaaagccaatctgatggtaacacaactaaaatcaagacaccggactaaggattgaatcatcttaccaaaacacagaaaataaaagtagctgagagtaactcaagtcctctatccgcaaccacctacaaaacatctcagtggaatgagtgtgagaaagcaattgcaatcggattcatatagcatatagcattcggattcatagaaatacaatcgaaatcttgtaactacacttacaagaggtgatacaatgccaagttttgcacagattcccaaaatagctaccgacaatattagtgccaatagacctgaaatt

SEQ ID NO: 44133 - DNA, 368 bp, Arabidopsis thaliana columbia
  unsure (1)..(368): unsure at all n locations
gccagtgtgctctaaagtattgcttgttgcatggagtaaggaaacaaggagttgaacctagtcatttgaggtttgtgcatcattacggtcattgccgttcgagagatgtttgaagaagaatgagtttctcacgtgaccagatttggaaaattctgcgctgtgtaggatgcaagtcagatanctgcttgctgtggattttagagcgnacagttgctgctgatgtacaatagcgtactctcgaatcagcattantcgggcnngatgttttacttgatgattgcctgtcagaagcattgantttctatctttgctagtcagaagttcttgagaaaataagaatgagatgctgcccctagtatagaacgttt

SEQ ID NO: 44134 - DNA, 503 bp, Arabidopsis thaliana columbia
gaggaggaagtaggaagaaagagggagacaaatgtcatgtgagaatgggtgcacaattctcgaaaccaaactactaactaccgttacttcccagtgacctttctctttggtcagttttatcggcgctcctcaatgttttcgctatttactacacatcctttcgcgtctcccaaactttatctatactacattttaaagcaaatatatgcatgtcttttttgtcaactaagtataataataatatagatattttatgtagagaaaatatttatgaagttgataactctcttttttgtttagttgataaactctcttcttcaaacaacttcgatcatcccctttgtatattttatttttagaaaatattaaggcctgtttatttcatcatttatcatttccatacaaataatctacttacataatttatttgaatgatacatttgaatgatgtttggttcattatatgtaatttagactaaatgatgcatttaaatagatcttta

SEQ ID NO: 44135 - DNA, 493 bp, Arabidopsis thaliana columbia
tgttaaaataaaataaatttgaattcttaattatgtttcaactatttttgagataaagagttatttattttagatattttaaaatttaacaaaataatatcgagttttttttaaaagtctatcacttaacaaaatttattttatttgtttggacgaaattttgtttacaaatatttaagataagaattaaatttgaattttaattgtttttacaattatttctgagataaagaatttatttattatatatattaaaaattaatcaacccctacttgaggataaatttaaaaagaaaatcaaaacataaactttgttttctactttttggaccaaattttgttctcacatatttaagctcctaattctctttacaaccattagttacatcgaattttaatttataatttatttttctgttttaggtattagttttttttagttattcctagattttaatgaggttattttagtattttgatatggtaaaagtta

SEQ ID NO: 44136 - DNA, 540 bp, Arabidopsis thaliana columbia
aaaacatatttctaattaagttttgcttggttttaagctgtttagattttcctttttttttataaagataattaatctttaaaaccaaaatctattctgtttacttaagaaaaatatgaaattattgaacttttaaataaatttacttttgtttggttgaatcttctattgtttgatatattataagatggtatttcttgaaatttctaaatgaataatgatacttttaactgatcaagaccatcttcaatgtatatttttattttttactttaaaatagagtgactctataacaaaacatgatttatgtatcattctaattgtactctaaaatagagttagtgtaataatagaaagaaaaaatagagtttctctagatgagcaatcctctcgtttatacaaatgtttctaagcatattaatgacgattataccttatgtccttgctgaattttatgcatgaaatattgtgcaaaacatttagccaccattaagaagcttatgcgaaatcctaaatgcaaatgtttacttaataatgcaa

SEQ ID NO: 44137 - DNA, 832 bp, Arabidopsis thaliana columbia
caattacgctgtgtagagttggttcttgattattgtgtataaattgtatgcaactctgtagtgtcaaagcaataacaacagaactgattttacattatgtcagatgatcggccggagtacgcatctcttcaagccatactctatggcccttacttgttagccggacacacgagcatggactggagcatcacaactcaggctaaagctggaaactggataacccctatacctgaaactcttaacagtcaccttgtcacactctcacaacaatctggaaacatatcttacgtgttgtcaaacagcaaccaaaccatcataatgaaagtatcacccgagccagggacacaagacgctgtttcggcgactttcaggctcgtgactgatgattctaaacatccgatttcgagtccagagggactaattggaagccttgtcatgcttgagccgtttgatttccctggcatgatcgtaaagcaagcaactgatagctccctcacggttcaagcttcttctcctagtgacaaaggatcttctagctttcggttagtatctggacttgacgggaagccaggaagcgtgtcgttaagcctagagagcaaaaagggttgttttgtgtacagcgatcaaacattaaagcaagggacgaaactaaggcttgaatgtggttcggctgcgactgatgagaagtttaaacaggcagcaagctttagtttaaagacaggaatgaatcaatacaatccaatgagtttcgtgatgagcggaacacagaggaactttgtgctacgccattgtatagcctaagagatgaacgatcaatgtgtcttcagtgtgc

SEQ ID NO: 44138 - DNA, 597 bp, Arabidopsis thaliana columbia
  unsure (1)..(597): unsure at all n locations
tgcacatataattcacctgtaaaaacattaaacgagaaaaaaaaaggaaagagtaagaaccaaatgttgcaaaaattatgtcacgctaaagagaacactttaaaagccttttctattcactgaatttttttatctgagtcagcaaaaaagactacgaaaatgtagagactttactgaaaattgaaatacctaaaccatgcagaatctcttgtttcaccttggctgctgtgtcacctgtgtaactcgatgacttctggaaaacaagctcatacacgtccagtaccgaattaagatatcgaagttgcaagtttccctagttcataaaaaaaaaaaaagttaagagagtgaaatatggatatgacagtgtacattgtagctcatagattgttcaaatagctgcgttgttaccttgacacagtgggacacaacagctgtctgcagacaatttatcgctgcaagtgatacctctttactcccattgaaaatgcttttcttaacaaaagcaagcaaagactcccatcctacagaagcagaaagtttccgatatttcagttcncctaaacaataagcactgcagggcagtcaaggattattcaa

SEQ ID NO: 44139 - DNA, 698 bp, Arabidopsis thaliana columbia
gtctgatggatccaattttgttgcagggagtggcgaaggagtcgactttgaatctaagaattcctgtttggactaactctataggtgccaaagtatctttgaatgggcgacccttaaacgtaccaacttcaggtgatttgagcattaggttctaaaaagcagaactcgcttgactgttacagtctctagtttgtgaaatgagaatcatattgtacctgtctttttctttgcaggtaatttcctatcaatcaaacagaaatggaaatctggtgatcaagtaaccatggagctaccaatgagtatcagaaccgaagctataaaaggtataaacacacagttttgcttttgtagactggtacccttactccggcaatctataactagcagtatatgtataaattgtatgcaactctgttttgacattattttgtgagtatttcagatgatcggccagagtacgcatctcttcaagccatactctatggcccctacttgttagccggacacacgagcagggactggagcatcacaactcaggctaaacctggaaaatggataacccctatacctgaaactcaaaacagttaccttgtcacactctcacaacaatctggaaacgtatcttacgtgttttcaaatagcaaccagaccatcacaatgagagtatcacacgagccagggacacaagatgccgttgc

SEQ ID NO: 44140 - DNA, 468 bp, Arabidopsis thaliana columbia
taaaagttttttttaatataaatttaaaataatctctactgcattatatgatactttataacttctgacatatgttaaaataaaagatatatactatagtgcatatttgaggacacaaaaatcataaaattaattctctttctatttcttttttttttaattatatctctgacattatgtagaaaaaaaaaagtcccttggagcaagaacatggatgtctctcatcatcatcaataatgacttattaattttgccgccttccaaagagctctctctctctctcttatattcttttttcctttctcacaaaactctcatattcaatccaattttcagattgaaaatgagaaatcaaagaaagatatagaaaatttatgtagagtcaaaataccagtaaaataaataagaacctcaaatgtcatgagtacttgtggttttgggttgtaaaaagcaatgtatgactctttt

SEQ ID NO: 44141 - DNA, 107 bp, Arabidopsis thaliana columbia
cgactctaccatctattgacaatttagccgcagactgtcgattaaccctaatccttctaaatggccgaatatggtcaggatgtatttagctctgttagataatagta

SEQ ID NO: 44142 - DNA, 558 bp, Arabidopsis thaliana
taaataaagttatataaatacacgttttagctgcatgattgttagatgcttttatattggtttgacccaaatgaagaaaccatggtccacaattgtccccctactagtctatatgaacacctcttctcaccacacacaccaaacattcatcacaattccctaaatcctacaatctttcttttcttccatcacctaagagtaaaccctaccttgcgtcccaagtctccaccgataatgcaaccatccaccaacatttttagcctccatggttgtccaccttcgtacctttcccatattcctacatcctcaccattttgcggacaaaaccctaatccattcttcagcttcgaaactggcgtgaacacttcacagttcatgagtttgatcagcagcaacaactcgacctcagatgaagcagaagagaatcataaggagataataaatgagaggaagcaaaagaggaagatatctaacagagaatcggcaagaagatcgcgtatgaggaagcagagacaagtggatgagctttggtcacaggtgatgtggcttagggatgag

SEQ ID NO: 44143 - DNA, 460 bp, Arabidopsis thaliana columbia
actctagagattatgtttctaattatatcaacatttgacataatttttagttaataaattaattcaatatagaaaaaaaaaaaaaactcatatgggcttgaaatattttataccaaattaatgatgtattatttcgttttatcatttgaattttattggaggtagtatatgtggattccattcaacaacgaaaaaaaggaaaatcatattttgattaaaattgaaataggaagaaaataagaagaaagtgacaacaacagacaaacggctccgtcaccaaattgacgagagagactctctcctttcaaactctttttcagtttcaacttcttcgtctccctcccacaccacctctacatatatacattcgattcacagtctatatatcttcttcttctatgcctctggcgtttctctcgcatggcgggtctatactcttcctcctcctcctcgaaaccca

SEQ ID NO: 44144 - DNA, 496 bp, Arabidopsis thaliana columbia
atatatgtttatgaatatagtcacaaaacctcgatcactcctcggacacggacgatgaagtctcggacctggtcgatgatatcacatacggttccgtgcttcgatttgtcgatcaggtaggcaaccaaaccgggccagattagtcacaaatgaaattaggctccactttggcaagttttttcacaattaaaaattagaaagtctaaccaaactaatagaaactgaaccaaacaaaaatgttcacgcaattacgtagcacttctctatgaaatactgtggataattcgatttgagctaatctatggtaagtcgtttctctcaaactgaattaagctaaaccaaaccgaaaataaaccgttgtagacacccataataaacatatatatgttctctactcttatttggctatttttccatttgcagatacgtgtgacaacattccaaatataggcacatgatacaaattacaaagcccagaattataatttataaacta

SEQ ID NO: 44145 - DNA, 444 bp, Arabidopsis thaliana columbia
gttgttcaaacatttttcaacttaacattttgatttataatcatatagctttatcttagagataaaattatactcagaaaagtttcgtgaaacatttcttgatatatggtagaagtatgtactgttcaaacttatctcaccttaattgctttggctccatttttataaaataatacactctaacttcttaattaaagatttttgtaagcaaatttgttatctatgcttagttgtgtatttggtggctcagagggcaagcagacatttaaaaaaaaaaaaaaacgattcatgggttcctcgaaccatgcatatccactagttctttattgggccgataataggggaactcttaaatcagcacatcaagcttcgtaggaagaaaatatgttttttgtggggcttaatctgttttatttcaaaacaaatcattctataacaaatttt

SEQ ID NO: 44146 - DNA, 564 bp, Arabidopsis thaliana columbia
ttcttctttttcctttagtttacactctgaaacaaaaactctattttttttttatgtaagaatataggttctgtacagagaatcaagaaaacaacaaatcaagaattcatgggtgggggagacaaacccaagattatgtatctgggtctgacccttgaagacaaacgaaagaatttttcttagacacacaaatcatgaatggaagaaaaaactcatacttttttagccctttttatggaatggcttttgagtatgatgatggaaagaaaactctcctaatgagtgaggataagattagaatcctgagtatctgagagagaaactcagcttctgagatgggtctagactttagaaatgttacctttaacattctagattctagagggaggaaaaaatgcagatcatggcacgcccgcttcactaaaacttttcaggccgatatggctgcaaacgtatggagaaaatctaagcaaaaagagggaagaaatgcaggttatgccacctccatgaggacataaccgaggtttttgggacgtttttttttggtttagagagcttggtttg

SEQ ID NO: 44147 - DNA, 519 bp, Arabidopsis thaliana columbia
gaagaaacctatcattcctcttgtgggagatttcttcttcttcaagaagaaaggttcttctgcctgaaatatctggacctctttacactacctcttccaccctgcacttttaactgatatacccaagatcatgtaccctgcaagtgtatatatatgtatatgtatgtatgcacatcaatattcgtaatatctatgtatgtatgtgttttcgtgtgagtgtgtttgtgtgtgagcgtattctttatttgtttgtctctttctctctttgtttggattttgagtccaaaccatcagcgtgtgttccccctctactgtaacaattacctgtcaactatcagattgtgaatatacaatgttactctactattagcactgattagatacacaatccaaagattaacttctatattcgtagacaaagataaagtgtgtgactatacatagttaggaagtcagtacgaaaaaggccaagtgagcatacctttctagagacaggtaactcgcaacaccgagcccgtg

SEQ ID NO: 44148 - DNA, 565 bp, Arabidopsis thaliana columbia
tagaggatatctgcaaataaaaaggatacttgaatcgagtaaagtccggaagactgctaatgatggagatcatggtagtgaatttttgaatacggctaagcgcggtgatgtagaaagagatggatgtgaggttatcaataatgaagacagtgaatggaaactcgatgaaagtgaagtccagaatctttgtaatgatggagataatggtagtgaaggtttcattaaggctaagagcagtgatgtagaaaaagataagagcgaacgtatcgataatgatgtgatatctccagcggttggaagtggtattaagcataccggtgcagataatgttgataaagtgacaagtgcaagtgctactggagaatcacttacttcggaacagcaaaatggtttacttgtaacaacagcatctccacattccctgcttaaagacttagccaagagtagcaaacctgaaaagaaaggaatatcaagaaaagtggcaagatcctcagaagtgacgacaatgtagtagatccatgaattactctgggacgaaagcaaaagtgcggaacacaaaaggaaa

SEQ ID NO: 44149 - DNA, 538 bp, Arabidopsis thaliana columbia
gaagaacatcaggggctttaaacgcaaaataacaaataaaaggataaaattaataatatctataaactttgaggtgttcaatgcaattaaaagccaatttcctccgcttcaaaatctcagtcgtgtgcgcacataaacctttaccaaaatcccagcaatcgatgattttccggcgattctccgggagatttctaactgcgatccccgactcttgtaaacttaaattcgaagctaaacggagtttccgatctgatgcggcgctcgaagccatagctaatgcattagaagagaaagtaccaaacttagtgttatacaattatccttccttctccggcgctttttcagctctcttcgctcatctctaccactatcgactccgtcttccttgtctcatcttacccttttcttccctcataacctttaggtacacttttcactctctgcagatttttcttaagaaatgtaaggttttgataattgggaatttgaaaaatcttgcagggttgaagatttgcgtttggaggggtttgagaggtgt

SEQ ID NO: 44150 - DNA, 523 bp, Arabidopsis thaliana columbia
ctttggttttttaattacattcattataaaacagttttttttggtgaatacaattttatatttatacaaaaaaattggctaaaaaatggcttgaaggacagagatctctgtcacaacgagcaatctaagtatgctttgatgattaagtaaacacatgattagtttttattttatgtacttaattagttttaccttttgtactaccatagttatttttggaatttgaagtactacactgttctgactttgattctcgaaacgtgtaatctgaatttgataccaacctagatgcaacgatatgtctgttggtgattaattggctcaaaacactatatacttaattctctttaccatcctaactttgaatcgaaactaaagctgatgtaatcacaaaatcggatgtaaccgaaaccgttgatgattagcaatattctaataagatcagtcagataaatcacgctataatactagtggacgatctttggaattggacgtcctgaagcatatatcgtcatatatatga

SEQ ID NO: 44151 - DNA, 495 bp, Arabidopsis thaliana columbia
tatttttatttgaatacttagagagaatattagtatattcatacttgtcttagtctaagaatttcaacgcatgttgtcattagtgaaaacaccaaaaattaggaaaatatggtttagagggattgacttttaattatttaataaatttgatgtcatttaaattagtttgacattaggtaaaactaacttatgagattatggcatatagcaaaattatatcttaacaatgtttcctttccaaaatattttttgaattattcatttttgttttgtttattatgttttgtttattatgttttgttatttgttagttattttaatatgagctaatatatagatttgatatgatatacatattattttgatacaacacttaatttttaataaaactccgtacttaaaaggtgatttgcattaataattaagtaagaagttttatattgactgattattaattgaatggttttaacattggactttcttacatgagggttt

SEQ ID NO: 44152 - DNA, 513 bp, Arabidopsis thaliana columbia
atctcagactatgaccggcggagactggattcacgaggctatgggtgatgattcattagtggcggaggtctgatctgtctcctccatgccgagccgtcacttcctgagacgaagagcggcgggcgtcggatctcaagctgaagtggagcgtgcgtcaccgaggaccaaggcggcgacgttaaggaagaagggagatcatgatacgcgtgctagtcccacgaccccactttcatggagcggcgcaacctcttttagcggcggtggaggcggtgctgctgctgccgttgatggatttgaggagtcaagtggcgttgtgaaactgtctgaggccgttagatctaaggttcgttcgataatttccctttggtttatatgttcaacagtttttgaaacttctgctttactctgttctgtgtgtttgacaactatacccctcgggatgcggcgttttgacggtgactagccaccgggttataacgaagcctagtcgtactttttacctgatatccattt

SEQ ID NO: 44153 - DNA, 332 bp, Arabidopsis thaliana columbia
cttgggtacttatagtaaaactcactctcctttcatttgcattagtcgtagatcattagcctcatgagactaacaaacaaattcttcgctgttaattaggcttgtagctacagatgacgagggtggtgatagtgtttgtcttgatgaacataaaaccagagggatctaattgattctttgttgtacattcctctctgtcatttcagttttcatgttaacacaagcactatttatagatcagaaattcaaatgtgatgcatgtaaaagagaaaataatttattttatttactggattttttttggtgttttatcaattacatgtttgttttgt

SEQ ID NO: 44154 - DNA, 598 bp, Arabidopsis thaliana columbia
gaaagaatctgatccctgtgtaaaccatagaaatgaacgtcagaggtctcaaaagcctaatatcatagatagttcaagcattgtaggggggacagttcggagccagacctttgataaggacttactaggacgcgttataatcttttctagccgtgattttttttcctcatacacttgcttccgagtatcatcagtctcatctactgtcatgttctcagttttcatgtctgtatataaaaagtccttcttgagaggtgcaataaacaatagtttgtcagtttccatgagctcttcatcatcatttggatggaaatttactttcccatctcttaaaatcccacagaccacaacctggaaggagaaatacatctcttaaaaggccgcagactaaaacggtaatgattcaaaaacatactcaaaacattgtcaatcctacctcctggaaccccagtcttaactgtctatacttcatcccagttagattggggaagctgcaaaggttaaatacattttctgcaacgagtagagacttggtactaatcagtccttgatacaaactctataagtcacatatgtatataatagtacttacttgagt

SEQ ID NO: 44155 - DNA, 594 bp, Arabidopsis thaliana columbia
agagagagctctttggatcaaatcagccgtctcttctgttaactaacagtggtgatgataataatggcataagtttggtgacacggagtgtgagtgtcacgggttcatccaaagagaaaggaacattaagcttcacttttagatttcttgtagagcaagttcctcgacaatttattataatcctcggcaatttattatagatttaggatgctacccgattgttcaaccggaagcaaatgttgggaccagaaatggttaaatgcagtcactgtatcaccagtcagatggataccaaaactattcaccaccgcaaatgcaaccgcaaccacaaaattggccatctcaactacaatcgctccactgatacctttggtcaagcttattatcaagagaagtggtgacatggatctcatcaatgagaaagagaaagactggggacgaaacagaggctttgctgatagaaagacttggagagtactagaggtgttgctgttgacgatcagaaagtataagagggcgagagatagctcattttggatcatgctttgatgttgtgagagtctttgtgaactttggcaacaatgtgttgagaga

SEQ ID NO: 44156 - DNA, 450 bp, Arabidopsis thaliana columbia
tgtaatccccgcaaaatgtgacagctaacaagctagacctcccacagctaaccccccaaatcacaagacaagagccatcagaccctggactgacctatgcaactcccaagacagccctcgtatccagcctgcgtgctgtactcagctcttacttgccaatcaacaccttgtgccaacttgccaagacaagttctgtttcagaagttaatggccttcaaattcaggtgatggctttacaagttttcaccatagcttgtgaatcccaactgctaaatctgatgagatggagacgagcagcggataagaagagtgccactcggctttgaacactcttttcttatgagctttcatcgagagagacgggctcggtgcattgtatcggatatcaaagatgtggatcacggggtctgcagaaccagatgagatgtgtaaacatctggagccaagact

SEQ ID NO: 44157 - DNA, 511 bp, Arabidopsis thaliana columbia
tggttctgttttcccttcacgggttacaaacactactctctttgcattctctctatcctcctccatttttaaacttctcgattcccaattccaaatctaccaaatcagactacgatacgattaatctctgtagatagatacgatcaagtatcaacacatacctcgaggatacaaaagcaccgatcgatcttaagaggcagatccaagaatcttgctttgggatgaatcgagagagagaacaacaagtgttttccgatctacagaaacctccaattcctctttagcttcggcgatgctccaaaatcgctccgatctatggcgtaatttctctgcttacactccactgttgatgatcatcgacggcaaactactctgtttcgggttcgacaaaaaaaaatgtctggtgggctgctgtccaaaaaaaaggatggtgggctataaaagagctaaaaaggcccaattgggactaaatgtcagcgcagaaagaacgtagtcaacaagtcaagaggag

SEQ ID NO: 44158 - DNA, 424 bp, Arabidopsis thaliana columbia
  unsure (1)..(424): unsure at all n locations
gaggctccctccctctttccacacactccaacccctctcacacacacatcccctcactttcccccggatcctcactttctcatcaatcatcgtttcacaatctccattttctcctgcaagactacgagatcgnaatggatgacgaagatggaggtcgtgagacaagagaagaaattcgtggtgtaaaggatggtttttttctggagttttggttggtaattttaatgggatttggaaaagaggttgtggttttgaaggtttatattttaaggaggagaagaagaatggagatgtggagttataatgtgcattagaggtgaataagatgggagatatgtgntttatggtggtgattatgagaattggtttatagatgattggagtgatgtttgagaaggtggtgatgtgtagaatatgagaagag

SEQ ID NO: 44159 - DNA, 588 bp, Arabidopsis thaliana columbia
tcgactctccgtgcttagctgcatagagagagtaaagagttgagagaggaacaagattttatttttctttgtggttataaaattctattcattttattgtagatcacgtgaattttattgatttgttttgtagtatactctatagttcgttaaagttataatattctctttgttacaatgtgcttttttgtttttttaagtctctcgtagttcgttccgttatattctccgagtcagtccaaaaatggccgcttctgttttaattttgttctagggttccacagtcaaactcaaaaccaaacccaatggagcaataaccttttttttagttttataatcgaaatcaaaccggaattttgcatgtaatttgattggtgtcgttactttaaatctttaatccacaaaacaaaatttactcgattttagtattaaccgaaccaattatagtttattgaaatttaattttaattctatcaaattgcatatgtattcttgagttattttttataaaaatactgaaaccaactaaaataatagagtttggcggaactacggtaccaaatttgattgtatttggagtacattttt

SEQ ID NO: 44160 - DNA, 443 bp, Arabidopsis thaliana columbia
ggataccccacatagagactcaacatagaaagggaccaaccgtatcagttagcaggtctacaaaaaaaactatgctcttacatacaatgaacatgccaattaaaccaattagagatgtcatacaacatatatttttgtccacagagaaaagatcaaaacctaacaatagaaaaggactttaaataaatgagacaacgtaattgttggaataatttacatcataggtggtaataatgctgtgataacatatatcactacgaatataatgtatgataaactaagctaatacaaccatttaataactacatcgtgtagagaagctaaccaagacaatgatcattaaactaaacattaagtttttttggggttaaatttgccaaataccctcaaagtctagtctccaaacttttagctttatcagtatacgacagtacaaactaatt

SEQ ID NO: 44161 - DNA, 812 bp, Arabidopsis thaliana columbia
acactcactgcaaagttagtgggaaagtcgcgcgtcatacgagggagcaacaaagtgtgggcttttcttttacagtctcagaaactaatgcatgctcacatttaaaaaaaaaaaaaaaaaaaacaattcttgtgttaaatcaagagtggattaattatgagataatctaatgtacattactgttatatgattataacttgacagaccaaataatcatcttaatcagacctgataaaagaaaagagattaatttcaacagtgagaaattaaagatagaaagtacatattattggtgtaaaagttgttgatttaatttaaggcagatgtattaagttaaatatgtaaatgtagaggctgcgggaagggtgaccagctggtctgacagggtacgccggttgtcgggaggaagaacgccgctattggcagagtcacgcggggtaaccggctggcggctgtagcggtcacagagtgtattaatatggtcgtacaatacttgtagagtgctttttcctgtgacggtcccgtttattccccacaccctcctcgattctttcacttaaaagtgggggaaaaaggtaacctgactcttagaaaatttgaatacaattgtgggtcactcatctcatgtagtcatgtctatacaattataaatacctctcaacaaacccaaaatcgaattataagccttctctagctagaatttgaagcaagacctgttcacattagtaaaaacaaatatatagaaagaggaaagattgaagcggaaaacgggacaagacgggtgtgcagttgtggatgttgggggtgggtgt

SEQ ID NO: 44162 - DNA, 565 bp, Arabidopsis thaliana columbia
tgaagcatacattttttctcgacaaccgacttatctaaatgaaaaaagaaaagaactaaggttagcataggtaacaaaaatagcatagccatgaatcaaaaggaaaatacgaacacaacagatcaaatatgtcttctgaggttcttgaggaagcgattctaacagatggctgtccgtggttgatgaaaacacccacaaaaccaactttcagatgccagctatctaaatattagtaacacacaatttgtgtacctagctcaaaactgctcaatttaatcttattcccagcaactagtctacaacaacatccacagttcaacacatgccactcgaactcaaagataactcaagtcgcaactcgcaagtctctgttactgactatgtaagcttagggccaacgtatgggaggtaggctactctaaacatacacaactcactggtcatagtttccaaatcttaacatggaaaagaaacgaccacaacataaacataatctaaacgatggacagaagcataccattttgttggcaggaggctcaaacgatcagaattgcaaagatgcatg

SEQ ID NO: 44163 - DNA, 479 bp, Arabidopsis thaliana columbia
cgttgatcagaaaatccaacaaatataccggaaaacactcaccgttaagctacaaaaatgcaaacctgtacggacgttgcttccgataaaacaaaagcagctcaacgttactaaaaatcaaacagaaacgacgatttaaagaccatggaagagaggagaagctataccggaagctgaatcgtcgatcggaagagaatccgtacaatgcagaacaaacgaagacctatagatgcaatgaacgacgtgaaaagtgaaaacgacaaggaggaagagaaaccgtttcgtcgaacgattttaggtcaccggagctgtttcgcggcaacgatcgagggtttcgagaggagaaaacagaccggaacgggtttttgaaggtttttgcgaaaataagaaaaagtgtgacttgaagatgctgacgatggatgctgcttcatggaattttctggacttagcttaattccgaattaactactgtaattagt

SEQ ID NO: 44164 - DNA, 490 bp, Arabidopsis thaliana columbia
gttacaaggagaaacctacctgcccacaatgtaagcttccatttgattttctcaatgtccaccgcgctctcgatggaaggtaaaatttccatccttgtttacatttggctccattttaaactccatttacttgactggcggtgtgcctttattgctttagtgtactcttggcttttacatcattttctgtacttcttcctttgtaactaattttgtctgttatatatcattgcagcgttgaagatttcatgttcgaggagagtgtatgcctcctcctgagggcatcatggttccagccactggaagcagtggagcgggtttcagacaatgacaatttcaactatgatttcgacattccacctgagtatgaggaggaggatgaggacgacgatgaccttgacgagttttatatgcaaggttcaagtcttcgattaggaaaccggagtggtggtgacaatggattgtgagggcaggctgcaaagaagcaagg

SEQ ID NO: 44165 - DNA, 514 bp, Arabidopsis thaliana columbia
ttcaaatacaatatatatatgtatatatatatacactattaaccaagaactttaatgataagttaattgtttctataaatttgattggtaaatatcgttttatatcaaagtaattatgataaagaaatcaaatttgtttatactcctaatagttaatctcctaatttattcaaacggatgattattctgccgattataattagaaatattcatctcacaaattaactccaacgaatagtgtgtgtaaatcaaaagacatgcttattgtatatgtatgtgcctatccttttttcttgccaaaatgagatctctttgagatttggttttgatttttatgttgaaaacaagatgtataaaaactttaatcactaataaaattagtaaagttaagtaaaggtaaatccaacatgtgagatcgtgtggacacatgcatggcatatactactaattttaggcaccctggatttggtctcacgaaattcagaccaaatgatattggatctatttcaaaaaa

SEQ ID NO: 44166 - DNA, 565 bp, Arabidopsis thaliana columbia
atgctataattcacaataacacatgaaggaaactgcactcaagtttcttaataaacctcgctgattggacgatattgatctgggagataacaagcaagaacagcaacagctgcttctcggtaagccaatctcaacttcagttcctctggaacttcagtactatcttcttgtccagtctcaaatgtccctttttgctgtaaggagtggaatcagaatttgctaaagcagcacctaagcatggataaactggatatcaaacactagttacccgcttaagcgcctcaaggagttcttctcttccaatgtaatccaaatcttttctagctgtcaagattccagcttcatttctgtaaacaattaaccaaagatcagtgttttctgtttttttccctctgcatctaaatacatagttgaagctgtagcattgtatattacagaacgttttgcagttctgctccggtaaaatcttccgtgttctcagctacttcttgcagcaactcctccttctcatcctcagatcgaaagaatttatttctagcatgtacctttagttacaaacagaact

SEQ ID NO: 44167 - DNA, 531 bp, Arabidopsis thaliana columbia
tattaatcatattttcaaaatttatttatttatttcttaagtatgttaacaatttaacgataaagtcatatcatatctacgacataattaaataaaaattggaactgcaactaatacaaaacttaccaaaataataagaaaatgtgcatgcatgattgcatgtgatgtgtgtatataaaacactatttactggtgcgttattgtgaatccatgtcctaacttttatattttgtttgtataaatttttcacatttaattcgtaaatctccggaaatcttattatttgggtttcaataaaattttcacttactttttacatttgactttcatatatctcattgctttccaatcaaaatttgtcacatgttttcagttatttgacgaagaaagaattgatcgagtataaccctaacccaaattgttattcatttaactcattctaactggtttaaatgttaaataaattatgggatgaattgtttggaataatccatgttcatcaaatttaaattaattgaccaatttatacat

SEQ ID NO: 44168 - DNA, 498 bp, Arabidopsis thaliana columbia
atttgtttggtgaccataaaaacaaacagactcgatttagtaaaatatattttcatatgaggaatgcaatctaatatatttcatataaaaatggtcaacaattttacgaatatcaaacattcaattcttatttctgtgttagggatgaaattatcaaatcgatttagttattttgaatagaatccgacccgaagcgagtggatcaagtaaaaaacacgtgtctgctttagatgagagaatcaaagctgagctgtataaattgcttgtctctctcattgccacttctctccaaaccctaaagagaccgccaaaaaaaaaacactctctcttctctctctgtctctatctctcgatatcgacggaaatggcgtcgggttgcgttaaaaatgttggtactcgccgagtcacttatggacgagctccaaaatgtcattgacccgtgaatctcaaccgttggcccagcgttagaaaacgaagatcctgttgacgactttgagt

SEQ ID NO: 44169 - DNA, 439 bp, Arabidopsis thaliana columbia
cagctactaaaaaattctgaatggatcttcttcctaagtaaaaaaacaaaatagctaaaagagagataaaaataaagcaagccaaataacaaaagaacatgattttatttctgtgtatttagaatatatgcagtagatgtattaaatgaataaaaacctggtctatatttagtgattttgtggctgtgtctcatcttgggtcttggctttactccttagcatctcagtgaagttgcctctcatgatacgtctgaatctcgtgtcttcacttgctgcagccacaacctttggtgactcgggtccctgacctgtcggtgatccaggtgccgtgctttccgttgcttctgtcttccccaacaagcctccttctccaaacaagctcgtgacggatgatgcaatcccaagtgagccccatagctttactacttgcttcaaatgt

SEQ ID NO: 44170 - DNA, 553 bp, Arabidopsis thaliana columbia
ttttgtaattcctatattatattcaagatatcaaaaataatacagaatttcaaaatttggaaaaagtgaattcgttcagaacttaagatttttaggagactaatcataatgaatgctctttagattcagcacatgatagtacaacagaggtcgagccaccccacgtggaacataatgacaaaatccttcctatttcattttgtttttgcttttctcctttttaacttattacattacaagaaaatgtgtactatacagtagtattttcttacattatttcagaacccaagtacattatattaaatttacttaacgattctaatttctgatatcacgtaaatatgcagtttcaaaacatttagactttctttgtttttgctgttgccgccatcggaaagaaaagcagtcatgatttgggcctcacatgcccattttggaatggttcagaatccaacccatctccaactctctactattcacgaatttttttcatgacattaataacaacatcgactaaacgttggttaaccttgacaccggttgattgtaattt

SEQ ID NO: 44171 - DNA, 396 bp, Arabidopsis thaliana columbia
gagaagttaatagaaagcctgagactccgggagagagagagagagaatgcacaaaaggcgaaattagccaaaatagaagagaatgtgtgtgtgcctactactgtagtcaaaaataaaagacagaaacagatagaaagtaaactttgttttcactgtctgcgtcaggatgtctaggaacgttataataattacccgattttcttggcaaagtaccaaattcgaatttaattcagcggaaaacgactgtaacaataaatttcggacaataacattatttacattcttttcttgcttacatcatcttagattttaatcatcaaatttacaaactttggttcgaactttgttatttttgacacagatactcacagtttcatctgtgctttacgttagata

SEQ ID NO: 44172 - DNA, 557 bp, Arabidopsis thaliana columbia
ttctgtgtcttttgtgattctagatctttactttgtgtcttttgtgattttctgtaaattgattagaattactcataagagtcaaaatataaatgatgttgaattgtcaatactattgatggaagcataagaatcaaaatatatactcaatagtcaatggaagcacaccgtgagctaacatgtttgtcaaatcaattgttatatgtttgtcaaatagaggtttgctttcaatcggctgaaggtgttaagtctgtgaatgtctgctatgttaaataagttcgtgaaagtctgctatttaaggctgtgaatgcctgttagtttatgtttggttttactcattcgtttaagtttgaacttattagtggttgtattgaatttgtgcttgaattgaatcttgttgcagatggcgtcttgtgatgaaccaattcctgagaatgatgaaatgacagaagaagagattgaaacaccacttctggaaaatcaaacaagaggaaagataatggaggggtaggtggaagtggttctaagtcaagcaagaagggtaggtcttgggtttg

SEQ ID NO: 44173 - DNA, 553 bp, Arabidopsis thaliana columbia
atggtagtattttctttgcaacaactatgtactcagtatacccccaatgcgttaatataaatcaggaaagtggttacaaccggttatatcaaactttagatcccaacaggatcgtttacttgagtaactaacctatatgcctacaatatgtaagacttcttccctataatttttatgcattacgaaattgttttagagcttcgcaatcaagaaataaaacagaaaagaacttaccttccaaccttcaatagtcccttttcggacatttaccattagctcccatgaatctttctggctgatcttaatgaaatctccaacagtttcacaagtgatactagtgtctgtcttttttatcgcctagagtaggaggttacttacaattgtcaggaattcatattttctagcagaacgacgagagatctttccaaaagaaatatgacttgtagaggatgtgggaaatacctgcggtattatttgtccctttgctggtaaaggaatctgcgttgaagacaaaagatgaccggcttcaagcgaacgagtaagatttaaaagc

SEQ ID NO: 44174 - DNA, 550 bp, Arabidopsis thaliana columbia
agaatctatgaacttttctggaaaaaatttgcttactgttactagaaatcgttctgttttatctccaattcagggtttatactttcttcccctaaataaacaagtgggttttgtttgtgtctctgttttgtttcttttgagtgaaccaataagattagaaaagtgtttaaggattttgaattctcatgttcctctttcaaagtttatacctttgtagtactgttttggttctatgagtgatccagttagatcagagtctttagattttgggttctcgtgttcttctttcaaagtttatatacctttgtggtccttgtctgaaaagggttcttgcagatggtaatagaaaaaggagttatcatagtcttctttgactctgttgtttgaatacttggtttaagctatgaaactgagatagttatttttggtttgtaaggggatcttgggacagagtacttagtgaggccagttggtagagctgaagatgaggaggatgcaagtgattttgagcaggaagagaatggtgtggaagaggatatagacgaaggag

SEQ ID NO: 44175 - DNA, 469 bp, Arabidopsis thaliana columbia
cggtcattgttattaaattacagtttgtgcacatttatttgacaatacaatcacgtgcattacaagttgtcaaatataaattgggggttgagctcgagggatggtggtaaacactttcacttatctcagatattattgtattcttattttttggagaaattcctttgcaatcatctacgagattatctccattccttttgctgtctttttctcaaagaagctgctataattctcaatcctacattacaattcgattcaagataaacctaaaaaataatcatcatattatctgagtgtgctagaaattacacatatattttatctagctaatttatcccaattgagatttttaaaataaaataatgagattttggaagaaggttttatctcagggttataacattttaacattggcgtttgaaactatcgaaaatttgaattttttttacagtagttcttgatgtagcga

SEQ ID NO: 44176 - DNA, 579 bp, Arabidopsis thaliana columbia
tatattccggtttgatcaaaagatattttttttgaaaccgatcgattggcaattatctagacactgaggcgatgaagcttcggctttcacattactcgaggagggactagtcagtgagacagttatggggactgtgtatgaccgcttgtgacggtagtcttagagtgggaccaaaaagacacgcataagaaaacaacaaacactgaatttttgtattcgttggatgaataaatccccaatatgtcggcaacaatcatgcaacaccaaatctttttctctgttttcaattattttcttgacgtgatataaaaacaaagtattgatagtagtaaataaagaaatggtttttgacaggttggatatttgaattttcaaaaccatttttctgatttttttcataaaacaaatcgtctagtgtgtataagaaaacagtaacatactaaaaatagactaaaagatctccgtatctttctttctaatcatgtggaactaaaaaatacgtgttccaggccattagatctgaacctacgtggtaatgagtcatatggacctatgcatgaaaacgtgacgaaggaaaca

SEQ ID NO: 44177 - DNA, 1162 bp, Arabidopsis thaliana columbia
caggtgttttcaaaaaaagtcggaattgtggagctgttaaatcgttaatggctttttgttttcttcgtcttcattggtacaattaaggaattagctaattatattagcgcgctaaagaaagcatcatttagagcagctaatgattttttttttgtgtagagagactctctcttgttgctcgtaaatcagacaattgtccaagaatattaaaaaaaaaataaaaaaaaatggatcagcttctgtaatttatctacatttggtttcagcttaattaaaaggttaccaaatgaagccaatttttttaataaccaaattgcaaaatttcaaagatttctcctcattaataatatatgccataaatgtgtctcaattttattatccacatatttttttcaaaaaagaataatgactttgtctaggccatatctttcttattccaaaaaataattatgcacattatctaataataatgttttaatccaaaatcagtctaaagttgattaatcacatcattaaacggtcacctatgatgaacacacattatttcgatcttaattaatggtacatcacatcagtaccacacaataaattatatgattttgcaagcaactattttatacaagcatttatttacatttttcgcgtttttaaggtatggttaacgaatttttagttcactattgataagtgaagcagagcacatgaaggcatgtgcatttgctttttcttactaacatacataaagtggttcaatgaaaatatcgtctaaagattagtcgtcgttaccaatctagttaatcatctagatggattaattaataaataaaccttatatttatatttgaaacgaccaaaatttgcgttacgcaacctttttagcgtttcaaattattgaacttctaatgatagcccaattttacaacgttcactagtttggaaggccgtacattgccaaaaaaaaagaattatgttgataagaaagaaaaaaattaatcgtgaggctgacaaatggttttgatctaaaatgtttattatttcggtggagatatacataaattagacacagaaataaataagagggccatgcacatataatgaggccatggacaaaatcatgcagccatagttattatgtatgagacagcacatgatgtgctatgag

SEQ ID NO: 44178 - DNA, 589 bp, Arabidopsis thaliana columbia
taaccatgatttgggaatggtaatattaggcaagatcccaagagaatggcgactgcactgcaaactgaaaacgaggaatcatgtactacttataacatgctcaaggtaggattttaaacttttccccctctttctatttgctcaaggtaacatactaacatatcaacacttgtacaatttcaggtctctaggaatctgttcagatggacaaaagaggttagctatgcagactattacgagcgcgccttgaccaacggcgtgttgggaattcaaagaggaacccagcctggactgatgatctacatgctcccattaggtaaaggtgtttctaaggctgtgacttatcacggttggggaacaccttatgattccttctggtgttgctatggcactggtaaactcttaaccacaattcatctggttttctacatttttgtaagatacaaaagtaagataaattttgagggtctttttttgtttctgccacaggaattgaatccttctcaaaactgggagatccatatattttcaagaagatggtgaactccagctctttatgtcccgaatatatacaaggcacttgattgga

SEQ ID NO: 44179 - DNA, 439 bp, Arabidopsis thaliana columbia
tgattttttttttttccatttttttcgtcaactaaggattctttatcttcataactaaccgtgacctcaaagccactaacatactcgttgatgctaataattaagacaacaaaactgagactttgattagtggggcatatataaattgtaaatggtactttcttacatgtataaccatttatttattaggggtcctgtctttttgttcttatcaacggctagtgacttttaaaattgtttttttcatgatagttttagttattttgtgtgcttaatttagttatagaactattataaaaactaatatatataattgttattgaccaagttatgtaagcatgtggtatgctggctgggttgtataccgctggacattgttaggcctgtcggtggtggtgtggtgttggtggtgtgtggtgtgggtgtggtggtgtgtggt

SEQ ID NO: 44180 - DNA, 607 bp, Arabidopsis thaliana columbia
cctctttagattcaaaaatatggtataattttgatgtggcgatcgaagaagagcagaaacatcacgataacatctaatacttacagcacctcgtcaagtatacggaattacggattctgcaagatatcacgagtcacgactaccgttttgagaccgggacggaccggaccattaagccttacatggattccgaacttagttttaactggattaactgttaggctttgggctttgaattttagaactttgaaagttgggcttttgagtagatataaaaacactgcagatatttttttccaaagattaagagaaagactaaaacgcacaagtttgggtcgactaaaaaaacaaaagataaattatttctgttgagtaatttctaaaaattttggtgttcaaaacaaaaaaaactaataatctattaagtgtttttttttttctcttggaacgaatcattgataatgaactaaatacatagaatccaaaattccaaatggatcaatttagctaacatggaatggaatagagaaaaacagattacgaatatcttgagattgacagcttccaaagagatcaaaaataaaactctatatatgtaatattaatt

SEQ ID NO: 44181 - DNA, 825 bp, Arabidopsis thaliana columbia
tcctcctatccttcttgatttgcagccatactagcatgatctgaaacaaattgttaagcaagaaacagaagttcaatttcctaaaagtaatctacacaatcaacagattcctcctagtatatcaaattcaaagatagtctcgagcaaacgaattcaaaaaaaaaacgaaagagtcacaaaaccttgagtagctcccatttctttttcgacttttgcttgcatctctcgtagcgcagcagcttcttcctccatctcctttaatctcctcttcatctcagcaagctcctgattccatgaaatcaaaacaccaaaaatcaaacagatgtatacacacgatatacaacaaaatcaaaatcgaacgaagcagaagtagaccgtaacggcgtcctcatcggctgcagacatatcgatatccggatcgggaacatccgtatcgccgacttcagggatttctccaccgtaaacctcgtgctcttcttcctccatttttgtttccactcttcggagctcaagcaaacgaataaagcttcgctttggtgaatgaaaacgacttgcacacttttcctaccgatccagataggtcgattgcaaacaacgacgtcgtctcgtattgggcctcggttacaaacttacaagagcccattatcataacactctaactgaatctgaaggttttgatttttcttcaaaattcaattcggcccatcataggccccaaacattatggaagaaacaggcttgtgaataatttatcaaattatatcatggatcaaattaaatttatggaccaaattaagaggtctgtgaaataatactgcataatat

SEQ ID NO: 44182 - DNA, 559 bp, Arabidopsis thaliana columbia
aacaaattccagggggacagcttcaacacttgtgtcactaacagtatctgcaagtgatcctgagtcgtctgaacctacatcgtcattagctgtgtcatcgcacatagagtcaatagctgtgtcatcttccacattatcaccatcatcgctctcagccatagagttactaactgtgtcatcggccatagagtcaatagcagtgtcattttccacagcatccccatcatcactctcagccacagagtcactagctgggtcatctgccatagagtcaatagctgtgtcatcttccacagcatcactatcatccctctcagccacagagtcactagctgtgtcatctgccatagattcacaagctgtgtaatattccacagcatcactatcatccctctctatgtcatctgccattgtgtcactatcatccctctttatgtcatctgatacaggtaaatcctctgccatgattgtagacgttacacgctttcttttcgtcttcttcttcaaattttctcggctaggaagccagcaagatcagtgttgcgtggtgcaggttgta

SEQ ID NO: 44183 - DNA, 564 bp, Arabidopsis thaliana columbia
ctctttactggaaaaagtagaattagcagtgtgtttagcttggttgtcttcctccattaccgagccaaaataagtcgtcatatcagggattctaccatcggctccaaagaaagtagaagaggtttctttttcaccatctggattacttgcagtaaagaagaaagatgtttgatcatgttgttcagttctactttcaaaaccaggtctgaaattattgtcacagtggagatttgaaggaccagcttcctcagtcagaccagcttttccaccatctggatttcttgcagcaaagaagaaagacgtttgatcatgttgttcagttctcctttcaaaaccaggctcgaaattagtgtcacagtggagattcgaaggaccagcctcctcactcaaaccagctttacctgctttcttcatttttctcaagagagctgcttgttccactgctcgcggacatctctatgagacccttctaaaatctcacaatcagaacagtcactctcggaaaagtcactataagtatcagagcctaaaccaaatcgaataccatgagagggcattgtagag

SEQ ID NO: 44184 - DNA, 523 bp, Arabidopsis thaliana columbia
ctctagtaacggacgataattacgtgcttaagcataatatatggttatgttgataaactaattgcctcataaattaattaaaaaatgaatgttccaacactactctgtcctgatcatggcatttcatcgagttagtctcatcgactagtagcaatattagtaatttaatatcattgtgtgaaaaacagaaacatggtacgttgaatttttcaaaagaagaaaaagaaatttgattgcagagttcatgcaatacatactgcaacgcaagcagccagctactctttcaagaatatctggtatctttttttttctattaatttcctatatgaaaaaactaatagttttgttttctgcattcacactttttaaagttttgaatagctaaatttgctaagtcatcagcacacagatttgccttccctagagagacaggtaaagcaagtttcctgcatttagtttcttctttgtgactggtctaacacgttactcattgaattaacatgtaagccatttgactttttgc

SEQ ID NO: 44185 - DNA, 515 bp, Arabidopsis thaliana columbia
tagagacaataattcaggagtcacttcctaggtccgttgaagttaacccttacgattataggctgagaaacgacgagatatttccccggggcactgtagctcgggctaatgatgtgattcctcatgatactttgcatcttaggcgtatcgaggcggttcccccagggtgctttacgcatgcatattgaggcagaccggcaagatgttttacgcaggcatgttgaggcggaccggcaagatgctttacgcaggcgtattgatgtagttcctcaagaaacgttatacatgccttctgatgttctcaggggagattgttttcgacagcatagagagagggatgattctcatgattccttgcatagacctttcgaaatggttccacgtgatgctatgggcatgccttttgagtcgtttcacgtgatgcttacggaaggcctattgaaacaatgacacaagaaactcttcgtgggcaaagtgcagattatcttgcacatcgttattcgactttagacaca

SEQ ID NO: 44186 - DNA, 379 bp, Arabidopsis thaliana columbia
tcaatgacactataagaatctgttaccgatcgatcaaggcaaaaggatcaatctttcttaatcagtgaaattctaagaactagcaaaccccaaagattcacagattcatcactactactagttcaaaagagcaacaaaacataaatccccaaatgcttcaaattcagaggtacacaggggagagcttacgttactattggaccagccagagtcctcaacatcaggagcataagatgcaggaacacgacctggatctacaagaacgcaaattgagagcgagaagagacagagagacgccaataagctgaagagtaaggcgtttaatttcgcagctgagctttggtaacgaaccgatcatcgatgaatacaacagtgtgac

SEQ ID NO: 44187 - DNA, 534 bp, Arabidopsis thaliana columbia
  unsure (1)..(534): unsure at all n locations
atccctaaaattaaaactaaaattagaaaacaaaaaaagttaagaaaagaaaatctctacaaaccaaaaatgacatataattctattaagaaaaattcttggattcatcctctctttaataactaatcaaaatacataatatgacatgtcacactttatttaaaaataaattaaaattaaaatcagaaaacaaacaaatataaaaataaaatctgtatacttttaataaaggaaggttaaatatcaatgtgtgcttataaataataacttgggtttagattttataattacacagaattatatgtccgtttgtatttataaatgagaattagggtttagattttataatttaaacaaaatcatatgtcaggttgagtttataaaaaagtggttagagtttaaattttagaattaaataaaattatatatcggtttaaactgtagataccatactagataacaactatttttgccaaacctctaattcgaaccgaaaaccaaacacaatcaacctggttntagagaataaacgta

SEQ ID NO: 44188 - DNA, 497 bp, Arabidopsis thaliana columbia
cacccatatcttagatatttcacttaaattcttactcaacttcaaatataagacattgttatctctaataaaaacatcatgacatgcatacgaagatgttcaaacaaattgagatagtgtcgacatgatggctgcaatgtttgtaaaaccctaaagtttttaattgaattaataaagcaaaagcttaactatcaaaattaaaaatgtcgaagattcgtgtttactctagcaatgacaaccacattatcaatttcagacaatagttatttagaactaaaaaataaaaaaaatggacataaaatgacttacaacgaccttcctatggattaaatagttaaacaagtctatgataataaaaaagaaataccttcggaaaataaaatgttatataaaaaggagccaatgcacaattgtggcgacattatgaagaagataggctaaacaattataacaaactacagagtttcgactataaatagatcataacacatatgcat

SEQ ID NO: 44189 - DNA, 401 bp, Arabidopsis thaliana columbia
tgtaagcaatggatattgcagcagcatcaacggggaagaagctgtttcagtgaagaggctatgtgatcatgagatggttgagctaaatggagtcactacagtgctaagaaacgggacacaagtgagaaacataagcaaagaaagatgtgaagagttgtgtaagaaagattgtgagtgtggagctgcgagttactctgtttctgaagagagttgtgtcatgtatgggatagtgatgggtgttaaacagattgagagagttagtggattgagttatatggtgaagattcctaaaggagtgagattgagtgatgagaaatctaatgtgagaaaatgggtggtgggattagttggaggtattgatggttttgtgattttgttgcttatttctggatttgcttttt

SEQ ID NO: 44190 - DNA, 617 bp, Arabidopsis thaliana columbia
tacttgagttgttgcattattggttgacgatcatactttactaacttactttcctcatgtaaataactgacatttctttctgtcttttgagttccggtgtgattgggttaagtctaaaccattgtgtatgtcaaaataggtgatgagaagcataaaggacaacatcacagaggaagtgctactgcaggagataagggagatcatccgtttgcctatgtatgcggatcgtattcaaatggatagcaaagctgcgcgccgcagatgaaacgtctgtttgtttctctcaatatacccaagaagctgagtcaagaaaaagacatgtctgggttggcagtaatgcttttgcttctcttctttgcaaatcccggggtgcttctatactaacattgtacgtaagaaggaaaaaaaaagaacgctgcatttctcgaatgtgtaagaatcccggtttcaaggaggttttagggtgggtttattatgaatcaaaattccgtttgggggtatgtgatgatggttttagcttgataagatgtgttactcttctaagtgatcatatgttagatgaaggtgttgtaatatactacaatagacttaggatgtgtaactttagtatagtacat

SEQ ID NO: 44191 - DNA, 520 bp, Arabidopsis thaliana columbia
tttggtttttggatccggtttcattctcgaattcgggcatttctctgtttttggttctctttggattgaagaagtctttaaccgggatcttcggtttttgttgctttcgttttatctttgttgaagattgaagattgaaatggagttgcttgttgattgtgttaatcaaagtttttaacttttgtttccatcgacacgactctgatatgtacttatatagagctctgatggggtttcattatgaatttcaaattcagattgaaacattgaaactttgttatgaacattttttgtttttcatttgctcaattcctaaaaagtaggattctttctagctttttggtttggtaaatttggcatactctgcctttatttgggagacgtggaggaatctcttctttttaaatgtgaattcaatataaaagtttagatttttttttatataaaggctttatgattgtagactcgtcttcttccataaaaggctttctttttgataggaaaaagggatttttgtttg

SEQ ID NO: 44192 - DNA, 530 bp, Arabidopsis thaliana columbia
aagcagaaaacatagataaatgtgtgctcgtttgctcgagttcgtagatacggggacttgcaacaagcacaaatcattttgttgtagaaacaaatcatgagcaatgtgcaatgagcttcttaaactatgagatttctttaaaattgaatttgtccatttatatgtttttaaatattatatgtttagtttttaaaattaatatatcaaatttttctaacaagaacaatacttagagaggaagtcatcgcagctttttttcccggtaacaacgacttcttcagcatttgttgaccggctatctgaccaaaatcctttgactttctcagcatagatgtctgattttctgcacgatgaggttttctatttacggtggtagtcggctagcttatggcatatgttggcttctatagcggcggttggctagtttaggtctagagtatcaccgcccatctccggtgtctcattgatcttttggccggattgctttctagtttagaataatgttttctttgcgttgttttatattgtgt

SEQ ID NO: 44193 - DNA, 479 bp, Arabidopsis thaliana columbia
acctcatttatgacatagttgatcacaaatattagctttagtttttataaaaaaaatcttttagcagaagctacttgagttggaatcaacaattatattcgataagtcttcacaagtttgtataacaatcttccatgcttttaagaaagtttagcccttccactaatcttttgaagttacctggccaattctccgtgacgccgcatttgatggagacgaagactaaacgtgggccgttgcagtataagactttgaccatcaaaggtggagatcatactataacatttcgaatcttttttcacgaatgaaaattcttggatcaacaattgttcttgatcgttttaacattgtccatggaccacagcccacatatgctaatgtaatccaaagagggcctctagatacatagagctacaattgctggtcggtttgaaagtaaaccactaaattttttgtttactctttagaggtcaagtgtg

SEQ ID NO: 44194 - DNA, 601 bp, Arabidopsis thaliana columbia
  unsure (1)..(601): unsure at all n locations
caagaaatggatatgggtagagccaaaacctaatctaatctacctaaagaaacatgaacaactctataaacaatcgcagcgattctaatcattaagaggctaaagactaattcctttaaatggacgcgagaatattccaagatcggaaaaatgtaaaaaagaaataacctttttagaacggagtggctatcgacggtcttagtcggaggagcagattgctttgatccggtggctgccggtgtagtcgccgccggagtattccctgtgtacccattaaccgtcgccatcctttttcgcctcttctaattgaacaaagcaacaatcgtagtcgaaatttctgaaattgaaacgcttttttctcgagaagaatcagattcaagaatgatcgaaactgaagaagaaggagaagagagatagagatagagatagagagagagttcttcttctcttctttgagagagagagacgtgggtctgggttataaaacgtgtacgacacaagaaacgtcgtcgtttcanaagcaataaaaaggaattatcctaaagcattttccgaacgttatcacttaggttatagcggctattttgatgcatttgaattg

SEQ ID NO: 44195 - DNA, 541 bp, Arabidopsis thaliana columbia
tagattgtttcttttttctgatataggagaatgtgagtaaaagaactaccgaacttgggaacaataacctttacaagacaggtgacttcctaaatgttatgtttgttttcatggctatggctttagttgatctttgccatttatcttaactttgttttaaatcatattttaggtcagaaattcatcaaaaacaaaaccttgagccttggatcaacggctggtggaacaaggtaccttcgtgctaatctcatgcataatagattatccgcttccagactagtttgaagaattttccaagaaaaaatagatatcttgtttatgccctacattacctatcaatatgtcaaagctctcatcaagtaacctgttgttcattcaccatagcgaaaacattattaatctaccagccattttctttagtatctgctgagaatgatttacatcattcattgattaacttccttgattgatttgtgcttgcagaaagtccttaccaactttaaagagaacaagcctcacagataagagcttaaaaaggttg

SEQ ID NO: 44196 - DNA, 290 bp, Arabidopsis thaliana columbia
gcggaacattataaatacatgcttcttatagactatatgatcatggatttcgaagaaacattatagaaaaaaacacttgcaacacatgcgatacggatacgtgcgcatacataccaatacactatgattcatcctagacatgtcagtgacataggcgcgtatgtgcaaacgcgcttgtactgtgggagaagggtcagaagagatgagtagctatcatgcggaatatgcgcgacggtggtgggtacggagcacgtgtgccatcgtgcatgtcagctgtccttgtcgggaac

SEQ ID NO: 44197 - DNA, 510 bp, Arabidopsis thaliana columbia
actagcgtcaaacttaaaaaaaaaacaaatattgcttattacattgatattcgtccaccaatatttctgaaatttttttattgagttggcatatttacctaatacctgaaaaaagcaaaagcaagagatgtggaggtggttaagtggttctgaggtaacttaagtataactaaagaagaagacgacaagttaaccaactcattaaccaaataattttcctccatctaaaagtatgaaaacacgaaaatgtatatggcatatgtaatataggttgatatctataattttctggttttattaatttgaaacaatatcacaaaattgttgatatctaatcatccaaattcaaacttgtaaactaaaagaaagttgccaaaaaaataagtaagaagagttgaaaagaaaagacgaaaaaaaacacagaggtatccaataagacgagtgccttgaaagtacaaacaatcgaagtttaataggaaataataggggacaagtggacaactaatattg

SEQ ID NO: 44198 - DNA, 530 bp, Arabidopsis thaliana columbia
atttggtttatattggcagtgataagagattacttgttcatgatactaaggtacatatatgtaaggatttaaaagttttctaacaagaatgatatgctgagtttatttaagatggttaagataaattgtttgctgagtcgtttatttaagatggttaagctggaactagtatgagttttgaccaaagaaaaagaaaattctttagcaatgtctttgttatgcaatgtctttgaaatacactgttgtctgatttgtgttggtttcttatgataaaagaagaagtttgtgttgatatttacattttttcttgttttttacagtctcttacttgctgcttcctctaaggctatctcttgacaagattaacaacaatgacgtaagttatttttttctgatgttatagaaatttatgattgaatatttggatgtttttgcatgaatttagaactggtcagatgaagagtgtcgctattatcttcaactttgtactgccgagaaaaaaaaggggaatagaataagacatgattgaa

SEQ ID NO: 44199 - DNA, 447 bp, Arabidopsis thaliana columbia
aattcaaagagccttgttacttttcaagaaaatcattactaaaccaagtaatgataaagacagaatatataaaaagcaatagtaatcaatacatatatgggttctatgggatttctgagatgaaatttaatataagtatatacaaatcatataatgcagggttcattgtatatatttcgatctaaccaatcaaattaagtaaacatatacttgtaaacttacgctctgaaatcaaggaaccaaagcatgaaatcgaatgaatttaattgtgatacacaattcaagccaaattgaattcagaatttaacaacaacatgtaaattaagatttaaagaacctgtgtatgaatagatattaatgtgaaagcctcgagtgggtcatgaaaatgaaatgtcacggtggatggtgccctagccgaagttcaagatcaagctcatccactgatgt

SEQ ID NO: 44200 - DNA, 598 bp, Arabidopsis thaliana columbia
ttccaacactttcgagactttctctattgcatactcttgttttccaaggcaattcttcattgcatactcttgttttctatttcgcgggagtcgaagaagactgggcgatggctcaagttatgaagccttccataggacgtgaaccaaacaaaaaaaaaaagagactcaagaaagaaagaaagagaatttcatgaggaatctaaggtcacacataatatcaacaaaagacaaaccggtccaaaggaacttgaatcaaaacgaagataattaagttacagagagatgatttagttcaggaactacacaacaaagtccttcattgattcattgtcaaaggataaggtagagtggcaatgtggttatgagccactgttccaatccaaagcttcccttgaacttccctcacttcactcacaagcttcattaccttcccttgtctatcctcgagcacctccaggactttaccttcctcgtcgaatctcgatatcacagtgtacattctcatccccatcgttttcgcaagcagcttcatcggtattggcaacgaaagtagatgcttcttatccaagggttgtttgtaagaacctcttgtgccggt

SEQ ID NO: 44201 - DNA, 595 bp, Arabidopsis thaliana columbia
cccaatcaattatctaagaagccatgactaatactaatgttgctgctacaaagcctctttctactatggtcgatgaatctcctagccttctccgtgattggtggtgagactctagatcaatgatttttcttacttttttcccattactatgttatgttacgtaacataagatggattaaactgaatctgatcctcttaaattatattggttgcagtatgaacaagaacctacaatacaactttgcgatgaacttcgtcatgataatcatcaacattgaagcaatcttgtctatcagaaaccacgaaaatcacgtaaggaaagattattcaacgattttgataatttccggtatgttcttgcctttcgcctattaagttgcgtttgttgggttggcgcaatcagggatgtgacattatgtgaactcgcctacatcttcggacgcatcagtcacaacataggctttattttcttcctagaactcctctattgtatttcccctacttggctctactcgttggtctacatgtaggccaatggtatctacttccatgattggactgtctctatgggaaggaatgcaagcattacgactga

SEQ ID NO: 44202 - DNA, 537 bp, Arabidopsis thaliana columbia
ggacctccttcataatgatgggcgcgttaagccgccatgtttgacctcagatcgcggcgagagaatccggggccagaatcagatccacggaaaggacgggaccgtcaacggccgagcgatgcgagagaaactaaggaagatttgaaatcgcagccagatctgaggcaagtgaaggagaaaggtgatgatggtggagagagattcgtttttttctttttggaaagtgagaaatgacgaaatagcgatccaatcggagtcactcgtcgaatataaggagagaaaccaaaggagagacgacgtgctacaagtgcctgagctgtacgatgtgcttttgccaaagttacgggttcggatagtattcgggtcgagtttcaaaccgcgtaaatcgacgggtcgggttttgtcacgacacacactactttttgggaattttatgcgtatgttttgagcaatggtcaatgactcaatcatggttaacaattaagatgaacacaaacgagaacgaagtttgaaataaattttctaaatatggagatg

SEQ ID NO: 44203 - DNA, 559 bp, Arabidopsis thaliana columbia
caatcctgtgaaaatgacatttattgagattgttattattattagatttgtaacaatttttgaggtttttgtttcaaataaaaatttgtgacgattatattgcaatcactgacaaaatcgtcacaaatttgtagttatgttttatattgttataaactatttttctttgtgattaattataaagtcttaataatattattgatatactcctactgataggatgttgtgaatgataagggtgcctcaactttcgtaggagctcggcatctttaaagcaagcttcttgattgcaaataaagttgctttccgactttgtaaaattaaaataggttggataaatgtagctcacttatgataaatttcactcgtcaattagagtggccaaagttgccgtggacaactggtgttggtggagatagacagcggaaggtcataaaattggtgacatcgacgattggtgtcgatttcaggcaaatcgcctccggtgtcgcattgtgtgaaaaaagagagagaaaagaaaaacaaaaaaaaaagaaatcccaatcataaaatgccatat

SEQ ID NO: 44204 - DNA, 543 bp, Arabidopsis thaliana columbia
  unsure (1)..(543): unsure at all n locations
tacgtactgcatatcaattttatgtgatcgattttatcatttactctcgtatataaaccttcatagaaacttaaaatttcaagtttaacaaaatgaacattaacatacaaattcttttgaggttttcattagggattcctttcagtaggataataaaattaaatagtaataaaattttaaaagggacatattttcaacaatatgggtccacataacacgaagaggagccaaaccttttaacacttttgagtggtatattttccttcaaacgttttttctgccatacgactctttattttctttccaaaagaggttattttcaaaaggtagatgaaggtcatgtggctatcgaacccatttttttctggtggttggctaaggaaccccataagatgactatactgacatagtcctatgttaatgtacaaggaaaaaataactaaccctcatatggaacatanaattattcgacagacgtgtcacctatggatctanaatttaatggtaggatctaaaatctanaatatgaaaatttgtggaaaa

SEQ ID NO: 44205 - DNA, 539 bp, Arabidopsis thaliana columbia
cgccggtgaacaaatcatcactctcgatgtcgattctcaggagactgtaagtttcttttccccggaaaaccctaactttcctgtttcttcgggttcttaatcacaatgtacttgtcgaattaatcgatggaggttcttgggtttcactactttagcacttattactcgacgttttcgaaagtttcgattttgctgatccttagtgctatattcctgtaggttgagaatgttaaagccttgctcgaggttgaggtaagagttttcagatctcttttgtctatttatatttggaattgtgtctcttgctactgagaaattaaagacttctgctgaaatctggggtttagggtttttgggacttaaagtttccttgttttcgttttaatcaatgagcagtccaatgttccgattcagcagcagcagctgttgtataatggaaacgagatgggaaattccgataaattgagtgccttgggtgttaaggatgatgatttattgatgatgatggttccaatgctcatctgggtacgttggattga

SEQ ID NO: 44206 - DNA, 629 bp, Arabidopsis thaliana columbia
tatagaaattttttaaaatatttgttttatgttttaggttgtgtccaacaaagacaaataacttcaagtctttggaggagacttcccaagtcaatctgagattaaacaaaatggtggaagtcccacaatcaaaaaagttatattcatttttcacactaaaatatgatcaaactaattaattacaaaaaaaaaagaagaagaaaaaaagtggagtaaacagaagaaccaagctctggtccaatcctcatatgaccatttctaattctcttaagataaaaccgtgtgggttccatccactttgatcaagacctttcttcttctttcaagtaaacatcacaaacctttaagaaatatgaaagaaaataaaacacattataaaaaatctcacaagacttcaaatttcaatatgttaaatcattcatgcctccacatacagtatttttatttttcgctcttgacttagtcttctccatcaaagtattgcccacaaagaaaatctttcacaacatattcggtcctagttgtatataaatgtgtattgattcacctaagtgatacccaccacgactttttcacttcacagctttaaaaagaccaaacctttataagtgtttttagcattggagaga

SEQ ID NO: 44207 - DNA, 541 bp, Arabidopsis thaliana columbia
cgttagacgttatagtctcacatggtcacatcacttccccatacaaatgagccaatgagccggatgtcatgtgccagtcgccgctaaaaacatgatagggagagtaaatgccttcattattctacttacataattcgactatcctaatatataggtgctagatctagcaatataatctcttctgtttcttcttttttttttttttttttttactgaagcagttacaaatgtaggttggtccattctatttagatttgtttcgttgcatgccaaacaaaataatgttaaccggttatagagtactaaacaaacaaaataatcgctaaatataagttcagctttgaaaagaatatactctcagctaccacgacaagtttgttcaactatcagttttacatcataaagcattataggttttgattgtttaaatcacgaattagtatgttgaaacaataataacaataataaatatggcattaatctcgatagtggtgtgtgtgtgtcctttgtgtaaatctccacctaacaatgtcattatgag

SEQ ID NO: 44208 - DNA, 551 bp, Arabidopsis thaliana columbia
cagtaacttcactccatgtttacatttagttaaatgatgtgtctcacattgcaggctaaaaccgatgtcgtacaagagaatgatgctactaagtccagaacgttagtgccaattgctttgaaactttcagtgaatctacttttcctaaaacgttctcacacacattttctgcagactaaaaaagcccattgattccttaaaaactaggatagtcaaagaaaatcacagcagaaagataaattgccaagtgtatgaatctaaatcttcccctctagatctaaaggtaattcagtttttttgactaaaaatccatggaaaagtcctacttttactccaaaatcttccttttcttgacagatatcaagcaaagaagacctcgttgaagcaatccgcatcgaatatggaaatcagagctcatgcaggacagatattaacaggtaaactaataagcaatcatctattcaaagctcaaatagttcaaaaaagaacaggccataatattatatcagacgccattgatgatgtactttgaacaggagcatggatttgtg

SEQ ID NO: 44209 - DNA, 811 bp, Arabidopsis thaliana columbia
atggagagcatcaatgacaaaactcagccacataccaggcgcttgcagagactaatgactagttccgaagaaactgacatggacgattttcttttgatcctcggtaggtcagatgaagtccctaagtttgcgaatatactagcgttagatttggatctcttcgtcataatcattagagactaagtaggcttacgtcgcttcatgaagatattcggaatatcagacgatatcaacacaatccttctctaccctatatatcatgatgagattctaggagattatgactcatgaacgcggctatgatttggcgtcacaagtactaaacatttgcaacgtacatcacaagaaactgttttgccatatcacgtaccgtcacttgttggtcttgtcgagtgacgataacggttgcgtcatactcaagaaagttataacaatagctgatgatttcttgaaagatgaattccttgacctaatcgcacagcacgctcactcgctaagcatgcacgacttaggaatctccctaatccagcacgtgcttgagcttgattttacaaagaaaaccacacaagacgacaagcgcttgcacgagctaatggctgagtttgatgaggttctctcgacatcagtaacagcagatgttgataagctccataagcttgcctcgaagctaatgttagattctgatctctttttcgagtttgtcataacaagacgaggctcgctcatgattcaaattatcctaggaaaatccgaagaagtcgaccaagttattttggcgggagtgaagcaaaggttcatcgatgttacaaca

SEQ ID NO: 44210 - DNA, 319 bp, Arabidopsis thaliana columbia
taatagactcaggaagatgcatgcagaatcaaatcgcgatatatgagtgacctgtgagcctagcagagacgaatcagaggctcgcagatgcatcacagactccgattacacaatctgaaacaaggcacccgcagttccggattgggacatatcaggcaacgctcataccaaagttctctcaactccggcaaggtgaaggtgcaggagaccggcagatgacgtatcgcgcatgtgccagacaacagcgtgccggtttagacccccagtgacagacaatgtgacaagacatgcaacgccagcccggtggacacgcaatggg

SEQ ID NO: 44211 - DNA, 581 bp, Arabidopsis thaliana columbia
aaaaggcagaagaagagctctttacccgggcacctcgcactaaagaggataagaagagagagaagcgcttgaaatcaagcagcgggtacgtgtttgctttggttggaaactgaagtgtctgatatgtaattggtccttatgtgatgatacacactcatgttcaactgaatcaggttgcatgaactaaccgagaacttttacgatgatatcaagttcttggataaggatggtgaaaagccaagaagcttcggccgtaataaaaggggagggccattcaagaaaagaaaggtaacttttttcttattctactatttttttctcaaatattctgcctttttttgtttttgtttttcagtttcttttgtgtttgacaatgtattgtcaattttcgcagacaaggcactgatatggatacacagtggttcctttagctgcttcagtgcaccaattttgttgccatgaaaaagatacaaattttcgatttgcttttatgattaaatgttgaaagtggtgaatgtgagaacttgttatcagttttagtattggttcatggtcatgctcttgcagtaaaattaggaaga

SEQ ID NO: 44212 - DNA, 583 bp, Arabidopsis thaliana columbia
  unsure (1)..(583): unsure at all n locations
gtaatttgcattagacttaagaaatatctctgtgaataaaggcaggaaatgtatgaaaatactaaccaggtttggtctcagccatggttagatgagttttaagcactctgtttcacacggcgataatacctaccaagacaacattgtaaagatcacttaagaaaagcttagatcgaaatcgcatgagaaatgattagatgaatctaaagaatcaagatgagttaaatgaccaaaatgtgttttaggatccaaagatgagaaagctagagagaatttgagagagtttatttttttatttttacctctattggagaagattgtttggggagaggtaagggaggctgaagataatggagaggctcatttgaagcaaggtgaaaacatgtagacaactatttagttctgattctaacaatctatatattgacagggtcctcctactgttttccataatatagaaatactttttagaaaaaatccaattaatcctattaaataaatacatagagttagtttaaactaatgacaacgaatcgttctaagtanaaaattaatatgagagaatatgctttgattaggagag

SEQ ID NO: 44213 - DNA, 566 bp, Arabidopsis thaliana columbia
  unsure (1)..(566): unsure at all n locations
gttaacccaaagttccgaccagcttgctcgtcgcttcttcaatggcgaaactggactactctccttccccgtattataagacatgatacttcacattctccgtcaacgtttcttgaaggttttttctcggttttgattttcccgagaaagagctttaacggatttctgcaatagaaatggaaagtttgaagctttgaggaactagagaacttttacattcacagagcaaaaattttgtttttagggattttagattttgtttataaaaaatgatatttttgttgtctctctctaaagacgaaagattcggtctctttttgttagctttcgttttggaaactgtttagatttctaggaataatgtacaaacggtctcaaatgtacagtgaagaagaaaaaattgaacctgtcactttcaatcttttcatcaaaaaatctgaagccactagatcataatcattatatctatctgttgagattattgacaaaagagaaacttccaaaatataggataaagttagaaagaccccattaaagtatggccaanagagagtaagatggtgaat

SEQ ID NO: 44214 - DNA, 519 bp, Arabidopsis thaliana columbia
tgtgtagtgcatcgttttgaatcttttgtattgttttataatttaattcgtagtggaaagccaaaaaatatgaataggtcttcatatttttgttattcatgagttccaaagcaaagtgatacgattcgaatgttcttgtcgatattttccccaagttttgatgttgtggtaactggtaaggttttctctatgcgtcgattgtttcgtttcctccatcattttgaaaagcatatctcaaaagtaaggtcgttaaatacttaaattacttaaacctttgtgctctaaaatatgtggaatggtcaaattcctactgcagatccaccaaaaacgctcatacgtttcaacaagaatatcaaatgggccttctgattttgtccacttaaacttactactatcatcggatactttaatgggcttacaatataatgaccttacaagttgcaacagattttttgttaaagcgattatatccgttaaagatcccaacataatagcgacaaaatcatgaattattagcat

SEQ ID NO: 44215 - DNA, 545 bp, Arabidopsis thaliana columbia
aaatagcgttatcaacatccaacaaacacgttagcatggaatgactctgaacttagcttgcaaataatgaattatgaccactatgtacagctctgtaacaatagttctcaagagttgtatatgtttctctcaacacctcacgcccttgaaaaatcacataattcaagtctctacaactaacacatcataaaagccaaacttcatcccagacagcgacaaaccacgacaagcttaatatatcagagtaaatagaagagaaaagaggtttgagaactttacctgaagaagagaacctcaggcgtacagattggggaagcttcagataccctccattttttgcattcggatatagttctgtttttttgctagactttgattggtactttgctaaagctagctgatccaaatctttcttccatgagagctgaaacgctttaaactgaaggagtaaaattttctccctagctctcaataggcctaccctatctgcaattttttcttggacatgagaatcaacgtgcgttgcatatgcagggaacttgagt

SEQ ID NO: 44216 - DNA, 326 bp, Arabidopsis thaliana columbia
tccattggatacaagtgaaaagtcacagtagatgagtcgtgggttgggtgcaaaaaggtcattggtaaagtgactgcccacaaattagggagctgctttctagaatatgttgaagaactatctcagcatcttctctttcattgaggatatacacaaccaacagctagtcatatttattaaatgccttccttctatttgttaaccaacaaatttgtgctggaaaggaacatgaaagtatttctgtggccacaattcacctgattccagtaaactttctcctttctgagactacaactgtaggcacaaaaggactggaaaataataaa

SEQ ID NO: 44217 - DNA, 513 bp, Arabidopsis thaliana columbia
catgggaggaggaatctacgtgcataggaggtagctggagatgtggtcgttgccgtgagtggctgtagctgccaacttttctcctgccaaagttaaggggttcctctcaattcttttttgtttttataggctaggccccatctgtgctgctatgttggggttttcaatgaaagcaaagaatatgtgttgtcgatagaagaagtaaaattaaatttgtatgaagaataatttgatgttctcattgcaatggcagaagataagctcgttttgttcttgttgctgcataaggagtgtctgaattcctttaatgcgctttttgcttgggattgagattatatatttattccttgcgtcttctgtgtcttttgcaaaaccaagtgttgcgtgtgcatgctgagtcaggtgaaaacattaacatatatgagatacagcaaccaacagcatcaatcaccgtaagcatccatagatagagaattgatggtgatgatgaatagatagatataccttgagtga

SEQ ID NO: 44218 - DNA, 561 bp, Arabidopsis thaliana columbia
tctctgttcttcttttcagatagcctataagtctctgacgggatctgattcacacgaaatcacaatgtccgtgttcgaacacctctcgagcttccagtgggacggcaagctcgtgctgactctagcagcgttcgcgttgaactatggagagttttggcttcctggtccaattctactcaaagaaccagcttgctaagtccctagctatgctcaagctcgtccctgtgcagaacagagtgaccctagagtctgtgtcccaagggctcaacgatctcatccgagagatgaagagcgtcacggcatgtgtagtggaactcagcgagttacctgatcggtacattacaccagacgttcctcagctgtcgagaatcctctctacaatcccaattgctgtctattggaccataagaagcgtcatcgcttgcatttctcagatcaacatgatcactgctatgggacatgagtatgataattaactttgttttaatcgatctttctattgatcacacgctaacgcgtacactttatttatcaggatgatgacacgcaaatggatttatg

SEQ ID NO: 44219 - DNA, 459 bp, Arabidopsis thaliana columbia
tgcatcataaggatacagcatacgagattataaagatatactaatgtataatgatgatttaggcttttgagatatgaatttttgtagaaagaggacccatccatgtgcaacggcaataatctcggttttcagaccagttcaagtttcctaaatgttagtattttaagtctctgattaatccctccaatctcttttaaagaaaatgattaatcactttaattaatggttagtttttgttccctttacaaagaatcacacgtggcaagatatcattgcaagaatgactcacaataccgtcgttagcctgcaagccaaaagccacgttaacattcccggttagattaatgacggcaacatcaccacgttacatagtctcccttattccgtttatcagataagatcataagaatgggtaaatcaaaacaattaatttttctaaatggagaaattataaatggt

SEQ ID NO: 44220 - DNA, 495 bp, Arabidopsis thaliana columbia
aaagaaaacaatgtccatgatataatttataatacccagcaatttggggataacaaatagattaatggtttcagctgcctgtaagtaggtttaattatttattttatacttttaaaagccgatagttttgaacattttcataaatttcttattacgtaaaaggagagaagtaaatccatttcaaccatctgcagccaaccttgcatggtcacagccagtaatattcaaagatgaccaaatatgaagacatctccaccaaaataatattgcaatttatttctgaaataactaaaatcgcttgaactatattttaaatttttgaagaagtggaaaagttgcaaaggggaatgcttgcaatttcatataaaaaaagagcaattcaagattttcggcccttgagtttttgatgtgttagaaattaataatcaacaggatatacctgaggcatgttataatactattcaacgtcaacggccgttttactataaaactgta

SEQ ID NO: 44221 - DNA, 512 bp, Arabidopsis thaliana columbia
actaccaagcttctcagaaaatacaaatacactcaaacgtgacatcaaatacgtggccacgcacaagtggtgtctccaagtcattagattcattttatgatgctgacatacgtgactcagtttgccgggaatgtttaactaatcaaatatggccacgtagacatcaatcttttttaagcgacatgtgtattatcttgttttcgtggtagggtctgaacttgccgacactcgctcttaatattttagtttctcccctaaaaaaattgtctcgtttgttttgctctttagaaattaccgatttacgctgaaaaaatgtgaaaaatacaatcgatcgcattatctttatccctagctaatcattcatgtacaagcatgtctccgaaggttaaaagcagtcgctatttaccggaccaacgtagttttctcgaagtggtggtccgttgtcatattttaaatttatcaccttcttgagaattccacatttttatcctttttgtcatgtagtgtatatt

SEQ ID NO: 44222 - DNA, 469 bp, Arabidopsis thaliana columbia
tttccaaagcaaccacaatcttggagtatctctaacagggcttgtctccattaccttaattcccaaaaattcttgcttctctgatctcacacacacattcatatgtgaaaggtctaatctttttttttttgtttcttgaaaaactgaagagattggtttatgagataagtgactttgctctctcacactcttaaaagcgaatctacttttttttttctctcttttcctttttatttttctcttgtgagctgtaacttagctaaatccattgcttgttaccactttatgctctgaaagttctcagctttctttgtctatgataagtctatttgttctctgtaattatggttcttcgcttgacttgagtacgaataagcatttatcctaggcttctcgctctcgcgctctttccgaaaagaacctgtgacttgcttctgctacattagatttgatgctctgttgatttagt

SEQ ID NO: 44223 - DNA, 520 bp, Arabidopsis thaliana columbia
atcgcaataaaatcgagatgagaaaaattcatccatatgttttggttcacacattctatcgagcagcttgtgtgcaatcccaatcctctgaaccaaaacaaaagcttatctcttgaccattacccgacatttcactcatcagccaacgacaaatcctgctccgaaacctctaatgcttggaaaagaagaaaattccgatttccgaacaatggaacttactccattttgcattctctgtcgaaagtaacatacgttcaatgcaaatgacccaaagtcgtcggtgccacgtggatagttctcactggttgatgcattcggtaactcgcagaatggaagaatattaacacaaaaggcatctcgcgtatccacgtgtcccgttcaagattccaaattctaaaccaaaagccggtccgaccagattaacaagttctctttattacatcacaacccaaaacttgttcaaaacctaacttttcattgctaaacatattttattctgacattcacatgttaactttaa

SEQ ID NO: 44224 - DNA, 593 bp, Arabidopsis thaliana columbia
ttcttattttttcctttttgaaaaataccaaaatgaatcaacgatgattttaacaaaacgaacttttcagttttcacaagggatttaccaaatcagtttacttcctcttgctagatttaaggaaactttactatcatcaattcatatacgctaaagtcatatttttgttttattttcatttaggacacgaacctatataagctatatgctattcataggtaataggttcgatgtgtggaccaaattttggaataaggtatatggctgtcaaataaatatcgatgttaacaaatatcttataccaaaattctatccgtaatgatcatgattatttatgttctcggtcttcatttgtctactctatcgtattaacacaaattataacgcaaacaagaattatttttatatggtcgtgattaaataatggtataataaattcaaaattgtccgcaaatatatacatcaatattcttatactcagctagtctagtagttacatcttgcgtcgatacaaaattactttatatatcatctcgatactttccaaacctcttcctatagaaaaagtatgataacaccactcaaaggtacat

SEQ ID NO: 44225 - DNA, 526 bp, Arabidopsis thaliana columbia
tagtaacggccgcgagtaggagacattcatttggggaagaagaggtagaaccactgatttatgctggataatatacaaattctttccatcttttcttctgatgatggttcactttgatctgaaagactttagatctattatagcacacaaatttactagcttctttggctgatcttggttgatgatgtatattcagcttgcttacctaccatacaagaggcgggacatgatggacgatgagcaacttgacctgtatgtttctgtggagggaaatcatgagattagagataatgcgtatagagaagaaaaaaagacccgcaagcacggattgttaaattggttaaagcctaaggtatacaaatgattgaattttcatttatagcattgacaattatgttgtgggctattcttgttcgtttcaaaactgcatctggcagctataggtttttactgtcgtaaatgtgtcatgcactcactatagatttctggactcaacgctgtgaggcttatgtcctcttagatgcag

SEQ ID NO: 44226 - DNA, 466 bp, Arabidopsis thaliana columbia
aagttcctaagcagacctaacaaactctcgtatgagaaagagaccactattccaagtaacacttaggatttgacaaatttaaagacaaagacgaataaatactagcattcgctgctgcagggagagatggagagaaaaggctaccggattcgataatagaattgacgatggaagagaggccgagacgagtgacattagaagggattgcgacggagttgaccggaactttgaagggagagtcaagcttcgtcacgaacttaacgtgaagtcttctagatacatcttctccgtcgatatccattttagcctcttaacttctccgatggcctgttactgagcaaaaagaagacgcggagataaattagggttctgccttgaggcgatgaagtgtggaaattcacccaggcacaaggtttaaggaaatttaaaattacggaattgccatccttttccggtttagatcata

SEQ ID NO: 44227 - DNA, 533 bp, Arabidopsis thaliana columbia
aatgaagaagcttatggttggtggggggttttgtatatttaaccctcaaaccccaagcaaaataacacaccgaactatcactcttctttgacgcttatcctctttcacgcttctcttctttcaaccttctctttcacaatgtcttcttcttccgctatcaaggctgcagcaaaaggcttaggagaggatccgcattatggatactgtccggtctagttatgttggtctgtttagttcaacagttaccgacatggtgtctaaaaatcgtttccgcaagggccaatgtatcgtcctcgagatagcacgtggagtggcaagggcattgaatattccagaagatgcggtggaagtgaagactcgtcacaatagctggacatgctatgagattgtgcacacggtgatagacccgatggctgcgtcacccaaaagagggatgccgacggatcctccggtgagcacgatcatacgcgtcaaagtcactcgcatgagtgcaatcgtggaagtcgctacacgagggactacaagaatatgga

SEQ ID NO: 44228 - DNA, 736 bp, Arabidopsis thaliana columbia
ctgggttaggtgaaccgaaaattaaccggttttacggttatccatttagcgatgcgcacgtggtattttggttgtggaccatgaaagttcaaacatgataaaagttgataatttatagagagcactccgatttccaaggtaacaacaacaacaacagatctaaaatcttcccatatctgcttttatttacttaatccaatccgaatcgtgtgagctacagtaaaatgccagtgtgatcatgatgaaacggtggaaagaagttgagaagattacattttctgaagatatacaaaagattgaaaatacaaacgacatcgaagataaaaagtctaataatgagaatgatggagactgcaattagtattcaattccttccagtccatggaacttaaatgccattaaatgcaaaacatgagcagatagattttgtatctatgggaatcgttacataatccataaataattcaaccataaaacgatgatctctcaagatttaagtatccagatcttacgattcattcagatgactgaaacaaaacccagaatatttgttcgcatattatgaacacttgaaacagagcaacaagtagagcatttcacccatatcacaagtaccataaataaaaccaaccataagtagcaaaaccaaaagaagagtcctaatccgaaaccatcaagaaaaaaccaactaacaaagatagagatccatcataataagcaaaaagtggataataga

SEQ ID NO: 44229 - DNA, 569 bp, Arabidopsis thaliana columbia
gcatgtatctaatcaaactttgaaacttgcatcagattgaaatttcattttcgcataaccatctacacaagaaaactataccataacaagaaccaaaaccgagtcaaaaactaccgtttcgagaacatgaactacaatgtcagtgccataagctttttcaaaactttgttctgatgagccatcataagctttattaccttaaaccatgttatctaggtacaacatgccgccctgaaagacaaacaacatccaacagcaacataacaacacgatattgaacagcacaagcttgagagcaacaaaagatctttaaatcatttcgcaatctttttactttccacttcacataccaacaaaacacagtccttgtcacagatcgtgccaggataaggttatgaaacaagaagatagtatctcattcaagaagactactataacatgaagaacattaaaccaagtcttaaacaaacaaaaaggcttattaaaagaattcaatgctagatatcgaaatcaaacatttcaagatcgaaagagcgaaaagttccacattgggaacaatgagatccttg

SEQ ID NO: 44230 - DNA, 558 bp, Arabidopsis thaliana columbia
caagtaatgatattttcgttttgagattttatttatatagtgtgtgatgcgtttgtatctgagacgagtgattttatgcagaaacaagccacagtgaggtcatctgttttggaagttctactagagattacaaagtatagtgatttgtatcttatggaaagagttcttgacgatgaaagcgaggtgagcatttgtttttctctctcattcgtgttcttttgtttgccttcgtgttggaactagtctctagtaggacagagtaaattagttgtggttattattgaacatggttagcttaaatactcgggcagtaggtcataacattacatggatattcatatcgataatagttggtcgatgaataatgtgtaattagaaggattcttaagcacatatctttacattattagaggaatcgagttcattggtgttactatatgcttattgtcagtagtttctgaaactcacattttgagctctaatttgcaggccaaagttttacaggctttagagaatgcaggagtttttacactggtggtttagcaaagataaggtatc

SEQ ID NO: 44231 - DNA, 612 bp, Arabidopsis thaliana columbia
tataagataatcaatttttgcagctacatttcatgcaaatccctcaacgagcaaagaaatggcgctcgtcaaatatactcctccgagtataagatatcataatactcatcctccttctcaaggttcgtacgtattatcaatatctagtatatacttgtctttgttctatgctttatatcatcattttatgacaaaaaaatgattaaggtcttagttaatgattatgtatatgtgaaacttatatttaggggcacagtttaatttcgtatgataattgtctagttagctttatgtacttatcataaaaaccttagtgtttatcgcaatacttttcaaatatagtgtagaatcataatggtcccactgtcattatgtttgatgcaaatctatttggattttgttggataataaaccgatgacgtggaccagaccagtagctataagatttggttcacatagaaattttttataagataatgtatctaggtttgcttatgattatacatgtgatatttaatacatggcacaggttcgtcgagttcacagccataggtacaatagaaggcaaattcgattgtggttatctggtaaaagttaagttgggctcagaga

SEQ ID NO: 44232 - DNA, 586 bp, Arabidopsis thaliana columbia
ctgtcaattgtcaacaatgtccattgcctttcaattatcttatataatataactagatttcaattagcttatataatttttttgacagaaataatcttgattttcttagcctatcagttctatatcaaatctcagaaatccttcattttgaatttgttgattctcggagatgaagaaatcaaatgggatacataaaactaacgattagttcctcttgaatttttttgagctaaaggaataatttttgaagagattagccttattacctaaattcatgggttaaataggcacacaatatactcacatagagcaaaaagttaaaaactcagaaattgtaaaccagaaaccaataatttccaaaaccgcggatagtttgttgggacttattttggacacatatcttcgaaccatttcatacacacaaaaggcattattgattataaacctcaaaaattgatggtcggccactgcgccacactttcaagaaaaatagcactaaattgttataagacttttttgtttgttttgcaaataattatataaccttaggtataaggtttatgaaacgacaagagcacgcaaggaa

SEQ ID NO: 44233 - DNA, 510 bp, Arabidopsis thaliana columbia
gatggatgaagtagttgagaataaggttatgtgtggacgagactcgttgttgattagatatgtactgatttgacgacgagcgaagacgttccaagctttcaagacttggttctcgagtgctggatcgaagtagagctcgattgcgtagcttgcgacatcttttgttgatttcgtttgggaattttgaagattgaggatggaattgaaaagggtagtgacgatctgagagagagatttaggagtttttggtgaaccgagaaaccctgagagtgatggaggaggagaaaaggggaagtttttcaaagtaataaagattcaacttttttttaagccaattaaaatctagggaaatttgcaaaagaaacacacaaaaaaatataaattagaaaactaacacctaacaaaaaagaaggtgatattctttatatcttctgtattaattccagttataacccgtatgtgaacaacacgctcttcgcatatctctcttctcattccagaatttggctt

SEQ ID NO: 44234 - DNA, 376 bp, Arabidopsis thaliana columbia
cagtaatgttaaattatatcccttatacaataaagtacatgtcctataaccaatagaaatgtgaaaatggcaagttcaatatattttttaaaagaaatgaactcgggattatcaaattataatatagaaaaaagcagatatttgggattagggataatgatctaattgactcaagttcttttctgaaacaaattaaaacctaaaatatcgagcgagaaattggtgaattgaaatgttcagttagaagaaaatgacaagactacccttatattgttgaaaccaacgaatcattgcaagacgtacgtaggaattgagaaagttgtgtaagcgcgagaagaggagatgacacagtgaccaatctcttttctctctctct

SEQ ID NO: 44235 - DNA, 550 bp, Arabidopsis thaliana
  unsure (1)..(550): unsure at all n locations
tttatatatatatgcctttggttatgcgaaatgagattggttttgggattactactgttcggtttggtttatgctttatgatgcgatcttgaatctagaatcaatgtgtttgtgattgtatggttacgtggttcgatatgtccggtttactttggttctcacttcaccggttacccaaaaataaaataaaattgttgtatggtttctatttatttcgttttacagactgaataagtgaatatttgcatggaaaccgagatatgagtctgaagcagtagcagttctggaaacaacaaaaatttgataaaccgtcgtactaaagatagttcgaacaaaaatccaaaacacatttctcatttcacaaaacaaacgaaaactattgagtcacaaaacacagagagaatggagaaaacagaggaaagcgtcggaatcagagtttcacgacgacaacgacgcaaaatccgtcaccaacatcgtctcggtcgcccaanacctgtcctctctcttcactgcctatgcttccggcagagccgccgcgggaggaggaaaa

SEQ ID NO: 44236 - DNA, 422 bp, Arabidopsis thaliana columbia
ccttatcaacactaatcaattcatttatcatcaatctcgtaaccattgttcctaatatgtccctcatgatactaaaattttcattggcttttctatatttttgggtcacaattctatctttatagattagaaatctgttaaacgcagaatcaataacattttcacaatattttgatcaaccaacaaacttgtacaatcaaaactcgaacatttttatactaagagagaaatagtataagtaccttgtggaggagagttctggcatcatcgccggacaaaggaggctgtgaagacgaaacaggggaacactgaagctgggagagagacaaaacagatgcgtttggtatcaaaatcttgtgctcagtgctttggcacccaacactttatctccgaattgactcgctatctcctccgggtaaggg

SEQ ID NO: 44237 - DNA, 465 bp, Arabidopsis thaliana columbia
attttcttttatttttgatttatttttcccaccttcttcgtatttgaatgccactgggagcagtgtggggtggaaaggtgggtggggtagtggggttgggtggggctgtggaggtgtgtattgggttgaaattgtcgattggaaaaaatcggttccgagtaatcgtcgatccggactttgaatcgtcgagaaaagtttaccgggtcagatgatttgttgaccagtattgggaatcggcgagagaaatctagcggtgtgtgagtgaggcttggaggagtgtgtatgggaggatggggtattccgaggatttgtcggacatgggttgaaatgtgcgaccagtttgtgtacttcatcgaccgggtccgaggattcgtcgaccaggagtggaaatcgtcgagaaaaatctatcgggtccgaggaatcgtcgaccatgacgaggaatcgtcgaccgggtccgaggatttg

SEQ ID NO: 44238 - DNA, 506 bp, Arabidopsis thaliana columbia
ttctctatctttctctctcttaccaaacttctttttagctgcggctatattcacaagtgtctcatgcatgcagtctcgtgagggtctcagagtctaatgtgttgctttccagttgtttgtgtcacaagtcacaaaggctatttttgtaacagttggaacagtactcgaggacagtaaaaactattctaggcaaaaactaagatacgtatgtaattgttattaattgtaaagtttcaagttttagaattccaaaactttcccacactggaaaaatagtatttttattcatatctgcaattgtggaagattatgatcgagcatttttttttactgctttcttggtgatatgaagcaattaaatgtaaactagatgtttgccactaagaaggacccaattttttggtgatgtgaagtcctcgcataagcctagttatcgagtagatatagcatactccgaactcatatgtatagtagtaaacatagatatgagtagaagttaagaaaca

SEQ ID NO: 44239 - DNA, 518 bp, Arabidopsis thaliana columbia
attttggcagcaaccaagttgtaacttccacgtagcaatgattgccatttatcagacgggacccacgaccaatatgagaagggagaccaacatatccagtcggagtttttaagtttccagaactgtgtgagaaaaaagtattagttgagaaaattggattaatcagattaacggctacgcactcacaaaaaatgttgacttggcattcgaaagcaaaggtatgaaatgtacctgaagtagacttgcttgacaaggtcattgggacagaatccagtaaggctgccccgcattccatgaggagaaacaataactggtgggaataacataggcctgtgagaagtgtttctatcaaataaaaagctcttatctttctttaagcatgtgtagaaggcggatttcatttcaggtatcaattcaaaaagtttggcttcatagaattacatgtagcataatctattacctcactcttggccaacccaaacatttcgaaaagccttgtgcatgcaaaaatgaggtgt

SEQ ID NO: 44240 - DNA, 547 bp, Arabidopsis thaliana columbia
caaactctttcaccactaaatactaatttcaatataggtctaacaaatgcgtataagccgtattcaaacaccacattcttcagctaaatctcaattcaacgtatgatcctatgaaacttccaggcatcagaaagaaccctttaattataaccgacgattcaattccaaatcaagtaagacgactcctaaattcaaaatcgtaagctcgtaaaggccaattcgatcagaatcgcacaagtccgtattggctgaaaacatggaaagtaaaacttaccgtccaaatgtcggcaggagcgaggatgataacggagacagagcagaaccaggtgtatccaacggtgataagaacgtaccgaggaatctccggtccggcgaagtatcggagcgtgaaaacaactaatcctagggttagaggcaacgagatcagatagacaaccacatctccctctatctcgatgcagagaattcaattaacacaactctgaaacaaccacgagcttagggtatcgataaacgccgctgcgagatcgctcgactcgtctatatg

SEQ ID NO: 44241 - DNA, 530 bp, Arabidopsis thaliana columbia
caagatctgaaaattttggccgagtgaatgtaagatttgtactatgcattgcgatgaatccgatctatctgaaatataaaatagaattatgtccctaggaagataaactaatctgactaattagactaatacgagtggtttaatggtttgatacttaagagagaatctgtctgcgatctgcagttgttatgtgctgtgtcccacgccaacgtaattgtctgtgttctttcatgtttcgagatgtaagaccaaacccagaccattatatattttaatttataggttaaacaaaaacactgttgtttatataatattcacaccccatgcacattaaaatacagcgtaatcagtggcggattaagactaaattattttcaaaaattaaaacattatttccacttgctactcgccacccgatgcatctaactaatttcttagtaaatactatatcactggagtaccatgcaatccagtcatgtatattattgttgttactggtcaatgggaggttatctatttataaaaagatg

SEQ ID NO: 44242 - DNA, 482 bp, Arabidopsis thaliana columbia
attccgggagtctctcttattcgatacctctgcgactctgccgagacgttttggccttcttctcttccgaaatctgatacagtaacagaaacgaacctaatgccgcctcgccggagttaccccttcagtggtcacggaggtacaattgcacgattcattgaatttggggaagcatttggacactatggagaagaagaagacgaagaagaggaagacgaagaggaagcatatgtcgactatggtgaagtacaagaggaagacgaggaggaagaggaggaagaagattccgaacgccaaaccagggaatacatcgatgtcctagactcacctgttagggtttcacagaacgagagtgaagggatagagaatcagaataggtcacaaggtgtttgttcatcgtcttccggatcgcaggaggatgtcgaatggaaacaaggtgacactgagggattgtcttgttctatctgtatggaagtttggac

SEQ ID NO: 44243 - DNA, 544 bp, Arabidopsis thaliana columbia
tatttccggaaactgtggagctcgtcttgtgcgtgagatacgctacgtgtgaacttgttttctcggtttattagacgttctcgtgtgcctcctcttccttcgtttcctcctgttgttgctgcggttccgatgtcgatgtccgccatggacgatcgctcgggaaaatgagaaattaccggagaggctctggctttttttttttttgttgtctaaatataaattgatgacgcggttggaagaaggagaagacagaatcaggaatggctaaaattgtcttatggttatttataaaggatcgatgtttaggtggatttgacaaccgtatttaaattgtaatttagtatcgtaaaacaaattactacaatatttcgtattaagatgtacatgttttgtatcttattggctctgttttattcgaatatttacattttcaataatactagtgacttggggttttctgctctatgattcatgaggggatatttgaaaaacagtttagaatttggggattaagtagagacgaaattgtgacttccattgtaag

SEQ ID NO: 44244 - DNA, 509 bp, Arabidopsis thaliana columbia
ctaatttagttaaatgaacaaacctctgtggacacttctgtggacagcgatttctggacacgttcttctttacctttttatctcagtttacttgaacttgtctctaagttttttgctgtcaaattctatggctattgaaaaggaatggccctgttttttttgtaatcactacatcagcgatcgacaactgaaattttttaacttacttgcatgtaatgtatgtggagactaacatcatcattctcgtgaaaagagtcgcagcgactataaaagtggtcgccgtttagtctagtgatgccgacgacaactacatctcttgtaaaagtggtacaccattactatttcttcttcgtttcttttgctgtaaaagtggattgacgatgtgagctttgtttgtatctactatttctaatcgaaagagagggaacgaccataattgatgattttgaaagagggaatgaaaatgatgaaaaacaaaagaacatggaagagagacgataaactaagaa

SEQ ID NO: 44245 - DNA, 541 bp, Arabidopsis thaliana columbia
tctagaggatccccggttaactaagttgatgacaatctacaaaaccattcaatatgtatatatattgtctatcgataagtttagcaatatttactttttgtcggaatcgcggactaggaaaaatcacatgtcggcaaaaacgagaacacgatgaccagtgtggtgggtttctagttcggtagatttggttggtccatgatatcggttgaatctatttagaatttgcaaaaatagttccgatatgactactgatatgaatttacccccggacattaattagtaacgacataatattcaaacgtatatggtactttttgatatataaaattagggctcagtatagtcaacatagaagatccgttattcgtatttcataggctagcttcttcttttcctaccatatgacgtagttattcacgctttaggcctttttcttcatttttgttcttttggctctctttaatcagtgttaggggtcatggtgaccgtcctaaagtatcgtagaattataaggtgcactttttggtatatagcacttatt

SEQ ID NO: 44246 - DNA, 590 bp, Arabidopsis thaliana columbia
attgtttatttccatagttacatgcacatatttgtattaacaatctcttattattggttagtatcatatctgtagttattcgaacactgggggcaaatttcatttaatcaatcacctaacgaggctatgatgcatgattaacgaacgttaaagccaaaatgtcaagactacccccttattatcagctcgcagttggtcaatgcctcaatggtctgaagttcagactctgaactataatacaaggtcaactcaacccgctggtagtaacgaaagtacgaaacagtcaaaaacatatcttaaaaattacataaaaaccggaaacgaagttgcagaatttacagtttctgccattgggacaatcattcgatctcatcattatccttctttctctccatggcagaaactcctcaaccgtatctcatcttcgtcttcttcgtcttcactctaaccgttgctacacaaaccaccggttcggttaagtgcaaaacaagtttgctccgttacccgtttggtttctcgacggttaccgatccgatcaactgctctgagataacggagaggccggacggtgaatcgctgtcaagaagtgc

SEQ ID NO: 44247 - DNA, 539 bp, Arabidopsis thaliana columbia
taactacattcttctaaatataatatgaaatatgactactgaaaaactcaataacaccaaaaacatttaaatatgtgaatatataaaaaacctctagtggtgtagtactctactagttatacgtaaaaacagaatggaaactttttcatgttaaaagaaaagtattgttgataaggatgtccatataatgcatgcttaatatgcagcaactacgaagaacactttgaagtgcccatttctttatgtctttgcatgactatctctctccacatatttcgaatattattcaaagatttcaaaaaacttagatacatttatttctttagatatgttatttgtgcgactcctattttctccttttcaattttcattttttagatttcttgaagtttccatccatatataacgtctacattatttgtttttaaagttttttttttccctatcggctgatccggtcagcttcggtagaaacgtactgaaatacttcagagtgaacttatcccgaaggactacacattgtctgtcccgagtttaga

SEQ ID NO: 44248 - DNA, 556 bp, Arabidopsis thaliana
ttcaagcctagaggtatcgttccgatgctgctggagaaacaccatcaagatccccaaagatcaaactccaagactttgcttgaggtttaagaaaaaaaaacgacaaaatagtagcggatcataaatgggctgattatgatatatacacaacacaaatcaagtttatcatttattcgcagtaacagttccaaaaactgaatagatcaatgtcactttcggagaggagctaaaaattagtgggttttgtttttctttggggcccattcgtaaaaggtatatactaaattctttattattagggttgagtccgtgtgcaaccgaaacagccctagggattcccttctacttgaaacccgaatccgatctcgatggacgacaagacggcgggtggtaagattgtcatgaataaggagcaactgcttttgtttatggaaaacaggcggaacgaggaggatcaccgtctcgctctcgccaaggaagccacagatctgagatggttgaccggaagccagcggtaagataacatgaatcatgatcagcagcttatgtttacgag

SEQ ID NO: 44249 - DNA, 535 bp, Arabidopsis thaliana columbia
tgtggatcaaaacgatgaaacacagatgtaaaatatgaaaaatgttaggtacgcaccaacattaattaatatgtaacagaaatagactaatcactcagtaccaaattcttagttaaaagctcataattcatttcatccgatgatattatagtccaataagtttaaacaaatgtaactgattcaaaagaaagtaggaatttgttcgaaatgaatgaacagaaagagtcatcatctcgaatgaaaatcttattaggattctacataaaaataatattttgcattcaatattttattttacaatttttacgacgataaaatggctgaaagagtaaactaaatataaatctcatcttttcttttctttttttttgttatcaaagaatataaatctgaatttattgtggtgttgtcaataacaaaagtgttaagtacttgcgaatttgaaacgcaattccaaaagcataaacaaacatggccttaataacgacttaagttaagagaaggtcaaacaagatgtaataccattaactagagg

SEQ ID NO: 44250 - DNA, 553 bp, Arabidopsis thaliana columbia
tggtcatggttctgattaaaacatctctgaaatacttttccagacaagttccgagccccagatgtgatgaccaagcccaagtttctctccttcgaccaaacgtgaaccatttgagcatttttcacccttgttcttctttttttcactgtccctgatcagagtatactttatcggcactcataaattatctaaaaatgggtactaataatccaaaccccataaaatcagaattgggagcataatatcagaggagctttttttctctaaattatatgcacataaaatgatttaagaatagtcggcagccttttcgtatccgaaaatcaacgtcgagtgactatgtacttcgatcgagtgttttgatgcttaacgtgtacgatcaaaaacttaacatccttaaaagaacgcacgacttaggatactttctcttattgctcatcagaatttcataaaccatagaaacagcatttttcaagcttgcatggcaatccggttatccgaaagatattgtatctgattaatgattatatacgtaactattcactttagattt

SEQ ID NO: 44251 - DNA, 528 bp, Arabidopsis thaliana columbia
ccaccaataatgattttcaaattagttgacaaatgcctagtgagattaaaatatactattacataacacaaaagaaaatataaaagcataaagaaactaccaagtcaaaattaatttgaactagaaaaaaaagtataacaacttttgggttcattttttacagatgacaaaaagggctttttaacctttttaaccacttttcttcaggcctttctaataaataccaaaattcctttagcttttttaagttacagagaaatgtaaggtgaaacactcgttacttaataaactagtaacggaaaaccgccatttttcactcctacgtgcaaaagactcgactccactcaaaaacgccgtcgttttacagaagatccgattctcactctctccaagagaaaaaaatcaatttttgagctctttcggcgataatgttaagctaaagagagaaagcttcaccgattcagaatcatttagccgatgggatgcgttttatgcaaagaatccaccggagacaaacgagaacacaat

SEQ ID NO: 44252 - DNA, 328 bp, Arabidopsis thaliana columbia
ccgcccggacgagaatactaccaggatgggtgaagtcaaggacggcccccgggacgcatcacacatgtctgaaggcaaatacatatatatgggaagaatgaaagacacaaggaatccaggacagagatgcagaacaggccgagtcaaaccacgtccaggagacgaaacagagctctaccgtgggagaggaaggcaaggggaatgaggcgagacaggctggtcccaggaccccatggtcaaaggaaaggaacaaagcgggccgaccagtgatcgggacaagatgacaggccgactcgcctaagagcggacgtagaaaacgaatacgggg

SEQ ID NO: 44253 - DNA, 597 bp, Arabidopsis thaliana columbia
aattttcgtcatccttctttgttctctctctctctctgtttttttcttgaaaggtgaatctgagagtttgcagagaaaatctgaagtctctctgtttcttgtgtttgctttttatagagaaaggcgggagaacaagggaatatccgttgtgagctttgactgggtttgactgtattttacacgtggaatttttttggttggacacgtggaaagtgaatcttggattctttgtatttttctgaaaaagattctattgcgatggtgaaatgttcaccggtgaatcggaataactcatttggtacatttagtatttgaatgacttttgttttgttgttgtgattttaacaactgtacagttttctgcatcacattaactgcttaacgttttcaagtgaaagagaaaaaaaaaaaaagagttatgttgtgcagatttcaagaaattggtcaatagtaataatttttgtgtttcactttgaaaaaagacaatatagatatgcccatctttcattaaactgtcgttttaaagttatagtcccattttctttttttgttttaagaaaactattgtttacatttccaatttttttgaaactaaag

SEQ ID NO: 44254 - DNA, 200 bp, Arabidopsis thaliana columbia
gatcgacacgcacgacgcgggcctcacgctcggccgggcggcgcgaccccgcattcagcgccgcgccggcatagagcagggccgccgtcgtccacggcccgcagccggcgccggcgcgctgcacgaggggcgtgctgaggccaaagagcagtgccgccagcagcccagacgccaccccgaaagatcgggccgctcatgcg

SEQ ID NO: 44255 - DNA, 549 bp, Arabidopsis thaliana columbia
taacttaatttgtttagtttctcatacgatttatacaatttcagttgaactattttgtgtccatttagcatagaacacatgtttaaaaacgaattaatgtagattagacacctatttatatggatagttccttgttcgtttgattttaagatatatttttatatatttacacgaatttacgtatggtttgagtttataaataggaattaaggtttattgttttacatttaaataaaatacgtattggtttgggttcataaggtagttagggtttgatgttatacatttaaacagaattacctatcagtttgagtttataagataaggataagggttagtattattcatttaaaccaaattataaatcagtttgagtttagaaggtaggattaagtattttgaaatgaattcttggaaatggtgttagcgtcataataattagcatagcatttttttttttaatatctgaaagttcaagcaagaaggtcttacatcttctagaggcgggatcccaacaaattattaaattcatcatatttggaaaacgga

SEQ ID NO: 44256 - DNA, 539 bp, Arabidopsis thaliana columbia
cattcttctcggataagtttctttaggcttgcatggcttgctgatcgaagcaattggtcaagagtcattaaatctgctggatctgttaagccttgtccatttgtaggcatctctggtacttcagacggttctctagcatatggatcggagtcactcatctgttgagaactcgatcacaagatgtttttgtctatcattcgtctataagccaaatagtcatcccaagtcccccatatctacatgagttcatgaaataaataacgaaactaagttgcaaagtacgaaattaacaaaccatttcatccacaaagccagttttatgatataaaaataatagaattacctatagaaaagaagagttacggtggtgagacgtgaagagtcggtatcccaaacttgtggatattgctaaatgaagattagggttacataagaggttctcggtattaatagttgtggtaaaaccacctaaattaatggaatacagtggacaaccggtccaaattctttttaaaaattagtaatttatatatttatat

SEQ ID NO: 44257 - DNA, 530 bp, Arabidopsis thaliana columbia
tgaaagaggaagcaaaacatgcaagaatcccaaccttatcaatttgtctccttcatttaaggtttggattcataatagctttcagatttcgttttagtgtaaatttttgtaaatgatttcacattgtttaaagtttctaaaatagttatattgagtctaacttatatatttttgttagtttttttttttggtaggcatcaaatgcactttaaaccatttaaatggatatgaaagaaaaaactagcatactatggatagtagagtcaattgcaagagaaagaaagaatcaaagttttgatcattcataaaatacaaaaattcaggcaagtgttttagttagtctcaaaaaataacaggtatgaccacaataattatataactatttctttgtctttccaaattaaatattttgaattaaattttgctataaatagttaccaaattttgttgacttatatgctctctaaaacaaaacttagattttttttctgatttttagtataaggaagctaaactaagataaacattag

SEQ ID NO: 44258 - DNA, 504 bp, Arabidopsis thaliana columbia
tatcccttttctaggttttaaaaaatgtaaatcaagaatccacttccatgccatgcaatcgaaaaagaagttccactcaccgatgaataaagaggaatgacgaatcaaaagtccacaaggaataaagagcttgtgaattataatgattcatttgtgggtctacatatatagacattcagattctatgcgttattttgaagcagctaataaattatagtctgaatgatgatcttccataatattctttctttcttttttgacaaaaattccatactatatattcttgtttatatgatgatctgaattgggagaattaaaaccggaaataaccaaagtctttaaaggatagatgttaaaatacattgaagtattaaaagactatatatataagcagtttcttctatgatatatatttaaatacatgatatctttagaagttatacgaactgtttgctacacctcttcaccaagaaagcatgactagagtattgtttgcgtgagatg

SEQ ID NO: 44259 - DNA, 536 bp, Arabidopsis thaliana columbia
tctaatccccattttaattcaaaaaaaagagtacgcacctctgatgcattgaaagagaacttcttggttaacttaatacgaggaataaccaaagaggaatggacacgaatgtggaatcgattaaaggaagtggagaaatattatgagttccattttccatcaaaggtagatgatgcggtgcagatgatatggcaagcgattgcccgtaaagttccgggtgttaaaatgaggattcataagtctagaaggtattctggatctgtttctgagaccgggaaagaatcaagatggtcttcattgatacctcggagtttctggtgaataaagatgagatttttttgtcttcattttcccagaggacatcaaattgtttttttgtttttgtttttgtgtagagataagtttatgttggatcaagatgatttgtcaactttttcccctaatcataggttatagatagagagacaagtcttcactctaatttgatttcgtcttttcaccatagaaaaaaactaataatgttgtaagttgatttg

SEQ ID NO: 44260 - DNA, 630 bp, Arabidopsis thaliana columbia
tgtctggcctgatgtagtacaataattaacggcacaataattaagtagtcacatgactaccaaaattagtgtggtgagtgggtaaactgtgaagtttcagttcccattgtcccgtagtgagaaagcaccagtccgcacatgactagccctcactttaaccattcccccataagaaattactttttgagaatgattcggatctagttcatggcctattagtaactttcaaaaaaaaaaaaaaaaaatcttgctttagcttatgttattaacttattattggccgaccattgtccctcgttaatttaatattcgactgcactttttttgttttattgtgtgtggtgcaattcatcgtttatactttatccacacatccttgaccatagcatctaactaataaaatacgatggagactagctcttaccatagcatctttttttttttaatactaataaattgtttaaaactctgatgtttagttgagtacctatgtggcccaaaaagaaccctaacgaaacctcacttgaatctatatatatggagtcatggagaagtagctcttgtccacttacgtttttagcatttaacaagcaatcaatatcattaggattatatatggagaccaagttt

SEQ ID NO: 44261 - DNA, 471 bp, Arabidopsis thaliana columbia
  unsure (1)..(471): unsure at all n locations
atatcgttcatagtaattcaatgatggttgaattagcaactcctcaaattgctcatttttcaaattccacaactcgagtctctattcataacttagagtgtgtgaactttgtgatcttaattaacagatacgaaaagcctgtaattcaatatacaagaaataaaagaaatattagatcaataataaacaccattcattaaaaatttattaaacatacaacattatataaaacatatagtggtttgttaattaaacaaaaacataagctttaacactaatcttcatcttctaaaccactttgttgactttcatttcaatctagtctttggttccccaaatgttgaataatcctccggctctatgtgattgtggttggaattctctaaatccagtcattgtatctgtcaatgttgtctcaaaggcttgttttctacgggcacctcaggaactacttgcgataganctcttgag

SEQ ID NO: 44262 - DNA, 477 bp, Arabidopsis thaliana columbia
gttaagcgaccacgaccaccaactcctgagttcgatcctccacctgacgtagccccacctcctccccctcctcctccaggcttcttcaagcctcggcctccgccggatactccaacaccaatcaccgtcaagcctccaccagatactccaacgccggtcattgtcaagcccccaccaacacttccaacagtccactaacctctgtcgtagtaaaaggcttctcgtttacaaggctttcctagatcgatctctttgtgtgtgtacaataaaataaaattatatatgtctcgagatctaagtataataattgttcttaactttactttgcaagtattttaagtgtaatagtcttttgtacgttgaatagttgaccaaatatattttacttttaaagctacgtccgtgtaaatcgcttgttcaaaaacatcaaaccagcatcagctcgagttgcttgatctataccaaatctttgagtga

SEQ ID NO: 44263 - DNA, 1047 bp, Arabidopsis thaliana columbia
ctctcaagtcttacctcagactgacaacactacagctgaaagaacttccaatgtgttatctcagccaggtacgtacacaactatggatcaacaacaacaacaacctctggctcaacaacatttcttacaccaaggcgttcagtatatccgtcacgcatcacaatacataccaatttactctcatcagcaacaaaactaccctgtttacgtgatgtccgtcccacaatctcagcagtatatcccagcaggaactcccccgctctacccgaactcaaaacccggcacaaactcgagacctgaagctgcccagaacgtttaccgagctgctccccctcaggttattcagcttcagcaacagcatcagtacatgggttacgctggagctcctcaacatagcacaaacgcaaacgccaattacggtactggagctcctcaacatagcacaaacgcaaacgccaactacggtggaccctttgaatacacaaactctccaaacgagacagtgtattaccacacacaagctcctgctgcaaacactgccattccattagcgtctccataccaaagcatgacaccagcagcagccgcagcagctctagccgatatgtccaagcaaatggctcttgacggcggcaaacagcaacagcatatggctgcgtctcagccgctttaaacgctggatctttggtaataaatgcgcaaagtgttaagtatagccgacacggcgcgctctgttctttttgcgtattacatgtaacgtcctgttacatctcgttagatatacataggatttgctatctcgttgttcttatcgtagtttgcttatgtctctctctcttttctgataaataaatatgttttggatatttttttaagttctatattggaattatcttgatccgaagattacacaaaaactcaagaaatggaacaccagtgtatactagatatagaactgtgaagtgatctgttgaggttgcttcatgctttgtcactttaagtgatgcattcacacttgaaaacttgatattgcagtcagaaaagaaa

SEQ ID NO: 44264 - DNA, 410 bp, Arabidopsis thaliana columbia
ggatcccctaaataaaatagaatcctgatcaaaaccaaaatatttcacaaccagttttaagccatcatatgcaagaaacaattaagttgtgaagtgagcaaccaaatgccaaagtggaaccatctcgctctcaaaacaaaacataaaatgggcctttttgtcaaattatacgggggcaagagtattatgagttttactcagtctggacatgtaaaatataaacccaataggcatcaaactcataattctcaaaaaaaaaaaaaaatgtatggtctagagcaaagcccaaagtctaagttacaaaacaaaacaaaacaaaatttaacatttaattttatttatgcatatcattttatcaatgataagttgaaaggttcaaaattttgtcattatcaatgaaatgaaaggtt

SEQ ID NO: 44265 - DNA, 292 bp, Arabidopsis thaliana columbia
cgttcgtgatagttcgctggccaatgaaattcgtacttattatcgatggacattgagagtcgtagatagttgagtatgccgcatggaattcagtgtactaggctttacttatatggtttctcatagttatctatagcgaaggaatatcaaaggttgttgggtatctcatgtcgtcgacacgtagatgcatgatcgattccactcagtcttagatcatttgcttgtcatatttggggttattctttggacacatcgctgtgaagttcgtatgaatgcatgttctggtcccagg

SEQ ID NO: 44266 - DNA, 618 bp, Arabidopsis thaliana columbia
  unsure (1)..(618): unsure at all n locations
tgataataatttgcgatagaattaggagtaaaattctagaatgacaattaaaatataattatacaattaaatactaccacgggtgaaatcctagaattgacgggcttgattcgatattaatatgggatggtgtacaacgggtgaaattttagaattgactggtttgagttgataataatttgcgatagaactaggagtgaaatcctagaatgacaatcaagttattattatacaattaaatactaccacaggtgaaatcctagaattgacgggtttgattcgatattaatatgggatggtgtactacgggtgaaatccgagaaacaacaatcaaaatacaattatacaatattaaacatttaacaaaataaacaaatacaacttaaaactttaaaatttgagttataaaattttgtctcgcggtgaattatacatttaaatcaaacaatagcagaaatttattaagtcatcctaagaaatattcaattatgttttatttaatgaaaatatagacccgcggtatacccgantctaatatttagtgctattgataaatttatctcacgttcagctttgacattgtgaactcattatgagtcatgactctgtttatagata

SEQ ID NO: 44267 - DNA, 1234 bp, Arabidopsis thaliana columbia
tgactcactcctttgcaactggtgtgtaaggaatcagagctttctcaattccatgaatatgacacttttcacctgaataataagtccactaaaatttataatctccaaaaacaagaagtttaaaaggaacaagtaaatctacaaatatataacttcaacacttatggtggccttgctcgttagataacaccttcttttccaatcttccttattgtatattgagaaactattaggaatgtccttctttgttttggtgatcactggaatttcattcaaactataagagttttgtctctatgagaagaggatacaaaaggctactaagagccaaacaaatcaaactaacgactaatacgttagtcgagcaattgaaaaagcttaagcaaaatcaataactcaaagagagaaataatgatagaggggagctaacaagcttaatccgagaaacaactaaaccaagacaaccgattctagcaccatcctttgcttccaaggaggccttcaagctacgttctttcgctagcaatgcgaatgcgacattacgacagacaattccatcgaaaaggggaacttcaatgacgatcgagaaccaccaatccatatcacatagagatgcgaaagtgagcctagcttcaccgcagaagatcttcttccctacaataaatctttccaccaaaaggggcatttgagaggacatatatatatgcataaaggagtaaacatgacaaagaatgtcaaaccacaaccaaggcaatctaaccatagaagccttatatactaccatcacattcataaaggaaagggtgaccaaaacatggacacaaatacatcgagtaaggctaatgatttcattatctaaccaacaaatcaaatagaatgtagagatagagcttaaaaacccagaatcaaacctggtagggacgtgagctggatcaaaaccggaatatagcctgcatactgcaataagggagtgcctaaaggcaaaaagagcaccccaagaagacccaacgataggtgataaggcactcaacgaagccaccaaagggattgagctcagatctaaaaatttagaaatctgacttgccggagacagagaggaaacgaaacaaatcaacaaaggccacgagaccacaccggcgaaattccgtactagcaagggatcaagagggtctggaggttctagcggatctggtggagaaggcggaataattgacaaagtcgatgccggtggacg

SEQ ID NO: 44268 - DNA, 562 bp, Arabidopsis thaliana columbia
ctcttgcctctacaaacaaaagtaaactaagcattaaagataagtgaaacagagcaattttagcaaattcatatgaacaaatacataccttccatttactattcaatacattagctatatcaagaacatctttaatcacagtaagatctgaatacacaacaaattagttccttaagctcaaaattaggaacgaagaagaagaagaagaagtttagttacatttgagagtctcgcagacaagagcgaaagtgccgcgtttgttgcgaacggaaggacttaagacgagtgatttgatggaagcaacggctcgtcgctcggcgtcaccacggagaacggtacggagtatattagctgcttctcttctggcgtagagagctgatctctctaagctggaaaacttttgcttagtagctggtggtgtttttggtttgcgactctcggcgccggaaaatcgttgtttcccgtcggcgtttttggtttgtgactctcgacgccggaaaacttttgctttgtagctggtgatgtttttggtttgtggatctcgacgccggaaaatggttgt

SEQ ID NO: 44269 - DNA, 782 bp, Arabidopsis thaliana columbia
caaatataagtaacataccaaacttgagaaatttacctaaatagaaaggagatagacatgaaagggctagggcattgtttacgcgtaggcattgtgacataaatctgtgcatcaaattcacacttaatcattggacaatgaaatggttatgtaagtttattaatatgtaacgtttttcgtctttacaaagtgcaaatactcaaatattatagatcaatgtaatactgttccggtcctataaatagattttatatattcagtgctatgttatttgaagtaaaccaagttctaagatgactcaacgaatgctttaattatcgttcagaataaattctgctttaattatcattcctcttagattagttataatctcagaagtccaaaccaacaacaactggtagtattattcatggctgcagagaagcttgcgtgtggtgtacggtttaatcacttaactggaccaacccactgaaattgaaccaggcttaaccaaaattgatttccctaacaataataactaaaccgattcgaaaactccgtataaatagatttaaagaaataaatttaacatttactatattaaaaaggaagggatccgagtcacttttaggtttattatgtattaaatgtctgtatatatatacaccaatttggttaaaccgaaccaagaaataaaccaaaaccgagccactactcaatatggtgattttgcaattgaactttagggtttatggttaaagcataaagtcactatataaatagtaagaaaagcagagttttgg

SEQ ID NO: 44270 - DNA, 580 bp, Arabidopsis thaliana columbia
  unsure (1)..(580): unsure at all n locations
aaagatctttagtcagattcagccaaaactcactaaacaattcagccggattcatcaatttaaccagattcagccagatttctcggttaccatttagacacagtggcccataagatcactccaatgcttcctctaatgaagcctccgaccctaccagacgtcaggaagtacaaaccccctgaatttatctccatgaagacgaaatctccggatatgccaaaaatgagtatcacaaacggtgggcttattgtgatcgattgacagtcgacaaaaacgatggtaaatccaccatcaggcgaaggatgcagtgaagaaaggagaggaagatggaatataatatagtgaagttataatgattattaacattaagattctcctaaatatcgatgcatatatatagtttttagtttttaataaaggttattttgtaaataataaaccaacatggctgtaagtaaatanacttgaaatttatttagtcgacgactgaatattgcaatccattttaatttataaatgaattttaaagttagatcattggtgatgttttaatttcattatttgtttgaatttaaactag

SEQ ID NO: 44271 - DNA, 383 bp, Arabidopsis thaliana columbia
tattaccgtggaattattgtatcaatgacttatttaacaagtgaagatggctttgttttattccctcatggatcaaggttaaaaacatgggcaaaacagaatcagatacacacagtagtggggcactaatggcatcacaaattcacatgtaagtaatgtccttccaactacagcatctatctttactccttaccctcagatatcctcaaggggtcgataagaggtccacggacactactcgtcctgatgtcagcaccgatgcaagaaggtctgcaccgcaatgcaggctggtgactgaatgtcgtcaaatagctggcatatgtcgccatactgcacttctaatcggagtaattaggggtacgccattaaacttggtgacgatg

SEQ ID NO: 44272 - DNA, 582 bp, Arabidopsis thaliana columbia
gaatcctctgaaccaataattatcacccctactaactaaatcgatcagaaacatccctaatcgaattgaatttgaagaaacagagcactaaagaaggagactacagtacctaatggacgaggtaggctccatttcagcttgaacctccatggggaaagaagagtgatttgagttataaatctttggaaaattcctctcagggtacacgtttcttggcagattcaacgtgatttagacgcatttcgagaagaaagagcgattaaaaattacttctttatcagattttcatttcaatttacagtttttttcccttggattgaggatcttagttcttaagcgaggttacagctttttccagtggattactaaattggacgagagagtaatagtcaacactcaaaaagtctttaaccttctgtcggaacaagaagggcttgctgtccgttgctcatctcatatagtaaggcccaaaaggccaaaggcttcttttccaattaaaactaatttttgtatgcgaaattatgatgaagaaatcgtttcatggcacgtcaaaactttcgcacacaatttttttttcaaaag

SEQ ID NO: 44273 - DNA, 572 bp, Arabidopsis thaliana columbia
gaggatagcaaatcgcctaggttcgagacacctattaatgcaccaaacgtcgtaggttcgaaacataatcataataaaatcaggagataaacaaaaaaactttaaaaaaaagagacatttttttttgcataaaacacaaaaaatcacatgcaaattctctaaaagaaaatgaaaattccaaacaggtctcagatccatatttttattatgtttaggtttaaaacaactatataaaaaaagaatgcgattcgggtcgacccgggataaactgggcgaaactcggaaaataacaaaaggaaattaattgtaatcgaccgcctaatcgaacattagattgatcatgtcttcaaagtaatcgatctatctggcggtggcttgtttccttgcctaagatgctggccatcctccaatcgagctcttaatggaccggctggtcgattggaatcttctactgctctagctcttgatcgatcgatcacatggtcgatggcttgcttttctgtcaactgctccgacattttggtttttaaggatgttccaaattaatttactttccgtccaaaatgatatat

SEQ ID NO: 44274 - DNA, 570 bp, Arabidopsis thaliana columbia
aaaagaatccagccaaacacgctttattcacattttgtgctggctctatcatcaaataaacaccattgagccactaaaagcaaaacgctccaattattgaatgaaatcgaaacttattagctttgcgagacttgacgacgcctcaagataagagagaaatcaagatcgaacatttggatttcaatcccgaatccatcgccaacgaccaccactaagcgtcctctgcttaagactccgttcttgatcaattccgccgacaaaatcttaccccgaagacgtgacataagaatctcaaccatgttttgtttcaactctcccattgagaaccagaagataggaacttgaataccctgaccaatgactgatcctttaactccaaaaaacctgtatcataatacaaaagtaaacaactaaatatcctcaacgaaaagatcagcttcttaagcttttaagtcttagagaaaaatgtaatcataaagctacttactccttctccaacatggtgtacattactcctcgacttttattaagaaatgatacctgaatgatacagaaagcctcaaaagtatt

SEQ ID NO: 44275 - DNA, 545 bp, Arabidopsis thaliana columbia
cggtccagaaaggaatacactggagtaaaaggtatattctttccaaggagaagaatgtttatagtactcttggtggattgttgcagttgtcaacttgggagagaggatgatatggtgaagtctcctccctctctcccatgtcttgttcattgcaaagtcttgttctttcatgtttcttttcatatacacttgttaatgaataaagttgaaaaaattcgtgaggaaaagtccgaatctatcttctctgcaaaaataaaattaagtaaaagaaacataaagttatggtttaaagatgctttcggaaactccatcattttagtgggagaatcacataaaagattggtcgtcaattatttttcttttattaataaggatgcacatgatgatgaatattaaccgtaatatactaatatagatgacaatgtatttcagtgctaaattatagtaacaattaattgaatgcttaaatgaatcttttattatatactactttatatgtgttttttttgttttaattgagacaatgatgatgcacctagacaaga

SEQ ID NO: 44276 - DNA, 470 bp, Arabidopsis thaliana columbia
cagtaacgagatactgatccgggttcacaagccagaaaagctgatgcttagatggcaaatctaaaccaacctgatgtcagggtctttcaaggaggtgattatctgagactgatgcttctttatgatatcttgaacatctgtgaccatcagcatccgcgtcatattttcctgtaattttgtcaaaaaatgcatcatgagaaaccaccaaccacttcacaaactactccagctaggcttagatgcaggaagtggtatgcaagatctcaccaagcctagatatctgatgttgggctcacggacagaaataaacttgccaagaagagcaacacactgtgacatcatttccttctcagcatcaagatgcatgacctatatcaaaacacattaaaaagttaggaggttgccactaagccagagaactgttaggaacaattaagtcaactatccatgataaacctcttagaaatagt

SEQ ID NO: 44277 - DNA, 596 bp, Arabidopsis thaliana columbia
tttttgcgtagttaataaacatgaaagtgtatgatccagacacgtggataagaatagaatctagccgttggatctacacgagaatcacgaaaggatagttattgactctttctgattgcggagttggagacaagaatccaatcaaaaacctctcttctctgcctctcattatgaagccgctttctatttcacaccctcttatacgtcgtcgttttctttcaaacttttaacatcattgttttgtacctatatttacattttcaacacatcacgccatcattcaataaaaaatttcgcaagttaaatttactttccgcacaaatttaaaacaacgaaataaaattcaaaaagaccagccatctagaaataattggccaaaagaatatctataaataacactattgttagcttaacgggtcaaatgatgttggtttagtccaattcaactccgaatcaattcaatgtcatagtttaaagaaaattaattttgcactataagctatatattctaaaagctttcagataaaaaaaaccaatatctagactagtcatagttgttctttagagactttgtgtactctttttccattttttgc

SEQ ID NO: 44278 - DNA, 537 bp, Arabidopsis thaliana columbia
agtaacggccgcagatcccccaggcagcagaagaatgcacttgtgttcttgagcttgatcagaaacatagcggcggttgatgctgagggctcagactttagtcactcttaaagaataccaatctgctctttttgatgtcaccaggcttatggagttgaaccctgattctgaggtttatcagaacctcgaagctcgcttgaggacgcagttggtatatatatatactctctgtcttgctttcccttattgatagtgttggctcgttggatttggatctaaaaagtgtgtcttgtttctcttggtcaaggaaagtcccttgctccaattcctgagtctgaagcagaattggaagaagagagtgacgttgaacaagacgctgaagataaagaaagtagagaagttgagcttggtgtcaatgagagaagagataagaggtttgagtcggtagttcccttagaagagatctagagactacaggagaagatgcgataaacaagggggaagttgttgacctaaacaccagagttagagacagac

SEQ ID NO: 44279 - DNA, 562 bp, Arabidopsis thaliana columbia
  unsure (1)..(562): unsure at all n locations
ctataagtcctatgaagagaactatatgcacatagctaatatcacatatacaggaggtatcaacatcaaatatgggcctttctgcgttccaatattctagtcaggaaccctgggccaaatttaacacagttctgatactcaagtactagacagtttttcatcataagttaatatatccatggaagatgtaagatctaaatatcaccaaagtaggaaccaacatcaaaagaaaagtagattcagaatagtttccctaagacgtgttctcggttacctttgggtagtcggatttgaggatgaggtcgaggcattactgttgaaccttctggaataactggaggcatctgttgaaccaagttgcatacctctgctgaatgcattagcaagagaactctcatctgcactatcttcttctagaagcaagtcatcactgtacatgtnacaaaattgcgcatattagaacgtccaaatgaaggactggggtaaaacatgttacctgaaaatagaattttgacatacaaatagtattatattatgcaactgtaaatagcagaatgaaaag

SEQ ID NO: 44280 - DNA, 471 bp, Arabidopsis thaliana columbia
gaaaacttattttcatagtatcaagcaaagattataagtaaaataaaatcttcaggatcttagctaattgtgaaacatctaagacaatcacattgatcaagtaaaaaagaacaaagcattaacttccggcagaagggacagcttcattcgcataccggaaatggagaaaaagaaatcattcattcaatatcaaaagaaaacagaaaccaaatgtgtctaaatgaacaatcaaacacacagtcattatatatacatacccttcaaactcatatatctcaatgggtttctcaggacgaggcccgaccttagcagtttcctttaccgtgatccctacacatcataacatcaaccattatgattaccatctatgcacaaactcctctgaaacaaaacaaaaaagtccacagctttgaagggaacttttcgtaatgcatcaaaatcccttctaataacataaaccactagacacag

SEQ ID NO: 44281 - DNA, 499 bp, Arabidopsis thaliana columbia
ctttcctaacagtggaatgatcaatggaacactctctttgtacctggaaagagaagggcatcaagactacagcgaaaagtaaactacaatagaaacagaggctggaaaaatcagagttaaaacaacagttataccttttccagagtagttcttccagaaacaacctcagtttactgatgccaatcctactcttttcctgttttgtcagtaaacggcccaacttcttctctaaagatgcaatgtcttccatttctctaagtgacacagcctgtaataaaaaccacacatagtttagaaaaagacctgtttaacttgtttaaggaatcagacagcagagcagagacctgtttgaactcgtcattagacttatacactgaatcctgtccatagccaactcttccagaaggcacagacgtgaaaaaaggagaatcgcccaataaggagctgtcaagtgcgcttgcaggaggtgagagaagacttcacgtcagatgaacatgag

SEQ ID NO: 44282 - DNA, 1138 bp, Arabidopsis thaliana columbia
aacaagtgaagtgattgcttctctgactgatcaatcattgaggaaagtttctgatcatttttttttttggtttatgtcttcttgtgtttttatgacagtactataagtatgtgttggagacgccatttgcgctcacgggaagtcacaatcttgcaaaagcgacagataagggaagcacggttgttttgtttgttgtaagtgctactgaaaagcaatggcagagctcacagaagactcttgaagccattcttgattcttttcaactgtaaatcagagtttttgttatgactctggacttgagaaactaaagagcaaacagtttatgctaaggagtgtctgtgcgtagtaacattaactcattcttttctactgtaaattcgagctatgactctgagacagatctcagtggtttatgctcagcatgtctttgttgttgtataactttctcaggtataaaagaacaaaagattacaaggttaggattcctatatctcgattcaagaaccgaactctgactccaatacattgtgtggaaactcccttcttcgtatggtttctacatacagagcaagtcaactggtcatgagatgagggacatctggtcgtggaagaacgcaagagtatgttatatacttcacaccgtccacaagcacgactatgaaaactcgggactgtggttttgttcctcccatcatcccatcgatgtctccattaccgccttctctgggatcaacaagcacagacactaccattgatgggcctggcttggtttcccggaacttgtctttgctagagctgttatgatcttctttggtaagattaaagtcagataccggaagaccaccactgaggattcttctgttctttttccccttttgtgtatcactggtgttcttacactgttgagtatgtggagaagcaggaatgatggctcctgagtttgaggagacatcaaactgaaacacttcagtgcacatccccgaactgaacattggccctatcagtggatacattaaagaaaaataggtgttattatatgcaaatgcaaacgtttcagttcactattctagctaaaaggctgctctccaagtctcaaggagagaatcagtaacattggaagcttgtgaatactgcaaca

SEQ ID NO: 44283 - DNA, 518 bp, Arabidopsis thaliana columbia
catgacattttctgaaaaccctaccacgcaattttactaattttggatttaaatacgacaatgtacctaataagcccttgcattatccccaatcttacttgttgacaaataatgtttttatttaatatcatataaattcataatcaaaagaattctgatgattggcgtcacgattaataacagataagcgcgttggtgaccctaattaaatacggtcaacgtttaattacattacaaaattcccccaaaaaaacatttgcctagttgtcttgtaagacaagtctccacgatctcataagtgtagaagaaactttcaaaaacctctgctctgttttcttcagaaattttttaagtaaaaatgatgagtaatctgaaacttggcgttgaagtcataagcgcaaggctcaaacctagagaggactatggcggtgttacgcttacgtcgagctacgatttgacgatcagaaagtcataactatgactaagatcgatgactctagtccggtgtggacgagaag

SEQ ID NO: 44284 - DNA, 522 bp, Arabidopsis thaliana columbia
ctactaaaaaatcataatttgtgatagataaataaatttaattttagaattttgggttaagtattttgaaatataaaacgaaaatttatttcaaaatttctaaaaacgagattatatgttacaaagatttatatttactataaataaaacaaaaataattaattacaagtaattatcattatgccttacatttagaaatatctaagcaataaattgtacatactaatttccaaatattttgggttttattttttatttttttcaaccagatctttttttaaataaatccataatatattattaaacaaacttgagaaataatgtaaactaattatacatttttcattcaaaaaaaattatccagcaaaataaattgcttttataggtgtattcaaaattttaattatattccaaaactccaattaattatgattacacaagggaaagatgaatatctaagatgtagctaaggaaataaacattattacatttgttaagatatattttttttacaaattatat

SEQ ID NO: 44285 - DNA, 408 bp, Arabidopsis thaliana columbia
gactctcagacgtcatcccatacttccgttatattcaccatcgggttattaactaattgatgcaggaatgatggattgcctacattcactgaaaactttgtgaaggaccatctgttaccgacaatgtatgtggactataggaaaggcgtacagcaagctatatcaagtaaaccccatatactatagagatttgatcatagagttgattgctattttagggtaattattctctaaatgtataacatagaattgcatcttgaaaagtgggccgtgagtttggccccaaagacttggagttttgccatcacaaagtcgtactagaagcattggctctcaaaactaactgaatcggtctgccaatatagggtatggcagtagtactgaaagttatagcatctttgagaatta

SEQ ID NO: 44286 - DNA, 511 bp, Arabidopsis thaliana columbia
gcatagatttaatattagaaaagagagccatgcactaagtctttcggttaaccaacaattagacaagaccttcggcgttgaagctgaagctcagtttctcctgcaccacctacaaaaccgccaccggttcccttgcttcctgctctcctgcacaacaatttaacaacagtttcatcattgtctcaaaaatcaaaagagtaaagagaatacacaaagtagtatagattaatcactcaccctcgggcactgacaacttcagcttctccaaactgcccaaaagtatggcgtccatcagtaccacgcactcgaaccagtctgctcttattgtacatcaaagcagctaactcagcctgtgaatggatgaaccaatcagctattaataaacctttcctagtatgtaaaaggacaaatctgtattgtcacagtacctgtagttttgcttcctttgtatgcgcatgagcattaaatatttcgattataagaccacacggtctaagacaggttttgccat

SEQ ID NO: 44287 - DNA, 561 bp, Arabidopsis thaliana
agaaagtaacaactctttttatccatctccattaacaccgagatcagtacttccagggacaatgatgatgtctagtaactctacatctccaagtctatggaacttaagagctcaagctttggataggttaagtcctgttgatttgaagcggtttgctatgcagatcttgtcacagagagattcagagagtgttagtgaaacaaagattggtatcgaagaagaaaatgaagagagtgagatattagcagaagaaaaagaagaagaagataatgatttctctgttttagaaacagagggaacagagcaagagattaaaacagaacatcatagggaaagttctggaacagagcatgagactgaagcaaaggatcatagcgaaggttttgaaacagagcatcatcgtattgaatgtttcgaaactgagcatgagattgatgcagatgatcatatcgaagattttgaaacagagcatcatcatattgaaggtttagaaacagagcatgagattgatgcaaatgatcatatcgaagattttgaaacagagcatcatcatattgaagg

SEQ ID NO: 44288 - DNA, 552 bp, Arabidopsis thaliana columbia
catatttctgatagaaatgtactagtttttttctttctcatcaatgtattgctttagaaaatatttacttttttcaaaagaagagagaatctgtacgtagattcatggaatttgcataagacaattcacctttgaactagactacgcgcgcaagttaaaaaaaaagtgaaaaacgagcagagtcaaaagacatattaaaggcttataaatgtttacattttatttggtcagcaaaacaaacatacatttgtataaaataaaatataaagtaagataacctctcttcataagtatgaaacgcctcaaataaggtcaactcgatattctttgtcgaactttttttagcatcaaaatttccaagtcttaccaattttaaaatccaggattcaacgagataatatatttgtaagtatcattatatcatctaagaaaattagattacattaaaaaaatgacaaaacggttacaaacctacctccaccttacgtagaaatagtaatcttattttaaaagttttaactttgacaaaaggaaattaaaatttagccaatt

SEQ ID NO: 44289 - DNA, 485 bp, Arabidopsis thaliana columbia
aaactaattctttttggttttcggtttggttgacggtagggtcctgaatcaagctgataccccaaaatccgaacggatttctgaaaaatctgaaacctaaactcgaatgtatatccataaaactttaaacaatacatacacatgatttgtttttaaaggttttcgggtccaaatgtcagttttatatcgggtatcaattaaatttcaccgaagccgaatgaccctaaccgatccaaaccaaaaagtttctggttcctacacggatcctaaacctccttatccaaaaaacccgatctagaccgacccgaaaaacctgaatgcccatgcctagttataatcatggtaaaaagaatatgcagctttgtaatttagtgaatgcttactagcatcggaaatgtttttatgtgaaattgtgaattgtaatatacttattagttattacacatgaatcccaagatccacccgtaataaagaggccattagtt

SEQ ID NO: 44290 - DNA, 521 bp, Arabidopsis thaliana columbia
tagtacagtgtgctctaaaggctagagggtcgcacctggggtatcctttttcaccgacgtatttcctcttaaattcgtcaaggtcaatcttgacttcttcctctgtcacttcatagccctattggtcgagattagtgccctgcgactggagccaggcagaacgcaataacgtacgcggtcttgcagcatttcgaaaactgttcgccatgtgcgccagacgcggatggtctcgcgctcggcgtcgtcggcggaataattgtattcgtcatccatcgcgatggaaagatgagctgagaaaagttaaataaaggaagagggcgagcgcagatagttctcgctgagaggtagtgaagctcggagggttgaacgctttgcgtcgaaaaatcgggcgagcgctaagagccgcaacggtaagcgccgccaatgagacgccagaaagccccagaatcctaaaggccagacacatcttccaccttattcttttctctccttcccccgcatctctcttttttcgctgtctt

SEQ ID NO: 44291 - DNA, 605 bp, Arabidopsis thaliana columbia
atcaaggataatcaaatacttgaataaagattttatagttaggattagttactaaaataatgtgatttctttgataaaaaaaaagaatgtaacagatttatatgtagatcgaagaatctgaagtttgttgaaaactagatattttcagatccaatgaaattacaagataataactcattttctgttttatatgtttacaaaacaacttcttctttttttagataagtaaggatttatagcaacggaaaaaaattaaaataagatttttttttgaagaaaattatttacagatctttgactagtttccaacatttgattgagatagtttaattccaataaaaaattgaagaaaattatttacagatttttgactagtttccgaacatttgattgagatagtttaattccaattaaaaaaatttagaagttgacttacaatgaaagaacccaaagaagtgaatttttatggatcaatatcaaaccaattaaccagattggctcgaccaaaataaaggacactgagagggtgtattggaccttacattttgaatgaattgaattttagtgacttttagctcaataagaccatttataacacaagtttt

SEQ ID NO: 44292 - DNA, 576 bp, Arabidopsis thaliana columbia
gttaaaaaactatcacacaagcccatattttgacggattggtccaaaatcgggtttgaataaaagaacaaaataaacaaatcattagtgagtcatgtagattttttatatatatactttctattttaacatatttaatttgaaatttataatcttcaaaagttaaaaaatgaaaacaatagtataaaataaaaagaaaaagcttgggcacaaagcaataagaagtgaagtggggcacgcaagcggtggcgcgtggctcaaagcagcactgtgtctgtcctctgtactttttttcccgccatttagccgcctctgctaggtgggtcctactttcccgccattatattattcttcccacccaaaaaatagtcaccatacctaaccatctctcatctcctgccacgtattcactctcgccacgtgcccgtttgtcctctgcgatggactctgttctctcgtttcccaacgtcactacttttattataattttttttttttttttttgtggtcttatgtgattatgtgaaaatcaaaaccttaacaacaaagaaaaaaactatttctggtcagatgtaat

SEQ ID NO: 44293 - DNA, 400 bp, Arabidopsis thaliana columbia
tacaaaaattgtttttttttacattttctgaatataattttcaatggaatatgaaaaacaatgttttttcaacatatgttacggacaatacggtacggtatttcgcgattgtgtcaaactttataaaaacagaattttgtgtattaaaatgaagggaatgaattttagataatgtattattcaaaataccacaaagtgatttactatgatattttacctccgcctttgatggcggttctagttgaaggcaaaatcaatactctgttttcattgataaagcttaaaaggttacaagacatgataaacttgtttatatataatgtctgagacttgctaaaaccctaggaagacaagacaggtggcagacatcaagctgggatctctgaatcaagggtcaaaa

SEQ ID NO: 44294 - DNA, 583 bp, Arabidopsis thaliana columbia
tttgaaacaatatatcaacagcaactaaagctgatatgatatatgccaatttcatgtatgaccactgaatcataggtgaatgtgaaaatggagatgaaagagaagctaatgaggacaaaagagggaaacaaagcaaaaacggtggtatgaagcttatatgggtgtaaaacattctaaatcttaaacacaaccatatcttataaagttataatgaagatgcatgcaagataagatacaatcagagccgttgatcttgaatccaaaatacatgctctttgtttgttagctacatacgtacatatacacatataattatgtcacgtacttatctcccgacaatttcatgtgataatcatcggatcttccaaaacattcttacccaatccatctgttgtatttcgtcttctatgcaaagttgtataaagatgttcattaaaacatttagttatgtcttctcaagtcccacaagaactatctataaaacgaatagcccacaagaactcaaatatagatgacacaaatccacaacttcattatgcaacggccaaagcattgtaatggcgaggggcgcatgatatgatgt

SEQ ID NO: 44295 - DNA, 591 bp, Arabidopsis thaliana columbia
atttgggattgggattgtgtatggaatgagtgggaaagagaatgagaatgaaaagaaaagaaaaaaagagagtaagagtttagagttcttaagggggatagaaaagaaagtgttagtctagtaaagggtttggaattcaaagaaagttaggcattgtaattcaaagaaaagggtaaaacgccttctatgctaagattagaagaaaagccttaagtttgtcaaagtttaaaaccaaaccgctagactcttgaatcgttttaaagaagcaccccttagaacttaaaccaaaaaagagaaagaatgggaaaaaggatagagttaggtagatgggagtctgttcttgtatgtgtctgttagcttttacctttagcattatgctaaagctcaatgttttctatgagagtccctgttactcgaccatatcattagagggaccattttttgtctcttagcctaagcccgaaaccaagtgagttcataacatcgcattgcttgatctattgttcgggcttaataaatgttaaaaggaattggttgatgtgaatgcttaaatagattgaggcagttgttaggttgcattgtgacgagtat

SEQ ID NO: 44296 - DNA, 540 bp, Arabidopsis thaliana columbia
gccactaatcaccctaatcaacaatttccaaaggtaaagtatgaaaagcacttaaagattttggttcgggaatttcatcgaacatcttccgggcatcaaatcaacatgatcaaggttgatctagccttaaaagcaaccaataagtaagaatcttaagtaatctagccctaaaatccataacccaacatctaaaccatcctaatctaccctaaccaaagaactctaggagactactcactcatgatcatgatcatacaaaggaattggtttgatctttgtaaagccataatcattagagaatagatgagaaatttaaaagaaatacttgatatagaaacttaagaactcaacattcatacaaaaacctaagataaagaaccttcaagagaagttttgatccctaaacaaaagctctttttctctaaaactaggttaagagtatttctagtaatgagaaaataaaccggatcaacccggaacaaaccgggttttgaccctgttaaggaaggcaatcgaccaagcaatagatcacttggtaga

SEQ ID NO: 44297 - DNA, 557 bp, Arabidopsis thaliana columbia
attccaccatcccttttcatagtaacaagttacttacccccaatcatgcaaagaaactgttcgcaagagagagatcgagtgtgatagatcatataattccaccatcccttttcttgtacccacagcaagaatttgttgctctgaagccactgatgcacaaacagcatcaccaccaaccttcttctcagctctaatactctccgtgtactttaaacctttcttattcacagagcatactactagctgcccatccgaatttaacacaaacaataacttggaacgagtgcaaagttccagctgaacaatagccggatttgtagagaatttatcatcagatgcaagtgttggtgaagctactccagagactagcccattaccgagagtgtaggacaagagtctatcatcgttgctatcagaagggtgggagcaatactgaaagctccccaaactacaaagacaaacaaaacatgagaaatcgaggaatcttgcacaaagaattcaatgcagatgaagcagatgtacattacctctccgtttccaggaaatactatataaag

SEQ ID NO: 44298 - DNA, 521 bp, Arabidopsis thaliana columbia
cgacactgacaacgatgtcatgccaacctgacaataaattaactatataccaacatctatattccaaatagcatctgtttcaaatgatcctagttaccagaagatacatgaataatctagaagctctatcccctgaatctttaaatacagactaacctgcagttctgaaaatccaccaatgtcctctaccgaaacaattggatcagagtcgacaggaaaacaacccaagtgatgccattgtttcatatcaaagccacggaagtttctggtcactagccccaacctcagttcctttgcagcgatagtctgagagcacttcttgcatgttgatctgctcgatttcgaatgagtgccaataacttttgaagaatcaggagaatttttcacatccttagtcttctgctcacttatttcatctgatgcaggctttttactctcttcatcctcatccttaaccgatacaagcagttaaaagaagtatttcagtcaaaaatctacatctaggttggaaaataagactg

SEQ ID NO: 44299 - DNA, 554 bp, Arabidopsis thaliana columbia
ccatcataagtcataacaattaacaagctgaaaaaaaataacaatgtaacaagcttaattaatgggccagtgagcaattgtaatgtctgggtttatgtcaccacaaagcccaaatccaagttcagtttacatatatgacatttaggcccaatgacattaactacatggacttgttttggatatcatatgactgactacattgtagcttaaaatttctttcagaaaactgaaaatttagaaatgataatttaggatattattttatgatctacgaatgtttttgacatcttgcaatgtacagatatgaagtttgaagtaatacatttttatgcaattatgctcgacgaatttacctctacacattttctcaacactaacaaacatattagtacccattttttcgtttttgtcaacaacttttacaaccaaaacggttctctgaattacaaatctgaaccaagttttatataaagttaaacaaaatctttcaatttatgtgaaacagtaatcaggttatttacatgactcggttttaaaggcgtgtgtgactgtat

SEQ ID NO: 44300 - DNA, 532 bp, Arabidopsis thaliana columbia
atgggtttatgattatgtattgaagttggttttggatgttgaatgtaggaatcgtgaggggtattgacacagagagaggaatattatatgtgatcactccagtaccagaaaacttagttgagaaagttgatcttctattgcaaggctatattcagttacctacttgcctcttagaggtgaaggattacaggtcgccatatttatctgccaacgtcttagcttccacctgatttcttttaagacatttttgctcagttcttcgtttttactatgtgtcagtttatctacaaagtttcatgtttttttatagttcaacttactatgcaaccagggttagatcatcttggagacgcagttagttatgtgtcttgtccacacctactactaatgtcaccatttacaacttataataattttcatttgttttcgtaaatagaaatcacatgagaaaagagttcatcaacagtgcgcaagtaagcatttcaaaaggatactgtaatgttccggttacaacttctaacccaatatacac

SEQ ID NO: 44301 - DNA, 536 bp, Arabidopsis thaliana columbia
ccccctaaaaatactgtaacatcccaaatatttttcttaccattgtgaaactataatatatacccaccgctttcatatgccctaaagtttacaaaatttaccaaagtagcaatcgtttttggtcttccataggtcgatgaacaatgagaatgttgttcggtgcaagggagtttgttaaaagaacagagtttttcttcagcacttcgttattttcaccctagagattaataagccataatgtatctttaagtgaagcctttatctgtggtctcaacttccccgcaacgcataaattgtgatttaacatatatactgcacaacttgcacggcttcttcaagtctaataaatcttcaatttaggaactgatttaaaatcgactcatgaaaattttgatttctctagcattaattaggtatcaatggattacacaaagaacaacttgagttgctagagacaaggagaaagaaaaaacgaaaattattacaaaaggcgtattatatccctaaactattgggaccgttctactatcattgtt

SEQ ID NO: 44302 - DNA, 337 bp, Arabidopsis thaliana columbia
gagattatatttgttagtagtttagcagaaaacaaaggaattgatcatccacattacagtcaaaggtaatgctgcttattgaatctttctccacggtcaatattaaacaaaggaattgataatccacatccactttgtcatctttgtatcatcctccttatacttggtttgattggaatgaatgaagacaagtctttgttcaaaaaaaaaaaaaaaaaaaaaaaaccgtcccccttgagaaccctttgggccaaaaccagggaaacttggaaaacggaattggggttattgggccatttttcccagggttcaaagggggttaaaagaaatttcaaaa

SEQ ID NO: 44303 - DNA, 604 bp, Arabidopsis thaliana columbia
atgtgttgcttgtgaactattaaaaagaaagaaaaaaaacacatttcatctcattttataactaatagtatatgagtagttttttttttttggctgggggcacaatatgaatgttttctaatttttgttaaacatattaaatcttggtgggagagttgtcgtatacgaaccttttaaagcgatgtttcctataattgtgcaataataatatgaatgcattacgtgaaagattgtgcttgtattggtatatgaacacatactattatactaaaaaatttgataaagagttttttttgttttgattttatatgtagaaattataatattttcaaattatggttgaaaacaaagatgattttcttagcaagccataagcttttcttatatgcaaatgataaagtacttcacataatatgtttccctagattacgagttaagatcatatcgttgaatatagaattttgtgacgatactaacttgttttactatgaaatcatgcacaattttgtgacagaattcatgattttgctacggaatcatcaacgtgttatgattttttttttaaatgatatgttctacctgagaataatgtgaattggattta

SEQ ID NO: 44304 - DNA, 520 bp, Arabidopsis thaliana columbia
agagagccttttaaaacaataacaaaattctttaagaaaaataacccaattgcaaacggtccttaacatgtacatgactactagcatataacatcttgacccattgtagtaaactagtaggtataaaataaatattttataaacatcatgatttcaagtgtttatggccaattttcaacatgaatagtttatttgaatcacgtccgtacaatccgtctccaaggaggtaaaatgactttgccaaatatgtagttcatggctcagattaattagcattatttgtcttaacataaaaaaaataccaaattaatagtagtttaagataagaaacgttatattcattgatttacttaatgcattgtttttaataaaatgttatttattacaaaactattttcgtattttcaatatgctgatggacataaaacccttttcaaactaattgaccaacaaaaatttatctactttttttttacaaatttagtttcaatttcttctgtttttgccatactatagttat

SEQ ID NO: 44305 - DNA, 1861 bp, Arabidopsis thaliana
ctatcagcgatggatttgctggttatgtttccgagcgacatggcgatagagaaatctatgagaaactcatcgaagctggagctcagagagggcgagacattggcactactaatgtcgagagaaccacttctacttccacatgccaagagagaacaatgaagtcccaaagccataaagaacttgtcaagtacttcactttcaaaaagcacagagactcaccatcagaagcacgtagcgcattactagtggtggcttcactagtcgccacagccacgtttcaggccagcttgaccccaccaggtggaacctggcaagatagctcaatacctgctgtatcccagaacacaacgaatgtgaatactacaaatcaacaagctcatacagcagggcaatctatcatggggaccttcaatggagttgctttcactttgtttgtgttcttcaacacaattgggttttcggtttcactgtctatgctcaacattctcaccctcgggttcccattgcggttccagcttcagatctgtatgattgctatgtatttctcgcacaacacaaccatggccagcattgcacctgatcatgtcaagctttactgcattctcatcacatccatcctcgctgctaccaccccgggtttgatgaggttgctcgagaaccctattggtatgctcgctcacttcttggactccaggtcacaaaaaatttgctccatgatttcactttcatgtaaacgttttgtaacataatagtagccagttcaatatctaccttatttcaaatcacaaggacttgttgttgcattgtccagaaatcaccaatggtattacgagtgatattatgatatatggagacttttttctatgaagagacatatattatggaatacccaagaacacagatcaactcatccttctatgtcgttacaaatgcatacctgattggtctgcaaacacagaaatttgagattttcttattcatctgggagtctacatattgtgtgtgttttgtttcatatcttacactcgatcccacaaaacttagaggtgaagatacgattctgcacacaacaacctgctctaagcttcctaagttccacgtcaacagctccctttagggaagttctaatatcaccaaacgcccagaccaaggatatatgcggccgcggatcctaaaagaaaaattgaagcagactcgatgggataagtgtccatgacgatttccagtggctatacagtaaaatacaatcaagctgtaaagtactatatagaaaagcaagtggaccttgtagaactccggcagattgtggagcttgtaaacttcattaacagcatcaatttgcttacttatctgaattaaggatatgataatcagtacaatatctaacacaaggtactgagtatgcaaaaatccaacattcaaggttaactcttgttgtacaacatacctcggatagtcctgaagtagtgatttccaaagaaaggaaagagcgagtatggtcatcattcacaaagacttcccacttattgaaatctatcaagtatctgtcaaaaacagaacggaaaacaattcacaaaccccatcgtaatttgggtagtatggtaggcaagaaatgatcttacctcttctgcaactgaagcttttgccgaagcatagaaatcaccgagttaatctgatgaacacgtagtggaacgtttcttcctaagcttatgtggaactctctcccaaggcacgctcaaacttctgatcatccttgcatagaatgctgagtggcacatcagcctctaccaaatgaagatgaggacaactgatgcaccttctttaaaaacatacaatctcatctttggcagtggaggtatca

SEQ ID NO: 44306 - DNA, 646 bp, Arabidopsis thaliana columbia
gggagtacacattttttctttgtttttaagcacacaaaggcatatctatccgtgtcgacacctcaaacatgtgtagatgaatgatctcatgcatatgtaagtgtctaaacatagagatgaaaattgatgagatagacattacaaacctatttaagtggggatagtttagaaggtaacttttggttttattaaaactaaattcaaacaaaattagcttatacgaaaattaatgatctgcgtcaagtgggatcttcatgtttattaccttggtatagttatatatatatatatataacccctaagacatatgacttaaagagcatcatcaaaccaaagaaagtgaaatacaacttatgatttgaattaggtcggttttcaagtgaccgtttcctgagtcagattttgaccccacaaatcgatataaaattgcatgccattttagtttccatctactaatattgttataagttatgataaagtaaaattccacacacgacgtcattagccaaaacaatataacgggactatcaatcatttgatcatgtagagacgcccaaaccgtagattcattattacggcttagacaaaaaatgaaactagtaaaagaagtgttttcaaatagaattagcatcatatttaattattt

SEQ ID NO: 44307 - DNA, 504 bp, Arabidopsis thaliana
cctaaaatatttagaatttttagtcatgttcttattttgctgagggtcttactagaaataggagagactgaatcaaatataattattgaatcagatatgatttaattggttaaaactttgcgagggatttgctaagagctctcgcagttccctcgcaatgtaagctgcattttgattggtttaaaagacggttccttgcaatttcctagcaaggtttgcaactgatttgcgaggaaatatagtttgagcggactcaaacctgtcgcctcaaaccctaaacctaattttttttcttcgattatcttcttctccgatctgtctcctcgccggcttctcttcttctccgatctactttcttcgccgccgcctctcttcttcttcgatctgattacgtcgccgcctctcttcttcttctctgccgcgtctcttattctccagcagccgccgcaactcttcttctccagcttcagccgcgagtcgatctgtttcttctccaaggtaacg

SEQ ID NO: 44308 - DNA, 575 bp, Arabidopsis thaliana columbia
ccgatgatagctcacacagacaacccaattgaggttccaaatgaaccatccctcacgaacgcggtttaggcttttcaacccttgccatgatcatgagttttgtttgtccggacaagactaatatcgaatgatacacactctttatagggaaataataatttataacatataaatcttcttaccaccaagtatccaaaacgttttaacaatggacccttgagcatacacgctcaaatccaacaaaaaaatcaaaatcattaagttttgcaaaaagcaaccaactctataccggctttctacgtccagagcatccctctaatggttcccactaaggtttcctgtaaaacaaaatggagtcataagtaacggttcactacgaaggtcagacataccacaatcttgatacgcttatggtctctgcctcctaccacgagcaccacacatcaagacccatggttactcaaacacatagaatcatcaatatccttgctcaacacaacctcccaaccataagccttaagcataagaatctaagagatctcatatgcggcttagtccatcatgtacattgttgg

SEQ ID NO: 44309 - DNA, 521 bp, Arabidopsis thaliana columbia
gtcctggctgtagccaaagatgcatgtctgcggctatcagatcagccacctttgtgaccgattttacgattccaccaacatgcccatcttaggcttcacgtcttcacctcgccaccgatggtcttcaatttacgaaagcttcacgtcatcgccacacttcatcaccacggaccatgtgtcatggaggcatggaacgcaacatatatcttaatcactaagaacgcaacaaaaaaggtcgttgtttagatttaacaaaatcaactgcaacccgagtcaaaagcccaaaataagttccaaaccaaggagtattaaggcgaagggtagtttcgtcaaatccctcgatgaatgccctacacgcgtagtgctataaatacggaatatcatgtcatgtcaaaaggggggaatgccgcctgacacgcagagagacagagtagctagtcagatcgcccgtatcacaaagctcgtctactcgtccgtctcacaaagctcgtcagctcgtccgtctcaaaaagttcgttagc

SEQ ID NO: 44310 - DNA, 463 bp, Arabidopsis thaliana columbia
tctagttaatttattgaaggatatatagtttgggttgattatgaaattaattatagattattaatgaaaaataatctttgatcgattatttaaaccgtcgcagattgagatcgttattggaccttttcttgttgctgttatttcgaaaccgtgttagacattgggtgttgattgttaattattatgaattaattgttaaaacattataagatgtgttgtgtgatgttatgcgttaggtgttagcgtgatatacatgttgatttgcttgacgtctttaagacgtatttttaaataaatatataaagataaataaaagagaataatgatattaaagaaaggataagattgaggatcttggactgtaatggaaccgacgggttcatgtcaggtcattaatcgctgacgagcaatgagaggaaggatctgagctacgggccgtggtcttccataaataggcttgagg

SEQ ID NO: 44311 - DNA, 1227 bp, Arabidopsis thaliana columbia
gaggaggtacggaaaaatgttttgagttttaagaatcttttaagaaatccgtaccacacttttcctaacataactagttcaatttttgagatcaaatcacttttgtgtatcatgatttaaaactctgaagttctctagaacacatggataattctttacatcatatggaaccaaattcatatatggacgcttcacgtcctctacggttctcatgtgcttgaccatctttgtgatatattcggtgcccgagcaagctacttggttagccaatggttcttttgagtcaactttttattattgtgactcatactatcttctcctgacttctgctcttaattctctatagaaaagttctctgatagataacaagtaattcaaacaaatagatatagaaccatctcgtaaaaacaaaaacattagtatatgaaaattatgttttcttattattttaaacattgaaaaatacaaaaacatatcaaatgagctatttattagaagaaaaaaaaacaatttgactaaagagttagttcttatggcttatgtaggaggtcataagcacattatgaacgccagaacgtacaggcaatgccgcacgtccatccattcgaaaatatatatgatctactctagcaatatacacacgtagttgaccacattgaatataatttggaattgtaggatagtttaaaaacttttggaacatatgcttcaacctcgttataaaacttcatgttaatctcttgcctaaaaagacatttccaaatcgatcgcttggttccgacttccgtcatccttaaatttaatgatttttgtacctttggcgtttaaatattggactcctaaattttggttctctgagcggcaatgatattggagaattctactagaaccgaaattgttcttaatcacaatctcagttttcttgcaagcatcatttaccacaaaataaatcgcactaactaatatgaaaattattagacgactcatttgtttgaatctaaagtaattgtcagagaaacaagagcatcaacatgtaatagtttttttttctgtgtgtggaacctttttctttatttagcaaataatgtttgctgaagtgttaactatatttagagcaaacatgcatgaacatattagaaatttggtcaaaagagattttagtgtctaaatttatgtttaccaataagattccaccaaatgaaatacctaagttatataattgacttg

SEQ ID NO: 44312 - DNA, 1010 bp, Arabidopsis thaliana columbia
tgacatacaggtcaaatggatatgtccctctctcgtgttccaccgattcatgtgagataaaatggcttatactcatcagttttcttgtaaacattatttgatgtcacaaaattatttgggactttaacaaaaattaaaaaaatggtaatgtagagtgacctaaatatcgacccataattatttgggactttaacaaaaattaaaaaaatggtaatgtagagtgacctaatatcgacccataattatttgggactttaacaaaaattaaaaaaatggtcttaccaatctttatatacatatattaagtgggcttttccgtttttgaatatgcttaattaacatatatctaatctgtgactagttacagctactcaatgactaaaactttattttgtatatagtcataaaaggagtgggaggtttaggaatgggtgcagcagtagctctccactttgcaacaagttgtgctcttaaccattatactataaatccccgagttgttgttggaatcagcgggtggctttctaattcggggtatactcaaataatttcttaaaactaattaattttacgtttcacatctcattgaatgatgaaagactaattattaaacattgcaggagcctaaaacgcagtatagaatctgcttcacatggggctccagctcgtgctgcatcgcagtcaatctttattacgcatggaatatgtaaatctaaccggcttctctttcaatgtaactattttcctctttagataatgatcagagacaatgctaaatctttatgatgacatgtgtcgcaggcgattctgttcctcacccctgtgactgtggagaagaagctgttttgtcccttagagaggctggatttagagacgtcaagttcacaccatttgcaaggtagataaacatcaaataatattttacattttagcctgctctatatagtatatacatttttggtttgattttgttttttgtctaataagtattgggttatgacatgtgatgt

SEQ ID NO: 44313 - DNA, 542 bp, Arabidopsis thaliana columbia
tcgactctacaggactagaatcctaattacgatagtttcacttgttgggatgctaaaaactaccaaatcgtttccaaatatttcagaaattttttcaaaaatagtagactcttttccaaacctgtgacagttgatttcgcaattttaacacacgccaattaattatcaaaattaaatgaaggtgacaaccggaaacagatttgaagatgagaagacacaaaatggtgagattgaagactcaacttacagagtgtgctatgataccacatgatgagatcctcccaaggactcgacattcttaagttgagcaacggatagaggtggctgtgaaaccgtgataatggatcgatttgaatgaatcgatggatatcacagaagcttgcagaaaggcttcaaaataccaaaagagactaagggttttgctggatatacacaccagcaagatgatcttcttagaaaaggtttttgattaaaagacagataagttctcaaaagagagtacaagagtatataaagggagacagaagagatgatgacgagac

SEQ ID NO: 44314 - DNA, 593 bp, Arabidopsis thaliana columbia
gactctagaggcaaatgatttctagaacttatgcctggatggctttatccattttgcaatatgaaatacttggtgggattctaaaaacccgaaccgttttattgtctcatatgattcagttgaagtatgggtgaaacgagatggggtatcggtgtttgagtatgaccgggtttctgaagatagaaatttcttctcaaaaaatctggaagaatttatcttgtatttatatagcgcgctgtagccgagcaggcgtaaaagatactccgagccgtcgctcatcgtatgtagccgaaggtttaaaagttgaaccgaatttttattatttatgccgaagctagtactcgtacaaaataataagtgggagtatggatatacggacccactccccccattatttaatgggggggtagctgaactcgtccgaaaacgagctgcttacgtacccttttcagggatcaagccactcgtagttcaagtttagtcacctcggatttagttgtagtatttccttaggtgcattgcattccatgaccttggaacggcttagcgattaagtcagcgagctcatacactacgagtcggatgctttagaa

SEQ ID NO: 44315 - DNA, 553 bp, Arabidopsis thaliana columbia
cccccaaaccaaatactcatatggaattcggctacaccatcaaagctttgagaagcaagatgaatcttgtttaatgttagggagtcaaatatatatgtcatgtgtatgattgagtataaaaacaagaacaacattcagatctttaaagcctaagtagtgtttccttgttagaagatacacaaccaaagactcatacagactttggctaaaccatcaaagctttgagaagcaagatgaagcttgtttagtgtttttgataataggtttttaagatcaattaatcctaaagcactatcatgtcgttgtagtactgaaggttgtcaatccaaatgggtgtgatgctaacaatcaagatgtgatcagaagtcactaagtcaagccaaccaataacaggttgtggtgtgttctagcagttcttagtgccaccgcaacagagaccctaaagttaacctagtcccagactcaatcaccattgacgagagctaacctaacaggcattacgaatcaacaagttaaagccaaaacgctccctgcaaccaataccttagtacaa

SEQ ID NO: 44316 - DNA, 855 bp, Arabidopsis thaliana columbia
ccccgtgtcagactcactcatcatccacaagatacaaaaagtttctttatctatgaatctcaccgacgttactgtttatctctttctcttccattccttccacatttgagctgattgatcccctttatattttagcgaatatacaagtaatgaggacaagtaacattcagacaaaacctgacgattagaagatagtttttaccaacaatccgtgcgcaattccacagggaccaacctcctaacaattcttcaggttagactatattccattgtcctactttgaatgagactataacgtaccctgctcactctgtttctgaaaaaatatgagcaaacagattaaacatctcaacaggataagaaaacataatcaataccttggtcattagaaactcaatgttcttcgatcatagcacatgcaagaagcatattaaagagcacaagtgatgcctcaataattgtggtctgtgtagtatgcaagaagcatatgaaacaagacagtagacacacattcaggagggagagagagccgggcaaagaaagtttattaaccaaccccgtaccttccctcatccctccacgaaaccaaaaactgtatctttttattaaagggtttgtgacctgccaagcaagcgcacctgtcatggcaaaagtcatgtacaaaatcccctctctgtgtttttggtacatctgtttcttttcagtttgaaagctcaaacaaaaaacctgtacaagtgttaaaatctatggagatagataacactaactaaaatcaaggttccttctcttttaaatcaacgagagttgataactggatcaacgagcgttgatgattagaggttatgatcaacgagg

SEQ ID NO: 44317 - DNA, 594 bp, Arabidopsis thaliana columbia
atcgggagtgtgttcggcccaaccgagtttatcaagaatccaaaggagctcgtcgagggtcacaagcccgtcttggttcttgtcgagcgtcttgaacattcttcggagatcgtttgtagttatgaatgaacaatccatttgatcagagaagggtagtttggatcttttggttatgttgaggaaatgtgtaaatctatttattgagaaattgtgcaatctttatcgtctataaaacatatatacacgtacagcaacatatttatatgattagtgtgtacggaagagattatagcggaggaaggttcccggaaatgggttatgaaacgactaattttatggaaaatgatgtttctagaagaaaagtcaataaacatgacatttagctaatttcgttgtgtcaactatgacatatagctacttttatatgaaaatttgatagcgtatttaattatcatctttgatttgttttaatattaagtaaaaacagtataagaatgaaaaaattaacttgataatataaccggataacgtcatttactttctgccatagagaaatgaaaagtctaacctagatcgcaattttgtcgtacaaag

SEQ ID NO: 44318 - DNA, 479 bp, Arabidopsis thaliana columbia
tgggtctaccatcttataacacaactaagatgaaagaatcaattggtaaaggggatgttattgtcatgttagacagtggtgctacacacaatttcatctctccggatacagtgaagaagcttaaactaaaaagtcgggcaaacccaaatttccatgtcagattggggacatgcatcactgttcaaggtttggggatatgtgaaaaggtgagtatgtccctgccagttgggtcagaacatgatctagaacttacaacagactttatcactttggatcttggtccagtggatgttatgttgggaatcgcttggctgagaaccttaggggactgtaatgtaaattgggaaagacatgagctctctttcttgcatcagggcaagacggtgaccttacaaggagatgcagagttggattcttttaaaatgtctctcaagtctttgtctactgagatgcgttacaaaataagggaattgaagtga

SEQ ID NO: 44319 - DNA, 313 bp, Arabidopsis thaliana columbia
aagtgaagtatgaattgtgtatgattaacatttgcgtgaaactttgacaagatgtttttctttgtttggtaaaaaatatgtggaaatggaattatttctatatttcgattagtgtatggggttatctcaaaagatacaaaatgatgatagattgcttttgccaatgatttcagcttgttagtcggatctatgggtcttaaattgatatggagctttggacttgcgtgtcttgatgtatatgcgataaggagaaaaagtgattgacgaagccctatcttattgagccttttcactgttggtgattgggtattaa

SEQ ID NO: 44320 - DNA, 553 bp, Arabidopsis thaliana columbia
attaatttgttaaggtatatatgtaggatatggttaatgctttgtctctgtttcagatacaaaatagaggttccattataataaatgtgtaatcaaaaaagcataaaatctcacttatgaccaaaaaaaaagaaagcacaaaagctcacaaatttagagtatgaataaaaaaaattagtaaggtgaaaaaatggaacaggggagattcaaaggggtgacctgagaacacaaaactcaatggtttcaatggaaatttgaagaaaccataggatatgtgttcacatgccactcctttgaaatttcacctcctgttgttcttctcttcttctccatactttgctttcactgcttcttatatatactatactacacaagtttctacatatataaatacagtttactcttcttggtcttacttagatttttgttcacttctgttctgtcataataatgtggtcatcttgttgacaaaaaattagtaagtgtgatggaaatgaccacatccttttcttcacatacgacaacgttcaatggaatgtacacacaaagttgg

SEQ ID NO: 44321 - DNA, 559 bp, Arabidopsis thaliana columbia
taattgtcatgttttgatgtgtgctgctgttattctttgcttgcactactttacctagttctgatagagatacagatcacttaaaagattctagctttgtcgtaggattagatcatttttcatttctgttttatgttgcaagttatccgtctttgttgaattagaagatgaccttaaatttaaccttagcaaagagctaggtattcaaaaatttgtattggaattcctttaggacagtacagccattatacaaggattatccttattgagagtctctctttttcgcttttcaagttccgctaggcgctacgtttgtaactgtgaaactagtggctcaatgtgttaggcaaagctatattgtaagtttggataaagggtggttatgaatctagaacttaagtgttacagttgaaattcttagtgtgatgcccccaacttgacttaattggaaatgatactactaaaggacaggaagacctgcacttttgagttctggaattacttcttctactggtagcctagatttgcaatttgttcagaaactttaaaaagaattgaa

SEQ ID NO: 44322 - DNA, 763 bp, Arabidopsis thaliana columbia
tacaagctttgtttcttgttctcccacgtttaaacactcttttccctccaaaaaaagtcaaagatgaacattaattttgtgttcgtttactttcttatgaaatctagtcaaagaagaatattaattccagaaatacaattaaataaattatgatacaaaaaccatctatcaatatttatatttttgttattttgctgaattatactctggttgtcttatatatatatgaaaatatatatacatggaaagcaaataaaaagtaaattaataaatactacgtctttttcttatccactcgtctctgtgtatttatatgttaatttaccatcaaacgggaaaattacgtattcatggtaagaaatagattaataaatacaacggatttttatctacatagtctcttggtttattctgtacatttcatcatacataaaaaagtctaaaattaatttgtacaataatcaaaatttgattttagcaatccacatttgttaacaattacccttactattcttatttgtaatttgactaatgtaagtgaggaaagttttgaaaataaaccaaatttagagaatttctcatattgcataatcaaaattaggtagttctttcaattgttaaattgaccatgactcattatgttaacacatatatgtatgaaataaattaaataccatttttgtgtcatctcaaaatataataatacttaatatacacatttctgataagcttaatgtgagtcacacctctctcccatatttat

SEQ ID NO: 44323 - DNA, 490 bp, Arabidopsis thaliana
atcatgatgaagactatgtgtgagcttaaggttgacaaaaactcgatattcatatacacgtacactgaaaccttttatactcaatcaactgtttttggcggaaaaaaactaaaacccctttgtcaattgaaaatttatgagttgaaatctttaaaattaacctagattttgaatcaaatcattctccaaacgaagttagggaaaactaacccagatttgtcgtcgccgccgatgcctcatcattatccgaaactcctcgccgccgactactcttcctcgtcgccggcattagagttcttctctgaacagttaatcgataaacccaaaaatcgtcttattgttccacactttaacacttcctccacttaagcaaagactcgaactcgaacagagcctcaatcggaattgtgtttcagtttcgtcggaatttctctggttcttcgaaaacggacttcgtctgatctgctttctcgaagaaggaatgacagtt

SEQ ID NO: 44324 - DNA, 837 bp, Arabidopsis thaliana columbia
aaaggttctggtgttgcagcgacgccaatgtgttgacttcattaatgaactccctaatactctgtggaatcataataaacaatcttaaggaaacaaacaaatagatatcatcaggattatgaagaaacatgaccaaaagaatgtttatatacctgagtaattacgtgaagtcgtacaacagttgcgtcaaccttctttaaacctgaggtcgaagcctcatcaccaaaggaagccatgtacataacagatgaaagaccttccatgacacatcggtctgaagaaaaagcgttacacgcagccattacttcatcatatgaaaagctcctaactgacccgctaggtggcaaaggtaaaggtccagatacagctgcggatgatgataaccgaccgctgcttccgttaaacgacttaaagcttccccaattcttcaatgaagaaccagttcttggtgacggtaacggaagtggttgagggctagattctttagtagaagtacgtggatctcttggttgttcatcttgctcgtcgtggtaaacaccagcaagcaaatcccgttccgctgcaccgtggatgcttgacggagcagacatgactcttgctcggctactcatctctccggttccaccgttgttagattgaattggcttcacacgagttctgaaactcggaggagctgattgtaaattacgacttggaatctttggtggctcaggtaaagcagttggcttgctttcttcaagatccaaccgcttcatagaaacagagccacgtttcttcttgcttttcaaagggaaacaccccaaaaccatctttttcaatcctctaaattctgctttt

SEQ ID NO: 44325 - DNA, 1056 bp, Arabidopsis thaliana columbia
tatcagaaatagtgttaccaatccttcgtggtgttgtttgcgatggttgagtaacaagacttatagtagtactaaatgaatcaatgcttaatgcgttgaagtatgcagcattgacttcaaaggttgagtaacggagtatggggagatctaacagttagacgtatagcctaggctaactcgttcatttgcctttcgtcgttatgaactagaacaaaaatagaataaaaacctaattgatatatcacctattttcagagaaccatgatatccggagaaaccctagagcgaccaacaccttaatcttattgcttaacaaccgatttttgcattgctttcattcattcactttgctttcattcattgcttttattacttgctttcttatttcattgcattagtcattaggaaacccaaacccaaaaccccaagttaagttttgtcttagcctgatcttcttctctaaattcaataccttatagctacactctttatgggatcgatcctaaaatactagtactgattattgtgcacttatagtttaataggtggtctttcttgtaatgtgtgaataaaatatacatcaatgatccgcgacctcaagttccaactctatacgagcattgacagtctttacacgatgaagatgcaaccccatctatgaatttcttgaagaacaactgaaccctctagacggacgagaccaagattaacgagctccatgtgaagttaatcctttaggtgtgggagacaacatagacgtgcctcctctatagcatcctcatttcatcaattccaaacaccttgctaatgttgccgtaagacatgccacttatgtacccacctttgagacgagccgctccaaatcgtacgatagccaaattttgatgcaccaaaacaatacctgcaagatcgacctgttgtatgagtcactaatcctccaggacgtgactacaagataatacctcaaatcattggtgtaataccccgtcccaagacctaagaactggacgggaaggacgcaagctggaccgttcaaccaaaggagaaattagattg

SEQ ID NO: 44326 - DNA, 1285 bp, Arabidopsis thaliana columbia
  unsure (1)..(1285): unsure at all n locations
taatcataaagaaatggagagagccaatagaggagctctctcaattggagatgctctaacaactagagattcctccaacaactgtaattaaacacttgagattcagacacctttcgctttaaacccgagggcaatcttgtcatttcatgttgtcaccttnttgaaaaatttcggcccattccgtttttaaaattcgtttaaatttttctaaatattcgtgtaacccaaaaaattcgcagtcgagaaaaaagaaaaaaagatagccttggacccatcgaaccagaatcaatctaaaccgtcgagaataccatccaacggtcacgaccaatcaccactaaagaaagatctttttttttttttttggttttcgatcataaaccctagccacctctgttccctctcttcttgtcaaaacgaaaagttcgtgaaaccatcttcaccgccgatccttcatcttcttcttcttcaccatgtctactcgtttctagaaaaaaaaaaacaaagatttatacccatgaacagatctcgatcctcccaatcgaatttctcaaattttcttcgatctccagagatctcggcgattttcattttctttcttctttttcctttctgggtagtactaatttgatctcgaatcgaatcggttaaatcgaaagtatctagctcttccccttccaatagccgtttcaatttcttaaattttccttgaaaagaaagtgatttcttttataaaatctggtcagaatcggggttggttctgtaagaaattcgtgtttttttacagagattagtgggtatagatcgaagaagaggtttaaaacaaagccaatttctgagttcagtcaagccagttgtggcatctccagttagagtaagaaacggagtcgtatgagcacggcatagatgccgtcggtgggaatgagacgaaccactagggttttcggggtggttaaagccgcagacggagcccgtgtcctccgttcgggtcgccggatctggcctaacgttggcgagccaaaggtacggcgagctcatgacgtggtggatcgagattgtgatagcgttttgaagaatcagaacaaatccaaaggcaataaagtctcctccggtaaaagtaacagccagccttgtagcccgaaacaagtttctagtgagaaagaagacaaagtagatgactttccggtcacaaaacggaggaaagtgagaaatgaaggtgtaggggatgaaaagactgtggataagatgtttgggattgtatatagtaggagaaggaagagactttgtg

SEQ ID NO: 44327 - DNA, 449 bp, Arabidopsis thaliana columbia
caacctaaatatgcatttttaatgagtttaattgttcatcttagtagataggccaattcttattacacacctataaaccagactcatcaaataatagatccaactacagatacctatggcgggcatatctactgtcttgaaagcataaacacagtaaatagagaaggggaaagaagggatctcttcactgtatatagatctgaatgaaactctgagaaacaatagatgaatagcttatgtctctcacaatagggtttgtagaaaacttgataaaagacttgataaatgaaacttaggtctaaaaacaatatatatagaccctaaaaacgtccagggactaataatgcaaataaggaagtcttctggggcaaacttgagcttctgtaaactcgaaagcatctagggtttttgttgggccgaaactggtgtcgatcgacactaagagtgtg

SEQ ID NO: 44328 - DNA, 499 bp, Arabidopsis thaliana columbia
ggaaataataagtccaaaaagcatccgaccatggagacatgaacccgggcagctccgagtagctcaccaccgaccattaggtcacgcccaagtcctttcctctttgtgccaccgtcattaggctcctgccctaaagcccactactcagcccgatcacttacttatccggcggaatgatgttcttacttgttctatgtcccaaccctaggtgtgccttcatcaccagcgaaccctagccgtcgccaagagctgtccactcaccaccgcacctcttgaagcttgaagaacaccatctctctctttctctttctcgtttttgtgtaagactctttaaggtggagctttgcgtcttgtattctacattcaaagaagtaatctctaagacctttttaagttttattcatcttttagttatggtttactcaacccaacttttgattagctcctttgccatgagcgaatagatctctagttgggtttgatggggtttcaaagggga

SEQ ID NO: 44329 - DNA, 520 bp, Arabidopsis thaliana columbia
tgaaagctcagaagatgatcccactcccttagatgtcctaactctacccttattctcattctttctctcttttggttcaagttctcaagggtgcttctttaaaatgattcaagagtctagcgggtttggttttaaactttggtaaacttaaggcttttcttctaaacttatagcatagagggcgttttacccttttctttgaatcacaatgcctaacttcttactctctttttattttcttttcttttcagtcctattccccttcccattcaatccatacacaatcctaatcccaaatacaagtctccacctagtcctagctaacccaaaaagcgtgggctaggtctacatgaatgactgctcttgtcaggctcatacctaacacgttataccaagctcaatcgataaagacctcacaatcacacacaaattatctttggcttgacataaggctaggctcagggtatgggacactgctctaagaatgagagtcagataccttggattacagggggtggtg

SEQ ID NO: 44330 - DNA, 608 bp, Arabidopsis thaliana columbia
gggaaagtcatttttgacattgaaaaaggggaatgtctttaattttaactatggttagtatttaagacgcatataagaagttatgcaatgaagatgctctaaatgtctaattagatagacaccataagaatttatatacttttacttattctttttgtcaacaccataagaaattattttagaatcaaatttaatttagaactaattttttttttttgttttttaaagaatgaatatcttcgttataattatctttcatactaatcataacgatattcctttcaacacacggaatcaaactaaatcaactcataaacagtgagaagagagactgaatttgaagaaaaaacataaactagattatcgtatattttttctcttctactgcaaattcgttaggatactcatgtaagtcctcctatagtcgtatacatttttcttattgtacaattattattgtttcattttcgtatacatcgtgcgtgactgcgtgtagattttatgtctcgtttttccttcacatctacttcgtatgttcctcgccgccgctcatattacctcttagaaacgttgaaaaatatagaatatcagccttggtagctaaaggt

SEQ ID NO: 44331 - DNA, 638 bp, Arabidopsis thaliana columbia
ttgctttaatcatttccttctagtatttggaccaaacaagtgaacaacacatctccatcaattacattctaacaaggagcttgaatttctgtggcaggattcaccagcttgagattcacattttgagataagccatatgcgtatatgttcttaattagttgtaaaagtttgacatatacacaacgttggtcatgtgaataatgtacaaaatatatttatagtgtgaacgaagtatgcattaatggatgtttgcattaaagaggagattgaaagacttttaacgaactcgtgaagatgtccattggaaaaacaattaacttcacctactctttcacctatcccatgttcttatctttaatgccttcaattttatctcccttcccaaaatacccctcatactagccctaaatcacttaaaaacctgcccctccgatctttcttgacatacaagaacacaacagaaaagggaaccctaaaagttattatcttataagctacttttggagatatcttcacggaactgaacaaaccactgtggggttgttgtatctgaagagtggctctcacgccgttcttccccttcctgtacttttgcaggcgacggtaacttctttggaggtggagacgggacaagtgag

SEQ ID NO: 44332 - DNA, 610 bp, Arabidopsis thaliana columbia
cgggaagtagtaccaactctttttctggtgaagaggaagaattacgattctctattccaatgtttatgtttgaatcacagctgttcatgttatctgaattagaatgttaccagaaagtttgatacaaaaataagatcgaatctcacgaatttatgatatttgtctggaatgggatcaggagatgttgatttggtgatgaatgttgttgctgtactgatgtggcatcatgtggtatatcactgggcttataatatatcatccctctgtagcatttcatattttaaaactgtcataaaaagcccatgagcttacttctaagccgaatactattgaacacctcttaaccagataggtgtgatgtgcatactagtgccctggaatctaacattgttcattgcttgcaaagagtgtacaagcaacattagctagtgttgcgggccaaacttcatcatctacacgagcgcgagaatactactccctgaagtagttactactctcgtttgccttaaatgagaagaaatattacaatcttaactggttcctatttgaaacggtttttggaaggaaatgcaaattagtttctaaggataaagaaatcagaaaagatgat

SEQ ID NO: 44333 - DNA, 459 bp, Arabidopsis thaliana columbia
tctttatttcatttactgtctgttactcgaccacacccagtgctctgcaacgagctgtgttggtcgagtgttttattgtttctgcttgattttctgttttctgcatgttcacttaggactgctagaacacaccaaaacctgttaatgcttggcttgacttaatgacttctgatcacatcttgattgattgatcacagattgtgcagtcgagtatctttgtttcatttactgtctgttactcgaccacacccagtgctctgcaacgagctgtgttggtcgagtgtttaattgtttctgctagaacacaccaaaacctgttaatgcttggcttgacttaatgacttctgatcacatcttgattgtaagcatcacacccatttggattgacaacctaaaatacgtcaacgacatgatagtgctttaggattaattgatctaaaaaacctattaccattagta

SEQ ID NO: 44334 - DNA, 552 bp, Arabidopsis thaliana columbia
ctaatcttagataattagattatattacgattaaatataattaatattttggatattaaattaatgtttgagtttttgaatactctttttgggtaacgggtaatttccggaccaatcggatatccacgggtttacgaaaactctacccaataagaaaatttcctaaaattttaacctgtcctaacccggttttttgtttcgggtattgggttaattatcgggtccgttttttcgttagccgtatcaaaaataatctaatatatggctcaattaggtccacaaatataagcaaaatactatataaagactaaaaactacatatgttgtatttattataaaaataatattttcaaacaaagtcaatccaatgcagcattatatccaaatagtaaaaatattaaaaaatattatagcatcatttttatactatactattttttatgtaattcacataaaatatacaattcaatttatacaaaatattaatgtccgtggtgtatagccaggttatgatctagttactgattgtaaagactaatcgacttttttttg

SEQ ID NO: 44335 - DNA, 600 bp, Arabidopsis thaliana columbia
ctttgcgtattctagaagttctctagtataatttacgtttttctttatgcgatgctttatgtaatttgttccttttttcggtctcatgtaatctccattgtattgcttatattttggtatctcctatgttttctccgtcgaaggactgtaattacttgtgtaatatttttggggttttctttctgtaatatattatcagtcccgataacatttgcttatataagaattaaatatagaactgacaaactttttaacaaaaaatatgtacttctctcttctttctccaatctcataatgactgttttgaaaagccatttatctccaaaccaactattgtcagttgatgtgtcttacacgctttttaggtttggaagtttacattggtatcccctatatcctatcccctatatccgtttggataagtccttctttcccacacaaactatattattgcccttagtaaaaattaactaatattttaaagaggtaaatattgacactaaccactaattactaacccttctcgcagggttgtctaatctcacaccacttggaatctttgcatgcgttgataagtgcactaatataatttacaattta

SEQ ID NO: 44336 - DNA, 496 bp, Arabidopsis thaliana columbia
atctttctcagaaagttgttggatttctataaatgttttgaaattgaggcttaattttctcatgctgcgtgggaaagcaggttgttcagcttctgtatacgaattccggtgctggaatcttggcactaggttccaatggtatccagagactctggaagtgggttcccaatgagcagaaccctagtggaaaggtaatcgtaaaaaagagtttgagagagcttaatgcatgctgtctgcggttttaaagagttagagatagcttaatgcatgctgtgtgcggttttatttaagtactgtttattatgcaggcaactgctactgttgttcctcagcattggcaaccaaacagtggtcttcttatgaccaatgatgtgtctggtgtaaaccttgaaaacgctgccccatgcatcgctctctctaagaacgactcatatgtcatgtctgctgctggaggacaagtctcgttgtatcacatgatgacttttaaggtatatat

SEQ ID NO: 44337 - DNA, 1056 bp, Arabidopsis thaliana columbia
caaaactcatttaaactcaaatcactcaaaattcttttttcaacacacctccctaattctcgttcctacaatagtgttcttttaatagtgaactttaatcgagacaaaggaaacaatcgagcccatcaatgttaggcccaacaacaatagtctatgactattcttctaagtaactcatagtttcttcttaacaactagctcaacatcttcatttcctatctctttgtaagtgtggagaactcaaacaaccaacaatatccactagaactcttttgacaatctttacgatgattacacttaattgatacaccattctaaataatctagtgcatggttcaatgtccaaccgccttaccaatcaaacctttgctttgtatcattgtaacgttgaataacgaggaaagaaagaaaacacaaagtgaatgaaaagatgtttcgtcaacagcctaattcttttgtaaggaaaagaaaacatggaatttgaacctttccatcatattgtctttcacatgcacactcaccaaacaaacaaaaccaaagggaaaccaaaaagttttgtcatccttctctcatatttataagacacacacgttaacatatatatactaattactaagtactcctttggcatttggcgcatgtatataaaagtcaattaagaaaaaggtttatgtacatcaagcttaaattgttaaattttatgtgttagaacttctgtcttaatacattgaagctattctgtgttgagtacgttgtatggtagacttgtgaatcactaaatcttctatataggattaaaatttacaatggatgcgagtgtatatcgtgggatgatacaacttactgatccacgtaggtgaatctgtaaataatcaatgtagctatcatctacttctcactaaaaaataatcatattttataatgttaaataaaagatagtatctacataaaattataaatattcataaaagcagtgttctgaaaagcagtttagccggtcgtctatgccctacgctctcacgcgaagcctagacgatatcctcttgatttagagtc

SEQ ID NO: 44338 - DNA, 533 bp, Arabidopsis thaliana columbia
tgcttcatgaagagctttctaagccgattaatgaacagccttctaagcctcttaatgaagaggtatctaagccaagaggattagcttggctttacaactacatgtgttatcagaatgctgctgagaaaataaagtagcagagcttaaaaaaacaaaagcctcaaagatgtctgtttctttacaaagcatttttttagctttacttgtagatagttttcgatataaccagataagtttaactgcagaagagaagagatatctcataaaccataattccaaattcttcttacattgaaagagttgttcctgatattgaattggtcaataagtttatgtagaaagctcttattggtcaataagatttgagatttcaacaaaatcagaaaacaataaacatcaaggtgcaatacctaatttaggataaacataagttccatttgcaatttttacaattcagtttagcgtaggggtataatagtaaaatcgatggattcaatccatcaaaatttccaccctactgctactcatgacac

SEQ ID NO: 44339 - DNA, 558 bp, Arabidopsis thaliana columbia
aatcgatggattcaatccatcaaaatttccaaccctactgctactcatgacacgtcatctctcctcgtaatcggagattttctctccttctcttttcagccgccaatcgccgccgcaatcttcttcatcggcctccgttctacatcgacggtgtttgccgtaacttcctgtcaaactctcagaatttgcttaagtataccacctaactcgagacgctatgaccgttttctcagttcagtccactatcttcagtcgagcctccgtagctcttctctcgagcaatggcttcaaacgattttcattcgtttcttcgttttcttcctccgccgcttactctccacctaaaatgaggaagcgtcgctacccaatcgtctctgctgttgatattggtggcgtcgcaatcgctagaaatggttcgttcttagattcgattcttaaaagtgaagttcataaaacatcgcacttgctccaaaagaagttatatttgacattttttagtgtaacttattgaattttcagatgtggtgagagaggatgatcaacaaataatgtaccaga

SEQ ID NO: 44340 - DNA, 508 bp, Arabidopsis thaliana columbia
ctccttctgttttgtgctccttgtttgcctaggcatacacctgaaacacagaaaagaagaaaacaaaaaacgcgtgagtaaactcaatgatgattcctaagaaccccggcaacggcaccaaatttgatatggttcaaattacctagaactactctctcaaataagagatcaattgtagtattttaggatcgaattcacggagttcttctttcaaacagtgagttaaatgtcaagattaagctagcagggtatgagtgaaatagtaagaaaatgaaattaagaaaacagcagattgattgggttgtaaacgatttaataaagagctaggaacagggtattctcaggaaactattggttagtagatctaatgaaagctaggttgttatcaaaccattcttaaactcaaactctaattatggaataaccagtgggcgtgccgcaaactccctatatctatagctaatagtgaccggagaagccgagaggctatcaccttagatatgcattt

SEQ ID NO: 44341 - DNA, 536 bp, Arabidopsis thaliana columbia
gatcagagcgttgatgaatttcaggacgctgcatcgggtttcatcagacgcttgatttgcagacatggatgcgagacgaaacgtggcaagctaaggctggaagttgacttggcgtggtgtcaaagacaagaattaccaaaaagatatggaagatatcatctcgaagatttaggaaggactaagcttgaagaaaacaagaaagattccttaaaacgagattctcggagatcctaggtttagggttctggagagtagatatatgtattctagagtttagcgtgaggcgttttgagcactctagaatactacgatacgattgaaaaacttcagagcattgcaaaagcttgaaggtgagtgtgtaattctctttgtcttcacgtgagagtgttaaaaaacagagaagagaattagacttagatattcttagtcgggtttgatattctgggtagaatagatcaagtaatctccgagataacatttgtaacaacttgttatcaatacgaatatagttataagcaattctctgtgttgtgttg

SEQ ID NO: 44342 - DNA, 440 bp, Arabidopsis thaliana columbia
ttcccctttcgaaaccccctcaaacccaactagagatcgactcgctcatggcaaaggatctaatcaaaagttgggttgggtaaaccataacaaaaagatgaataaaacatagaaaggatttaaagattacttctttgaatgtagaatacaagaggcaaagctctaccttaaagagtcttacacaaaacgagaaagagaaagagagaaatggtgatcttcaagcttcaagaggtgcggcggcgagttggcagcgatgaaggcacacctagggttagggcttagaacaagtatttatacttgagggccaggaattatgtttaggggtaagaacgtcattccgccaggtaagtaagtgatcgggccgagtagtgggctttagggaaggagcataatgacggtggcgcaaagagagaaggacttgggcgtccatagtggttggt

SEQ ID NO: 44343 - DNA, 563 bp, Arabidopsis thaliana columbia
gattgtgttgtaaacaatttaataaagaggtaggaacagggtattctcaggaaactatttgttagtagatctaatgaaagctaggatgttatcggagaagccgagaaactatcaacctaaatatgcatttttaacgagttcaattgttcatcttagtaaataggccgattcttattacacacttataaaccagactcatcaaataatagatccaattatagatacctatggcgggaatatctattgtctggattcaaaatctagttaattactctagatctagcattaggcataattaaagatgaagaattctatagataacctagcaaatggggcaatctactaaaccatatgaatccctaatgagaaaccttattcctaacaagcagactactcgacatattggatgaagcaaacaacatatttgagggtgaaagcataaacacagtaaatagagaaagggaaagaagggatctcttcactgtatatagatctgaatgaaactctgaaaataatcgatgaatagcttatgtctcttagtaatagggtttgtagaaacttga

SEQ ID NO: 44344 - DNA, 513 bp, Arabidopsis thaliana columbia
ctccgaagcgttctcgacatcgcctcggtgtggattcttgacgagatctccgaggcgttttgtggcccggttcgggataactcatcgatgtctcccgaggcgttgaggtgagcttcatgaatggattcctgagccgactgttcgtcttctagttctgtcgcctcatcttcttggatggtcaaacttctgtcgcgtgtcgcgactattcttgaggagtggaaacgtttcttgcttattcccgaggatcatgcggatctttttcttctgccgagcccacgcgcttgaacgcgttttgaatgtttaaagcggatccgatgcacctttgaaaactctatatatacggcgagccactccttcaatacttcatttgaagtttttgaagaaaataaacaagatttgcttccttctctctgatcttgatatttctatcgttttttcttttccggcaaagctccgtcgttcttcttgttatttttgattttccagggatagaaattcttgttttccggttat

SEQ ID NO: 44345 - DNA, 557 bp, Arabidopsis thaliana columbia
gtgagttatatacactagagaaaaataattgcattccactgaaaacctcaacatcttgggaaatttaaacttaatcaaagacatcgcaaatgttgcttatctttttatcaagcccagcccacatattcgcggccccaaagcccaaaggttaagctgactcgttacaaaataaataagtattaataaaggtttttgattggcttatttcggtttaaatttaataccatatctttcggaagatcacgtgagacacatgtgacatccaacgaatagccaatcgctgaaaagtgaagactttttgttaccccataaacaaaagcatcatctctctctcatcttttatttttcttttagaaaccaaacttttcagatttctctctctccatttggcgatagaagaagtcatgtaccaatcatcatcctccacgtcatcatcatcgcagagatcatcgcttcccggcggcggaggacatgatcgttacggctcagctccgggatcgtttctaaactctgtggttgacgaagctatcggaggaggctcatcaaacgctcgtgac

SEQ ID NO: 44346 - DNA, 909 bp, Arabidopsis thaliana columbia
tgtatttatcccgaataagaagctgctaactgcaagtgcaaagtcttctaactcaaattaatcgatcgaatgatgaatgattgaatacacagaaggaaaaataaacagtttagaagaagctacacaataaaatattgaaatctctggttaagtatcttatattaagattaatatgtatatatgtgtatacaatgataaagaagaatcataagctctaagtaaggcttacactaagacaagaacagagacataacaagaccaatcccacgagcgactctctttcgaccttactactcgaatatattgcaagaacctacagagcaatatgttagagagctgtgaagtaacttcttggctgggttcttgattcttcaactgagccaagaactcgaataaatcatctgcaaatctgaaaaattcaaccaaaatccaccaagccctctcaactcagtatttcgtctgtaagaacctcccgactcttttttttgtgcaacctcccgactctttctgacaacaaacctgagagattatgaggttggtaataatccataccatcgcaggttcacttttcgctttggttatctcctatgaaccgttaaccccatttagttgatgccttggcgtggtttttacttttgttcttctttaagagcattgacatgtggttaagatcattcagacttgacttggactcgccttgtaaccacaacaaagcctcatgagctgcatccttctctgcatttttcttactaccacatggctttcccatgaaatccaatccattgaaggtaaccatagagcggaactggttgttcttaagctgtcttgtcttgtacacaggtgatcagtgtcctgctcgggcaagtaatgtctgaagttggttcttgttgttttcacaccgctgttctg

SEQ ID NO: 44347 - DNA, 588 bp, Arabidopsis thaliana columbia
tacgctaacttctccgaatctttgcttttgcgttactataaatattcagaagacaccatttcttctcattcaacaaacaagcatctcattctctgattcggtccatcgatctcaaaggctcaaagcttaatcgtttcctttcttcttattctagccatggctcaggtaattttgtgactttgatattcttcttctttttttctccatttcttggccatgaaacgatggaataatgtttttgagagacattgatctggaagcaggaatgtctttttgtgtccatctccaaaaaagatgctagcaattgtctatatatatcggttatgagagtccgattaatcagtttttatgataataaatattttggaatgaattaatatcaaatttcaagagggaagaaaagagattgattggtctaggtctaggttctatctgtaagtactataatgtccgattagcaccactttgaaatattcatcaaaaaaggtaaatattattaagctagagcacaaaagataccagttaataattgtgataaaattagctgttgatatatttggaccgaattggtcctatgtatatggatat

SEQ ID NO: 44348 - DNA, 604 bp, Arabidopsis thaliana columbia
cctttttattttctttttattttgattttcttgggtctctgtggcaccttttctttgaaatgttttcacaccgggtcggtgtgaagcaagtcgggggaggctgccacttgtctactaatcaagtttgcatttttgatgtttctttgagtcattctattagacaccggttccactcccccatcttgacaaaaaagaaacgtctaaaaaaaaaaagaatgacaaaaagaaagaaacgggaaaggagaatgtacgaaccggaaatgtcgagttgttattcatataaataagcatcataggaactcattgatttgattaggataatatgtgttggttggtttgatccgaacttaaggaaagctatgtaccacctaattggtctgtgtctcacagtgatttcgcataatgacatgcatccgcccataacgtgtttgataccccttttgtgagagtacacgcctctcctaatgaatgttaaaggttaagtcctttgattctgaaagttcttttagatctcgggatttaattttgttgctacggttatagaaaagtacagtctagtacgggttgatgaattttgtgatggtggtatgcagcaattgataag

SEQ ID NO: 44349 - DNA, 568 bp, Arabidopsis thaliana columbia
accctattgttcaaagtggatcattattacctaaggtaccaaactgaaacttgattctcaaaagaagtgtccttagagtagaaactcgatactactctcttattaaccttcatgttagagtttaaggattttcaccattcaccgggtaaaaccttatcccggatcccattcgtctctgtcggatgctgcgttcaggcacttctaatacttgcttccctttctttctctttgaactctcaccaacctcatagctaacttgatctttaggtctccattccgaagctgcaaggtaaccatctgaaacagtgtgagaagatgagactgaagttgatgggaatctatgaggtatgttgcctatcatgttatcattccagtttacaacaggaggcgcattcagtgatattggagttaaggatgaaaacgatgagataacagaactttgtgagtgtctcccgtgatcttcttgattgagactgtcttcatcatcatacctctctggagagaccaaaacatctggttcattatccactcctcctgatgcacaacatacgggcaatgactgacttga

SEQ ID NO: 44350 - DNA, 556 bp, Arabidopsis thaliana columbia
tgcctttcctttgcggtggtgatgatctcttctcctacgccacatttccgccttcatctccgcttccttctcttcttctctttcacgatcttctcaattcttattcttctcctttcttttctttccagatcatggcagtttggttatggagacaataatgggtggaatatcaataggttctctcgacgttgataatgcggagactacgacgacgataacaaaggctcacgaactcacgtctcaacaatgatgatggtggctgacttagtttagggtatgagataccccaatatatatgacacttacaaaacccttgttgttgtcatcaaaaagagattgagccatttatgggctatatcataatgtcaaaacaaattggcccaactatgtgggagtggggtattacagtagagacgaggtagataccaagagatcgaagagtcaatccaatgatgcacatatttaccgaggaagaaagagaaaggagccatcgccagaagaaactagagcctccaatgtcgcaaggcacaaggaagagcccacatgacagagctga

SEQ ID NO: 44351 - DNA, 567 bp, Arabidopsis thaliana columbia
taaatcaaaaagaaattctttttttttgggtggcagaatagaattttttttttcgaatcatggcagaatagaaattcttccgtatttataaggtggtccagtttgaaacgacaccgttttgagagatcattaatctaatgactgggtacatatttgggctattgtagggctgattcgctgatcacgtgttagcccaactaaatatgctttttttttttttttttttttgtcgaccaaattttcattaagtaaagcccaaaaggtagtacagaaggttagtctagtggatacaacgaaaataaaaacggcccatttaaaccataattaaacacaaattatgattaacaaaataacaacacgtgtataggacgtgtctccgcctaactacgtgtcgaggattgtagcaccgccgtcaagagctcgccggacatcgccaaatcttcaattagccgccgctaatcaatcctggatcgatgtgtatcggcctgccttctgtccgatctcgaatccaacccaaaaaagcatcgaatctcctggattgagagatcatcatagcttcaaaaaatt

SEQ ID NO: 44352 - DNA, 338 bp, Arabidopsis thaliana
ctatgaaatcgttccagaattttgagtattgccttctcttctttggtttcgatgactttccattgtcctcatcatcatcaacatcatcatctccattgtcctcatcgtcatcttcttcatcatcatcatcttcgtcttcatcactaatcttaaacactttttttggttttttagatgcttcatcacccttgcttcttctttgggttttagatgcttctggttcacacacttttttcctctgcgtcttaggtgttcctgtttcatctctcagttttcttttcaactttttagatcctcctgcttcatcattagcttgttgttgttcatatctagcaagt

SEQ ID NO: 44353 - DNA, 598 bp, Arabidopsis thaliana columbia
gtaagcaaaaatgttctctcttatattttattgatgttttgaatgagatagctccaaatagatgatgatgttgttgttgtatcttgtctgcagatatgatcctagtctcttgttgcatgggcagcagtatattgaaatatacaggccattaccttccaaggcttccgtaagtagcttttattacgtgtgtataggaactgttttgatactaggaagtgtactctcatactgattggtttttgatgaacgtggaaattatatcttcaagaactttcttattggcttcttcttctaatatccaaactggtctttgctttatttttctgaattgatgttgtttgtgttgccacagttaattaacaaagtaagcctcgctggtttgcaagataaaggtacttgatactccaatcttaagcagaaaactaactactacagagaactagaaagttgactttaaattgatcttttttgttctctctgatggcaatcttttaggtaaagcagctatccttgaattagaaccagaagttacgaggaagggtcaggggaactgttatgcatgaataggtaaaaaacgtctctataagtaaatagtgac

SEQ ID NO: 44354 - DNA, 563 bp, Arabidopsis thaliana columbia
gtttgctcctatctctatagataaaacacctactccaaattaattgacataccaattctctttccataatatttttgtaaactacgagagaagtcaaccctgtagtatctcgatgtgaattcctaccgaggttgaccagatcagccagtagaatttatcatatatatatttgcataaaaagatatgtagacttgccatctttgcaactgttgtaggtattggatacgtcgataaaatcactaaagtggagatttctcccgatgatccctcaactgttattacaatctccggtcttacaagtaggcaatatattttctaatttccgtttcaaatttctaactctctttttttctaatatatattttcttgatatgatccttttatgcatatataggaagaggactcgtctatgctggaactgtagtcgtggccagtggaattggcgaatttaatatcccttttaaatactacgacttttgtcagttgtgtaaatgccctatgctaagtggcaccaactttgttttcactctttctcaaattctcattccaaaagcttttgcggt

SEQ ID NO: 44355 - DNA, 623 bp, Arabidopsis thaliana columbia
  unsure (1)..(623): unsure at all n locations
cctgtaaactgaggaaacaaaactactcaattaccccatcctcgagagttctttatctgattgatttctttgtttactctgctgttttttactgcatcttgttacttgttgcttagtttttgcatttctgtcctgttactcgacctgatactcgaccacctagttttcctggcaacagaccgtgcagtcgagtagccctgttggcaacaagctgtgttggtcgagtgttttactgtttctgcttgaatttcagtttcctgcatgttcacttaggacggctagaaactccaaaacctgttattgcttggtttgactctgtgaactctgattgcatcttgattgttagcatcacacccatttggattgacaacctaaaatactacaacgacatgatagtgctttaagtttaattgactaaaaacttattatcaatttggcgtctttgccaacacagcttgggggagttgataagtgtgcattttacatgttttaagcatccatttattacactattgcctcatacaccactgtgttatacatttctcacatttctcacattttgcatgtttaggatagttttcatgcatgttgcatattgtgttgtntcaggtgatttggagtgt

SEQ ID NO: 44356 - DNA, 927 bp, Arabidopsis thaliana columbia
atgtgaagttaagtaatcaaagggatggatctttcactagacgtgcattaatctagctttgtttgttccctaatgtggaagtcgagcatcttacccaactccaaacaattatacaaatcatgtatgaatgttaatgcaattagtattgctttcacaaaaatccttagtaaatatcttttttatttagaatttaaaatttattctttatttttttttaatacaaggaagttttgggccgaagcctgtaatctctccaggtccgaaaccacaacatgtaatattagttttgtcctaagcatttaaaatttattcaacaaaaaagataatcggtaattacaatgttaaaacgatagaataagaaaaggtccatataacggacgacgaccagatggctgaaatatgaagagattatgactaaaccaaatcaaatggttagtgtaagtaatattctttttaaaaaaaatgaaaatcggtagttgtattatacacattacgaaataaaatgtcaaagttatcaccatttggaaaaattaactcaaaagaaaaactcaaaattatgagtcatgtacgataacattagtatttaaaattacaagatgtaatatagaactagtgtacaaattcggtgatagataattcagaaagaaacactcttaaatgtcttgaatttaaattgacaacttcaaaagttgacacatttaaatttaaagtatggttagaggtagttaccaaagacatattcttctcgactttttcttcagatttatagacaaaatcagaaactagttaagttgacttattaaacaatataagatattgctctaagacgcttccttaaagttcaataaacaagtattctagttggcctaatgtaagctatataaactgtttactttctattacaatccattcaaaaataaatcgggt

SEQ ID NO: 44357 - DNA, 592 bp, Arabidopsis thaliana columbia
cattggaatgactagagggttccagtcagaaccactgcctgaatcaacagatattgtctgtgcagcactgtcgcattcttgaagtacgttgcagagacttggatacagatcaattacaaagttcaacctccgtcttccagctttatccataaatttcccattgattccaaaccgtactttcagacgaggacaatggagctgaaggggtctgtccccaaggaagagttgcagcttcattgtttggctcccgtcatatagcgggacatgagttgctctgatacttgaaacagatattttatctagctccatgaatccttcctggtcaccggtaccttcagaggcaacagtctcagactgctgattttgttcttcttccatgggaacatctgattgaagaacttcaggggctatttcgttcctcaaagtgctcatatcaaatggatccgtttgagcttctgcggatgaaacaaatgataaaataggtatagttgtcatgttctctcctgtctgctgatcagtgggagattgcagaggagatttttttatagtcgacgccttcttgactagtttcaggagtagtagtagtaccgag

SEQ ID NO: 44358 - DNA, 412 bp, Arabidopsis thaliana columbia
cttgccctcaagcataacacaaaagccgaacccttggaagaggttttgaaaacaaaggaactgccaacattctctagcctattgccatgatcattcaaactaagtccatatgcctaataagtctaatcaaatcctaaccaacatgtacttctctacaagcttacacaacattctagattccatacctaagttccagaactatatccaccaggctttcatagctgggtctcatcaaacaagctgacattcaagaccattctttatatatttgtttttctttttcgatgttctttctctcccccagacttattatttttagagagtaaacaaaggggaactcgcatactggatcgacaccctcgacatttttccaacctttataattccaatgggactgctcaagaatgcttgg

SEQ ID NO: 44359 - DNA, 467 bp, Arabidopsis thaliana columbia
cattgagtttttgcttcagttttattttctgttttactctggctgcgcgcttttgcttctgcaacctgtaattcgagatttttccaagttattcagattccgcatttgatttcatctgtcatcttgtttctctactctttatctctttacttatgcaatattatcatttacctgcgtttatgtctttgagcatgttgtctgagtagtgacttagaattcttaaggatgggatagagtaattgtggaatccgtagtctgtagaatggttaagttttagaattaattgaatcccttcaactggaattcgatcccaagcattctcgctacccagaaggtgttcgatggaatgcttgatccactagttcctgagatattcgtctctatcccaagggatctggccgtttagagcgtttattgactttattagtctgttcttattgcctgaatagttagattccgttaatggg

SEQ ID NO: 44360 - DNA, 758 bp, Arabidopsis thaliana columbia
ttctattctctacattaaaacatcctccaacattcagttttctcactctcaatgaaccagtaatacacaccctaggtgcactagatttcattcaaaactaaatctggttcactaaaccaaaccatattgattttcaggaggaaaaccactttttttagtgtgtagtacgagtaagtttacaccctgagatgcagggttttttctttgtcttttgctaagtgcgtgagatgcagttttacccctagttagaggaaaacaatgaatttgtgtaattttaacattttcttgttatgaggaatatgctctgaataatgagaaccatacaagatacaacaatgacataagccaagttgtcataaaaggccaaatgtgctttaatgtgtgatacaccgctttacactggcctactctttcacttcacgtcaagttcgtaaacgaagagacaatctctacgtgccctccccttgaatattcagcatcatcagctttttttgaaatcaaatttgacggcttctgttgtcacaggatatactatagacaacaaaactacatatgatacaaggcatatctcgagttctgatcattctcaataaaatacatgtgatagcagcaatttaaatatgtgcctgaaatatatgttcatgaaagccatcaatcataggttaaagcaatatggattgtacgtgttgagtgtatattttcatttttgtcataccaagaataaaaacatcaggccgcgacagtagtataagcgaggg

SEQ ID NO: 44361 - DNA, 931 bp, Arabidopsis thaliana columbia
actcatctacataaccactaaaaaaatgggatcaattacgaataaagcacttaaaattctatgtcgttgtcgatacaggcacaaaatgcatgtgcttatagaattaagtacttctatctcttgatattgacgattttacccttcgtcacccagacaaacctaataatttcctcttctctcttttttaattttttttagttggattatctctcacccacacaaccataaggaatccaaaacccaggttcgaaacacacacaaaccatacagaagaatactcgtaattgctattgttcaatgactaccataattattcatctctttgtctctttaaatctatcattttttttctttttgccccaaaatacgaccataaaagttatatttatctgatttccaatctccaatttgagatttgaaaattgcagtttgaaggcctaatcgaccagcctttgactgcctgctttcaagatctcatgttacaaaccgtgatgggaagcttcgtcgacactagcaactaaatttggtttagaatgaattgatttaatttgtgtctaaaattagaatccgtggattccctagacattatccccatagagtttagattctttgcatcaacactcttttaagtagatctatcggattttaacggaggaggttggtgaagaaaatgttgtatgagttgtcagaggtgaaggaacgattttgttggacctgaaaattatgattttgatagagtgttgagtcggcggtgagaagcagaagattgttggtcggaaaaatcaggcgcacgacagagagacaagggaattgagggcaatattgtcatttcacagatcaaaaagttcttaaacttataagctcaagtcaaatgtgtctcttttctaatttttgggccgaatatgcctatatctatacaaccccaaaaaag

SEQ ID NO: 44362 - DNA, 947 bp, Arabidopsis thaliana columbia
tcccctcaacgatctctgacgtcgagcttgttgaaatgtcttgttggaattacgaatttgaattagacaccaaatgtaaagtttgggtttgaaattcaaatttttttgggtttgggtataaattaatcttacaaatttgttcaggtacgtaaacacactttgaagattgttaatgtatgaaaatatcattttcccatgctttgtattttcgttgtgattagtgagaactgagaagtatcttttgatcttttagttttagtagattagggtatttcttggttgattcgagatgcttagagcttagttttagtagatacttaattactatcaaggtggtcttaatgctagattagtcttgccaagttcggaagcagaaggtgtttgatgaaatttcccgaaagaacttagtgagtacttaacattcctagtctataaaaattgatggttaaggtgctaggtagttagttaggcttgagatcaatgcatgttagtcttgtgattacaaatggaatctttgttaatagcttgaaatttctgttttaattattaacagaaatgctgatagagaaaatgatacaaacggcaaagtggaatctaattaaggacgaatcattaacctttcctctgtgatcacagttgggtcaagcttgattgtttctccttccctaaattactccatcccatcgggtaatttacattcattttcctttttttaatcttttatgtgtgaaagtatctacaaacatgtatttatcattagattagtgttttgtttagtaattgtgttgtgtgatccgaaaactatatagttaaatctgttaccatacaacacggatggaaaacttgtaaaattatttatctgtcattgatgcatatatcaattctgaaaccatatgtttgaaaagtatgatgcccgcataagttacaatattttttatgtcaatata

SEQ ID NO: 44363 - DNA, 614 bp, Arabidopsis thaliana columbia
catagagagtttttcctcaaagaaacacaagcagaaaaagcaggagttcagacagaggaaatttctaagctcaggagcatcggtgttcaattcaaacacacccttgaagatcaagaaatgctcaataaaaaccgacgcgttctcgaggaagttaacaaagataaaatcaaagctgaggagacacaagaacgaaagaataagacagaagactcattcaaatcaagcaagagacgtgtaagacgaggatcagatcctatccacaacaaagctcagccattttcttaaacggcgcaagagaaatcaaatacagaaaaaggcaatatactatagaaacgcaagaagaagaaaagggcataacaatcaaccttatcaaagctggaggtaggttagttggttattctcagggtttatttttcaagtataggttttgataagaacacacaatatggtgaagccatcagattatgcagaacagcattatctgttcagatacaccaagagaatacatatttgttttcaagatatttctttgaccaagtccccactctattgtttgcattagttcgtataagttttgttctttctgcaatgcttttgaccccaccaaaacatgt

SEQ ID NO: 44364 - DNA, 710 bp, Arabidopsis thaliana columbia
caccctcctaatttcgttttgtttatgaatactttaatttgattgaaaagtaacttttggttacaaagaacgaagaagaaaacatttgattttaaaaaataaaataaaaatacaaaataatggatttcaccaaaacaatatacaaaataacggtaataaaagagttccaaacaatctaatactgtactgatgagatttacccataatactgttattcttttgattttaaaagatttattttctaaatttaagataataacactttaaaagtaatttgccactgaaacttgttatttggttcagccgcttacgcccttcctggctatgatgttgtctcccactttgacgagccattgcagcaggctaaaatgtgtatccctacacatttctaaactgaaacatcttgaggacgctttgtttccagcttgtggggcattaaatcgagttgaattgagtggttcttctagtgggatgaaagcagacaatattgacacagcctcctcttctcttcctcaagtcgaacttgatttcagggagtgcttcaacttggatccagaaactgtccttcaccaagaatcaattatattcaagtacatgttatttccagggaaagaagaagtgccatcatatttcacttaccgtactactggagtctcctctctgaccattcctctacttcacctccctctctcccaaccattcttcagatt

SEQ ID NO: 44365 - DNA, 547 bp, Arabidopsis thaliana columbia
aatttaacaatttatggatggattaatggatggttattttgtaattgcgtatgacgaacgaaaaacaataagaaaccaaaaaaagaacaacttgcaaagtaggtctgttgaaacactgtaagctaaaaatctgaaagcataaagattaactgacataagttatgttctttgcgaaaataaaagttattccacaaacgcattcgataaaacattcaaaaccttcttcagagtctaatccgtgaactgatgatcgatatagcttcacactatatatcctcttcacttcttagacttcttcttcggtacactgcacaagcaaaaaaacacacatacacgatttagatagatgttaaccaatttgaaacaaattcaattcacaacaaaattgaaataacacttacgctgcagttggagcaggtgtagcagcaggtgctggagcagctacaggcgcaacatctccaccgggaccctacaagcaaacaatccacaacacataagaatctctgatcaaaattaaaaaacaactttataaagtttgtaagaagtt

SEQ ID NO: 44366 - DNA, 699 bp, Arabidopsis thaliana
tctttggtgtgtaccttaatggaaccacaatcttaacttatataattcatacaaatcaactcataaataagatatgctctaaggtgttcttagccactaacaaaacaaacccatttcacatctttgcaaaccaaaaccaaacccatattgaaaaaccatacaaaattacataaacaaactcactatacacataaactcaaatgaaagatttgctccaatgtgttcttagccactaacaaaacaaacccttttcacattttgactcactggctactcttaatatatccatctttaactactaatcatgataatactactcagcgatccaaaagcatcaaatcacataaacaaactcgctatgatctatcaatctcaaatcctaaaatcatcatcatcatccacaattctcaaatcacaagtaaaacccaacatagagtcatcaccaccaaagatcattaaaccaacatcagaaacacaagtctcaacattaaacaaagatccatcaataaaaccaacatcagaaacataaagtcttgacctttaaacgaaacttctaaccaaatgatcaatcaaagagacccatcatgcctgcatcgtcagaagattcatccttcacttcttcaaccttcttcttagattcagcaaccctcagccgccgaagcagcaccaccaccaccacctccagccaccatagcaaca

SEQ ID NO: 44367 - DNA, 607 bp, Arabidopsis thaliana columbia
ctttttcgtgtatctctttcatcaatgtcctgtgaatttggctggagctcatctccagctgtctcagtctcagcagattcaaaatctgttaagctatacgctacactttctctgagcaacttcctcacagaatcttcaacaagtttggtttgacaggcacgattctcaacagtaggagaaatggaatcaagcccataagttagcagtaaacgcatgacatctatagttcgagcaccttcatcatcccgtgcttgtgcatacgccctttcacatttccctctcaagttgcaggagccacacacctactaagtaaatgtttaagctttgttaagtaagtttcaattaaaacctcaaagagaccatttgatgcaaactaatataagcgtgtcaatccaaaaaaagggtaacacttagtgactatataaagaagtaagcatacatttccttcatcaatgcccacataagctcttagacgctttcctgagttcacgaccttcctatcagtgcttggacatccacacccagcaatcactttgatatctttcttcgacaagtttctgcaagtaacaatatttctctgaatttcaacaatttcaactaaaagaga

SEQ ID NO: 44368 - DNA, 875 bp, Arabidopsis thaliana columbia
gtaatctgcctctgatgctttaagatatgatttggggatcaatgcatctttgctttgggatttgctttgtgacagttagtataaagaagagagaagctgaatgtgctgcaaccaaattaaaactctcttttgagttaagcctatatccaactcctactcttcctagtgtggtccattgtatttatcataagagtaaactcgcttgtaataaattatagtagggaaaggtggaagacccacttttgtttctcactttctttctgtttggtgagaagttgttttccttatgcaaaagatggaatgcatgaaggacacttgtgtctggctttttatttattttggttgtggatactttcatgatatactttacgacctcaaccctttaataccacacaatctacctccattcatcttttctcttctcttaattttcaccttatctcccaacgagaccatagaggagttactgactccaacttatagctactagctatgctgcgtaactctcttaaacactaccttggcacctatgacaaatatgttagtgagccaacttttctggctttgattttcaaaccaaacaagtatgaaggaaatacatatcagacaccatttggagacttgagtccatgcggggagcaacaagtgacgaggccgggacccttgttgccattcaactctctctctctcttgggatttaatttcactaacactttatgtcaatttgatcattaccactttcacatctctctctcttctccttcttcttcttcttcttcttcctccctcatatcaacctttgagcacaccagttttcatggtaaaatcaatcatccttttgctttatctttttcgtttttttttctctctctttt

SEQ ID NO: 44369 - DNA, 646 bp, Arabidopsis thaliana columbia
tgaaatgttgctttgatttctgggaattttagctggattagagcttaaggttgtaatctaaacagagataaaatcagatctctgttttcctttttttctattgtaaactttcccttttaagcaaaatttctcatttcgtttgtgtttttggaaatattctcttaattacagtttcatagcttagtaagattgttattacaattctagatctgctacatttgtttttgtttgtctattgttttaggtttcgttgattctattgttattgggagcgtctgatgcgaaagtaggcatcatcatcatcatcatcaacgaatagcagtggaaggtgtggaaagtggagtagcttcacactcgtgtattcatgatcagattatagagcagaggaagagaccgggtcggaaagtgtattcggttactcctcaggtttatcatgagccaaggagtgttgaaaaagcttttcatcataatggaagggttttgcttagtgtttttgatgaggagaaggatgtgtaacaacctattaggatttatttgaattatgatgctgttggtcattcgcgtgaccgagattggcaacgagttggcaatattgtgaaggttggtattaggagtaggttttgagatttatgacatgttagggttt

SEQ ID NO: 44370 - DNA, 524 bp, Arabidopsis thaliana columbia
tctactgacctatcaatagctagaacgttcttggactctgcgaaagaaagaagatttgatttagaaatgtaaacaagaaaaatggttaagggtagttatttataatactagttgcataccattatcatcattgtgtgtctcagtgattgcagattccaagagaggaatatcactaacatcaacatatatcacaagatctccaatctcctgatcattgtcattcttcttcggaccttcctcacagatggcctgcaacgtttcttcttctttgtctacttggactaagctattctcagattctgtaaaagaaagctacatcatttagaaacaccgacaagaaaataacagataaacactgattgtatatgaatgcttgcattaccctttttatcagccgtaacttcattcatctcttccttgttggcctccgtgtttgcatccataacaacaattacctcaagatctccagctatcttgtcactgtcattcttcaagttctcccatacttgttccatggaaacact

SEQ ID NO: 44371 - DNA, 498 bp, Arabidopsis thaliana columbia
tgatttaatgagccatacgcagtttcacagtcgtaagacttagaacttcctagcccaaccaattgtgtcagacaataacataagcaatacctgtctcactctcgcaaatttcagacagcaaaccaacaaatgccaatcttgaaagcaaccaaattcactcatatctatctagctacgcctgaagcaaaccgcacaaacaaatagattgcagcattgcaaagaacaaggacatgcaaaatgacattgtgaactttctgaaccaaccaattgtgtccgacaataaaagaagcagaacttgtatcaatctcgcaaattgtagacatcaaacctagcaaatctcaatattgaaagcaacctattacttcctatctatctagctacgcctaaagcaaaccaaaccaacaaatagattgcagcatcacaaagaagaaggacatgcaccaggaataaaagagacgaattgaatcagtgagatcttttaatccagactttaagata

SEQ ID NO: 44372 - DNA, 591 bp, Arabidopsis thaliana columbia
acataacaaagacattactattcagttattcagtaatgtctccatgagatgatgaacataacaaaactgttgactccatgctcatccaccctcatgatgatccgcagacattcttaccgagttgtttacagataccaagagaagaggtcttattggagaaacgttaatatgtatttgtcctaacacctgaaactgtaaagagctttgtcaaacattttttttatagaaaaatctgtgccctttttttggtgatatggatgtctcacagattcgacgatctggagacagatttacgaaaaccacaatgcgtgtatagctgcacaaaagaccattccgtttacggaaaccaagttggtgaccttcatttgggactctgtcgcggagagtatatgtagacaaatgtaactaaaaaagacaactatgattgttactcttgctcctttattatatgaatcagaatatgacacaattatttgcaattgatggaagttaaaagaaagacttagtcatgactctctgtccttgtgcaaatagaatgccgtacgtacgagggtgaacaattatcatttctccaggatagagacttgatag

SEQ ID NO: 44373 - DNA, 355 bp, Arabidopsis thaliana columbia
tatacatccggaagtaatcgcatcctttccgtgaagatggaagccaaatacaagactaaaaaactttgggatgagattgttggagtgagattgtatgacttgcttccgagtgtaaacggtgaagatgatatccagtagaaacaacattggctgggaattccatgattgacgaaattgataggtcaaactcgagaacaatagggtcttccattgaaacggttcttctgagataacccgagatcaatttctcaaaagaatttggatacattgaaagcgataccataaaagggatgtcaaaatatctaaccggtatcgactttggtggagaccaaatccaattagatgggagaagcat

SEQ ID NO: 44374 - DNA, 983 bp, Arabidopsis thaliana columbia
cacaatgttatctctctgcacactgcgatcgatttttaatatggatttatccagtacaaattcgacaatagttgttatttcgcaaatagatgaattattgaagaaacatgagattatgttgcattaaacatatatgattttttgtgcaaaagctttgtttctattcaatcactcaaaactattacaagacttaggagaatacacattctcagtgtttgaaacgacaaagttaaaagcagtaaacgaaaaagtacgataatccaacgatagatccataattactttcatacaagagttgtagaacacaatgtcacatgccagaaaatggtaagtcggagacagtaccacgaaagatctgagaagtggtagattggtcatagtccattaacataatgacgttgaaaatgactttgtagcctcgagtctcgcagacacaagacactcttcacaatacgatagcaaggcaattaggaaaatcaagcgatttctcggcttaaaaaccggaaaccaaatacggacactcgttataaaagttctctccataaaggaggaaagtgagataaatgttctctctataaaaaaggagactgagatatatgttctcttcataaaggaggtggaaccaaagttttctttgggaagtttgcacaccgtggaccctcaaaatcatgcaagattacacggtgacaatattgaaattgtcgaccctcgcacggtcttctgaaataagcatgtgacatatggcttgcttcagagtgtaaacggtgaagatgatatatagtagaaacaacagaggccggaaaatgcgggtcgacgaaatttatttttatattacacttattttatgattttatattttaatgataaatatcatattatatcaaatcatgattacatgatactttggacttatatgaatacataagtatataagaaagaatgtgacagcatagattattgattgtatatttgtatagtatagt

SEQ ID NO: 44375 - DNA, 1035 bp, Arabidopsis thaliana columbia
attatcatcatgaaaacatatactaccatagtatttttattttgcagaaactatatatacaaaagtagttgccaatgattatcgtttatcattctatttatagacggttgcgtacattttttgttactgtttttttgttgcacaacatataaacggttaacagttatttgtggagtacaactatatttggatagttctctatgatgtactgtatatgaatattcgatcgttatctgaaattgatggatgagaaaattaaccttaaaaaaaatcattacaagactcgttccattattttattttattttatgttattttgatagaaactcgttgtattattgctatctattactccattaacgaagctcaaccaccagacagctactttgatagtcctcttaaattccaaattgatccaatttatcactttttgtaacctacggttcatttttttcaatgcgatattgatactaatttaattagtttttgattttatcaattattaaacgttttaaaaaggatgcatttgtacggaactatgaggaggtttaccccatatatacggagtcgttggtcaaacaacgtcgcgaaaaaattgtacgtgacgaggtctgcgttatataaacaatatcaattcaattgtttctttacgaatctatgaaaattttaggatctcgtacttcagttcaaaaattatatattgactttataagcgattatcgatttatttttattagaaagtcgcaagttctcttgcaatgtgtaaaatttcagagagataactcgtaacgtgcagagcggaaacaaaagaagaaacagcgattccgaaatgccaaactcgaaaatttgcgtgattccacaattcaaaggagctggagtccatcctagttgtcacgagcaacccaactagaggcccgtcacaaaatctccggatcaagagcatacagcttctctgcaaactaacgcaaaaacgcgatgacaacaatggacttaatcacaaatccgatggttataagagcatctcggaaacttgag

SEQ ID NO: 44376 - DNA, 576 bp, Arabidopsis thaliana columbia
tgaccatgatcaaagagtctgtagacagaattcatttaggcatatcatcgaacacatggtatgcaatatataataagctttaaatcttcagtcaaaagctaatgaatccatcattgactatattacaaaagctaatgaattgataaaaaacactttctgaattccaacttctacaatttcaacattgtttacaaacgaaaattacataattttacctattaaaggagaaaatgcttcgaaactgagaagatgacgatgatggagaggattacggagagagacgatggtagtggcctcaaaacaacgccggtaactatgagttcgatgaagaattgatgctcgtgagaggaacaaaagggaaataatgttttttgtgtttcataaaaaagaaaatactacaccattgacacgtcaacatcttttagaaagtaacaaccgctcttacataagagcgcctcttgtaatagaaagcattattgatttaattttattcaatcacaaagctaagaaccactctaaacccctcgttgcggatggtctaatgaaagaagataatattctcaatgtgacctggaa

SEQ ID NO: 44377 - DNA, 725 bp, Arabidopsis thaliana columbia
tacccggtgaagaggatccccgttttcaatcgtgagagagagaccacagaggggaataatgttttttgcgtttcataaatgaagaaggaaagaaaaacccatatattatatgcacatatatttaatatgtatgtataagtataacctaacatgtaaagtctaatacttcttgactttttagtcgatcagattttgacacattttttgaagaaaagtctatacaatctctcaagtcccaaaagtcaagaccgaaacttttgagacaactacacgttacgagtttttttttttttttggtaaaatataaagtatttatatcattttcaaagtttcgacaaaaattacaaagagtacaagtagcgaaaaaataccagaaatctacagaaagaacatacaatgacaatcgttggtgtcagttttgtcttccgttgttgcttgtttgtggctcctcatcaggttcccttttctctgttacagtggttcgatgttggtgttttgattttgtctttcagtttttggaggtgcatgtcttgtctgagcggagatttcttgagaagaatagaggcggcgttttggtctatgtggcattgcttatccgtgagagctggtttttatcgtttttataagaatggcgaccggaggtggtttctctagtttccgtagatgctcttataaccatcggatttgtgattaagccattgttgtcacgcgtttttgcgttagtt

SEQ ID NO: 44378 - DNA, 707 bp, Arabidopsis thaliana columbia
atgtctgttgttcttctttaaatgcataaaatatattttccatgtgaaaaattgcattaaatattttttatgccatttctaatagattctttagcagggtatctagcgtatctatgtgatagaaatagtagctagactgttcagctattgaatggccaataaagagttgttatcatgcacatgtctctattaacatttagaatcatagctgctcttgattttcccatatgtcaactgttctctcttttccttgtcactatgaatttcacataaataattaatgtggtttgtggttgtctgactgttaaatgttatgatcgtgtttatcttcatacgttcctgcattaatcccctttagtgctcctattacattagtaatgcatggacggctgtactttgattttattgtgcctcggatttgctactttcccattcatatatcttgtcctgaactgtagtttttctcttttatttcaaacattgtctttaattcttattatcactcgcagaatccgagaaaggaaagaatctgtaactgttttgctctgtggcaccagcggctgtggtaaatctacggtgtctgcattgctggtaaatttctatgccctccagttatatgctttagattgacaataagaagttcttgtcgtgtgtgtttttgtatactgaactcctaggctatgtacttattcaatgtgtttcagagt

SEQ ID NO: 44379 - DNA, 473 bp, Arabidopsis thaliana columbia
gaactataattgatgaatgataaataaaaagtggtttgatccgttgacggttttgtccgccccaaccgctgtaaccattcaaaccctaagtaaaaagctatatatgtagatgggcctagaatatcccatcactagcttggatcctttttggattttgccaaatccaaaaggaattaatagtgacaagctagcgcctagcggtggtctagtgatggtggggtgtcttaaaggaagtatagacatggggcaaaggaccatctataggtattaacctaaacgattaagcccttaaaaatccattgaagaaagtttgaacaaagcctaataaaatttctaaaggtttgtattttgtagcatctgcggaacatgtcggtccactaaaaagtgacaaaaaaaacacgaagtgacataaactatttttctcattctgctgataaatattggcaaatgaaaaagtaatgaaagattttact

SEQ ID NO: 44380 - DNA, 499 bp, Arabidopsis thaliana columbia
gcagcggaccatctgtggactgttttgacatacaaataaacttggtccgcaacggtttattgtctgtccaaaaaatgagatggactaaaccgcagacaaattagaccgatttgtccgctgcctccattcatagcctgtgtgcagtagaagaataatgattagagtaaggacaatttgggtatttttaagattaaatgacaagtgcaatcagcattattagtgttaattggttttatttgctacgtacctgcaaataattattagtacacagagttatagttgtgtgccagaaaaggaattttcaaataattatacaagtatttttcgaatatttgaatctcgaaggaaccataaatactctaataatcttgattgtttgtttatcaaatagagcataggacatcatttatgcttgtattcaccattataacgtagatgctagagttgctctagctagatgtcttactttttcatgactaattatgtaataggataatgt

SEQ ID NO: 44381 - DNA, 965 bp, Arabidopsis thaliana columbia
gtccctgacatatttgagtgcaatgattattagtgtataatgttatctgatgaaataattaggggtttgaatggttatggcggttggggcggacaaaaccgtcaacggatcagaccgttttttatttatcattcatcaattatagtccgcagtggtctggacttaaaaaaatagaagaaaatcgttgcggaccatctgcggaccgtttttacatacaaataaacttggtccgcagcggtttattgtccaccccaaaaatgagatggactaaaccgcagacaaattagaccgctttgtccgctgccttcattcatagcctagatgtgtatcatacaaagcgtttctttctctctctctctcaaacctaattagaaaacaaattttagatttgtgttaagaaacaaatcttacttgttatcaaatttcacaaattcagatagattataaaacttccaaatccacatatttcaacatgaaatgatttccctcaggttacagatagtttattaatgatgcttagatatttccttctttcttcgaacccttgtgaattttttcagacttacagtatttagatatttttcaattacgggagaggtgatttattttggtaagaatatatataaatgtgtgattagccaatccaatttctaaaggctaatatgataatgtttgtgccaacctcgagattctccagataaaaaaaagataaataatggccaatccagtttcgaacatcatccatctcattggctctgtaaatgagccagatatcattaatgtcagattcagaattttaaataaaaactttgatactaaattgtagggtttataaatcataactgggcaaaatcaataatacattacaattgtaactcaaaagtaaaaaaatacatcaaatgtgttgcaaatcaaatctcttacattgtctagccatgccacgctcaacgctgctaatatcattg

SEQ ID NO: 44382 - DNA, 616 bp, Arabidopsis thaliana columbia
ccttaccattgcagagactagtgtcaaggcaggacttgcaacaatcatatgtgccgtcattacagatatctgaatagcactgggcacaactgtctgccatataaatgaagtgtagagcttatagttgttagccaaaatcaccacaatgtatcaaaaaattctgaaaagaaggaaactttctcttcgcaaaacattcataacaagcaaaacactcacgttgagaagagcatagatagtgtcagcaacttcagaagcttcagcagtgatcctgtaagcaatgtctcctgatgaaatcccattgccaccttcaaagaactctagttctctctctaaaaccctcctatacgcgaaaacccgaatcttgtaaacagtattcaaagcagcttcccaaagaaacgcttgctgcagataataagcaacaaccttagccaaaaccagacccgccaaaacgagacattcgcctttgagcttcgtcaagctcgcggcgtttgcgttaaggttggaagtgaaggagccgagcctaggaacaatctgagaaagcgagacaacagagacacagctgcagagcagccaagtaggacggttttagattccgattgaagatagggtttaatag

SEQ ID NO: 44383 - DNA, 547 bp, Arabidopsis thaliana columbia
cgttttttctttgattggacaaaacgagatatcagccctattcttgaggcagcaagacccaatcgcgacatgatacattgtaaatcgtttgatatttttttcttttttatatgtaaaaattgctggtgtccctatctatctatatggtacaccttcagctataaatgattgaaattctcttacaaagactgtaaatacatatccgaacagtttggatactagtaccaaaaatgataatgtggtgatttaggcgacgtgagtcgtgagtgtagctgttattattattttatcaatacttgagacgctaataattgttaagatccatgccgtgtcatgtttgtataagccagtttcgttatcaaataaacagataacgaagaagattcttatactttgtgaaaggaaaatagaaaaacagatgacgtataacagtttgttcggtgaaggaagcagataaaaacagcctaatattcaaatgtatgccaacgcaaaaattgtgtttaatatacaaaacacacaattagttacaagtaccctacaatgttac

SEQ ID NO: 44384 - DNA, 550 bp, Arabidopsis thaliana columbia
gtaaacctgggtcaaaaggttccgcgtgtttttaaagtgaaggcgagagatcgaacagacacaaacaattcaatcgaatggcaaagattataacggaagttaagtgattctcagttaaaggtaatttttttcatgacattaacattttaaacatatgattttaaggtaaatttttttttaactgagaatcacttaacatacgtctcaaataatagagtagatataatgttttttgcatatatatcagtctttgaaatctaatcattggtttaataactgagaatttgtttatatcgtcaaatatattattaacatattaagttggtttgtacgttatatcatttcatccatacatcaaactccatctatatttgttaatgatattatttcaataatgcagttatctgctaattatcctgatttttatcatatttttttatagggatatatttgtcatatagattttagttgaaaaaaagttacttaaataaatggttttaatgtgtacatgcggatttttatctattctgccatcatctgcgggaaaaat

SEQ ID NO: 44385 - DNA, 850 bp, Arabidopsis thaliana columbia
gtcacaaacattgcggtcatccattgctagagcttcgctgcgaccaaaacaagagtacctctttattcatctcagaccaagagttctttgttctccatgtcgatcaaacatcttacagtcttacactcgccagaccagaccttttacattccttttgctcccttacatttcaccaacacaaccttaccaccagaaattttcgaactttctccggcctacaagagcgtcacattctaccactgttacccggttcttcctgacctttcgaattatacatgtcctgttataggtccaatctcagtgtctggaaaccctgaagatcacgaaacctgctttcccaattttgccgcaaacgttcccacgagtttcgtcacgaaagagaaaaaattgaatatagccaatttggaaagtgttttggaaaagggctttgaggtgaacatgaatgtcatcatgaaagcttgtcaagcatgttcatactctaatgaatcctgtggcttcgatgaaaactttccattcgaagtcaaatgcaaaccacaccattcaccaactggtaagtttcttatccatcactatcatttcctatcaattttctttgacgtattagacataacttattagtgagcttagaaagacggtgatgcaagatatataacataacttgtttgatatattttttttccgatttggcattaatttagcgtttagtcgccaatctatttcactaattgattaacaatgttttaaatcaatttatgtatctgtatatattgctttagtgtttaatttccaagagtttgatatgaccggaccgtccatcaactttaataagtgcactatatccatatggtct

SEQ ID NO: 44386 - DNA, 1261 bp, Arabidopsis thaliana columbia
ttatttatcttgcaattcacaaaaccaaatagttttcactctattaatacttcctttgtatttgttgtaatacgtctgattatatatttctttgctacataataaattgtgcaatcttgcaatggtttggatttgtttatttacatgtaagaagtctatatgcaaaacattaataacgacaattttttttttagggtgagttaaaaatctatatatgcaccatcaaataattaaaaatctatacatgaagatcatttatttaggtaattttttcaactaaaatttatatgacaaatatatccctacaaagagatatgataaaaatcaggatagttagcagataacaaattatcgagataatattgttagcgaaatatggatggggtttgatgcatggatgaaatgacatggaatacaaaccaacttaatatgttaataatatatttgatgatataaacaaattttcagttattgaaccaatgtttagatttcaaagacacatatatatatacgaagacgataacattattattaaaaggtaacaaaatatttagcatgaagagcaaaaaaagttgacttgctactgaataattatgtagaaaaaatacatgtatcagaataaatagcagataacgtattatcaggataatattgttagcgaaatatggatgggattttgatatatggttgaaaaaacttaagatacaaacctacttaacatgttaataatacagttgacgatataaacaaattaccagctattgaatcaatgatttgatttcaaagattgtataattatgggaagatgataacattattataaaaaggtaacaaaatatttaacgtcaagagcaaatatgatataggagtataaaggtattttcataatggagagagaatgctcaacaatagctttttctgacacataattttgtaatcttctatgtatatagattcataataccctataataaaagatgtaacctttttgcttgttcttaattttttgtggcttaggaaaaatgctctattctacttaatgaagcacaactttgggttacataataacaacattagtacaaaccactaaattacatgtcttggtttaattatatcatagttttttttgggaccaccaaaatcgaacatatggcatatgcctttcatcccaaaacttcaatagctatcatttttcaaaccattatagaattcaaatttcatgcctaaattaataaacattatgcaaaaactaacattgact

SEQ ID NO: 44387 - DNA, 817 bp, Arabidopsis thaliana columbia
gttagtaaggatatacctcgtggagctcgtgaggcatacatacgaaagaaccactcgcagaccttttccgtgaaagccacgcgctgcgtagaagaaacctgatgaccgaattcagtctatatagtaagagcacatagtctaaatgtaatttcaagaacccaaagatatcaatatgccacaactcatctaaatgtgatccagtctcatcaatgaagttgtcacacaagtaaacctggattagatcaaagccacatcaagtttattgagttctgattttggtaactcttaacttccacaaatgatagacatgtaatggcataacaacaagcaaacgattttccaaacatttacattaggggagagaaatatatcctatttcttgattatggtatcagttagacaccaactttcacagaaacagaccatagcgaacagtgaccaacaccctagatcttgttgctctttaagattccacaaaccatgaacccaaaaaagatatagaacaaataattcatataactatgctcacacattgtcaaaccagtaccaaacatatgcactacatggtacccagaaatcaacattttcagacaactataaccaaaattacatacagaaactctaagttcatgacagaacagacccaggagaaaaattcttcctctaactggcctagtgtattcataaagatcagcaacatacaaataaatgttgaaagccaatgaaaacaatggttaccaatcgtatgctagaatgagtctactccatgtattatatgatcatgcacaacaatgaacaagaacaagaatgtgaatgt

SEQ ID NO: 44388 - DNA, 704 bp, Arabidopsis thaliana columbia
taaaacccaaagatttcaaactcaaatcgaggaacagctacagtaggatccacatgtgcccatattgatctcggcatcgaagaaatacataaaattgggctttaaaagtggatcttcatcatccatgaaggtggcacatcaatgcatctaccgacagttgaattacataatattattgagacagtagtaaccaatatgttaaaattcaaccatagcactgttttccatctagttaacaattagctaaagcctttgaggaaagaggaaggtgagcgagcgcgtggacctcgtgatcctgaatagctcacgtattgtttgtggcctgaattctggttatgtacataaataatgttgtatgaagataagtacaggcctgacgcaagcccgacaatacaagaaaaatgataaaagagaaagatgataaaaatgctaatgtaccatatatatgatccattgcaccaaacccacaaagataaaaaggtgctttcggctttttggcttatgttttgagactctagaaataaatatattctactaataagtgtggtaatgtattgttcaacatatatctttcaacgctgccgaatttgaattcgaattatgtttatttatagtcttatagaaactatttgattcaatcaattagaatacaaataattggtttttaaaagaagttcataaagtatgtgaagaaagggatggag

SEQ ID NO: 44389 - DNA, 879 bp, Arabidopsis thaliana
tattggtggagttgcaacaggagagttttccgcgttggtggagttgtgataggtggtgtcgcggctgctggtgttgcaactggtggttttgaaataggaggagttaagattggtggctttgcggtaggtggagttgctattggtggtgttgcaaccggtggttttgcaacaggtggagttgcggtgggcggtgctgtagtgggtggtgttgcaactggtggttttgcaataggaggagttgcaactggtggtgtcgcggtgggcggtgttgcaaccggtgattttgcaataggaggagttgcaataggtggtgttgcggtgggcggtgttacaactgggggttttgcgacgggtggaattgctatcggtggagttgcaacaggcggttttgcggtaggtggagttgctattggtggcattgcaacaggtggagttgcggtgggcggtgttgtcgttggaggttttgcaataggaggagttgcaactggtgaagttgcggtgggcggtgttacaaccggtggtgttgcaataggagaagttgcaataggtggagttgcggtgggcggtgttgcaactggcggttttgcgacgggtggagttgctattggtggaattgcaacaggcggttttgcgggtggtggagtttttataggtggtattgcaactggtggttttgcaacaggagaagttgcaattggtggtgttgcggtgggcggtgttgcaactggcggttttgcgatgggtggagttgctattggtggagttgcaacaggaggttttgcgggtggtggagttgtgataggtggtgttgcggcaggtggtgttcaactggtgagtttgaaataggaggagttaagattggtggctttgcagtaggtg

SEQ ID NO: 44390 - DNA, 990 bp, Arabidopsis thaliana columbia
gaagaagcttcatctgagttgaatctcgatctttcgcgagatccgtacaaaatcatcgtcagagaagccgtcgatagtttcatcgagaaggcgattatgacaatcgatactgagatgggaaagcttcatactcagattgtagaagatgttgatggagaagtaaccgagaatgccacgaagacgactacgaagaagaaaaagaagaagaaggcaaagaagaaggtggaagaagaagagtcatcacctgcttaggtaaattttatcatctcagataaatttcatctttgctcaggtttttgtgtaatttcaacgatgaatgatgtctttagttgaaattagtgttttagccattgatactacacttcgaagtcaagtgtatcagactctgtaacatgctccatcaatagttatatgttttgttacttaaaaaattgatgattgtctaattcattaggacatttaatttgccaaagaaaaacttggttttggtgaaattgtgatactcaaaagattcaagtatatcaaaatgaaacctctttttccaatgctatatattctctttgtgttatgaaatgcattatttttgtatcgacccttcaaatgataatgacatttgcatatctttcttcggtagagtttgacatatttgcatttaggagagacgacaattagaagattgaattgtcaagaatatgattgactcaccacgtagattacactgaagccacaagcacactttgtggtggtcgtcattctaattcttattatgatcgtttcacaaatattcatggactcgaataaatccacaattgtatactaagcattattctaggaaggatacaaattgatgcaaaaaatatttagataagagaatgctcttagaccacacaaaatgctacccatcattttcttgttttcttcatatagtaaacacaaaaacatatacaaagaaaactgaacaaaatttgaagagttattagaatggggtgt

SEQ ID NO: 44391 - DNA, 684 bp, Arabidopsis thaliana columbia
cgctccaaaagaagcccaatctttttttattcgttcactcactactctcttcactcgcccaaactctgcaaaacctctttcgatttcaaaaatcaaattcaccaaaaaaacttcgaagaacaaaaaaaatccaaaaaaaggtgaaatcgaagaagaagaagaaaaaggcaaaagcttgaattgattatggaagacgacgatcagcagaaggctgcagatctagtacaagagcttgttcttcgtctcgtctcacaaaaccctcaaacccctaatctcgatcccaattctcccgccttcctcaaaacccttcgttacgcttttcgtatcctctctagtcgtcttactccttccgtcctccctgacgccaccgctatcgctgagtctctcaaacgccgtctcgctactcagggtaagtcctccgacgcactcgcttttgccgatctctacactaagttcgcttccaaaactggacctggcagtgtcaataacaaatgggctcttgtttatttgcttaaaattgtttctgacgatcgtaaatcggctataaatggtcttgattcctcggttttgttacctaatttggggattggtgatactggtaatggggttttgagccgtggagaggctaagaagaaggattggagtaatggggttatgttggttagtacagatcctgagaatttg

SEQ ID NO: 44392 - DNA, 580 bp, Arabidopsis thaliana columbia
ctttggttccgctccttccacacaagatagactgaggcttgaaaggctaatttgatgatcaacgccgtattaggttttagtttgtttggttttactttggtttgtgttggagttgattcccaaagattttaaacattcaaaagtaattttctgtgctcttatataccaaacaattttccaaataaacttcatcgtttggtttagtaaaaagtttattaatcaaacatcaacatgcaacgattgtgacatggtttgggttagactagttcggtttagtttgacttggttcagttaaaatactcacctgtacccgagacgaggatattagaagcgcaaaataataaaatacgccggaggacgacgacagccgtcggtccacgtgctgttgccggtagtccacgtgcgtccatgtgaggcattgaggcgcctcggtcgtaacttccgcctacttcctacattatgttaactcaatttttaagtgtaattaattactaatcactattcagtttttgttttgttaacatgatttctcgttttttttttttgttgaataatttttagattcacctcgtaaaatggt

SEQ ID NO: 44393 - DNA, 325 bp, Arabidopsis thaliana columbia
ctcttttaattgactggtgaatatggttttgttgggtgtaggtggtagaatgatgaaatgagaatcgatagataagagtataaagagcaccagaatctttcttatcttggcatgtcgacgacgtcgttgcaatcgactggtgcaactaagtcgtatcatcagcacgctcttcatatggtgaacaattatctcatagcagctagttttattccctacagttctgtccacagcggcacattcctgtaggttcgggatcactttggattgtgcgatggactttcatgcatccggagacgtagggccgaaggatttatgatggggacgg

SEQ ID NO: 44394 - DNA, 1022 bp, Arabidopsis thaliana columbia
catctcgacgacgactctctctccacctctcacctgcaccctcctctctccaacttcttctggtgatttcaatttgtatttccattgaatcaaccaatatcaaaaatcaatcaaccttgccttgcctcaaactaattatcgtattatatattaatcatcaacacctagctcgataaaaaaaaagttacacatatataacatgttctcgttaggaaacaggtatgatcgatgtttttatatttgtaatgtggacgatgtcaccgtggtttgtttgtgtttgtaagatgattaatgtaccatttccaaattgaggactatataatatatagttgaattgattttatagttactctgttggttggtttgtgtgacattatttggtatataaatgtagtccacattcgaaaaatttaaagtttttatcattaaaattgtactaacaaaaatttggccgaaaatgctttctatttttgacaaaaggaaatttaaactctccaaaaaaacgcagcaaagacaaatacaaaatttcgctcaacgataccttcaacagctaaaggaaatatatttcattgggccttagtttgtaattggtgggcttttaaatgtatcttattttaaacggagtcaacagaaaattatattgtaatgagttccaaaaaacagcttattgagtctatgtttcaaattgatgggccttataatgggcttctttaaattttacacttgttcaataaagacagattaccataatgagcctatagacgaggaaaattctattgggtttaatgatagacccaagtccacgaatatagcgatcacgtgacaaaccaagaaattcgacaaatggataagcgcgtttaagcacgtgagcgtctcgactctctcgattcccaaaagtgtaatgtaaaaccttaaatagtgtaatacgttgatcaacttagattacgaaaccttattacgaaaagaaaacaaaactattagagacatagaaatcataagttacgaggacatgaaaagttgtg

SEQ ID NO: 44395 - DNA, 615 bp, Arabidopsis thaliana columbia
tgtctatgttttaggcggtgggtattctggtcagtctaaagcaagtattctacaaacgccaagtgtgcatatgtcaattataccacactcagaatatttgacacgatcaagcgctttgtcgtcgcatgcatgtggcgtaatggaaagcaaaggatgctgatcggtcaaatccggaacttgattactggatgtaaaacagaggtaccgtcacttgagtacacaagaccgcaccatagccaacaacaaagatccaccgcaatacatttataggagaatgtttttttccggcgcgaacggtcaatctatagctcaagtcctcagctaaaggtcaaaattcaattactccttcaaaattattatgtctagcacctaattaagctacatgtatataactatatatgttaaattcgtttcttttttttatcaagtcccttttgtaatatacgagtataatagaagagaaataccacgaatcttctattacgaaaatatttcgtcggaatctttctacagatataagaatatactaattttaaaacatcataatttagcggcaaccgaatgataaataatcacaatacatcatgtggcttaagaatatatataattgagtat

SEQ ID NO: 44396 - DNA, 582 bp, Arabidopsis thaliana columbia
gtttccagctgactatggacaatatcacgatttatctcaacccattgttgcaacagagccaatccagctggacgccaattccaagagggaggcgaaatagtaccctgagatgactcagcgagtaaataagccgagaaactgagaccaaccagtctttctcggagttctcgttcactttcttgaagcagtttgagccacagatcaatttctccttcatcgttcgttctctgaccttgcagttttctgttgatttcttctgttttgagttccgataacattacacgtctagagattacgttgagaatgtgtaacagcctggaaggaacatcagagaagcgtttggtgatctttggcacgagatcttccatggagatatcatcatgaaatccaaggtatgacacagagagccatttagttaatactaattcaacaaactctggcattgattgtttgaacggcgagcatttgcagctaccatatcccaaagaactagaggcttattcaaatagttgaattcttttaccgaccagagaatattggatttgcaatttgcgaattcattctttgagaacccagaatagc

SEQ ID NO: 44397 - DNA, 567 bp, Arabidopsis thaliana columbia
cttggtctatcttagcttgtggcttaggacggcgaatggcctcgactgcttctgccatggcaacctggaggtggttgtggaggtacccatgatcgttgcctctggaaagctgctggttccattgtacttgtttcattttggttagcagtgaaacgggccgctgttgttgtctcgtatccgaaatccgtggatctagggtttttctgttgccaccattgaccattggaactctcgtcttgcggcgcttgaccatagtcccatggctggtaataagagagagtacgagtttaatgaagtcttaataataagttcagttccacaaatttgaccaagattccttacaaataatgtacttttagattaacattcagggacattttcagtttgtacctttgatttgggagcaatgcgtggatctgatagtggttggtttggattgggcggcatgtcgttaatctcctgtagatttcagtgatagtgccataagtttgtcaccacaaaactatattgttagtctagaaatggggcgagaaaggattgtagttttcaacttacccgaatgtttga

SEQ ID NO: 44398 - DNA, 553 bp, Arabidopsis thaliana columbia
cattcttacaataaaaacatttttaaacaattcgaataaaaacaaagttacaagcatgagcgcgcgtgagtttgaaaataaattggtctaacctaagtagctgacaagttttggcatttatacttgtaagtacataacattgattaatgttatttaatccttaacactaatttataacctaactgatgagagtgggtgaacgaatatccttataattatgagactctcgttaaactctttttttttttttttttctatatgagtgttgacaaaaaaagaagcctttatataagtaataattaaaaataaatgtatttggagggcatcaaagtttttggcttttgcggctaatggagaaacagtaacacgtagagcgcactcctcgtggtccttcaaacccaccaacctctcttaatcactactaaacccaaattcttaaaataattaatcaccaaaacttggaaatggtaattaaattaatcttataaatggtaatcaaattgaactctcccctgatgttgtttgccacatttaaccaagaatgttagtttcg

SEQ ID NO: 44399 - DNA, 918 bp, Arabidopsis thaliana columbia
aaaatatatccaatgactcttattgatgtggatattaaagctaatatcctacaatgattagctaatatgctatgttaagtaataaaaacatcaacgatattttggtgttttatgatgtgattttgactgataaaacgtaaaagtcatgaatttgtgatatggatggaagtaaaatttgtctatttcgaccaacttatgataatggcattagcctgtggtacactaacaaaaaagttaagaaccaacgggtcaatgcttaatagtggctttattaaaagtaagtaatggaataattaagtctatcctcttaaacgcccaaagcatccgcaataataaagtgggtcatatccatattagtatattgataatcaccaccaaattattatcgtgaatagattctgctgaaattacgcttaaaccattaaaataatattaacgagaactttttttttttaactaagacttgtacgtgagataagtgatgattcatttttcttagttgagataaactgattttattatgttcatacagtgtgtggaagaggacagtgatacggtctcgtgactctcgtatcgtcttgttcgttcgtgtgagttcgtcggtgccggctttgttggggaccttctgtctcttacggcagcttttcatatctctttgtctgttgttgtatgtttgatttagctttgaccgctttatcttcattttttgtcctctcacctacacacgtatgcctccaaagtccaaacctttttatagatttcagtaaaaaatcggactaaagagaagctagagcaaacaaattaaagcttcatctacatagtacttctgcttagaaattggcttagattatctgaatatatgacagtgtttacagattatgatctagttcatgatatatttcagcaaattggtatgat

SEQ ID NO: 44400 - DNA, 585 bp, Arabidopsis thaliana columbia
cgccagtgtgctctaaagccacacccagttcgtccaccaagccagaatgaaggatacaagcagttcaaaccagccaagccaatcaaaatgtcttattcctctataatcgtcgcccgttttgctcttttttgctgtggcactgcagctaacgacattggcgcgggaggagtgtcggtgcttgtctacgcggttgatgtgatttgcctttgcccttaccactgccaccagacgtattagatgaagacgatttcttcattgttgaagaagcccgagtcgagcgcgagtcgacccgaaaaatcatatccctacatatcctcgccccacgccttgcaataaccagcggcagactcaacgcggagacactaatctccaccggcagcaagataaccttgatagtgcgacttagcaatgaatcaaataggcctaggctagaccctgagagcggtgtgttgtagagcgctgcgctgtggcagcaagtgagagcgcgtcgcgggttttagcctccagaacctgtagtcttgtttcggtctggtaggctgtgagtgcagtgcgcttttcgtactggcggacggcgcggttgagggc

SEQ ID NO: 44401 - DNA, 576 bp, Arabidopsis thaliana columbia
gtctacgttatgtgtttgccatttatcacaacgcaagccgtcaaaagcgacagacagcttctgtcatctaataatgatgcttgctttgccaattgttttacaggctaagaaagaggtgacgactgtggaggatccttttgattctcctacataccacatcccggagaagccggtgacctttacagaaggtgcgtcctacagtcttgttattctggctgggcttggtgtcgctggagctgctggctacggtgtgtttaaagagctcatttttcaaccaaaagagtgaggcttcagaaatctaatttgatttatctgctcagacacttggatttgagtaatctaaagacaccattatgtattctaggtacaaggtctttgacaaagccttgaagagaattcaagatgatggtcaggtaattagaaactaactctacagattgatcatagcggaggggtggtgtatgaaacaaaagcatctgtttataaaatgaaacaatttctgtgactgtgattgtcttgtaactaggtgagggttaggattggatccccatcaaaggctatggacaagaaactaga

SEQ ID NO: 44402 - DNA, 607 bp, Arabidopsis thaliana columbia
tgctaattggaacttttgtgatgctacagtgatcgccgtttagctgatcattttggaggggaagcttcatctaggatacatgctagtccgggacaaattaacagagcttctggtaaactaataacacaatctactttatctgatgatggatgaaactgccttcttatatttctcttcgtttacttcaggatgagaaggccaatatacgcaaggaaaggttaggttttagttctagcttcttgtttcattgttttattacggtgttgatttgaaattgacttcatagtgaatacttaaaaccatacttagatcaaaggaacggaacagtaaggagagagaatcaagtaaagaccgagagaaagaacaagaaactagtcgtgaacatcgaagagattatgatcgcaggagtagagatcgagataggcaccatgaccgtgatcgtgaacaagacagagactatgatcggtcacactcaagaagcagacgtaggtcacgctcacggtccaggtcaagagatagaccaagggactatgatcgcccaggtataaaccagagtcatggttgcttctttttccctaagacatcacattttcgttcaaatggttat

SEQ ID NO: 44403 - DNA, 126 bp, Arabidopsis thaliana columbia
atttagctatatcgaaggatgaactcgagaatagtcattgtcagtctcaacttagattaagttatttgttactgatccgaaagacttatatatctcacgtacaaagatcccattctccactagaga

SEQ ID NO: 44404 - DNA, 497 bp, Arabidopsis thaliana columbia
aaagggacacagacatcctgtagaagaaatatttacagatgattctttgatgttcgaccttaaaattttaaatcaaaaaagtaaacaacaaaaagatctatggcatatatttcaggtttctgattgtagttggaaagttcatctacaaccaaagtgtatcgcaggacagcaacatactgtcctcattgcttcatgacctggcgccatagcatagcaagcccacagcgcctctcttcttatctgcatggagtcaggaaagaaaatcttttggtaactcaatcttgttagaagcaaacgaaagtgtaactcatgtagagttacatcctcagcatagcctcattctctacagtgaaaatctccagacatgtttatctcacgtttggtatcatatcataaccaggatggtcaaaaaatttaaaacacggactatcacgaaacattaccactggcgagagtctactgagcaagaatacactacaacaacaacaagtacatat

SEQ ID NO: 44405 - DNA, 611 bp, Arabidopsis thaliana columbia
tgtagccatgtgatacttaaaaagtagaaagtaataagtgtttaaaaagttctgttgaattccatacctaaaaaaaattctaagaagttgcatttatagtttaaaagtatttatgtcaaacatgctcatctagtttataggacacggtatgccttctattttatccgatagaatggcaaaaagtcaagtcaccggcccatcgaacacgcttatgtaataaagatcacgacttcagaactctcacgttgagcagtcgccattctaaagcaaaacagtgtttctattttattttttattttttattaaagagaaacaaatacaaggtcaagcaaactgaaagaggcacatataccccaaaaaaacgcatatgccaaacaacaacaaaaaaaaaaaaccaaaactataaaaaaatcttaaacgctcaagaagtccggacacaaaaggagaagagaccccttaatctaagaaaattaaccaagcggagagtagagaaaaccatggaggagcgatacgttgctttttagcaagatgatcaagacgcgcccacattaacgacttgatgtctttgatgattgacgtggggtcttgaaattcgtagtgcagatacgaga

SEQ ID NO: 44406 - DNA, 528 bp, Arabidopsis thaliana columbia
tgaacccctgtcgcaaatacgttccgcggttgaaccgatacttcctatcccgtcgtggtactttcttcacatctctatacgccaatttctcaaatccccatttcctgaaaaacaacacacaatcacatatcaatcatccaagaacaaagatccacctaaatagtaaacatcacagttaaaaaaccctacaggcctacatagtcgcatttagaatgtaaacacatacatacccatcaatgtctagctaattctgaactatatctggtaactttggaacctaaaatctagaaactttgaaacaagtaacctcaggacctaaagacacaatcctagagacactgattcaaatttacattgacaattacacaaacccatcaacatcaaatccaacccaatctcgaattggtttacataaaaatagagatctaaaaaagctagaatctttgaaaacaactctcacccacatggaccaagcactgaaacacactaatgacaaaagtgtacaaaaaaaaaagctctttttacatg

SEQ ID NO: 44407 - DNA, 569 bp, Arabidopsis thaliana columbia
cgtcagttagtgcatccaaacacctgatgatcgtaacagctgcaaatacagacttgctttgaaaagaagaaaaaaaaaaaaaatgtgtggcatcgcatattacctgaggccctgctggataaaactgaaattttctgttccagttcctgcttttcagacattaaagaagctactcgagtttgttcttcagctaaacgatgttgttcttgctgcctcaacactgattctttctgtgtatgttaagacaattatcatcttagatacagagactctcacgaggaacatattacctgtttcaaaatcatacgaacctgtaattctagttttaggttagccatctccttttctaatattggtagttggtctggggaaactcccattggcgacatgccagcaaatgaattacccattgcttgctgttgtatcgaattaagctctgctctaagagatgctgcatcttcctcagcctatcaacaatgggttatggtatcttttaagaaaagaaaaaacaaaaaagaagaaagaaaatttttaatttggaaggcaaaagattgttacatactcgatat

SEQ ID NO: 44408 - DNA, 534 bp, Arabidopsis thaliana columbia
ttttggatatatgagaaactagcatgggaggtgggttgataaagacaatcatgaaaagacaattctcatgtttaatttgaacactacaagaccaaaagttatctatcacacataactatgccggcttttaatccctgttttgttaactactatagtttaagaatcccttaattgaaacctgcttatgagtagcaaaagaagatgaaataggtaacaagaggtttggatccaaagagtagaaagaaaatgattaagagacaagacagaaacttttttgactttagaagatagcgatgtcggaagttaaatctgtgtacgtcccaagacgaatgatttgctcatcggaagctacaaaagctgtttgtacaaattggggatcattctctttttcgttttctataagacctaatattttatactactatgctctttcaaattatttgctccttccatttccatgacactaataattgacgctttaaataaaatccatacaaatgaattctttgaactgttgaaacttgaaagagagtg

SEQ ID NO: 44409 - DNA, 461 bp, Arabidopsis thaliana columbia
ttaccccttcaataactagaaaaagaaggaaatatgatatgcaagaaaacatttgaatcgcaactattacttaggaactccatgatcagaaggacgggacaaagattgccaaccggtacaaatttgcatgatttgcttgagagtttctgatggtggctccacagtccatgttgggtagtgttcacttggatggaatacacattcttcactggctcctgtcatcaaggaaggttgagctccattcaagaacaagtcattttcagatcgtactaacccagttctcgcttcttccttgtcagcagcctacaaacaaactcacacaagatgatggtggtggattcaaaataagaacaagattttctctgatgcaaatgaaaagcgagaattaaccttttctgagtagtatcaaaagttttcttcttcactcctgcttcgtatatattgcattgagagacacctga

SEQ ID NO: 44410 - DNA, 576 bp, Arabidopsis thaliana columbia
caatggtactgacaaaaccataaagtgtcaagcttcagagtcaaaggtgatcattgtatcaaacgtgcaagcaactagaaagaggttggacacattgtggagtataatatctgataggcaccatcaagaaggtgatttgagtaactctgctgcctctgttccatttacaagaaatttagacgtgatcttttcaaatgaagtaacagaaagatcgtgatagtagcatttccatcggcatattattatacttctttatttccactctatgctgaagaaccagtcattttgatgtgaaagcagtcttgttcatggtggaaaatgcttcgctggctcctctttaactacttgaaaaaagtagatgtatatgtcatcggatttatcaaggtgtatgagaaatagaattttttattaaatattccagttgcgaatttaaggcctttgtctttcatctatgcttgtttctttttaaaaagttgatcttattccagtgactagaatatgattttctgtcttgagtgtactgcttaggaacactgtgatgagcgggacttgacgcagatccgagcttcataggag

SEQ ID NO: 44411 - DNA, 714 bp, Arabidopsis thaliana columbia
tcttcttcttcaggatttttcgaaacaatttcggaattttcttttgcgaagacgttggaacgagatagaagtagaacgatgaaatactgagacgaagatgttagaaattggtcccgttttgtattaatgggcttactaatattagcccacaaaaatgatgggttaaataatagtggcccaagttactatgatttttatacgtcaccgttactatgctcaatggcggcacgtgagtactattgaataacacgtgcggctatatacgtcatccaaaatctaatccagaaaatccaacgttgccaaatcgccaatcctgcggctcttacgtaactcttttacttctttttttcttacccttttatcgactaatttatgtcgaataataattgtaaataattttctcaatttataaactcaaaaaaatttcctaattagtcccgccacttagttcgatttagttgatactggttgatttattcaaatttcctagcaaatattacaaaattaccaatccaaaattgaaagttgcatcacatgcattaaatttcatgacttctttaaaataagaaatgaacatactctattttccgtatggttttggataaatatgaattattacacagaaatccaaaactaataaggagaccaaattgcattatttattttttggtgcgttttaatttgtcttttagacgccaataagctcccagtgag

SEQ ID NO: 44412 - DNA, 439 bp, Arabidopsis thaliana columbia
attgtctatcttgcttcgaaacatcagtagtttcttctggattcacagttaccactaggcactagcctaatgctagtcttgccggatcaggatcaaactagcatctatatttccaaaaaaattacattctcattctctataaactatcttacattgcaattcaatctagatacatccctgcagtaatgccaaacttgaaggcaagtcacttagactgctataaaattcccagaaagcagaaaaaatcaggtgaaacacagaagaagaggaaccaaaaaaatcagttacctttgatcttccaagcaatccagcagctctaagataggaatctgcaacttcctcctcagacatagtaacagaagcagtatcatctgtcttagaaaacctgagtccctcaaccgttctgtagccattcccaaatccccttttgtgatcacat

SEQ ID NO: 44413 - DNA, 456 bp, Arabidopsis thaliana columbia
agtgatattttcttttttcgatggcatatgaaattttaccaatgtttaagtaaaattcaatgaaaaaaagacctaattactatcttttaatatagatactattttcgaaattctaaattttaaatcgtaaaccctatatgaattaaatggtaagatatacatttaggatctgaatggtagatgaaataaaatttcatattcagtggtttatccacaattaaatatagccacgtttaaataaaaaaattgtggttacatgcatcatccacaaacaaactaatacaagacctcagactaattcgcaaacttgcaggcgaagagcaacaatgtacatgaatcaaacctctgcattatcaatttatcaaacatgaacaagcaaaatattgacgtggaacagacataactaataatcttaaaagtattcaaaagaagacattagttaaaggccggttttag

SEQ ID NO: 44414 - DNA, 561 bp, Arabidopsis thaliana columbia
tagctgatgattgatttctcttcctaaattgcagtttcattgacctcatatggagtgtgtctaattgctagtggttttgtggcttattgaagtcttgggaatagtatattgaggatgctattgtagtaaagaaagtatggaagatcttcggctatcaccgctgaaattaggtagctttaagtcttcattgtcagggaggtctactccaaggggttcacctacacttcggaaagtgcattcaggcaggactccacgtagagagggtaaaggtagtggtggagctgttcaatggttcagaagtaaccggctgctatattggttactcttgattactctttggacatatcttggattctatgttcagtcaagatgggcacatgatgatgataacaaagttgagttcttgcggtttggaggcaaactcagagaagatgttttgcatgtcgagcagaataaacgacgggatttagttgctgatgagagttctcatgctgtagtagatcataccaatatagtcatctaggtgtaaataaaggatgcatgtactttggccagaaagag

SEQ ID NO: 44415 - DNA, 484 bp, Arabidopsis thaliana columbia
cgttagcgctagtcgaacgatgaggataggtctatcacctaacaaaaaaatcagagattatacgaaaattaatcggaaattaagtttagggttatttaatatttttaaaacatattcctccattacaattaagagaattatataacattgtttttagaattgtattaaacacatgaaaacaagattttaagttcaaatttatgattttttcatacaaattagaacataagtttgatgttttaaatttggatatttaaaaagttggagatttttaaatgtttatcttaaaagatacgaaattatgaaagaaaagttttggactaggcatcctctagacaggtttaagcggatctatgatgaataaatcagatcaacgattaatcctttcgatttggacgaaattgcggtagactctatccgatcagccgactttttgaacaagggattcataactattcttcgaaacatttcgctagttacaaca

SEQ ID NO: 44416 - DNA, 655 bp, Arabidopsis thaliana columbia
aagaaaaacataacaacggcggagacaaacccgaaatccggtcaagacgatactatgtaagctactgcttccggagtggtgccgaccaagacgacgctaaggaagccatcgctgtcagaagaaagctagccaactccgctaaagtagtcagagatgccagacacgagcccactatgtgaggaacatgagccttcgaatcaaaccagaaggcaaaggtttgatcggaaagtttagctttctctaaaagatattaaagagagaagagagagagaaacttaccattgatacactttaatagtctaggaaacagaaatattatgaaacatcatgatatataatttgatccaacaatcggcagaaacatctcaaattgagttcctctacaagtgaccatagccaaataacgagccacagactcgagtaaagttgtctctttgccaagagttgagacttgatgcaaactcacccgaacctcatatacttatgtacaatacacgaactccaacactcatacaagaaatgaacattaactaactaaatccgctctctgtgacaacattcctactagtacttgcacaacacatcatttacaccattagagatcgacttgagtttatgttttctcttttctcgggtttcttagtttaacagggga

SEQ ID NO: 44417 - DNA, 495 bp, Arabidopsis thaliana columbia
gctaatcgtatactcgaatgataaactaaaatatctaatgtttaattgcaatatatatagccaagacatgtagcttagcttagctatagctagtagctttttcttagtgcatgtcatttttattttaataaatccaaattctgatttcattctctcaatgatatgcaaataagggaaatattaaaaactatatatacgtaaattttgttttaggagccaattttttttatacaccaataaaaccatctgagccaatcgtattatcaatgtatcttggtcttaccttcagcaatttttgtatgggctgagtcggtcatcttaaacgcccatgtttttgtcaatgatgattacatgtaaccgtaacttggtgttttaattaaaaacgtttagaatgcgcatagtccttaaacatttcatagccacattgtttttattcaattttttaaattaattttatttagcaggataagataacccttgaatttattgaattgc

SEQ ID NO: 44418 - DNA, 622 bp, Arabidopsis thaliana columbia
cctactagaaatacaaacataaacatactcagactcatataagaacaaaaacctcaagaagagaacattaccattcatgtcctgtacctcaaagcagcaactatatctggatcactagttaggacatcaggatgtccaatcgagatcctacaccgttcagcctaagaaatatacgaatccacacaaaaattgtcagcttaaagttcaacattttcagaggaaattgttctttaaagatgaaagagcagacctcagggtaacctccttgagcaactatcttaacatcagcaaatttttccaatagtgaaactgattccttaacaataggtggtgtgagaaaatctgtatgaagaacttctctttttgatgatgcacgtcttgcctaataaacaaatcacaaatcccattgagatgatgaagatggaagactctcaatgacgaaaaacaaggtcgagaatataccatttcaagaatttgcttgacttctttggcaacagcttggtctccaactcctttgaggagaaaatctacatctccttttatagcttctgcactgtaacatcttctcaaagctgcaatttttattagagattcatcagaaaaaaaccaaactttgatgaag

SEQ ID NO: 44419 - DNA, 456 bp, Arabidopsis thaliana columbia
tatatatacacatataacaaaatgtatatattatatagtatatgtctcttcgttcacatgtacgatattgttttttagaaataatgtaaggttaacgtatatataaaaaatggaatcaagtgatgaggcaccagttaagaaaatacggtaaaaaaccaattgacgatttttatcatgaactgtttgaaaaaaacaatacaaaaacctagcctaaaataattccaaattgtttgctccaacagtccaactgtttgaaattaattaattacacacagttagactactgtctaaaataatttattactaatcaatcttgtaaaataaatttaaatatttccctaggcattctaaacctgacaaattggctgtagaaaataccataaataagaatggttcaaatgaaaaagtattaaatgtttaaacaaacaaaaagatcttttttgttgagacttgcac

SEQ ID NO: 44420 - DNA, 562 bp, Arabidopsis thaliana columbia
ggtgaaacgaaaacaataagtgattagtgtgacaataatgttttaagttcaactatgtaatcaagcgagaatatataatctctctgtctcatattattattgtctcgatcggcattgtcctaaattctttataccgacttgattttatttttggttacaacgcaaccatagccaacgaaaaggagataggaaattagaaagatattatatagttgttaatgccaagtatatatatcacgcaaccaatattgtatgttctatatacaaaacttaataactatgcttttattttgtatgatatgaaattagctacaaacaataatgtactccagatattatttcaaaagttgtccactactcgacaaacacgacatattagttaatcattaaaactcaatagatatgttcaatgagataactattgaatcatcgatgtccgggagctggtggaacatagcgtcagtgggaaatcgcataagcggactgtgtaccgacaatttcataatttaaacgaggatgcatttatataacagaatttcccaagtcatctgatcagactata

SEQ ID NO: 44421 - DNA, 128 bp, Arabidopsis thaliana columbia
cgggcgcaggctgccgacaccgccgctccggctgcggcagaagaccctgcgcgcgatattatcatgggcaatgtggacgcgccggtgacgatcatcgaatacgcgtccttcacctgcccgcactgtgc

SEQ ID NO: 44422 - DNA, 454 bp, Arabidopsis thaliana columbia
acattggtattgaaacaagtggcttttgaatttggttgtccaggtttatgcaccatctgttcaagtgaagagaaagctatagaacggttctatatctgttaaaccgaaaccagtgttccctggttgcattttcatcagatgtatattgaacaaagagatacatgactccataagagacgttgatggagtcggatgtttcataggttcaaaagttggaaatacgtgagtagtattctcactctcactctcatcctatgtgtgttaaggtctgtgaattaatttgtatctgcattgatttttagtagccagagacagattaataaacccagaccagtagatgacagtgacttggaagctattttcaaacgagcagaagatgcgcaagagcaagcagatagtgagttcgaagatgcagatagagctgaagaagacgcgagtatactagcagtcacag
